United States Patent Application Publication US 2007/0294782 A1 - sequence listing, part 2

SEQ ID NO: 3833 - protein, 449 aa, Thermoanaerobacter tengcongensis MB4
MIELVKFPKDFTWGVATSSYQIEGAVNEDGRTPSIWDTFSKTEGKTYQGHTGDVACDHYHRYKEDVQIMKEIGVKAYRFSIAWPRIFPEEGKYNPKGMDFYKRLVDELLKREIIPVATIYHWDLPQWAYEKNGGWLNRESVKWYVEYASKLFEELGDVIPLWITHNEPWCSSILSYGIGEHAPGHKDWREALIAAHHILLSHGEAVKVFRDMNLKGAQIGITLNLTPAYPASEKEEDKLAVQYADGFANRWFLDPIFKGNYPEDMMELYSKIIGEFDFIREGDLETISVPIDFLGVNYYTRSIVKYNEDSMLKAENVPGPGKKTEMGWEISPESLYDLLKRLDREYTKLPMYITENGVAFKDEVTEDGRVHDYERIEYIKEHLKAIARFIEEGGNLKGYFVWSLLDNFEWAHGYSKRFGIVYVDYETQKRILKDSAFWYKGVIEKGVIE

SEQ ID NO: 3834 - protein, 359 aa, Annona cherimola x Annona squamosa
QMGFAENQVSFDLLEQYLEQHPEASGWGSRLSSFRDNALFQDYHGLKTFRQAMASFMEQIRGGRAKFDPERIVLTAGATAANELLTFILADPGDALLVPTPYYPGFDRDLRWRTGVKIVPIHCDSNNKFQVTPQALENAYAAAKSMDIKVRGVLITNPSNPLGAAISRPILEEILDFVSRKNIHLISDEIYSGSVFSAAEFTSVAEILAASNYKDSERVHIVYSLSKDLGLPGFRVGTIYSYNDKVVTTARRMSSFSLISSQTQNLLASMLSDVDFTKKYIETNRERLRRRYASTIRGLRNAGIECLKGNAGLFCWMNLSPLLEKPTREAELKLWDSMLHEVKLNISPGSSCHCLEPGW

SEQ ID NO: 3835 - protein, 227 aa, Zea mays
NLSWPASHICRVKSLSSNCTSLASRRRTLLKVIILGDSGVGKTSLMNQYVNKKFSNQYKATIGADFLTKEVQFEDRLFTLQIWDTAGQERFQSLGVAFYRGADCCVLVYDVNSMKSFDNLNNWREEFLIQASPSDPDNFPFVLLGNKVDVDGGNSRVVSEKKAKAWCASKGNIPYFETSAKDGTNVEDAFQCIVKNALKNEPEEELYVPDTVDVVGGNRAQRSSGCC

SEQ ID NO: 3836 - protein, 652 aa, Saccharophagus degradans 2-40
MCGIAGLVSPSLPIDSLKATATAMAQAIEHRGPDAMGVWVEQEQKLAFSHRRLSIQDLSESGAQPMHSHSKRYTIAFNGEIYNFLEIKKPLIDAGFEFRGHSDTEVLLCAIEHWGLEQTIAKAKGMFAIALWDSQTKVLTLIRDRIGEKPLYYGVINGSFVFGSELKAIFAHTPAKALTLNKVAIASFLRHGYISAPNSVFVEVKKLSPGCRIDINLAKQSDWSIANLTPQPYWTVAQSANQPYLYTEQNQSEAISALDEKINKVINEQSIADVPLGAFLSGGIDSTVVSAVLQANTSTAIDTFTIGFEEKSFNEAEFAKEIAKHLGTKHHEHYVNQQDILELVNILPRVYDEPFADASQLPTILVNRFARSELTVCLSGDGGDELFAGYNRYVFTEAVLKKAAALPAVFKSILKALITSVAPGKWDKLYQALNSIAKRKGGAEFGNKLYKMVSLADAKSKAAAYEYLMSYWQQPEQVLKAFNGELAMQSPLSLEDDFINAAMAWDQQWYLPGDNLTKTDRASMAASLELRAPLLDIELIDFAWTVSPELKVRDGKSKWLLREVLYKYVPKELIERPKMGFSVPISQWIRTDLSAWVDELLDKEFIEKQGIFNYAPIQHALLEHRSGSYDHGKKLWTLLMFQAWFKTNIIDG

SEQ ID NO: 3837 - protein, 667 aa, Moorella thermoacetica
MVAYTRLFEPIKIGKVEIKNKIAMTPMGVLGLATHDGCFSKRVVDYYVERAKGGTGLIITSVTKVDNEIERFKAGAVPVATANPLHFIATAGELTERVHAYGTKIFLQLGMGFGRVAAPILLESQPVAPSALPNFWDPSITCRELTTAEVETLVQRASEAAEIAVEAGFDGVEIHAMHEGYLLDQFTIALFNRRGDKYGGALEDRLTFPIEIVRAIKDRVGKDFPVVLRFSIKNYIKDWRQGGLPGENFQEKGRDVEEPLAAAKILEGAGYDGFDADAGSYDAWYWAHPPVYQKHGCYLPLTQRLKEVVKVPVIVAGRLEIPELAEEALVKGQADMIAIGRGLLTDPYWVNKVMTGRSKNIRPCIGCHDGCLGRGFLGRPLSCTVNPACGREEEYAIDRAPEAKQVMVIGGGVAGMEAARVPALRGHRVSLYEKSDRLGGHVVEAAVPDFKADDGRLLEWYKTELGELQVEIHLNQEVTPEFVEEKNPDVVVVATGSTPAIPDIPGVNKDKVTTVSDLLLGKKQAGDRVVIIGGGLVGCETALWLAQQGKDVTIIEILDDLMRAGIPVPYMNRMMLLDLLKMNGVKWLTETSVLEVTDDGVTLIGKNYQRSPLPADTVILAVGFGADQRLYNALRDKIPNLYLIGDSREPRNILAGIWEGYEVGRGI

SEQ ID NO: 3838 - protein, 607 aa, Pseudomonas syringae pv. phaseolicola 1448A
MPLRTDDNWRHGAVLLDPEHTRFALWAPDANYVNVELQDGQGVQSLAMLPQPDGWFVLEARCEAGTRYRFKIDHELEVPDPASRAQDDDVHSQSFVVDPLAYSWQNTSWQGRPWHEAVIYELHVGAMGGYAAVEKHLPRLAQMGITAIELMPLAQFPGDRNWGYDGVLHYAPQSSYGTPEELKHLIDTAHGLGLMVILDVVYNHFGPDGNYLGSYAKDFFRSDLHTPWGDAIDFRRPQVRDFFVDNALMWLLEYRIDGLRMDAVHAIRDETFLPEFATRVRGQIEPGRHVWLNLENEFNQAGLLEKGFDAQWDDDGHNTLHVLLTGETDAYYSDFAQEPTQKLARLLSEGFVYQGEQTRHGHTRGEPSGHLAPTAFVLFLQNHDQIGNRALGERLPQLCTPAALRAATALLLLSPMIPLMFMGDEWAASEPFLFFTSHHGELADAVREGRRKEFADFAAFADPEKREHIPDPNDIKTFEASRPAFSAVDLDTDKGLDHRSWVDFYTQLLALRHKEIMPRLPGARFLKTDILGDKAVSARWVLGDGSELRIDLNLSEQAVDAPPQQNARQIFSSAAKSSELSPQAILNPYTAIVSLTASDVLEEQDEQ

SEQ ID NO: 3839 - protein, 413 aa, Erwinia carotovora subsp. atroseptica SCRI1043
MADSTSPRRFTRIDRLPPYVFNITAELKMAARRRGEDIIDFSMGNPDGPTPPHIVEKLCTVAQREDTHGYSTSRGIPRLRRAISRWYADRYEVDIDPESEAIVTIGSKEGLAHLMLATLDHGDTVLVPNPSYPIHIYGAVIAGAQVRSVPLVEGVDFFNELERAIRESIPKPKMMILGFPSNPTAQCVELDFFERVVELAKQYGVLVIHDLAYADIVYDGWKAPSIMQVPGAKDIAVEFFTLSKSYNMAGWRIGFMVGNSELVNALARIKSYHDYGTFTPLQVAAIAALEGDQQCVRDIAEQYRQRRNVLVRGLHEAGWMVDEPKASMYVWAKIPDAYAHLGSLEFAKRLLSEAKVCVSPGIGFGDYGDTHVRFALIENQDRIRQAVRGIKTMFRADGILPTTKPLAGKGPAA

SEQ ID NO: 3840 - protein, 704 aa, Rhodospirillum rubrum
MAKRSTDALTPAEIADAKILRGTGGETHQIAEGDTPVLTTQQGIPVADDQNSLRIGPRGPTLLEDFAFREKIFHFDHERIPERIVHARGFGAHGTFETYEDLSALTSADIFQRAGEKTPAFVRFSTVAGNLGSSDVARDVRGFAVKLYTKQGNWDIVGNNIPVFFIQDAIKFPDLIHAAKQEPDSGFPQAQTAHDNFWDFISLMPESLHMALWIMSDRTIPRSFRFMEGFGVHTFRLVTAEGKSSFVKFHWKPKLGLQSVVWNEAVKINGADPDFHRRDLWSAIKRGDYPEWDLGLQVFDDAFADSFPFDVLDATKLIPEELVPIRIVGRLVLDRTVDNFFAETEQVAFHTANIVPGIDFTNDPLLQGRNFSYLDTQIKRLGGPNFTHLPINAAKCPFHSFQQDGHMAFVNPKGRANYEPNSWGPGIGGPRESPESGFHSFPAEDGGEKRRVRGELFADHYSQARQFYRSQTPVEQTHIKDSFVFELSKVETPAIRARVVSHLLTIDQTLAQKVADGLGLAELPEAAKPARPLVEDLPASPALSILLNPPKDFSGRKVGVLVSDGVDGAFLDEIERLLTAEGAQMEVIAPRVGGFTAKDGTLRPAHQKVNGAPSVLYDAVAVLLSTEGAKLLLNEATAKDFVSDAFAHAKVIAFTQAAQPLLEKAGVIADEGCLLLDTPAKAETFLGLCRKGRRWEREAKVHAV

SEQ ID NO: 3841 - protein, 375 aa, Oryza sativa (japonica cultivar-group)
MASFAVSGARLGVVRAGGGGGGGGGPAARSGGVDLPSVLFRRKDSFSRGVVSCAGAPGKVLVPGGGSDDLLSSAEPDVETQEQPEESQIPDDNKVKPFEEEEEIPAVAEASIKVVAEDKLESSEVIQDIEENVTEGVIKDADEPTVEDKPRVIPPPGDGQKIYQIDPMLEGFRNHLDYRYSEYKRMRAAIDQHEGGLDAFSRGYEKLGFTRSAEGITYREWAPGAQSAALVGDFNNWNPNADTMTRNEYGVWEISLPNNADGSPAIPHGSRVKIRMDTPSGVKDSIPAWIKFAVQAPGEIPYNGIYYDPPEEEKYVFQHPQPKRPNSLRIYESHIGMSSPCSISFSLVCYCIFLEIRQCMQSEQKNHLNGPQKNE

SEQ ID NO: 3842 - protein, 130 aa, Triticum aestivum
MESKAFVSVTFLIVTLLLCRTIQSRSCRSDEKTTEKTMILGGVHDLRGNQNSGEIENLARFAIQQHNNRKNKVLEFKKIVKAREQVVAGTMYYLTLEANEGGQAKNFEAKVWVKPWMNFKQLQEFKESSS

SEQ ID NO: 3843 - protein, 445 aa, Mortierella alpina
MATPLPPSFVVPATQTETRRDPLQHEELPPLFPEKITIYNIWRYLDYKHVVGLGLTPLIALYGLLTTEIQTKTLIWSIIYYYATGLGITAGYHRLWAHRAYNAGPAMSFVLALLGAGAVEGSIKWWSRGHRAHHRWTDTEKDPYSAHRGLFFSHIGWMLIKRPGWKIGHADVDDLNKSKLVQWQHKNYLPLVLIMGVVFPTLVAGLGWGDWRGGYFYAAILRLVFVHHATFCVNSLAHWLGDGPFDDRHSPRDHFITAFVTLGEGYHNFHHQFPQDYRNAIRFYQYDPTKWVIALCAFFGLASHLKTFPENEVRKGQLQMIEKRVLEKKTKLQWGTPIADLPILSFEDYQHACKNDNKKWILLEGVVYDVADFMSEHPGGEKYIKMGVGKDMTAAFNGGMYDHSNAARNLLSLMRVAVVEYGGEVEAQKKNPSMPIYGTDHAKAE

SEQ ID NO: 3844 - protein, 545 aa, Sinorhizobium meliloti
MAAKEVKFGRSAREKMLRGVDILADAVKVTLGPKGRNVVIDKSFGAPRITKDGVSVAKEIELEDKFENMGAQMVREVASKTNDIAGDGTTTATVLAQAIVREGAKAVAAGMNPMDLKRGIDLAVAEVVKDLLAKAKKINTSDEVAQVGTISANGEKQIGLDIAEAMQKVGNEGVITVEEAKTAETELEVVEGMQFDRGYLSPYFVTNPEKMVADLEDAFILLHEKKLSNLQAMLPVLEAVVQTGKPLLIIAEDVEGEALATLVVNKLRGGLKIAAVKAPGFGDRRKAMLEDIAILTGGTVISEDLGIKLESVTLDMLGRAKKVSITKENTTIVDGAGQKSDIEGRVAQIKAQIEETTSDYDREKLQERLAKLAGGVAVIRVGGATEVEVKEKKDRIDDALNATRAAVQEGIVPGGGVALLRSSVKITVKGENDDQDAGVNIVRRALQSPARQIVENAGDEASIVVGKILEKNTDDFGYNAQTGEYGDMIAMGIIDPVKVVRTALQDAASVASLLITTEAMIAELPKKDAPAMPGGMGGMGGMDMM

SEQ ID NO: 3845 - protein, 542 aa, Mesorhizobium loti MAFF303099
MAAKEVKFHSDAREKMLRGVNILADAVKVTLGPKGRNVVIDKSFGAPRITKDGVTVAKEIELEDKFENMGAQMVREVASKTSDLAGDGTTTATVLAQAIVKEGAKAVASGMNPMDLKRGIDKAVEAIVQELKTNARKVTRNDEIAQVGTISANGDAEIGRFLAEAMQKVGNEGVITVEEAKTAETELEVVEGMQFDRGYLSPYFITNQDKMRVELEEPYVLIHEKKLSNLQALLPVLEAVVQSSKPLLIIAEDVEGEALATLVVNKLRGGLKVAAVKAPGFGDRRKAMLEDIAILTGGTAISEDLGIKLENVTLEMLGRAKKVVIEKENTTIVDGAGSKDEIQGRVSQIKSQIEETTSDYDKEKLQERLAKLAGGVAVIRVGGSTEVEVKERKDRVDDAMHATRAAVEEGVLPGGGVALLRAAKALDSVQAENEDQKHGIEIVRRAIEAPVRQIAENAGAEGSIIVGKLREKPEFGWGWNAQTNAFGDLYNEGVIDPVKVVRTALQDAASVAGLLVTTEAMVAEKPKKEPAVPAMPAGGMDF

SEQ ID NO: 3846 - protein, 396 aa, Methanocaldococcus jannaschii DSM 2661
MRNMQEKGVSEKEILEELKKYRSLDLKYEDGNIFGSMCSNVLPITRKIVDIFLETNLGDPGLFKGTKLLEEKAVALLGSLLNNKDAYGHIVSGGTEANLMALRCIKNIWREKRRKGLSKNEHPKIIVPITAHFSFEKGREMMDLEYIYAPIKEDYTIDEKFVKDAVEDYDVDGIIGIAGTTELGTIDNIEELSKIAKENNIYIHVDAAFGGLVIPFLDDKYKKKGVNYKFDFSLGVDSITIDPHKMGHCPIPSGGILFKDIGYKRYLDVDAPYLTETRQATILGTRVGFGGACTYAVLRYLGREGQRKIVNECMENTLYLYKKLKENNFKPVIEPILNIVAIEDEDYKEVCKKLRDRGIYVSVCNCVKALRIVVMPHIKREHIDNFIEILNSIKRD

SEQ ID NO: 3847 - protein, 578 aa, Tortula ruralis
MGNSCVGAAGYFQGFTSVIALGGRSSRSPSEVSPTPSKAESRGGSRAEAESPETQRKPPRPAHIPAVEPAETQQFKEVIEAMKKGREMKPVPGQSLTHSVLQRKTENLRDLYVLGKKLGQGQFGTTYLCIEKATNREYACKSIAKRKLISKEDVDDVRRELQIMHHLSGHPNIVMIKGAYEDPASVHLVMELCAGGELFDRIIQRGQYSEAKAAVLTRTIVGVVETCHSLGVMHRDLKPENFLFSSTKEDAALKTTDFGLSVFFKPGEVFRDVVGSPYYVAPEVLRKNYGPEADVWSAGVILYILLSGVPPFWAETEQGIFEQVLKSELDFASDPWPKISDSAKDLIRKMLTPQASKRLKAHQVLAHPWICEDGVAPDRPIDSAVQSRLKHFSAMNKLKKIAIRVIAESLSEEEIAGLKEMFKMMDTDNSGSISYEELKAGLKKVGSNLKEEDVRQLMDAADVDGSGAIDYGEFLAATLHLNKVERDENMFAAFSYLDKDNSGYLTVDELQHALAEFNMGDVSVEELLREVDQNNDGQIDYTEFVTMMRKGNMGGGAGRSSLRNSQQLSLTDVLGIGG

SEQ ID NO: 3848 - protein, 680 aa, Photobacterium profundum SS9
MYFAYRIVVRPLTLMSLAVSNFDDDKVPQRINLKGRRFDDEISTLTETYNSSVNRIRDHYDELELAREEAEEANRKKSEFLANMSHEIRTPMNGIIGLSSLLQEMDMPKDQKEYIQMLNISSLSLLDLINDILDFSKIEAGRLELEHTSLNLFELNKEVESIFLVKASEKSIAFQCSIDKRIPPMLLGDATQLRQVLNNLVSNAIKFTHTGYVHLHTQLETDTDTETTIRFEVIDSGIGVSADKHEAVFDKFQQADGSTTRKYGGTGLGLSICRQIVHLMGGEIKISSEVDKGSTFYFTITFEKNVLVSASLEDSKALSEISVLLVDDSMLNMRITSAQLNNFGAKSICCDDATQAIDIVKQAIANKNPFDLVIIDKIMPHLDGFELAQLLTKEFGLDCPRLMMISAGPQMGDDLKAKQVGILACLSRPYKESNLKWTVKRVIKMTSDEVIATPLNCKRSLNGTETSQALSNATSPVMTPEMTTPENFLQSVHHANMPQASEINFLPKSNAEVKKASSPEESGVITNDSTAALTRELDPEASTPRAKVLVVEDAVVNQKVAKMMLEKLGVEVMIASNGQIGVDMYQEHDFDMIFMDCQMPVLDGFGATKAIRNLEQNTSHIPIIALTANVVKEEKDKCYEAGMDDFVSKPVSKKVLSAVLEKHLAIVLLAKKDITIKNNI

SEQ ID NO: 3849 - protein, 165 aa, Zea mays
MDGRMFGLETPLMVALQHLLDVPDGDAGAGGDKASGAAAGGGPTRTYVRDARAMAATPADVKELPGAYAFVVDMPGLGTGDIKVQVEDERVLVISGERRREEREDAKYLRMERRMGKFMRKFVLPDNADMDKISAVCRDGVLTVTVEKLPPPEPKKPKTIEVKVA

SEQ ID NO: 3850 - protein, 491 aa, Zea mays
MDPYKHRPSSAFNPPYWTTNSGAPVWNNDSSLTVGARGPILLEDYHCEKLANFDRERIPERVVHARGASAKGFFEVTHDITHLTCADFLRAPGVQTPVIVRFSTVIHERGSPETLRDPRGFAVNFYTREGNWDLVGNNFPVFFIRDGIKFPDMVHALKPNPRTHIQDNWRILDFFSHHPESLHMFSFLFDDVGIPADYRHMDGSGVHTYTLVSRAGTVTYVKFHWRPTCGVRSLMDDEAVRCGANHSHATKDLTDAIAAGNFPEWTLYIQTMDPEMEDRLDDLDPLDVTKTWPEDRFPLQPVGRLVLNRNIDNFFAENEQLAFCPGLIVPGIYYSDDKLLQTRIFSYSDTQRHRLGPNYLLLPANAPKCAHHNNHYDGSMNFMHRHEEVDYFPSRYDAVRNAPRYPIPTAHIAGRREKTVISKENNFKQPGERYRAMDPARQERFITRWVDALSDPRLTHEIRTIWLSNWSQADRSLGQKLASRLSAKPSM

SEQ ID NO: 3851 - protein, 358 aa, Kluyveromyces delphensis
MSEWKVDPDNRRRLLQLQKVGANKRCVDCNAPNPQWASPKFGIFICLECAGTHRSLGVHISFVRSITMDQFKQEELVRMEKGGNEPFIEYMTSHGIDMTLPHKIKYDNPIAEDYKEKLSCEVEDKEFVEPKHPDFDPKALGKTSTPSVATKAGAGSITSNATSRQDTPIESRRTGTPQQKEKNEQYFAQLGQKNQERPDHLPPSQGGKFQGFGNTPVNNSKQANTNTMSLENLQTDPVGTLSRGWGLFSSALQKSFDDVNETYIKPNVQQWNTGELSEETKRAAAQFGQKFQETSTYGVQAFSSFTKQYITGEEDTMSNFNRTSPMPGTANSTNSTDNLLKKEKMRPPKAGEDEWEEF

SEQ ID NO: 3852 - protein, 484 aa, Nicotiana glutinosa
MVFISSNNQKQQLLSKIATNDGHGENSAYFDGWKAYENDPFHLINNPNGVIQMGLAENQLCFDLIQEWVVNNPKASICTIEGAENFKDIAIFQDYHGLPEFRQAVARFMENVRGDRVTFDPNRIVMSGGATGAHETLAFCLANPGDAFLVPTPYYPGFDRDLRWRTGVQLFPVVCDSSNDFKVTKKALETAYEKAQESNINIKGLLINNPSNPLGTLLDSDTLRDIVKFINSKNIHLICDEIYAATVFDQPKFISVSEIVEEHVGCNKDLIHIVYSLSKDMGFPGFRVGIVYSYNDTVVNIARKMSSFGLVSTQTQHLIASMLSDEIFVEKFIAESSERLGKRHGMFTKGLAQVGISTLKSNAGLFFWMDLRRLLKEPTFDSELELWRIIINEVKLNVSPGCSFHCSEPGWFRVCFANMDDETMRIALRRIRNFVLQTKGLNNKAAVKKQCSRSKLQISLSFRRMDDFMNSPVHSPMNSPLVRT

SEQ ID NO: 3853 - protein, 215 aa, Triticum aestivum
  misc_feature (205)..(205): Xaa can be any naturally occurring amino acid
MGEQKGNILMGKYEMGKMLGQGTFAKVYHARNIETSQSVAIKVTDKEKVLKGGLTDQIKREISVMKLVKHPNIVQMYEVMATKTKIYFVLEHVKGGELFNKVQRGRLKEDAARKYFQQLICAVDFCHSRGVYHRDLKPENLLLDENSNLKVSDFGLSTISECRRLDGLLHTSCGTPAYVAPEVINREGYDGAKADIWSCGGILFXLLAGYPPFPK

SEQ ID NO: 3854 - protein, 671 aa, Erwinia carotovora subsp. atroseptica SCRI1043
MNNLIRITAIAGLLLAGSSFANENITRVEQIPQLHQEPQHATVSDRVASRFLRSHYRQFMLDAQFSEKIFNRYLNMLDYSHNVLLASDVAQFSGQKAQLGDALKSGQLDIPYALYNLAQKRRFERFQYALSLLDKPVDLTGNDTFELDRSKAPWPQNAGELNRLWDAKVKYDWLSLKLTGKDDKDIKETLTKRYQFAIRRLAQSNSEDVFQLVMNAFAREIDPHTSYLSPRNTEQFNTEMSLSLEGIGAVLQMDDDYTMINSMVPGGPAAKSKNITVGDRVVGVGQSGKPMVDVIGWRLDDVVALIKGPKGSKVRLEILPAGKGTKTRIITLTRERIRLEDRAVKMSVKTVGKDKVGVLDIPGFYVGLTDDVKVQLQKLEKQNVSSIVIDLRTNGGGALTEAVGLSGLFIPSGPVVQVRDNNGKVREDSDTDGIVYYKGPLVVLVDRFSASASEIFAAAMQDYGRALIVGEPTFGKGTVQQYRSLNRIYDQMLRPDWPALGSVQYTIQKFYRIDGGSTQMKGVTPDVMMPTGTETVDTGEKFEDNALPWDSIKAANYIKSGDLKALISKLNEHHQERIAKDPEFQFVAQDIARYNAMKDKRNLVSLNLAQREKENDDDEAMRLNRINDRLAREGKKPLKSLEDLPKDYQAPDPYLDETVKIANDLAQDQKE

SEQ ID NO: 3855 - protein, 73 aa, Oryza sativa
  misc_feature (57)..(57): Xaa can be any naturally occurring amino acid
AILFTYPTSGSFNRTGLVISSKSPSLSVVYTLTIASADTHFKSASDSVHFTESVTQXFRKHRVPVEGLFCIVC

SEQ ID NO: 3856 - protein, 324 aa, Neisseria gonorrhoeae FA 1090
MDTLTRFLPEHLQQNQLPEALGGVLLSVVSACTEINAKVRLGALAGVLGMAGTGNIQGEDQKKLDVIANNIMIDTLKANPAVAGLASEEEDTFVSAGENGRYLVLFDPLDGSSNIDVNISVGTIFSILAKPEGALATESFLQTGRQQLAAGYVLYGPQTQLVFTFGHGVYVFTLNAENEFVLTKENPKVPESTKEFAINMSNRRHWLPPVQQYVDELLAGETGTRGKNYNMRWVASMVAEIHRILMRGGVFMYLQDKRDPSKPGKLRLMYEANPMALILEQAGASASNAYQAMLDIQPESLHQRVAVIMGSSEEVDYLNRLHSK

SEQ ID NO: 3857 - protein, 336 aa, Candida glabrata CBS138
MGSHEGIDTDVISLPRFIIEYQKRVHNATGEFTLVLNALQFAFKFIAHAIRRAELIHLGGLFGTSNATGDEQKKLDVIGDEIFINTMESSNCVKILVSEEQEDMIVFEHNTGNYAVCCDPIDGSSNLDAGVSVGTIVSLFKLQPGSTGKVEDVLRPGTEMVAACYAMYGASTHLVLTMGDGVNGFTLDTNLGEFILTEPDMRVPMYRQIYSINEGNTYYWNDNIKSFINFLKEPQDDGKPFSARYVGSMVSDMHRTFLYGGIYAYPEDKKNPKGKLRLLYEAFPMAFLMEQAGGKAVTDRGERILDLTPTHIHDKSSIWVGSPGEIDKFLKHIGKA

SEQ ID NO: 3858 - protein, 691 aa, Magnaporthe grisea 70-15
MATNGSNTVVANEGTVEHIGAVKLDPWLEPFEDVIKRRHGMAEDWLKKIEQSEGSIEKFTRGTEVYGFNVKPDNTIVYREWAPNATAAFLVGDFNQWSRQSHPMKKNEYGVFEITVPPTAAGEPAIPHNSKVKISLFLPNGQLIDRLPAWIKYVTQDLSVSPAYDARFWNPPSSERYTFKNPRPKKPKSVRVYEAHVGISSPELRVATYKEFTKNMLPRIKKLGYNVIQLMAIMEHAYYASFGYQINNFFAASSRYGTPEDLKELIDAAHGMGLTVLLDVVHSHASKNVLDGINEFDGTDHQYFHAGGKGRHDQWDSRLFNYGHHEVLRFLLSNLRFWMDEYQFDGFRFDGVTSMLYLHHGMGTGFSGGYHEYFGPDADEEALVYLMLANKMLHELYPEVISIAEDVSGMPTLCLPWSDGGVGFDYRLAMAIPDMWIKILKEKKDEEWDMADICWTLTNRRHGEKTIAYCESHDQALVGDKTLMMHLCDAEMYTHMSTLTPLTPIIDRGMALHKMIRLLTHGLGGEGYLNFEGNEFGHPEWLDFPREGNQNSFWYARRQLNLTEDNLLRYRFLNDFDAAMNNCEEKHGWLSAPQAYISLKNESDMVVVFERAGVVFAFNFHPTQSFADYRIGVDVSGTYKVALTTDDKEFGGHGRIDSSTRFFTTPMEWNGRKNWTHIYLPSRTAVVLELE

SEQ ID NO: 3859 - protein, 479 aa, Anabaena variabilis ATCC 29413
MSDLVLFWHRRDLRITDNIGLATARQHSSKVVGVFCLDPNILERDDVAPVRVTYMIGSLQELQQRYVQAGSQLLILRGDPVQAIPHLAEALNAKAVFWNWDVEPYSQTRDRAIIATLKDKGIQCLTHNWDQILHSPDEIRSGSNTPYTVYTPFWKNWSSKPKAKPVETLHNVEGLTEAEQELAQKAGVKALPTAKDLGFFWDADLIIAPGEAAAQAKLAEFTAKAITEYQEQRNFPGVNGTSQLSAALKFGVIGIRTVWQTTLEALENSRSEETTTSIRTWQQELAWREFYQHAMYNFPELADGAYRATFKNFPWETNEEHFQAWCEGKTGYPIVDAAMRQMNESGWMHNRCRMIVASFLTKDLLINPQWGEKYFMQKLIDGDLSANNGGWQWSASSGMDPKPLRIFNPASQSQKFDPDAEYIRQWVPELRSMDTEYLVTGKITPLERHAVGYVKPIVDHQKQQQLFKQRYQQQKAIGI

SEQ ID NO: 3860 - protein, 1039 aa, Cryptococcus neoformans var. neoformans
MSRVPSGSQQPQYTQQPLYHPSSVHSQSTPIQQTHQQYHPHTGQPMTFQGDAHAYSYDRQSQINTWQANPGAAGSMEYHSAVAGSSRGADPYQPYSQSHRSSPSQSVTASRTQPASAQQYTPWAPVQTSATTPSSRGGGVKLEDLMSSDSRAGGKNQPLSGIPLSVSASFDTRSQFSAGPQGASAEKEKDKERDKATQQQGPSEFIKKLYKMLEEEQAQYGNSRTKKGEKGKRGSVGWGANGTSFVVWDMNDFTTKILPQTFRHSNFSSFVRQLNKYGFSKIKHVDAGTGSIKENIWEFQHPNFQAGGKSDLESIKRKPVAPKKANNQEGDENSPRHIGLSNEDQTRMHLMEDRINMLEDALAKSRSEADEARMREMAMMGLVRDMIGHIAASESEAIGSPAATTGHSPRVLHLLKSLDNLARAYPPEMYHSNIARQPTTMPYTPAQPQSHQSFLNAAYNPAFSGNSVGGAAQAQASPHTDGTGSRGSFSGPSTGEIKPPASSSRLRAASNAGAAPSGSVNASVPLASQPTGNPPAGPVARAEDPAEDVIEIPNQMQDMYGGESVGIAPLFVETPAWLTEGTTVPLTMYRKQSDGQVLKAVYQAFAAGGKLPAGEGQDEDGNAIASGSSTSAAEIMAGSSQMGLQQSYGAGSSTSTGIPLPMEGSPSSESSSRKGKGKKSRGTSLKEQRESKLKPHWAQTPRILVVEDDIVYRTLSKKFLQKFGCETETVENAQGAVDKMNGTKYDLVLMDIFFGPNMDGRKATSLIRQFNNYTPIISMTSNAQPQDVDSYYQSGMNDILAKPFTKNHLFTILDKHLVHLRHAQLYERLIPLGVGVPPLSDQHVQEALAVSAANLQNTNGQLQLENGPTAETQNEQQDSNGELELGIRNPLAGSGWSDEAYQLVLAQFLQTGVMPDITTISAVSSSPNPNGIDGTIGTSIVFGESSGFSRKRSIEAISDDNWDGQAQTSASAQAQTQAQVQNTIMQGDQQQGMSLQMPMNVGMGMEVNMGNMPESGMMNQDISNGSDGREAKRARGMAG

SEQ ID NO: 3861 - protein, 917 aa, Pseudomonas fluorescens
MLKKLGIKGRVLLLTLLPTSLMALVLGGYFTWMQLSDLQTQLLQRGEMIAEQLASLVAPAMGNHNTQMLERIATQALEQQDVRAVSLLAPDRSLLAHAGPSMLNPPPAGNSSHMMQRSGSDATRYQLPVFGRHRNLAGDLIPDESDRLLGWVELDLSHSGMLLRGYRNLFASLLLIPAGLAVTALLAVRMGRTINNPLTQIKQAVAQLKDGNLETRLPPLGSQELDELASGINRMASTLQNAQEELQHSIDQATEDVRQNLETIEIQNIELDLARKEALEASRIKSEFLANMSHEIRTPLNGILGFTHLLQKSELTPRQLDYLGTIEKSADSLLGIINEILDFSKIEAGKLVLDSIPFNLRDLLQDTLTILAPAAHAKQLELVSLVYRDTPLSLVGDPLRLKQILTNLVSNAIKFTREGTIVARAMLEEEHEDSVQLRISIQDTGIGLSNQDVRALFQAFSQADNSLSRQPGGTGLGLVISKRLIEQMGGEIGVDSTPGEGSEFWISLNLPKTRDDAEDLPGPPLLGRRVAVLENHELARQALQHQLEDCGLEVTPFNTLEALTNGITGVHQSEQAIDLAVLGITTNDMSPERLSQHIWDLEHLGCKVLVLCPTTEQTLFHLSVPNPHSQLQAKPACTRKLRRALSDLVTPRRARSEPEETLSSRAPRVLCVDDNPANLLLIQTLLEDMGAKVLAVDNGYAALNAIQTEPFDLVMMDVQMPGMDGRKSTEAIRQWESERHGTPLPIVALTAHAMANEKRALLQSGMDDYLTKPISERQLAQVVLKWTGLALRNQGPERASERPELGLELQVLDQDEGLRLAAGKADLAADMLAMLLASLDADREAIKAARAANDQNALIERVHRLHGATRYCGVPQLRAACQRSETLLKQEDAKAFAALDELDHAIGRLAAEARTNA

SEQ ID NO: 3862 - protein, 278 aa, Nocardioides sp. JS614
MAIPTHQLNDGSTLPAIGFGTYPMKGEEGVTAIRGAIEVGYRLLDTAVNYQNETAVGEAIRRSRVPRELLQVTSKLPGRDHGYDDAIASVHGSLERLGLEYLDLHLIHWPNPSRDQYVDAWRALVDLREQGLVRSIGVSNFTERHLERIIAATGVTPAVNQIELHPYFPQADMRAVDEGLGIRTEAWSPLGKRQAPFAEPAVADAARRHGMTPGQVILRWHVQLGSIPIPKSAAPERQRQNLDVFGFELSEDEVAAITALGRPDGRLFGGDPDVHEEM

SEQ ID NO: 3863 - protein, 487 aa, Candida albicans
MAPTFTNSNGQPIPEPFATQRVGQHGPLLLQDFNLIDSLAHFDRERIPERVVHAKGSGAYGVFEVTDDITDICAAKFLDTVGKKTRIFTRFSTVGGELGSADTARDPRGFATKIYTEEGNLDLVYNNTPVFFIRDPSKFPHFIHTQKRNPETHLKDANMFWDYLTSNEESIHQVMVLFSDRGTPASYREMNGYSGHTYKWSNKKGEWFYVQVHFISDQGIKTLNNEEAGALAGSNPDYAQEDLFKNIAAGNYPSWTAYIQTMTEAEAKEAEFSVFDLTKVWPHRKYPMRRFGKFTLNENPENYFAEVEQAAFSPAHTVPYMEPSADPVLQSRLFSYADTHRPHRLGTNYTQIPVNCPVTGAVFNPHSRDGAMTVNGNLGSHPNYLASDKPVEFKQFSSFQEDQEVWNGAATPFHWKATPADFKQAQELWKVLKRYPNQQEHLAHNIAVHAAGADAAIQDRVFAYFGKVSQDLADAIKKEVLELSPRK

SEQ ID NO: 3864 - protein, 159 aa, Glycine max
MAGMVFGLDAPMMAALQHLLDIPDGEAGAAAGEKQGPTRAYVRDARAMAATPADVKELPGAYAFVVDMPGLGSGDIKVQVEDERVLVISGERRREEKEDAKYLRMERRMGKLMRKFVLPENADMEKISAACRDGVLTVTVDKLPPPEPKKPKTIQVQVA

SEQ ID NO: 3865 - protein, 155 aa, Oryza sativa
  misc_feature (86)..(86): Xaa can be any naturally occurring amino acid
MSMIRRSNVFDPFSLDLWDPFDGFPFGSGSGSLFPRANSDAAAFAGARIDWKETPEAHVFKADVPGLKKEEVKVEVEDGNVLQISXGERIKEQEEKTDKWHRVERSSGKFLRRFRLPENTKPEQIKASMENGVLTVTVPKEEPKKPDVKSIQITG

SEQ ID NO: 3866 - protein, 251 aa, Triticum aestivum
  misc_feature (176)..(176): Xaa can be any naturally occurring amino acid
  misc_feature (194)..(194): Xaa can be any naturally occurring amino acid
  misc_feature (204)..(204): Xaa can be any naturally occurring amino acid
  misc_feature (227)..(227): Xaa can be any naturally occurring amino acid
MPTPHAKIPFPSSHPLTSTPAANSSNPRRPTPTLPGACASDASAPASATGGAVMVGFFRSGNLASRVFDRQFLSPRPGATVNTVRQFYENLVPSYTIYDIDCPDYSFRKFTDDGKYLVAFSRNHQDLIVYRPIWLTFSCHEECDSHDLPANAERFDSFFKQLYSISLASSNEYICXKDFFLYMECHQYGLFATXSTAQSNDSSXSTEGAIHGVPSIEKITFYLVRLXDGAILDEKAFCNDFINLAHSNWCI

SEQ ID NO: 3867 - protein, 613 aa, Arabidopsis thaliana
MESCDCFETHVNQDDLLVKYQYISDALIALAYFSIPLELIYFVQKSAFFPYKWVLMQFGAFIILCGATHFINLWMFFMHSKAVAIVMTIAKVSCAVVSCATALMLVHIIPDLLSVKNRELFLKKKADELDREMGLILTQEETGRHVRMLTHGIRRTLDRHTILRTTLVELGKTLCLEECALWMPSQSGLYLQLSHTLSHKIQVGSSVPINLPIINELFNSAQAMHIPHSCPLAKIGPPVGRYSPPEVVSVRVPLLHLSNFQGSDWSDLSGKGYAIMVLILPTDGARKWRDHELELVENVADQVAVALSHAAILEESMHARDQLMEQNFALDKARQEAEMAVHARNDFLAVMNHEMRTPMHAIISLSSLLLETELSPEQRVMIETILKSGNPGSTHASDVLDLSRLEDGSLLLENEPFSLQAIFEEVISLIKPIASVKKLSTNLILSADLPTYAIGDEKRLMQTILNIMGNAVKFTKEGYISIIASIMKPESLQELPSPEFFPVLSDSHFYLCVQVKDTGCGIHTQDIPLLFTKFVQPRTGTQRNHSGGGLGLALCKRFVGLMGGYMWIESEGLEKGCTASFIIRLGICNGPSSSSGSMALHLAAKSQTRPWNW

SEQ ID NO: 3868 - protein, 590 aa, Pseudomonas syringae pv. syringae B728a
MCGLAGELRFDHQPADLAAVERITHELAPRGPDAWGFHSQGPVALGHRRLKIMDLSDGSAQPMIDSNLGLSLAFNGAIYNFPELRAELESLGYQFHSGGDTEVLLKGYHAWGADMLPKLNGMFAFAIWERDSKQLFIARDRLGVKPLYLSKTDKRLRFASSLPALLKGGDISGMLDPVALNHYLNFHAVVPAPRTLLAGVEKLPPASWMRIDASGKVEQKVWWTLPYGPHEDEKNLTLEDWRDRVLDSTREAVAIRQRAAVDVGVLLSGGVDSSMLVGLLREVGVEDLSTFSIGFQDAGGERGDEFQYSDLIAKHYGTRHHQLRIQEREIIEQLPAAFRAMSEPMVSHDCIAFYLLSREVSKHCKVVQSGQGADELFAGYHWYPQVDGASDPVAAYRDAFVDRSYAEYAETVQPKWRTANDAAGDFVRDHFAQPGASAAVDKALRLDSTVMLVDDPVKRVDNMTMAWGLEARTPFLDYRLVELSARIPGKFKLPDGGKQVLKEAARMVIPSEVIDRKKGYFPVPGLKHLQGDTLNWVRELLTDSSQDRGLFNPAMVDKLLTNPEGQLTPLRGSKLWQLAALNLWLSEQGL

SEQ ID NO: 3869 - protein, 252 aa, Francisella tularensis subsp. tularensis SCHU S4
MQIKRWFLNNSLRNYQYLLYDKSHAIVIDPLKSDIFAEFIAKNKLQLEAILITHKHGDHIAGVKKLLAIYLNAKVYAYTGNDLFKPDIYVKDGSFINLGFTSFRVMYIPGHIDDHVCFLFEQERALFCGDTLFNAGVGGVQAESADINQLYDSLVKITKLDGDIKPYPAHDYWLGNLDFALSILADDSYFNYYRNQVAELAAEDKPIVNLAEEAKLNIFIRAMSDKALLKALPDYSLGREMFVKLRQLKNNF

SEQ ID NO: 3870 - protein, 477 aa, Neurospora crassa
MASTSATDIPAEVQAVNVPDGTTDFIPLRGKKYDLKKPHITELPITWGNWYKHVNWLNTTFIIFVPLAGLISAYWIPAQTKTILFSIAYYYFAGLGITAGYHRLWAHTSYKATLPLKIWLAAGGAAAVEGSARWWSRDHRAHHRYTDTDKDPYSVRKGLLYSHIGWMVMKQNPKRIGRTDITDLNEDPVVVWQHKHYIKCVIVMALIVPTLICGLGWGDYAGGFIYGGILRIFFIQQATFCVNSLAHWLGDQPFDDRNSPRDHVITALVTLGEGYHNFHHEFPSDFRNAIEWWQYDPTKWCIWVWKQLGLAYDLKKFPHNEIEKGRLQQQQKKLDQKRATLDWGIPLENLPVVSWDDFVQESKNGKAWIAVAGVIHDVGKFIQDHPGGKALINSAIGKDATAIFNGGVYNHSNAAHNLLSTMRVGVIRGGCEVEIWKRAQAENKDIATVTDSSGKKIVRAGLQPTRVTPPVTTADAA

SEQ ID NO: 3871 - protein, 205 aa, Ustilago maydis 521
MASRKKVLLKVIILGDSGVGKTSLMNQYVNKRFSSAYKATIGADFLTREVMVDDRLVTMQLWDTAGQERFQSLGVAFYRGADCCCLCYDVNNAKSFETLDSWRDEFLIQAAPHDPENFPFVVLGNKIDVEESKRMVSQKRAMTWCQSKGNIPYFETSAKEAINVEQAFQTIARAALQQEAEAELYADYPDPIRIDQDNQQSGCNC

SEQ ID NO: 3872 - protein, 336 aa, Pseudomonas syringae pv. syringae B728a
MSRVTLSRYLIEQTRSNNTPADLRFLIEVVARACKEISHAVSKGALGGVLGSMGTENVQGEVQKKLDVISNEILLEANEWGGHLAGMASEEMDNAYQIPGKYPKGAYLLVFDPLDGSSNIDINAPVGTIFSVLRCPNEYLSQNEALNEKAFLQPGTEQVAAGYAIYGPQTMLVLTLGDGVKGFTLDREMGSFVLTHEDITIPESTQEFAVNMSNQRHWEAPVQRYVSELLAGEDGPLKKNYNMRWVAAMVADVHRILTRGGLFMYPRDSREPSKPGKLRLMYEANPMSFLVEQAGGASTDGHQRILDIQPEGLHQRVAVYLGSKEEVERATAYHKA

SEQ ID NO: 3873 - protein, 191 aa, Araucaria araucana
DDHREVVAEIRRANLEPYLGLHYPATDIPQASRFLFMKNKVRMIYDCRADGVKVIQDKRLAKPLSLSSSALRALHGCHAQYMANMGSVASFVMAVTINENETDEETSGSGQKGGRRLWGLVVCHHTSPRFVPFPLRYACEFLMQVFGIQLNKEVELAAQLRVKHMLRTQTVLCDMLLRDAPVGIVTQTPNI

SEQ ID NO: 3874 - protein, 234 aa, Triticum aestivum
  misc_feature (32)..(32): Xaa can be any naturally occurring amino acid
  misc_feature (55)..(55): Xaa can be any naturally occurring amino acid
  misc_feature (63)..(63): Xaa can be any naturally occurring amino acid
  misc_feature (82)..(82): Xaa can be any naturally occurring amino acid
  misc_feature (121)..(121): Xaa can be any naturally occurring amino acid
GGPPRGGGAPCLQGWPKRNDSPPPVSRGRTLXLCLLNVSPGGKQVVQAPHPDCFXAPGPAEFXCSVWGNSFSFYQGGGGHQXSHPVKQPSPSPDAAAGPMVALPAVAPVLPSAERATWSTXAGSSDGTTNRVHRCSICPKEFPTGQALGGHKRKHYDGGVGSVAPSSTELLAAAAAESEVGSTGNGSSAARAFDLNIPAVPEFVWRPCAKGKMWEDEEEVQSPLAFKKPRLLTA

SEQ ID NO: 3875 - protein, 464 aa, Listeria monocytogenes EGD-e
MLYSKENKESYLEPVFGSSAEDRDIPKYTLGKEPLEPRIAYRLVKDELLDEGSARQNLATFCQTYMEDEATKLMSETLEKNAIDKSEYPRTAELENRCVNIIADLWHAPKDQKFMGTSTIGSSEACMLGGMAMKFAWRKRAEKLGLDIYAKKPNLVISSGYQVCWEKFCVYWDIDMRVVPMDKEHMQLNTDQVLDYVDEYTIGVVGILGITYTGRYDDIYALNEKLEEYNSKTDYKVYIHVDAASGGFFTPFVEPDIIWDFRLKNVISINTSGHKYGLVYPGIGWVLWKDESYLPEELIFKVSYLGGEMPTMQINFSRSASHIIGQYYNFLRYGFEGYRTIHQKTSDVAQYLAHAVEQTGYFDIFNDGSHLPIVCYKLKDDANVNWTLYDLADRLQMRGWQVPAYPLPKSLENIIIQRYVCRADLGFNMAEEFIQDFQASIQELNNAHILFHDTQQSGVHGFTH

SEQ ID NO: 3876 - protein, 191 aa, Araucaria araucana
DDHGEVISEVRKSDLEPYLGLHYPATDIPQASRFLFMKNRARMICDCCASPVRVVEDKRLPRELNLCGSTLRAPHGCHAQYMSNMGSISPLVMAVIVHEKEEERSRCGPQQQKGRRLWGLVVCHHTSPRFVPFPLRYACEFLMRVFGIQLNREIELAAQSREKHILRTQTLLCDMLLRDAPMGIVTQKPNI

SEQ ID NO: 3877 - protein, 212 aa, Vibrio sp. Ex25
MKKVLITGFEPFGGDAINPALEAVKRLEAAAIEDAMIVTCPVPVIRHESVNTVIDAIEAHQPDCVITVGQAAGRGAITPERVAINVDDFRIPDNGGHQPIDEPVVADGPDAYFSTLPIKRVVQTLQKQGIPSQISNSAGTFVCNHLFYGIQHYLKDRPIRHGFVHIPLLPEQAADGRQPSMSLEMIVEGLRLVAQVCIANENDILVSGGSIC

SEQ ID NO: 3878 - protein, 547 aa, Bartonella quintana str. Toulouse
MAAKEVKFGREARERLLRGVDILANAVKVTLGPKGRNVVIDKSFGAPRITKDGVSVAKEIELEDKFENMGAQMLREVASKTNDIAGDGTTTATVLGQAIVQEGVKAVAAGMNPMDLKRGIDAAVEEVVGNLFKKAKKIQTSAEIAQVGTISANGAAEIGKMIADAMEKVGNEGVITVEEAKTAETELEVVEGMQFDRGYLSPYFVTNADKMVADLDDPYILIHEKKLSNLQSLLPVLEAVVQSGKPLLIIAEDVEGEALATLVVNKLRGGLKIAAVKAPGFGDRRKAMLEDIAILTSGQVISEDVGIKLENVTLDMLGRAKKVNISKENTTIIDGAGKKAEINARVNQIKVQIEETTSDYDREKLQERLAKLAGGVAVIRVGGATEVEVKEKKDRVDDALNATRAAVEEGIVAGGGTALLRAANALAIKGSNPDQEAGINIVRRALQAPARQIATNAGEEAAIIVGKVLENNADTFGYNTATGQFGDLIALGIVDPVKVVRSALQNAASIASLLITTEAMVAEVPKKDTPMPPMPGGGMGGMGGMDF

SEQ ID NO: 3879 - protein, 392 aa, Zea mays
SAIAPCLSYARGTGSAPSASCCLNRPTPFVGLAFKRKWQNKRKEQGKPCDRPNIVTGANVQVCWEKFARYFEVELKEVKLSEGYYVMDPVKAVEMVDENTICVAAILGSTLTGEFEDVKQLNDLLTDKNKETGWDVPIHVDAASGGFIAPFLYPELEWDFRLPLVKSINVSGHKYGLVYPGVGWVIWRSKEDLPEELIFHINYLGTDQPTFTLNFSKGSSQIIAQYYQLIRLGFEGYRNIMENCQENAAILREGIAATGRFDVLSKDAGVPLVAFSLRDSSRFSVFDVSENLRRFGWIVPAYTMPADAEHVAVLRVVVREDFSRSLAERLVSDVRKILRELDARATHAVRVATATAEQSGDSVVAKKSVLEIEREVAARWRNAVNKKKTGVC

SEQ ID NO: 3880 - protein, 731 aa, Erwinia chrysanthemi
MFVAAMTESDQNIINLLFSGHYADPFAVLGMHDTASGLEVRALLPDAIDVWVVDAHSGRKVANLQCRDPRGFFASAIPRRKKPFSYRLAVTWPQDTQVIDDPYRFGTLLQELDIWLLAEGRHLRPFETLGAHPSTLDGVVGTCFAVWAPNAQRVSVVGDFNFWDGRRHPMRRRRENGVWELFVPGVGPGQLYKFEIIDCYGNVLVKSDPYAFESQMRPDTASVVSRLPPALPVDEARQHANELQSPISIYEVHLGSWRRHTHNNFWLSYRELADQLVPYVKEMGFTHVELMPVHKHPFDGSWGYQPLGLYAPTRRFGSPDDFRYLVSAFHEAGINVLLDWVSGHFPADSYGLARFDGPALYEYADPKEGYHQDWNTLIYNFDRHEVRNYLAGNALYWTERFGVDGLRVDAVASMIYRDYSRRDGEWVPNYFGGKENLEAIGFLRYTNQMLGQHHAGAVTIAEESTDYAGVTLPPEHGGLGFHYKWNMGWMHDSLAYMQLDPVHRKYHHDLLTFGMLYAYSENFVLPLSHDEVVHGKRSLLDRMPGDVWQKFANLRAYYGFMWAYPGKKLLFMGGEFAQGREWNHDTSLDWHLLDEPEGWHAGVQQLVRDLNHCYRQHPPLYQCDYLHQGFEWVVVDDRENSVFAFIRRDADGNEMLIISNFTPVPRDSYRVGINQPGAWREVLNTDSWHYHGGNLGNQGLVYSETVGSHSRPQSLVLALPPLATLYLVKEA

SEQ ID NO: 3881 - protein, 357 aa, Arabidopsis thaliana
MDRPAVSGPMDLPIMHDSDRYELVKDIGSGNFGVARLMRDKQSNELVAVKYIERGEKIDENVKREIINHRSLRHPNIVRFKEVILTPTHLAIVMEYASGGELFERICNAGRFSEDEARFFFQQLISGVSYCHAMQVCHRDLKLENTLLDGSPAPRLKICDFGYSKSSVLHSQPKSTVGTPAYIAPEVLLKKEYDGKVADVWSCGVTLYVMLVGAYPFEDPEEPKNFRKTIHRILNVQYAIPDYVHISPECRHLISRIFVADPAKRISIPEIRNHEWFLKNLPADLMNDNTMTTQFDESDQPGQSIEEIMQIIAEATVPPAGTQNLNHYLTDDDMEEDLESDLDDLDIDSSGEIVYAM

SEQ ID NO: 3882 - protein, 125 aa, Triticum aestivum
  misc_feature (34)..(34): Xaa can be any naturally occurring amino acid
  misc_feature (68)..(68): Xaa can be any naturally occurring amino acid
  misc_feature (74)..(74): Xaa can be any naturally occurring amino acid
  misc_feature (96)..(96): Xaa can be any naturally occurring amino acid
  misc_feature (103)..(103): Xaa can be any naturally occurring amino acid
PARRTFQGSPDLKAAREVADYLGTIHHEFHFTVXDGIDAIEEVIYHDETYDVTTIRANTPMFLMARKXIKSLGXVRWCVPGKGSEQLLGRLLYFNXAPNKEGXHKEDCRKGEGLHNTPARNKATS

SEQ ID NO: 3883 - protein, 581 aa, Triticum aestivum
MCGILAVLGCGDESQGKRVHVLELSRRLKHRGPDWSGLHQVADNYLCHQRLAIIDPASGDQPLYNEDKSIAVAVNGEVYNHEELRARLSGHRFRTGSDCEVIAHLYEEYGESFIDMLDGVFSFVLLDARDNSFIAARDAIGVTPLYIGWGIDGSVWISSEMKGLNDDCEHFEIFPPGNLYSSKEKSFKRWYNPPWFSEVIPSVPYDPLRLRSAFEKAVIKRLMTDVPFGVLLSGGLDSSLVAAVAARHFAGTKAAKRWGTRLHSFCVGLEGSPDLKAAKEVADHLGTVHHEFNFTVQDGIDAIEDVIYHIETYDVTTIRASTLMFQMSRKIKALGVKMVISGEGADEIFGGYLYFHKAPNKEEFHQETCRKIKALHQYDCLRANKATSAWGLEVRVPFLDKEFINEAMSIDPEWKMIRPDLGRIEKWILRKAFDDEERPFLPKHILYRQKEQFSDGVGYSWIDGLKDHAASNVSDKMMSNAKFIYPHNTPTTKEAYYYRMIFERYFPQSSAILTVPGGPSVACSTAKAIEWDAQWSGNLDPSGRAALGVHLSAYEQDTVAVGGSNKPGVMNTVVPGVAIET

SEQ ID NO: 3884 - protein, 313 aa, Zea mays
  misc_feature (62)..(62): Xaa can be any naturally occurring amino acid
MARKPLDYHELNENLKRVQYAVRREPYLRASELQKEGKKIIFTNVGNPHALGQKPLTFPRQXVVALCQAPFLLDDLLVGLMFPADAIARAKHYLAMAPGGLGAYSDSRGIPGIRKEVADFIHKRDGYPSDPELIYLTDGASKGVMQILNTIIRNEMDGILVPVPQYPLYSATISLYGGSLVPYYLEEEANWSLDFVNIRQTVAEAPSKGISVMFDMGPPISRAMYSFPQIRLPPRAIEAARRAGKSADVFYCLKLLEATGISTVPGSGFGPKQRLFRLRTTILPAEEDFPAIMRSFKKFNDSFMEQYEGYSRL

SEQ ID NO: 3885 - protein, 750 aa, Bifidobacterium longum DJO10A
MAKETKIEEDTVTVPVAQGDLDATSNAEFYNPHGVLGGHLGIGKHADTATIRVLRPLAKSVTILTQDGEYPMTHEYNGVFVVTVPASGTKKQPTIPDYRVRTEWESGAVLIEDDPYRYMPTVGDMDTYLFGEGRHEKLWETLGAHVLRYDDPMGGADGTPGEQVVGTAFSVWAPNAHAVRVVGNFNAWDGRRHAMRELGSSGVWEIFIPGIGAGETYKFQILNANYTWEMKADPMERQHEVPPNTASIVTESTYKWNDDAWMQHRRTTNPHDGPVSIYEVHAGSWRQGLTYRDLAKQLVDYVKQEGFTHVEFMPLAQHPFSGSWGYQVTGYYAVDSRLGSPDDFRYLVDQFHQAGIGVIMDWVPAHFPKDAFALGRFDGTPLYEDPDPLRGEHPEWGTYVFNFGRREVRNFLVANALFWLEDLHVDALRVDAVSSMLYLDYSREPGHWRPNIYGGRENLEAIDFLKEATATAYKNNPGVMVIAEESTAWPGITAPTSAGGIGFGMKWNMGWMHDTLEYLHEEPINRKWHHNEITFSMVYAYSEHYVLPISHDEVVYGKGSLYGKMPGDDWQKLAGVRSMFAYQWAHPGKKLSFMGNELAQWGEWDHDASIDWDCLNWQEHRQVQTMVADLNAFYKAHPALWSQDFDPAGFQWLTSDDADHNTLSFLRIGTKGETLAVVVNFSGEAWSDYQVALPTGGKWTEVFTTDDAKYGGSDIHNGTFEAVEGEYHSRPFSAKITVPALGVVFLKPED

SEQ ID NO: 3886 - protein, 472 aa, Glycine max
SARGPGSHIVVLAFVLLISSKLAECHNIVRFLPGFQGPLPFLLETGYVEVGETEAEEHAELFYYFIESENDPKGNPLLLWLTGGPGCSAFSGLVFEIGPLTFKNEEYNGSLPNLTLKPQSWTKVSSIIFVDLPAGTGFSYPKTERAVHQSSSKLVRHAHQFIRKWLIDHPEFLSNEVYIAGDSYCGIPVPVIVQEISNGNEGGMQPWIYIQGYLLGNPITTSTEKNYEIPFNHGMALISDELYESLQKNCRGEYRNIDPRNALCLRDMQSYEESISGIETGHVLAPLCDESDLRNDMEVTWRRSSLAHKTSAFFSPRLTLPPLYCRSHAYVLCSYWANDDNVRKALHVRKGSIGKWTRCNDDLKSKFNADIPSSFQYHVNLSRKGYRSLIYSGDHDMVVPFLATQAWIRSLNYSIVSDWRQWYYDGQVAGYTRTYSNRMTFATVKGGGHTAPEYKPEECLAMFSRWISNMPL

SEQ ID NO: 3887 - protein, 147 aa, Bdellovibrio bacteriovorus HD100
MPMRSLSPWGGRRLPSSDLFSQFQDFINEFDRGESSALTRAGFDFSPSVDVEEKDNAYLVSADLPGMKKDEIKVELNDNILTISGERTRESKSEGGYSERSYGRFQRSFTLPVQVNSEKIEAHFEDGVLQITVPKAEGARSHSIKIM

SEQ ID NO: 3888 - protein, 483 aa, Vibrio salmonicida LFI1238
MSKKLTTAAGCPVAHNQNVQTAGKRGPQLLQDVWFLEKLAHFDREVIPERRMHAKGSGAYGTFTVTHDITKYTKAKIFSDIGKKTDMFARFSTVAGERGAADAERDIRGFSLKFYTEEGNWDLAGNNTPVFFLRDPLKFPDLNHAVKRDPRTNMRSAKNNWDFWTSLPEALHQVTIVMSDRGIPATYRHMHGFGSHTFSFINSDNERYWVKFHFVSQQGIKNLSDAEAGELVGNDRESHQRDLLDSIDNQDFPKWTLKVQIMPEADAATVPYNPFDLTKVWPHKDYPLIEVGEFELNRNPQNYFAEVEQAAFNPANVVPGISFSPDKMLQGRLFAYGDAQRYRLGVNHQHIPVNAPRCPVHSYHRDGAMRVDGNFGSTLGYEPNDQGQWAEQPDFSEPPLNLDGAAAHWDHREDEDYFSQPGDLFGLMTAEKQAILFDNTARNLNGVPKEIQLRHVTHCYKADPAYGEGIGKLLGFDISEYNS

SEQ ID NO: 3889 - protein, 574 aa, Candida glabrata CBS138
MCGIFAAYKHQDVHAFKPKALQLSKRIRHRGPDWSGNVVKNSTIMVHERLAIVGLDSGAQPITSEDGDYTLCVNGEIYNHIQLREQFPDYKFKTLSDCEPIIPAYLEHDIDAPKYLDGMFAWCLYDAKQDRIVAARDPVGITTLYMGRCSSSPKTVFFASELKCLTDDCDEITAFPPGHVYDSKTDQITRYFTPDWIDESRIPTTPVNFKDIRESLEKAVRKRLMAEVPYGVLLSGGLDSSLIASIAARETEKANEENDAADNDASASKQLAGIDNQGHLHTAGWSRLHSFAIGLPNAPDLQAARKVAKFIGSIHHEHTFTLQEGLDALDDVIYHLETYDVTTIRASTPMFLLSRKIKAQGVKMVLSGEGSDEIFGGYLYFAQAPSATEFHIESVKRVKNLHLADCLRANKSTMAWGLEARVPFLDKEFLQLCMNIDPKDKMIDQSAGRIEKYILRKAFDTSDEPDVKPYLPEEILWRQKEQFSDGVGYSWIDGLKDTAERVISDTMFSNPKIEWGEDIPTTKEAYWYRLKFDALFPQKTAASTVMRWIPKADWGCAEDPSGRYAKIHEQHVTA

SEQ ID NO: 3890 - protein, 117 aa, Glycine max
NEEEEQIRKMASKVPKKANLLDHHSIKHILDESVSEVVTSRGYVEDVRLSNAKLFIGAIIIVIALFAQFYKKKFPENRDFLIACIALYVIFNGLLQLIIYTASRAGFSLLVPASRAG

SEQ ID NO: 3891 - protein, 192 aa, Araucaria araucana
DEHGEVVAEIRRSDLEPYLGLHYPATDIPQASRFLFMQNRVRMICDCRAVPVKVVQAGQLQQPLCLVGSTLRAPHGCHAQYMANMGSIASLVMAVVIIGNEDEEEGRWKRKRRGSMKLWGLVVCHHTSPRAVPFPLRYACEFLMQAFGLQLNMELQLAAQLTEKHILRTQTLLCDMLLRDAPIGIVLILPSI

SEQ ID NO: 3892 - protein, 412 aa, Ralstonia metallidurans CH34
MVVPHCIPRFLDGEHSLFDSILDWAANGLANWSWWEIVIYTLVMTHITIAGVTIFLHRCMAHRSLDLHPIAQHFFRFWLWMTTGMVTKEWTAIHRKHHAKCETEDDPHSPQTRGIRKVLLEGAELYRAEAKNKETITKFGHGTPDDWIERNLYSRFSWQGVALMLIIDLALFGLVGMSVWAVQMLWIPIHAAGIINGLGHYWGYRNYDCEDASTNVSPWGFIIGGEELHNNHHTYPTSAKFSIKWYEIDVGWWYIRAMQSVGLAKVKKIPPKARLVEARPVDHNTLEAIIANRYDVMARYAKTLKSAYKDELRKHKEGNTPEYSSFKPARKWFHREETKLAAPQRQQLATIVEQNKMLSTFVEMRRELAVIWGRSNLTREQLLAQLQAWCHRAEASGIQALQEFSLRLRRYA

SEQ ID NO: 3893 - protein, 191 aa, Agathis dammara
DDHGEVVAEIRRADLEPYLGLHYPATDIPQASRFLFMKNKVRMICDCRADPVKVIQDKRLAHPLSLSGSTLRAPHSCHAQYMANMGSIASLVMAVTINENENEEEASGSGQKGGRRLWGLVVCHHTSPQFVTFPLRYACEFLMQVFGIQLNKEVELAAQLREKHMLRTQTVLCDMLLRDAPVGIVTQTPNI

SEQ ID NO: 3894 - protein, 140 aa, Zea mays
MVSFEMNDLKKIGLGLTGFGIFFSFLGIIFFFDKGLIAMGNILFLSGLGLTIGLKSTMQFFTKPKNYKGTISFAAGFFLVLIGWPFLGMLLEAYGFVVLFSGFWPTLAVFLQRIPIIGWIFQQPFVTSFLDRYRGKRVPV

SEQ ID NO: 3895 - protein, 192 aa, Agathis dammara
DDHGEVISEVRKSDLGPYLGLHYPATDIPQASRFLFMKNRVRMICDCCAPPVRVIEDKRLPRELNLCGSTLRAPHGCHAQYMSNMGSISSLVVAVIVNEKEEEEGDSDAQQQQKGRRLWGLVVCHHTSPRFVPFPLRYACEFLMQVFGIQLNKEVELAAQLREKHILRTQTLLCDMLLRDAPMGIITQKPNI

SEQ ID NO: 3896 - protein, 426 aa, Alkalilimnicola ehrlichei MLHE-1
MRMIRPLYSTAILLILAAGLGLGQTVWAERQQANADLPLEELQAVAEVYARIRSHYVDEVDDKALLEAAVRGMVSSLDPHSTFLDSSEFQALQEGTRGEFGGLGIEVGQEDGFIKVIAPIDDTPASRAGLRPGDLITRIDDKPVKGMSLTEAVKQMRGEPGSQITLTVVREGEDRPLTFEITRAVIQVESVRARMLEPGYGYLRISQFQERTGRDVREALSELKREADGSLRGLVLDLRNNPGGVLDGAVSVADVFLSNGRIVYTEGRDERAEMSFSATPVDMLHGAPLVVLVNQGSASASEIVAGALQDHGRAVVMGSPTFGKGSVQSILPLGRGAAVKLTTARYYTPGGRSIQDKGIQPDILSEELRVARVEREDMSPAELERHGLRQRPDVDRDDETESLAQRDFTLYEALNLLKGVGIFTGR

SEQ ID NO: 3897 - protein, 492 aa, Hypericum perforatum
MDPYKYRPSSAFNSPFWTTNSGAPVYSNDHSLTVGSRGPILLEDYHLVEKLANFDRERIPERVVHARGASAKGFFEVTHDISHLSCADFLRAPGVQTPVIVRFSTVIHERGSPETLRDPRGFAVKFYTREGNFDLVGNNFPVFFIRDGMKFPDMVHALKPNPKSHIQEDWRILDFFSHHPESLHMFSFLFDDIGIPQDYRHMEGSGVNTYTLVNKAGKVHYVKFHWKPTCGVKSLLEDEAIKVGGSNHSHATKDLYDSIAAGNYPEWKLFIQTIDPDHEDRFDFDPLDVTKTWPEDILPLQPVGRLVLNKNIDNFFAENEQLAFCPAIVVPGIYYSDDKLLQTRIFSYSDTQRHRLGPNYLQLPVNAPKSAHHNNHHEGFMNFMHRDEEVNYFPSRYDPVRHAEKYPIPPVVLNGRREKCMIAKENNFKQPGERYRSFSPDRQERFLNRWISSLSDPRVTHEIRAIWVTYWYQADKSLGQKLASRLNVRPNM

SEQ ID NO: 3898 - protein, 479 aa, Gloeobacter violaceus PCC 7421
MSSIAIVWHRRDLRVHDNPALWQASRTGGQVLAVFIVDPTIVERDDTAPARIYFLRESVLELQKAYRTIGGRLAVRVGEPVQQLVALAQAVGAGAVYFNDDIEPYARERDARAAEALRAAGITVHACAEILLHPAGEVLTAAGGKPYTVYTPFWRQWSAKPKPKPFPTPERLEAPTVEEQSFPELAQLGRPFAGELLVSPGEQSGLEQLEAFAREGLYRYGERRDLPGCDGTSRLSAHLKFGTVGIRAVWARTMDAWKQAEHDRDRAGLAVWQQELGWREFYKYELFHLPQLAGRPFRREFENFQWDEDQERFERWCQGETGYPIVDAAMRQLNTVSWMHNRLRMIVASFLTKDLLLPYGWGERYFMQKLVDGDLSANNGGWQWAASVGTDPKPLRIFNPSTQAGRYDPKAVFIRRWLPELEGVDTALLVTSERLPPLMRAQHRYAQPIVEHKRQQQVFKERYRAVRAQQADPGARDSE

SEQ ID NO: 3899 - protein, 112 aa, Zea mays
STRSAQKESAADNAGMLAGGIKDVPANENDLQLQELARFAVNEHNQKANALLGFEKLVKAKTQVVAGTMYYLTIEVKDGEVNKLYEAKVWEKPWENFKQLQEFKPVEEGASA

SEQ ID NO: 3900 - protein, 343 aa, Rhodopseudomonas palustris CGA009
MDQGQTLSVLLDSYAVDPQKKAVAAAVGAIAAGSIEISELIGQGALAGITGAAHGGSNADGDVQKDLDVKAEQIIVKSLKDVPYAALASEESDTLLDGDPNAPISIAYDPLDGSSNIDTNMTVGTIFSIIPNQPGVKPFTAAGSCQIAAGFVVYGPQTSLVLTLGDGVNIFTLDRKAKVYRLIRERVKVPADTAEYAVNASNHRHWEQPIRDFVDECIAGADGPRAKDFNMRWIGSLVAEVYRILTRGGVFLYPGDNRPGYGNGRLRLLYETHPMSFVMEQAGGAASTGRERVLDLTAKTIHQRSPLIMGSIDKVKRIELLHTDPSAASRSAPLFARRGLFRV

SEQ ID NO: 3901 - protein, 473 aa, Staphylococcus aureus subsp. aureus COL
MQDIYFLEQMSQFDREVIPERRMHAKGSGAFGTFTVTKDITKYTNAKIFSEIGKQTEMFARFSTVAGERGAADAERDIRGFALKFYTEEGNWDLVGNNTPVFFFRDPKLFVSLNRAVKRDPRTNMRDAQNNWDFWTGLPEALHQVTILMSDRGIPKDLRHMHGFGSHTYSMYNDSGERVWVKFHFRTQQGIENLTDEEAAEIIATDRDSSQRDLFEAIEKGDYPKWTMYIQVMTEEQAKNHKDNPFDLTKVWYHDEYPLIEVGEFELNRNPDNYFMDVEQAAFAPTNIIPGLDFSPDKMLQGRLFSYGDAQRYRLGVNHWQIPVNQPKGVGIENICPFSRDGQMRVVDNNQGGGTHYYPNNHGKFDSQPEYKKPPFPTDGYGYEYNQRQDDDNYFEQPGKLFRLQSEDAKERIFTNTANAMEGVTDDVKRRHIRHCYKADPEYGKGVAKALGIDINSIDLETENDETYENFEK

SEQ ID NO: 3902 - protein, 503 aa, Methanobrevibacter arboriphilus
MSNKKKFTTNKGIPVPNDQASITTGKGSNYTMLGDSHLTEKLAHFGRERIPERVVHAKGTGAYGYFEVTNDLSKYTRAKFLSEVGKKTEVFIRFSTVGGERGSADAKRDPRGTAMKYYTEEGNYDLVGNNTPIFFIRDAIKFPDFIHTQKRNPKNNLSDADMFWDFMSLTPESIHQATFLFTDRGTPQNYRHMDLFGSHSFMWYNEKNEYVWVKYHFKTAQGIQNLTNDEAIKMCGENPDHATEDLFNAIEEGNYPEWNVYVQIMTPEEAEKYEFDPFDVTKVWFHGDYPLIPLGKLVLNKNPENFFAEVEQVAFAPSNFVPGIGPSPDRLLQGRLFSYEDTQRHRLGPNHHQIPINRAKNAEVNTYQRDGPMTVTDNGGSGPNYYPNSFDGPEVDETVTPPTIELKAEINRHPRPVEDVDFFQTGELWRRVLSDEDKDHLVYNIVAHLGNAQERIQYRQCALFYKAEPEYGTRVAEGIGLDISKVKNLSEMTQEERVEATKK

SEQ ID NO: 3903 - protein, 730 aa, Aspergillus niger
MRHFWLLPAVAGIAGAQCPYLSGEMSFTQEQDNAGDTIEVTEQPIDNTLYVNDTGSYMTTDFGTPISDQTSLKAGPRGPTLLEDFIFRQKLQRFDHERVPERVVHARGAGAYGTFKSYADWSNVTAADFLSANDKETPMFCRFSTVVGFRGSVDTARDVHGHACRFYTDEGNYDIVGINFAPFFIQDAIQFPDLVHAIKPMPNNEIPQAATAHTSAWDFFSQQSTALHSALWLMSGNGIPRSFRHMNGYGVHSFRFVAANGTSKVVRTPWKSQQGVASLVWDEAQAAAGKNSDYHRQDLYNAMPNGHYPKYELQAQIMDEADMLRFGFDLLDPTKLVPEEVVPYTPLGMMELNANPTNYFAEVEQAGFQPGHVVPGIDFTDDPLLQGRLFSYLDTQLTRHGGPNFEQIPVNRPRKPVHNNNRDGFGQQQIPTNNWAYTPNSMSNGYPMQANQTQGHGFFTAPYRYASGHLVRQTSPTFNDHWSQPAMFWNSLIPAEQQMVVNAIVFENSKVNSPHVRKNVVNQLNMVNNNLAVRVARGLGLDEPSPNPTYYTSNKTSNVGTFGKPLLSIEGLQVGFLASNSHPESIKQGQAMAAQFSAAGVDLNIVTEAYADGVNTTYALSDAIDFDALIIADGVQSLFASPALANQMNSTATSTLYPPARPFQILVDSFRYGKPVAAVGSGSVALKNAGIDSSRSGVYTGSSETTEKIAKEVLEGLYTFRFVDRFALDE

SEQ ID NO: 3904 - protein, 222 aa, Glycine max
MGRGKIEIKRIENTTNRQVTFCKRRNGLLKKAYELSVLCDAEVALIVFSSRGRLYEYSNNNIRSTIERYKKACSDHSSASTTTEINAQYYQQESAKLRQQIQMLQNSNRHLMGDALSTLTVKELKQLENRLERGITRIRSKKHEMLLAEIEYFQKREIELENENLCLRTKITDVERIQQVNMVSGPELNAIQALASRNFFNPNMLEGGTVYPHSDKKILHLG

SEQ ID NO: 3905 - protein, 84 aa, Glycine max
LLFIFNFHPKDSYDSYSIGVEEAGEYQIILNTDEIKYGGQGILKEEQYFLKTISRRVDGLRNCLEVSLPSRTSQVYKLRRILRI

SEQ ID NO: 3906 - protein, 547 aa, Bartonella henselae str. Houston-1
MAAKEVKFGREARERLLRGVDILANAVKVTLGPKGRNVVIDKSFGAPRITKDGVSVAKEIELEDKFENMGAQMLREVASKTNDIAGDGTTTATVLGQAIVQEGVKAVAAGMNPMDLKRGIDAAVDEVVANLFKKAKKIQTSAEIAQVGTISANGAAEIGKMIADAMEKVGNEGVITVEEAKTAETELEVVEGMQFDRGYLSPYFVTNAEKMVADLDDPYILIHEKKLSNLQSLLPVLEAVVQSGKPLLIIAEDVEGEALATLVVNKLRGGLKIAAVKAPGFGDRRKAMLEDIAILTSGQVISEDVGIKLENVTLDMLGRAKKVNISKENTTIIDGAGQKSEINARVNQIKVQIEETTSDYDREKLQERLAKLAGGVAVIRVGGATEVEVKEKKDRVDDALNATRAAVEEGIVAGGGTALLRAANALTVKGSNPDQEAGINIVRRALQAPARQIATNAGEEAAIIVGKVLENNADTFGYNTATGEFGDLIALGIVDPVKVVRSALQNAASIASLLITTEAMVAEVPKKDTPVPPMPGGGMGGMGGMDF

SEQ ID NO: 3907 - protein, 190 aa, Agathis dammara
DEHGEVVAEIRRSDLEPYLGLHYPATDIPQASRFLFMQNRVRMICDCRAAPVKVIQAEELKQPLCLVGSTLRAPHGCHAQYMANMGSIASLVMAVVINGNEDEGGGSGSGRGSMKLWGLVVCHHTSPRAVPFPLRYACEFLMQAFGLQLNMELQVAAQLTEKHILRTQTLLCDMLLRDAPIGIVTHSPSI

SEQ ID NO: 3908 - protein, 464 aa, Mesoplasma florum L1
MNKFPKDFLWGASTSAYQFEGAIKQGGKVSSIMDRFDEQPSYPKGITGFKEASDHYNHWKEDVKLMSEMGFKSYRFSISWPRIIKNKEGEINKEGIKFYNDLIDELFKHKIEPIVTMFHFDIPDFIQEIGGVCTNEFTKQFEIYSEVLFKNFGSKIKYWLTINELNMFALAGQIIGVVPSDQKINSWQLMHHLNVAQAKAIVLCRKICPSAKIGPAPNISTVYPDSNKPLDYVAKLNLDMVRNWVYLDIVCRGEYSPIFINGLKKMGLEITITEEEKQILKNSKPDFIAFNYYSTMTVKMPTEESLKNTKKDQQQGLSMPGFGESVKNDKLEKTQFGWEIDPVGFRNTLREVYDRYQLPIMITENGIGARDVLEEDGKIHDNYRIEYYEKHIQQMALAIADGVEMIGYMPWSAIDLVSTHEGISKRYGFVYVNRDEFDLKDMKRYKKDSFHWYKELIKNNGENI

SEQ ID NO: 3909 - protein, 434 aa, Ashbya gossypii ATCC 10895
MPLLQQNPPIQPPYSRASQKLKSLLSSYGENTSTTTAAKEMNGIAPMNLIEKSVVHPPRTIYTKANFSIPGHYEVLQMLGKGSYGTVVSAIDNLNANYPIRIAIKKITNIFQREVLLKRAIRELKFMHYFKGHKNIVSLINLEIVNEKPYDGLYCYQELIDYDLARVIHSNVQFSEFHIKHFTYQILCGVKYIHSADVIHRDLKPGNILCSISGQLKICDFGLARGISPLFTNTKTSNHITNYVATRWYRAPELILSHKRYNKSIDMWAIGCILAEFYGRKPIFMGQDSMHQISEIVKVLGTPSRDTIIKYGSSRAYDIFCPPKPQYAKIPWAEIYPFAGPDALDLIERLLDWDPDRRLTVEEAIEHDFVKSVRDVNDEPCCPHGPFNFSYEAEFKSMSNLREVLYAEVKQFQEECATKDVVPSLPIPQQIYPI

SEQ ID NO: 3910 - protein, 1124 aa, Cucurbita pepo
MSTSRPSQSSSNSGRSRHSTRIIAQTSVDANVQADFEESGNSFDYSSSVRVTSDVSGDQQPRSDKVTTAYLHHIQKGKLIQPFGCLLALDDKTFKVIAYSENAPEMLTMVSHAVPSMGDYPVLGIGTDVRTIFTAPSASALLKALGFGEVTLLNPILVHCKTSGKPFYAIVHRVTGSLIIDFEPVKPYEGPVTAAGALQSYKLAAKAITRLQSLPSGSMARLCDTMVQEVFELTGYDRVMAYKFHDDDHGEVISEVAKPGLQPYLGLHYPATDIPQAARFLFMKNKVRMIVDCRAKHLKVLQDEKLQFDLTLCGSTLRAPHSCHLQYMENMNSIASLVMAVVVNEGDEENEGPALQQQKRKRLWGLVVCHNSSPRFVPFPLRYACEFLAQVFAIHVNKELELENQIIEKNILRTQTLLCDMLMRDAPLGIVSRSPNIMDLVKSDGAALLYKKKIWRLGLTPNDFQLLDIASWLSEYHMDSTGLSTDSLYDAGYPGAIALGDEVCGMAAVRITNNDMIFWFRSHTASEIRWGGAKHEHGQKDDARKMHPRSSFKAFLEVVKTRSLPWKDYEMDAIHSLQLILRNTFKDTDATEINRKSIQTTLGDLKIEGRQELESVTSEMVRLIETATVPILAVDLDGLINGWNTKIAELTGLPVDKAIGKHLLTLVEDSSVEVVRKMLFLALQGQEEQNVQFEIKTHGSHIEVGSISLVVNACASRDLRENVVGVFFVAQDITGQKMVMDKFTRLEGDYKAIVQNPNPLIPPIFGSDEFGWCSEWNPAMAKLTGWSREEVIDKMLLGEVFGVHKSCCRLKNQEAFVNLGIVLNNAMCGQDPEKASFGFLARNGMYVECLLCVNKILDKDGAVTGFFCFLQLPSHELQQALNIQRLCEQTALKRLRALGYIKRQIQNPLSGIIFSRRLLERTELGVEQKELLRTSGLCQKQISKVLDESDIDKIIDGFIDLEMDEFTLHEVLMVSISQVMLKIKGKGIQIVNETPEEAMSETLYGDSLRLQQVLADFLLISVSYAPSGGQLTISTDVTKNQLGKSVHLVHLEFRITYAGGGIPESLLNEMFGSEEDASEEGFSLLISRKLVKLMNGDVRYMREAGKSSFIITVELAAAHKSRTT

SEQ ID NO: 3911 - protein, 190 aa, Angiopteris evecta
DEHGQVVAEIRRLDLQPYLGLHYPATDIPQASRFLFMKNRVRMICDCCAPPVKVIQDKELRLPLSLAGSTLRAPHGCHAQYMATMGSIASLVMAVVVNDNDENSTTRAHQPKNRKLWGLVVCHHTTPRAVPFPLRSACEFLMQVFGLQLNMEVELAAQMREKHILRTQTLLCDMLLRDAPIGIVTQSPNI

SEQ ID NO: 3912 - protein, 685 aa, Gibberella zeae PH-1
MSWFMGVDMDGVISSIVTLLPVRFDTTSIISGRLTVNGSQQLVLGQIGSILSFRSPRVIYWFRTDLRLHDSPALKAALDLDPSVFWPIFTWDPHYVYRARGGLNRWQFLLDCQNDLSKSITKVNSNSKLFVLREAPQTLFPKLFKAWKVTHIVFEKDTDSYARERDSIVTQAAKDAGVEVIIRSGRTLWDSDQIVEKHGGKPTMSITQLQAAGSKLGQVKKPIPAPKNLPDPGDMPVNFDQDEPDTKPDFNSEIRTEGDKTYTKISGPKGDFAIETMEELGFPPATTPHRGGETLALKALDEIIADKKYTATFQKPKTSPAQFEPQATTLLSPHLHFGSLSVREFYWRVKDVVDSYKGASSPPESLIGQLLFRDMYFAAQAALGYVFSQTANNPYCRFIPWHLPSKRDPETGLVTGEYHVDSEEADIWFKRWKAGMTGFPWIDALMRQLKDEGWIHHLGRHAVACFLTRGGCYIDWERGCEVFEEWLIDHEPACNVGNWQWLSCSAFFSQYFRCYSPVAFGQKWDKKGEFIRRYVPELKNMDAKYIYEPWKAPLTDQKKAGVRVKGDGLNNVEEGTYPKPMFDFAKRRDVCISSMKVAYQVGLHGNDGQALDGTWRKLFPTDRGEVQGDVESGYGEHADEEGKSDNEAKEEGEGTSSVKKEDDTTKGKRSARRHSTEKVPKKKKV

SEQ ID NO: 3913 - protein, 190 aa, Angiopteris evecta
DEHGEVVAEIRRSDLEPYLGLHYPATDIPQASRFLFMKNRVRMICDCRTPPVRVLQDKELRQPLSLAGSTLRAPHGCHSQYMANMGSIASLVMAVVVNDNDEDSSNRASHQKSRKLWGVVVCHHTTPRAVPFPLRSACEFLTQVFGLQLNMEVELAAQMREKHILRTQTLLCDMLLRDAPIGIVTQSPNI

SEQ ID NO: 3914 - protein, 404 aa, Lactococcus lactis subsp. lactis Il1403
MRKFEKSHKLDNVSYDIRGPVLDEAQRMRANGEKILRLNTGNPAEFGFLAPDEVISDLIQHAVDSEGYSDSKGIFSARKAIMQYCQLKGFPNLDINDIFTGNGVSELIVMAMQGLLDTGDEVLIPMPDYPLWTASVSLAGGTAVHYLCDEQAGWFPDIDDIRSKITSNTKAIVLINPNNPTGALYSKDLLLEIVQVARENNLIIFSDEIYDRLVMDGAVHVPIASLAPDLFVVTMNGLSKSHRIAGFRVGWMVLSGEKSHVKGYIEGLNMLASMRLCSNVLAQSVVQTSLGGTQSVDKLLLPGGRVYEQREFIYKAINDIPGLSAVKPQAAFYIFPKIDREMYKIDNDEQFVLDFLKQEKILLVHGRGFNWKEPDHFRIVYLPRVDELAEIQEKMERFLWQYRK

SEQ ID NO: 3915 - protein, 461 aa, Oryza sativa
MVNGEAEAECTRASLLGRYEIGRTLGEGNFGKVKYARHLATGAHFAIKILDRNKILSLRFDDQIRREIGTLKLLKHPNVVRLHEVAASKTKIYMVLEYVNGGELFDKIAVKGKLSEHEGRRLFQQLIDAVSYCHDKGVYHRDLKPENVLVDRRGNIKISDFGLSALPQHLGNDGLLHTTCGSPNYIAPEVLQNRGYDGSLSDIWSCGVILYVMLVGYLPFDDRNLVVLYQKIFKGDTQIPKWLSPSARDLLRRILEPNPMKRINIAGIKEHEWFQKDYTPVVPYDDDDDNYLDSVLPIKEQIDEAKQEKPTHINAFQLIGMASALDLSGFFEEEDASQRKIRFTSTHSPKDLFDKIENVVTEMGFQVQRGNSKLKVMKNGKGSKNLRNPSSFLVCTEVVELGPSLYVVELKKSHGDPILYRQLCERLSDDLGVCKTEQIQRTESLEDDLESFDSGSSLPGF

SEQ ID NO: 3916 - protein, 141 aa, Chromobacterium violaceum ATCC 12472
MSMLPARHSLFDEFFRDFTPGFLVKPLHGDALPSQIKMDVKETGEAYQVEAELPGVGKEDIHVEIDGALVTIKAEIKQFDQQGKDERSLRSERYYGLVSRSFQLPQEIDRDAAGAKYENGVLSLTLPKRRNSGVGQRLRIE

SEQ ID NO: 3917 - protein, 332 aa, Salmonella typhimurium LT2
MKTLGEFIVEKQHEFSQATGELTALLSAIKLGAKIIHRDINKAGLVDILGASGAENVQGEVQQKLDLFANEKLKAALKARDIVAGIASEEEDEIVVFEGCEHAKYVVLMDPLDGSSNIDVNVSVGTIFSIYRRVTPVGTPVTEEDFLQPGNKQVAAGYVVYGSSTMLVYTTGCGVHAFTYDPSLGVFCLCQERMRFPEKGKTYSINEGNYIKFPNGVKKYIKFCQEEDSSTSRPYTSRYIGSLVADFHRNLLKGGIYLYPSTASHPQGKLRLLYECNPMAFLAEQAGGKASDGKERILDIIPESLHQRRSFFVGNRHMVDDVERFIREYPDA

SEQ ID NO: 3918 - protein, 285 aa, Nostoc sp. PCC 7120
MTVKHLAIAPEGKKSLRLSWTNVAFFTTIHALALLAPWFFSWSALGLLLFLHWLFGSIGICLGYHRLLSHKSFQVPKWLEYAIATIGALAMQGGPIFWIGGHRQHHAHTEDVYLDPYSSQRGFWWSHMLWILYPRSEFFDYEIYQKYAPDLARQPFYRWLDRYFLLLQIPFGLMLYAIGGWSFVIYGVVLRAVLLWHSTWFVNSATHMWGYRTFNADDNARNLWWVSIVTYGEGWHNNHHTYPNVAKAGFQWWEVDVTWWSIKLLQTLGLAKKVVLPPSQRMNQG

SEQ ID NO: 3919 - protein, 474 aa, Streptococcus pyogenes M49 591
MGIFPKDFLWGGAVAANQVEGAFEADAKGWSVQDVLPNGGLGEWTDSPTSDNLTLEAIDFYHRYKEDIALFAEMGFKVFRTSIAWSRIFPNGDDDQPNEAGLQFYDDLFDELLNYGIEPLVTLSHYETPLHLAKAYNGWTDRRLIGFFERFAQTVMERYKDKVKYWLTFNEVNSILHMPFTSGGIMTEKEKLSLQDLYQAIHHELVASASVTKLAHEINPDVKVGCMILAMPAYPMTSDPRDILAAHAFENLNLLFSDIHVRGKYPSYIKSYFKENGIEIVFEDGDKELLAEHTVDFLSFSYYMSVTQAHNPEAYTSGQGNILGGLSNPYLESSEWGWQIDPIGLRLVLNQYYDRYQIPLFIVENGLGAKDQLVQTADGSMTVHDDYRIDYMSQHLVQVAKAIEDGVEVMGYTAWGCIDCVSMSTAQLSKRYGFIYVDRNDDGTGQLTRYKKKSFDWYRQVIQTNGRYLEDNFS

SEQ ID NO: 3920 - protein, 541 aa, Streptomyces coelicolor A3(2)
MAKILKFDEDARRALERGVNKLADTVKVTIGPKGRNVVIDKKFGAPTITNDGVTIAREVEVEDPYENLGAQLVKEVATKTNDIAGDGTTTATVLAQALVREGLKNVAAGASPALLKKGIDAAVAAVSEDLLATARPIDEKSDIAAVAALSAQDQQVGELIAEAMDKVGKDGVITVEESNTFGLELDFTEGMAFDKGYLSPYFVTDQERMEAVLDDPYILINQGKISSIADLLPLLEKVIQANASKPLLIIAEDLEGEALSTLVVNKIRGTFNAVAVKAPGFGDRRKAMLQDMAVLTGATVISEEVGLKLDQVGLEVLGTARRITVTKDDTTIVDGAGKRDEVQGRIAQIKAEIENTDSDWDREKLQERLAKLAGGVCVIKVGAATEVELKERKHRLEDAISATRAAVEEGIVSGGGSALVHAVKVLEGNLGKTGDEATGVAVVRRAAVEPLRWIAENAGLEGYVITSKVADLDKGQGFNAATGEYGDLVKAGVIDPVKVTRSALENAASIASLLLTTETLVVEKKEEEEPAAGGHSHGHSH

SEQ ID NO: 3921 - protein, 253 aa, Prochlorococcus marinus subsp. marinus str. CCMP1375
MKKKEEGFIIHPIPVLMDNIIWIWVKEKQAIVVDPAISEPVINLLKGNGLSLHSVLQTHHHEDHIGGTQELINVWPSASVIAAKSDLDRIQFQTKSVVDNEELDILGQKIKVIEVPGHTSNHICFFLQGSKESKIDPVLFCGDTLFGAGCGRLFEGTPEQMFNSLSRINNLPKNTKIYCAHEYTEANLRWAKSIFPEDIYIEERLKEVILRKSKGFLSIPSKLSEERKTNLFIRASNQREFAQLRLHKDNWKS

SEQ ID NO: 3922 - protein, 480 aa, Streptococcus pyogenes M49 591
MLAFPKEFWWGGATSGPQSEGRFAKQHRNLFDYWYEEEPDLFYDYVGPDTASDAYHQIESDLALLASLGHNSYRTSIQWTRLIDDFEQATINPDGLAYYNRVIDACLANGIRPVINLHHFDLPIALYQVYGGWESKHVVDLFVAFSKVCFEQFGDRVKDWFVHNEPMVVVEGSYLMQFHYPAIVDGKKAVQVAYNLALATAKVIQAYRRGPAELSDGRIGTILNLTPAYPASQSEADTAAAHFAELWNNDLFMEAAVHGKFPEELVAVLKKDGVLWQSTPEELALIAENRVDYLGLNFYHPKRVKAPDVIPVISPSWSPEWYYDAYLMPGRRMNVDKGWEIYPEAVYDIAVKMRDHYDNIPWFLSENGVGISGEDRYRDETGQIQDDYRIRFLKEHLTYLHKGIEAGSNCFGYHVWTPIDGWSWLNAYKNRYGLVENNIHTQVRRPKASAYWFKKVATHNRLISLEVMEEFGGSASHPSD

SEQ ID NO: 3923 - protein, 395 aa, Methanosarcina barkeri str. fusaro
MNEQGLSEKEIFSYLEDVKSEDTDYYRVLSSMCTHPHRIAVEAHRLFIEANLGDLGLFAGAHRLEKEVIRMLGELLHAQSVEIPSGEACESSVCGYLTTGGTESNIQAIRGMKNLVTEDGKKSGEILNIVVPESAHFSFDKVANMMGIEVKRASLDPEFRVDIASAESLIDANTIGLVGIAGNTEFGQVDPIEELSKLALENELFLHVDAAFGGFVIPFLEKPYSFDFKVPGVTSIAIDPHKMGLSTIPSGALLFRSPFFMDSLKVNTPYLTTKSQFTLTGTRSGASAAATYAVMKYLGREGYRKNVQYCMQLTTKLVKEARKFGFEPLIEPVMNVVDLRVPNPDIVREQLLKKFGWNVSITRNPRSLRLVLMPHNTARDIEEFLQDLRKVTTEL

SEQ ID NO: 3924 - protein, 543 aa, Arabidopsis thaliana
MRRFVIGQAKNLIDQSRRRQLHHHKNLSFVSLIPPFSAPSDSSSRHLSSSSSSDMSASDSSSSLPVTLDTINPKVIKCEYAVRGEIVNIAQKLQEDLKTNKDAYPFDEIIYCNIGNPQSLGQQPITFFREVLALCSYTALLDESATHGLFSSDSIERAWKILDQIPGRATGAYSHSQGIKGLRDAIADGIEARDGFPADPNDIFMTDGASPGVHMMMQLLITSEKDGILCPIPQYPLYSASIALHGGTLVPYYLDEASGWGLEISELKKQLEDARSKGITVRALAVINPGNPTGQVLSEENQRDVVNFCKQEGLVLLADEVYQENVYVPDKKFHSFKKVARSMGYGEKDLALVSFQSVSKGYYGECGKRGGYMEVTGFTSDVREQIYKMASVNLCSNISGQILASLIMSPPKPGDDSYESYIAEKDGILSSLARRAKTLEEALNKLEGVTCNRAEGAMYLFPCLHLPQKAIAAAEAEKTAPDNFYCKRLLKATGIVVVPGSGFRQVPGTWHFRCTILPQEDKIPAIVDRLTAFHQSFMDEFRD

SEQ ID NO: 3925 - protein, 195 aa, Azolla filiculoides
DEHGEVVAEIRKPDMAPYLGLHYPATDIPQASRFLFMKNRLRMVCDSRAVAVRVIQDTQLRQPLSLAGSTLRAPHGCHSQYMENMGSIASLVMAVIVNDKGECGSSNGSNPQPRPRMRKLWGLVVCHHTTMRAVPFPLRSACELLVQVFGLQLNMEAELAAQMRDKHILRTQMLLCDMLLRDAPIGIVSKSDPNI

SEQ ID NO: 3926 - protein, 380 aa, Glycine max
MQQSHINATPYLWCEQGCPNLQLASFEFWSVICCFGERVDMDERYETLKELGSGNFGVARLAKDKETGELVAIKYIERGKKIDANVQREIVNHRSLKHPNIIRSFLQVFLTPTHLAIVLEYAAGGELFERICNAGRLSEDEARFFFQQLISGVSYCHSMQICHRDLKLENTLLDGNPAPRLKICDFGFSKSALLHSQPKSTVGTPAYIAPEVLSRKEYDGKVADVWSCGVTLYVMLVGAYPFEDPEDPKNFRKSIGRIMSVQYAIPDYVRVSKECRHLISRIFVANPAKRINISEIKQHLWFRKNLPREIIEAERRGYEETQKDQPSQSVEEIMQIIQEARTKIHTGEQAGTGTSDVVRGDEANEEVDINDHFAKYLTLD

SEQ ID NO: 3927 - protein, 644 aa, Listeria monocytogenes str. 4b F2365
MLFLKFNSMFSPIDIGPMKVPNRFVVSPMCNNYANTDGTLSDTSLAYYKERALGGFGLITFEATVVDVRAKGGANKACLYSDHQIASFKRVIDVCHDAGAKISVQLQHAGPEGNSKVSGYPLRAASAIASAAGRNTPEAISREELYELIELYGEAALRAKKAGADAVEVHCAHGYLVSSFLSARTNKRVDEFGGCFENRMRLPRLIIESIRKRVGHSIAILCRINSTDGVEGGLSVQDSATVAAYLEDCGLDGLHVSRSVHIRDEYMWAPTVLHAGFSSDLVTQIKRAVSIPVITVGRFTEPHYAELMVREGRADLVAFGRQSLADPETPNKAAAGKLDELLPCIACLQGCVANMYAGKPITCLVNPLLGRESEAYSPKTPSKKVVVIGGGVGGLYAGWMAGSRGHDVTVYEASDMIGGQMRLAAYPPGKGDLTNMVRSYIKKCEQFDVEIKTNTPVTPELIQEVAPDAVIIATGATPLVLPIPGIEDAGLIHAVDLLDGKEKCGQKVLVVGGGMVGSETAAFLGEAGHDVTVVELRDEVGADVISEHRKFLMRDFDEYKIKSVTNAKVTSFFEDGVTYSLADNKEHRIDGFDSVVLAMGSRAYNPLEEAIKKMVPETYVIGDAIRARRALDATKEALDAVLQL

SEQ ID NO: 3928 - protein, 238 aa, Oryza sativa
MAVEEVLDGAAPMLSSSPAASGEEVGARKPQQRCGGAEGWSKRKRSRRRHRDRAAAPPPHGSEEEHLALSLLMLARGHRDPSPAPQEQHGCSVCGRVFSSYQALGGHKTSHRPRTPPTMAAVVVVDEPAATTASPAASSSNSGSGSGGGGGNKVHECSVCKKTFPTGQALGGHKRCHYEGPIGSGGGAAVAGRGFDLNLPAVALPDIMTERCLPAAAEEEEVLSPLASFKKPRLMIPA

SEQ ID NO: 3929 - protein, 194 aa, Azolla filiculoides
DEHGEVLAEIRRSDLEPYLGLHYPATDIPQASRFLFMKNRVRLIYDCRAQPVRIIQDKELRQPLSLAGSTLRAPHSCHGQYMANMGTIASLVMAVVVNDNDEETGNRTQRLNPSPKMRRLWGLVVCHHTTPRVVPFALRSACEFLMQVFGLQLNMELELAAQMREKHILRTQTLLCDMLLRDAPIGIVSESPSI

SEQ ID NO: 3930 - protein, 547 aa, Thermoplasma volcanium GSS1
MVNPGDKGRIGNVEIKNRIVMAPMISNIANSDGSPSEPYISYMRERARGGIGLIITEYTYVDPESGKGSRNQLGIYDDIFLPKFSRLAEAVHDYGSKIFVQLVHAGAKALPSSSYKIAPSKTSFDKNAREMDSSDIERVIRNYERAASIARRAGFDGIEIHGAHGYLVDEFISPYWNRRTDKYGGSLEGRIKFPQEVIDAVKSEVDIPVGIRLSLYEDEVGGYGPDYGIKVAKSLVNIDYVHFSAGNNDPPGSSAPFYSNHTHILSKFPGGSNKPTILVGSVTTAEDVRNVLKVADFVAVGRAVLADPYFARKVIDNYGHIRPCIRCNQACRNLAYGEVRCTVNPYFAFPRQLRKLSGDVVIVGGGVKGLEAARFAALNGLSVTLYEQDDKIGGQLNTIYDEAKRKEFNRLIEYYKEVLDRLGVEIITSEKYKGKGIYCLPDKTYPDLQEKPEIFIDSNVYMYHDIALKYSSTSKVFVTYRSLSSLDRARKAAFLKIAESRGIKFIEKADNYDVSIYEEKQYDIGEAMKSGINEVEKYIDDRINEFL

SEQ ID NO: 3931 - protein, 479 aa, Alkalilimnicola ehrlichei MLHE-1
MGDATLVWLRRDLRLTDNPALDQAARRGGPVIAVYLHAPEETPQYPPGAASHWYLHHSLKALGPALAQAGIPLVLRRGPALATLRALIRATGAGAVYWNRLYEPDAVARDRTVKQALRTEGLDCRSFPTALLHEPWAVRNQADRPYRAFTPFWRACRRQPPPAAPLPAPDLRDRPVPAVEGLDLAALGLLPRTPWDTGLRNTWQAGESAALARLEAFAADRLARYAQDRDRPAEPGTSGLSPALHFGELSPRQVWWQVMAAREAGVPEDACETFLSELGWREFAHHLLWSHPDLGDAPVDDRFGAFPWRPDPGDGWLHAWQAGRTGIPLVDAGMHELWQTGWMHNRVRMVTGSFLVKHLRLPWQRGERWFRDTLVDWDAASNAMGWQWVAGCGADAAPYFRIFNPVRQGERFDPQGRYVRRWLPALANLPDKYIHAPWTAPEAVLRRAGVTLGSDYPCPLIDLRLGREQALSAFQAIKG

SEQ ID NO: 3932 - protein, 247 aa, Petunia x hybrida
MVFPNQEFESSSSQRKSGRGKIEIKRIENTTNRQVTFCKRRNGLLKKAYELSVLCDAEVALIVFSSRGRLYEYANNSVRATIDRYKKHHADSTSTGSVSEANTQYYQQEAAKLRRQIRDIQTYNRQIVGEALSSLSPRGLKNLEGKLEKAIGRVRSKKNELLFSEIELMQKREIEMQNANMYLRAKIAEVERATQQMNLMHGGGSEYQQQPMSSTSQPYDARNFLPVNLLEPNPHYSRQDQTALQLV

SEQ ID NO: 3933 - protein, 208 aa, Desulfovibrio vulgaris subsp. vulgaris str. Hildenborough
MPIKTFPLGPLETNCHLVHNGRTAVVVDPGGAPRPVLNYLEMQGLTLTHILNTHLHFDHIYGNAALAAATGAPILASAGDAFLRQTELGKGGAFGFPAVDDFTSIDLEPGEHRFGDLACTAFATPGHTPGSLSFYFPEEDTIIVGDLIFYRSIGRTDFPGGDLEKLRASVRDHIFTLPGKTRILPGHGPATSVDDETRNNPYFGDFAV

SEQ ID NO: 3934 - protein, 173 aa, Triticum aestivum
  misc_feature (92)..(92): Xaa can be any naturally occurring amino acid
  misc_feature (141)..(141): Xaa can be any naturally occurring amino acid
  misc_feature (160)..(160): Xaa can be any naturally occurring amino acid
  misc_feature (166)..(166): Xaa can be any naturally occurring amino acid
PFNQIISANIGNPQQLGQKPITFFRQVLSLLEYPTLLENEDVLLKQLGYKVDVIERAKWLLKSVGAIGAYSASNGAPAIRESIANFIERRDXHPADPKDIYLSAGASSGVNTLLSIICAKPTTGVLVPIPQYPLYTATLSXLGAKCVPYYLDESKGWGTXVEAIKXAYEQGNF

SEQ ID NO: 3935 - protein, 502 aa, Oryza sativa (japonica cultivar-group)
MMDGRSILMGRYEVGKQLGQGTFAKVYYARNLTTGQAVAIKMINKDKVMKVGLMEQIKREISIMRLVKHPNVLQLFEVMASKSKIYFVLEYAKGGELFNKIAKEGKLSEDSARRYFHQLINAVDYCHSRGVYHRDLKPENLLLDENENLKVSDFGLSALAESKRQDGLLHTTCGTPAYVAPEVLSRKGYDGAKADVWSCGVILFVLVAGYLPFHDPNLIEMYRKICRADFRCPRYFSAELKDLIHKILDSDPSTRISIPRIKRSTWYRKPVEINAKNSEAATTNSISSGVATTSGSAECSTSEENQGSLSLPNLNAFDIISLSTGFNLSGFFEDTHGHQEERFTTRQPVTTVLGKLKELAKRLKLKVKKKDNGVLRLAAPKEGKKGFLELDAEIFEVTPSFLLVELKKTNGDTMEYRKLVKEDIRPALKDIVWVWQGDEHLNSQSILQGEQQQSPLPPELPQDQLQPSLPQQEKQDMPEPPLLPQVPQEEVQTSIPAEQTKN

SEQ ID NO: 3936 - protein, 661 aa, Bacillus cereus E33L
MEQLEHHVTDNQRKHALTTNQGVKIAEDEFSLKMGLRGPTLMEDFHFREKMTHFDHERIPERIVHARGVGAHGYFQLYESLEAYTKADFLTNPSKKTPVFVRFSTVQGSKGSNDTVRDVRGFATKFYTDEGNYDLVGNNMPVFFIQDAIKFPDFVHAVKPEPHNDIPQGASAHDTFWDFVAHNPESTHMVMWQMSDRAIPRSLRMMEGFGVHTFRLINKEGKAHFVKFHWKPTLGVHSLVWDEAQRIAGKNPDFHRQDLYEAIEKGDYPEWELGLQLIPEEDEHAFDFDILDPTKLWPEEEVPVKLVGKMTLNKNVDNFFAETEQVAFHPGHVVPGIDFSNDPLLQGRLFSYTDTQLSRLGGPNFHQIPINQPVCPFHNNQRDGMHQMQIHRGQTSYHPNGLNDNQPATVQAEQGGYEHYQEKIDGHKIRGRSKSFLNFYSQAKLFYNSMSPIEKQHIKDAFCFEVGKCKSDMVKANVITLLNHVDRQLAKEVANIIGAPLPKENHEVNSDAKSPALSMSNTICKSDSKNVAILLNGDPSVSLLSEWIQAFAQHRINYGIIDKKIYHFTDSIKVTDTYTTADSSLFDAVLVFSSESVIHSPVLEFAETTFKHFKPIAHVLSNPHALDNSKIKLDGAGIYNLANTSIESFIEGIAQGRFWNR

SEQ ID NO: 3937 - protein, 478 aa, Lactococcus lactis subsp. lactis Il1403
MEHKKLKAFPNDFLWGSASAAYQVEGAPFEDGKKASVWDNFVRIPGKTFKGTNGDVAVDHYHRYKEDVALMKELGLKSYRFSIAWTRILPDGRGEVNQAGLKFYEDLIDELIANEIEPIVTIYHWDLPQALEDLYGGWESREIIADFVNYAEVLFNAFKGKVKYWVSLNEQNIFTSQGWSLATHPPGKRDMKLFYQVNHIANLTNAAVINKFHELEMDGQIGPSFAYTPQYAKDSDPLNVLAAENAEELYSHFWMDVYLYGEYPIAAMAYLRENGLAPEFEAGDAELLKSAKPDFLGINYYQTATNAWNPVDGGVGVGSFNTSGKKGTTKESGIPGLHKKIQNPFIDRTNWDWEIDPEGLRIALRRITSRYRIPVMITENGLGEYDKVEDGKIHDDYRIKYLESHVKAIKEAMTDGAKVIGYHTWSYTDLLSWLNGYQKRYGFVYVDQDETMEGSLKRIPKDSYYWYQHLIETNAEEV

SEQ ID NO: 3938 - protein, 242 aa, Akebia trifoliata
MGRGRVGLRRIENKINRQVTFAKRRNGLLKKAYELSVLCDAEVALIIFSNRGKLYEFCSSSSMFKTLERYQKCNFGAPEPNVSTREALEHSSHQEYLKLKARVEGLQRSQRNLLGEDLGPLSGKELETLERQLDMSLKQIRSTRTQYMLDQLSDYQRREQMLSEANKALRRRLEEGSQPNPHQWDPNVQVVNFGRQQAPAQGEGFFQHIECEPTLHIGYQPDQITVAAAGPSMNNYMQGWIG

SEQ ID NO: 3939 - protein, 529 aa, Glycine max
MTQSRKPRKPNPQAREAQESPSSSFSSSGMKLIVPLQGVVQGRGGLLLGTLVPCTLFYFLQLYLKRRRSNFSPPSPSSSESTLPRTSSRSNLSTRGSISRVRVSKLATSISKPDESLYYVGLERVSRDPYDALENPNGIIQLGLSDNKLCLDLIGEWVARNLEGSISGGVGLGINGIVPYQSFDGVMELKMALSDFMHQVMGGSVKFDPSNMVLTAGATPAIEILSFCLADHGNAFLVPTPYYPGFDRDVRWRPGVDLIPVHCRSTDNFDLNITALEQAFSQARKRGVKVRGILISNPSNPVGNMMTQDMLYSLLDFAEEKNIHIIADEVFAGSTYGSEKFVSVAEILDSDYIDKSRVHIIYGLSKDLSLAGFRVGVICSFNESVLAAAKKLSRFSSISAPTQRLVTSMLSDKRFIQEYFETNRKRIRQMHDEFVGCLSKLGIKCAKSSAGMYCWVDMSGLIRPYSEKGEIELWGKFLSVAKINITPGSACHCIEPGWFRICFTTITLEEIPMVIDRIRRVVESCNFSS

SEQ ID NO: 3940 - protein, 229 aa, Akebia trifoliata
MQKREGDMGRGKIEIKRIENTTNRQVTFCKRRNGLLKKAYELSVLCDAEVALIVFSSRGRLYEFSNSSIKSTIERYKKASADSSNTTSIIEANAHYYQHEATKLRQQIQNLQIANRQLMGDSLSSLTVKELKQLENRLERGLTRIRSKKQEIMFAEIEYMQKREVELQKENMYLRAKIAENENAQQTSMVPAQEFDAIQTFDSRNYFQMNMLEGGAAYSHADQTALHLG

SEQ ID NO: 3941 - protein, 548 aa, Salmonella enterica subsp. enterica serovar Typhi Ty2
MAAKDVKFGNDARVKMLRGVNVLADAVKVTLGPKGRNVVLDKSFGAPTITKDGVSVAREIELEDKFENMGAQMVKEVASKANDAAGDGTTTATVLAQSIITEGLKAVAAGMNPMDLKRGIDKAVAAAVEELKALSVPCSDSKAIAQVGTISANSDETVGKLIAEAMDKVGKEGVITVEDGTGLQDELDVVEGMQFDRGYLSPYFINKPETGAVELESPFILLADKKISNIREMLPVLEAVAKAGKPLLIIAEDVEGEALATLVVNTMRGIVKVAAVKAPGFGDRRKAMLQDIATLTGGTVISEEIGMELEKATLEDLGQAKRVVINKDTTTIIDGVGEEAAIQGRVAQIRQQIEEATSDYDREKLQERVAKLAGGVAVIKVGAATEVEMKEKKARVEDALHATRAAVEEGVVAGGGVALIRVASKIADLKGQNEDQNVGIKVALRAMEAPLRQIVLNCGEEPSVVANTVKGGDGNYGYNAATEEYGNMIDMGILDPTKVTRSALQYAASVAGLMITTECMVTDLPKSDAPDLGAAGGMGGMGGMGGMM

SEQ ID NO: 3942 - protein, 487 aa, Triticum aestivum
MGDRPKLPARYEQVKLLGEGNFAKVYLARHMDTKEEVAIKVMDKEKLIKLGAVQQIKREIAVMRRLRHPNIVQLHKVMACKSRIFVVMEYVRGGPLYRHIPANSGLKEDETRRIFQQLVSALTFCHAQGVYHRDIKPDNLLVDEHGNLKVADFGLSAHADTARREALLHTVCGTPLYVPPEVFARRGYDGAKADAWSCGIVLFVLAAGRKPFRDDDFITLYRTICRGDYRCPRTFSPELVRIVRRLLQPNPAHRITLLQIKETDWFKKGFKEISFYIDNKDCLRSLDGSEEPDLCDSDSEDETAMSSSSSGSSSPVAHGDGGGMHTSVSAPSLVNLEKMHIAAARAPEPRIRRIKSMNAFDIIASSPSFDLSGLFEERGEQLRFVSSAPVNTIIKKLEEIAGQVSFTARTKDCQVSFEATRNGHKGALAISTKIFQLTPELVMVQVCKKAGDTAEYRQFCGSELKPGLRGLVDGLPEDGLPPTLNVA

SEQ ID NO: 3943 - protein, 694 aa, Rhodobacter sphaeroides 2.4.1
MKRPTRPAPPLKFDMSSAHPNRLGADFDGEGTNFPLFSENATRVELCLFDETGQTQTHCLDLPSYEGGIWYGYLPGIREGQTYGYRVHGPHAPEEGHRFNPNKLLIDPYARELRGDLIWDDALFGYPIGGDDLELDPRDSAPFMPKAVVVDPAFDWEADKALRHRWQDTVIYEAHVKGLTMRHPGVPEEDRGTFKGLASPAVIDHLKAIGVTAIELLPIHGFLNDRHLIEKGLSNYWGYNTLSFFAPYRPYTKSGSMREVKRAIKRFHDAGIEVILDVVYNHTCEGNEKGPTLSFRGIDNASYYLLSPEAKRHSFDTTGTGNTLNVAHPMVLRMVMDSLRYWVEVMHVDGFRFDLASTLGREPEGFERGGTFFAAIRQDPVLSMVKLIAEPWDIGEGGYQVGGFPWPFREWNDKARDDLRAFWRRDPGLIGDVSQRLLGSPVQFSHSHRPATSSVNFIAAHDGFTAWDLVSYDEKHNEANGEDNRDGHSHNLSHNLGAEGPTDDPGILEARLRRVKAMLATLFLSQGVPMILAGDEFGQSQQGNNNAYCQDNEIAWLDWEEARDELIRAVADLAEFRKADGGISRARFAVGPDAVQHDTPVATWLHPAGREMEEGDWNEGELRLFALRLDLPRGRDLLVVLNAGDDGDFALPEGEWRLKIDTSRERIACDEPALGTLPVGWQSVMVLVAAEEAD

SEQ ID NO: 3944 - protein, 267 aa, Shewanella oneidensis MR-1
MLTITAINAFNDNYIWVLQQDTQQAVYVVDPGDVNVVLDYLNAHQLTLAGILITHHHRDHTGGIAALVAYVEQTTGHTLAVYGPQSEAIQGVNIAIEPQITQILHLPFLNSPVQVLSVPGHTAGHIAYLVDGALFCGDTLFSGGCGRLFEGTPAQMCHSLRLLAALPAETRVYCAHEYTLANLKFAQAADPSNAKLKAYNEQATALRAQGKATIPSTIGLERSINPFLRGLTPTIVDSIKQQFCDQDLSNVDELTYFTLLRQWKDIF

SEQ ID NO: 3945 - protein, 1039 aa, Desulfovibrio vulgaris subsp. vulgaris str. Hildenborough
MVNLSLGRFSWRGQRREACRGLTFILRCHLLLLFLALSMAGAAWGASPRVLLLSSYGPAFPTFFQQVEGVRAVLASAGVVLDVEFMDSKRFTDESSVDHFESYLRYKLARLPAYDVVITSDDNALAFVMERHGGLLGKSPVVFCGVNNVGLARSLSGSETYTGVIEAVSMHETIKLVWSLKPSTQTLYVISDVMPAGKADLETFHDVVRGIASVRYQELSLENMGWEELGRRLQRVGANDAILLLSAYKDQRGVVRNFEEGLAFILQNTRSPVYHLWEHGMGKGLLGGKLISHYEQGRLAADMALKILAGASPASLPVIEGNDANAYLFDYEVLRRHGISTHRIPQGSRVINEPESIWRDYWRELLVAVAFVAVLCVLVVVLLKHVLRLREARTEIKRSETRYRLVFDQSPLGLVQYDGDGIIIDVNERFAELCGASRGQIIGFNYINQMHDARMLGAVLASLRGGIGGFEGVYTSPLGKKTAFIRCLFKGVKAPAGDVFIGIGIIEDVSDRKQAEEALRERELFLLETQRIAKIGGWKANIRTDYLFWSEEVNRILDLPEDYKPGLAEWLTSFMPEYLPRIRAMLEDVLHHGGTADIECEAMTRLGRRKWTHLRAVGRVDEGSGALVVGTFQDVDERKRTELELVEAKTKAVAANRAKDEFLANMSHEIRTPLNGIFGMLRMLADASLAPRQQELAEMAMRSCRRLADLLTDVLDISRIDAGKLEIVSIPFDLSRSIRQVRELFIPSAMQAGVSLHVHIDAAIPSRVVGDASRLQQVLTNLLGNAFKFTEKGSVTLRAEHLSPVLANSCRVLFSVEDTGCGIPDEKHGKLFTPFTQACEGFKRSHQGAGLGLSICRRIIRVMGGHLAFESEAGTGTTVYFTLNFGLPDGDEVQPEAAAASSAEPIPPLRVLVTEDDAVTRRYITYQLDRDGHTVAVAEDGRQALEQLSTGDFDMVLMDIQMPVMDGAEAILRIRKGEAGSRNTDIPVIALTAYALSGDRERLLQIGADDYVAKPAEVAQLHAAIARHVSRMQLRRADA

SEQ ID NO: 3946 - protein, 1414 aa, Oryza sativa (japonica cultivar-group)
MDSPPPPREEVVVFAVNSERFELRRDGGDPGESLLEFLRSRTRFTGAKLGCGEGKATPQPTALPPPRLLCFRGCGACVVVVSAYDAEADEVAHAAVSSCLTLARGLHHRAVTTTEGLGSSRRGLHALHERLAGFHASQCGFCTPGVCMSLAGALAAAEGNGKKAASAAEGFSRLTAAEAERAVAGNLCRCTGYRPIADACKSFAADVDLEDLGLNCFWNKGDATASVSKLPPYKERSIAAFPEFLKDEIRSSLGIDHSISSASMVGSVSSWYQPKNVEEYYKLIGSLSSSSDKSRTKVVVGNTSSGVYRDAELYDRYIDLRAIPELNSVSKDVKGVGIGAAMSISQVIEILRGEGNSYKDVVFCKIADHMEKVASQFVRNMASLGGNLIMAQRDEFASDIATVLLAAGSSLCIQVSSERMNVTLERFLDMAPCDCKTLLLRIYIPHCTPSGISSSSESVNKTGDKPASSVLFETYRASPRPIGNAVSYLNSAFLAKLSSDETSGNCILEKLCLAFGAYGTQHAVRATNVESLLVGKPITASLLLEACTVLKKTIVPGEGTRHAAYRSSLAVAFLFSFLYPITKGTFKPVEAVHLNGHIISDNNGNMNRGPDTHVDVSPKEINNVKSDLHGNDRILESSKQVIEISEDYLPVGLPAKKVGAELQASGEAIYVDDIPSPKDCLHGAFVYSTKPLAHVKSIELNPSLEQLKTVAIVTAKDIPKGGSNVGANTIFGPEPLFGDPLTQWAGEPLGIVVAETQKTANIAASRALVDYSMENLDAPILSIEEAVRSSSYFEILPFLLPQKIGDFSKGMEEADQKIYSTEVNLHSQYYFYMETQTALAIPEEDNCMVVYSSSQCPEVAQETIAKCLGLPCHNVRVITRRVGGGFGGKAVRSLPVATACALSAFKLQRPVRIYLDRKTDMIMTGGRHPMKIRYSVGFKSDGNITALHIELLVNAGITQDVSPVIPHNFIEALKKYNWGAFSYDARICKTNIATRSAMRGPGEVQGSYVAEAIIEHVAAVLSTDVNLVRQRNLHTVESLSLYHSECMEDALGYTLPSICNQLITSANYQHQLEMIRSFNKSNRWKKRGLSVVPIVHKFASRPTPGKVSILNDGSVAVEVGGIELGQGLWTKVKQMAAFGLGQLWTDRRQELLERVRIIQADTLSVIQGGWTTGSTTSESSCEAVHRACNILVDRLKPLKEQLQEKQGTVSWDELISQAKMVGVDLSAKELYVPGASGSYLNYGAAASEVEIDLLTGATTILRSDLIYDCGRSLNPAVDLGQVEGAFVQGIGYFMNEEYVTNSDGLLVSDGTWTYKIPTVDTIPKQFNVKLLNSGFHKKRVLSSKASGEPPLLLAASVHCATREAIRAAREEYHCSRSGSSPPFFDLEVPAIMPTVKELCGLDNVEKYLESICSK

SEQ ID NO: 3947 - protein, 243 aa, Citrus sinensis
MGRGRVQLKRIENKINRQVTFSKRRAGFLKKAHEISVLCDAEVAVIIFSHKGKLFEYSTGSCMEKILERYERYAYAERQLIAPDPESQRNWPLECNNLKAKIDLLQKDQRHYLGEDLESLSLKDIQQLEQQLDTALKHIRSRKNQLMQESISELQKKEKSIEEQNNLLVKQIKEREKAAAQQAQWGNQIQNQVPNTLSFLLPQPPPCLRLGGAYQEQASEMRRNELNLTLEPVCSCSLGCFAG

SEQ ID NO: 3948 - protein, 628 aa, Francisella tularensis subsp. tularensis SCHU S4
MCGVVGFYSFNKEEGFDSIINQSLLSIKHRGSDDSGYWCDNQVTLGHTRLSIHDITNAGHQPMLSNSGNTAIVFNGEIYNYLSIKNQLLSEYSNLKFKSNSDTEVLVNAIELWGIDKTLEKCIGMFAFGVYSRKTSCLILARDRFGEKPLYFGIQNGILGFASELKALKPLKECGWRFDIDRDALATYMRYAYVPTPYSIYKNISKLNVGSYIKFDAKGNSKEYKYWDSKKVLDSEKYKDSYDQAILDLEIKLKSTLSIQMQSDVPLGAFLSGGIDSTTVVALMQSMSKDKINTFSIGFNQKEYNEAEHARAVAKHIGTNHTDMYVTERDALDVIPKLAGIYDEPFADSSQIPTYLVSKIAKSKVTVALSGDAGDELFGGYNRYFLAPNIAKKIKFAKLLKYAPDAWIKKAEILNFGKFALLADKLLKLKRVLEKAKTNKELYVLLCSQINDTSFVLGAKEYDILRDKNIYDIPQLSFQEWMMFVDSNTYMIDDILVKVDRAAMANSLETRVPFLDHNIYEFAYSLPIDYKIQRGNGKRILKDLLYKYVPESLVNRSKMGFGIPLAKWLREDLREWADNLLDYSKIDKQGYLSPEVVQKYWQEHLSGKRNWQAILWNILIFQEWLDNE

SEQ ID NO: 3949 - protein, 428 aa, Triticum aestivum
  misc_feature (415)..(415): Xaa can be any naturally occurring amino acid
CTLPNAPFPNNLPSSYRGVAIKILDKEKVLKVGLAEQVRREITTMRLVAHKSIVQLHEVMATRSKIYFVMEYMKGGELFDKVSKGGKLTEGAAHKYFQQLISAVDYCHSRGVYHRDLKPENLLLDENENLKVSDFGLSALSESKRQDGLLHTTCGSPAYVAPEVISKGGYDGAKSDIWSCGVILFVLVAGYLPFQGQNLIEMYRKIEKGDFKCPGWVSQKLQKLLYKIMDPDPNKRISIQKIKESTWFRKGPGENLTAKERLPSENATTDAVPTLGVRRRKNSHEDGKPLAVTNLNAFEIISFSTGFDLSGLFVEKESKKEARFTSEQPASAIVSKLEAVAKTLNLRVRKKDNGVVKMQVRKEGRNGVLQFDSEIFEISPSYHLIEMKQTSGDSLEYQKLLEESIRPALKDICLXAWHGADGQQEPQG

SEQ ID NO: 3950 - protein, 369 aa, Photobacterium profundum SS9
MTHPLFTPTSMSNNSQQPIALSNRMVMAPMTRARTSQPGNIPNEMMAEYYAQRASAGLIITEATQISDDSQGYSFTPGVYTSEHIQGWRTVTDAVHQAGGKIFNQLWHVGTVSHTHFQNGEAPIAPSAIQPIDTQVWIVKDGEDGTMFPCPMPREMNTDDIKRVIADFAQAAENAIEAGFDGIEIHGGNGYLIDQFLRTNSNKRTDEYGGNRENRLRFLMEVVEAVSARIGAERVGVRLAPFATFKDMDCPDIVPTILDAAEHLNQCGIAYMHLSEADWDDAPTIPDDFRVALRERFSGTIIVAGRYDLKRAEYILDAGYADLVAFGRAFLANPDLAHRLANDVALAEADNTKLFGGNKSGYSDYPACV

SEQ ID NO: 3951 - protein, 291 aa, Triticum aestivum
VIRTQLKRKATREENNAAESSDCMIVTTGVTGNPLLTPVSGKAVKNSKSKTKNNKAGPQTPTPNVGSPLNPSTPAGTCRYDSSLGLLTKKFINLLKQAEDGILDLNNAAETLEVQKRRIYDITNVLEGIGLIEKTLKNRIRWKGLDDSGVELDDGLSGLQTEVENLNLQEQALDERISDMREKLRGLTEDENSQRWLYVTEDDIKGLPCFQNETLIAIKAPHGTTLEVPDPDEAGDYLQRRYRIVLRSTLCPIDVYLVSQYDDGFENLCGAATPARHTNVPKSGPCEDLHA

SEQ ID NO: 3952 - protein, 319 aa, Arabidopsis thaliana
MALAVGTIRGYKKNLFEFVKTCAIADDGSSRSRVVSTMQKRAYFQRQWPLVDVVRASVVVIVHFLCLLAPFNFKWEALRFGLVLFALTTLSITFSFHRNLSHRSFKIPKWLEYPWAYSAVFALQGDPMDWVSIHRFHHQFTDSDRDPHSPKEGLLFSHILWIFDTQYIKYKCGGRDNVLDLKKQWFYKFLRRTIAVHILMFWTILYLYGGLPYLTCGGGVGIFIGYHVTWLVNSACHIWGSRSWNTKDTSRNVWWLSLFTMGESWHNNHHAFESSARQGLEWWQIDITWYLIRLFEVLGIATDVKLPSELQKQKMALVR

SEQ ID NO: 3953 - protein, 335 aa, Schizosaccharomyces pombe
MQQTYKPNTSALKDGAPKATVDQKQLLPCKYRVGRVLGGGTYATVREAVHIETNKMYAAKIMNKKMMEKKQDFVKNEIAILKRVSYEHPNILHLVDFFETVNNLYLITELATGGALFDRICAKGSFYEADAAALMRTTTSAVKYLHDNGIVHRDLKPENLLYRSKDPNSDLLIADFGLSHFYEDSQYYMLMTACGTPEYMAPEVFRRTGYGKPVDMWAIGVITYFLLSGYTPFARPSQVEVIEAILANEYTFNDPCWSGISETAKDFIKKCLENDPSKRLTAADALKHPFLSENGPATSNLLPNVRENFNARKTFRTAYNAVRAFNTWKKLENKH

SEQ ID NO: 3954 - protein, 205 aa, Emericella nidulans
MSSRKKVMLKVIILGDSGVGKTSLMNQYVNKKFSGSYKATIGADFLTKEVLVDDRLVTMQIWDTAGQERFQSLGVAFYRGADCCVLVYDVNNSKSFEALDSWRDEFLIQASPRDPESFPFVVIGNKIDMEESKRMISSKRAMTFCQSKGNIPYFETSAKEAVNVEQAFEVIARSALAQEEAEEYGGDYTDPINIHDTTERDGCAC

SEQ ID NO: 3955 - protein, 854 aa, Arabidopsis thaliana
RARVRFPHLPSIKKKNSSLHSFNEDLRRSNAVSFSLRKDSRSSGKVFARKPSYDSDSSSLATTASEKLRGHQSDSSSSASDQVQSRDTVSDDTQVLGNVDVQKTEEAQETETLDQTSALSTSGSISYKEDFAKMSHSVDQEVGQRKIPPPGDGKRIYDIDPMLNSHRNHLDYRYGQYRKLREEIDKNEGGLEAFSRGYEIFGFTRSATGITYREWAPGAKAASLIGDFNNWNAKSDVMARNDFGVWEIFLPNNADGSPAIPHGSRVKIRMDTPSGIKDSIPAWIKYSVQPPGEIPYNGVYYDPPEEDKYAFKHPRPKKPTSLRIYESHVGMSSTEPKINTYANFRDDVLPRIKKLGYNAVQIMAIQEHAYYASFGYHVTNFFAPSSRFGTPDDLKSLIDKAHELGLVVLMDIVHSHASKNTLDGLDMFDGTDGQYFHSGSRGYHWMWDTRLFNYGSWEVLRYLLSNARWWLEEYKFDGFRFDGVTSMMYTHHGLQVEFTGNYNEYFGYSTDVDAVVYLMLVNDLIHGLYPEAIVVGEDVSGMPAFCVPVEDGGVGFDYRLHMAVADKWIELLKKRDEDWQVGDITFTLTNRRWGEKCVVYAESHDQALVGDKTIAFWLMDKDMYDFMAVDRQATPRVDRGIALHKMIRLITMGLGGEGYLNFMGNEFGHPEWIDFPRTDQHLPDGRVIAGNNGSYDKSRRRFDLGDAEYLRYHGLQEFDRAMQNLEETYGFMTSEHQYISPKDEGDRVIVFERGNLLFVFNFHWTNSYSDYRIGCSVPGKYKIVLDSDNSLFGGFNRLDDSAEFFTSDGRHDDRPCSFMVYAPCRTAVVYAAVDDDDDDERSSLVPIGLLPEDV

SEQ ID NO: 3956 - protein, 194 aa, Arabidopsis thaliana
  misc_feature (184)..(184): Xaa can be any naturally occurring amino acid
MALKALDYDTLNENVKKCQYAVRGELYLRASELQKEGKKIIFTNVGNPHALGQKPLTFPRQVVALCQAPFLLDDPNVGMLFPADAIARAKHYLSLTSGGLGAYSDSRGLPGVRKEVAEFIQRRDGYPSDPELIFLTDGASKGVMQILNCVIRGNGDGILVPVPQYPLYSATISLLGGTLVPYYXDEFENWGLDV

SEQ ID NO: 3957 - protein, 377 aa, Pereskia zinniiflora
TDVPAAAAGAFKSYKLAAKAISRLQSLPSRNMSLLCDVLVKEVSELTGYDRVMVYRFHEDEHGEVISEYCRPDLGPYLGLHYPATDIPQASRFLFLKNRVRMIFDCLATPVKVIQYKKLTQPLSLGGSILRAPHGCHAQYMANMGSIASLVMAVTVNEDEDEVRSDPSTGKRLWGLVVCHHTSSRFIPFPLRYACELLVQVFGIQINKEVELAAQIRESHILRIQTVLCDMLLRDSPVAIVTQSPNVMDLVKCDGAALYYKGQVWLLGTTPTEEQIKNITQWLVEYHGSTKGLSTDSLMEAGYPGASELGDAVCGMAAVRISSKDVLFWFRSHTAKEIKWGGAKHDPVDSDERRKMHPRSSFKAFLEVVKWRSQPWE

SEQ ID NO: 3958 - protein, 166 aa, Nicotiana tabacum
IERYKKHHADSTSQGSVSESNTQYYQQEAAKLRRQIRDIQTYNRQIVGEALSSLSPRDLKNLEGKLEKAIGRVRSKKNELLFSEIELMQKREIDLQNANMCLRAKIAEVERAQQQMNLMPGGSEYNQQQQPMTTSQNYNDARNFLPVNLLEPNPHYSRHDDQTALQ

SEQ ID NO: 3959 - protein, 377 aa, Pereskia guamacho
TDVPVAAAGAFKSYKLAAKAISRLQSLPSRNMSLLCDVLVKEVSELTGYDRVMVYRFHEDEHGEVISEYRRPDLGPYLGLHYPATDIPQASRFLFLKNRVRMIYDCLAIPVKVIQYKKLTQPLSLGGSILRAPHGCHAQYMANMGSIASLVMAVTINEDEDEVKSDPSTGKRLWGLVVCHHTSSRFIPFPLRYACELLVQVFGIQINKEVELAAQIRESHILRIQTVLCDMLLRDSPVAIVTQSPNVMDLVKCDGAALYYKGQVWLLGVTPTEEQIKNITQWLLEYHGNTKGLSTDSLMEAGYPGASELGDAVCGTAAVRISSKDILFWFRSHTAKEIKWGGAKHDPVDSDDRRKMHPRSSFKAFLEVVKWRSQPWE

SEQ ID NO: 3960 - protein, 285 aa, Lactobacillus johnsonii NCC 533
MKFNSVEDTYTLNNGVKIPIIGFGTWQTPDGDVAKHVVEAALNSGYRHIDTAAAYGNEESVGEGIKNSGINRHDLFITTKLWNADHGYKEAKAAIDKSLQNLGTDYLDLYLIHWPNPLALRDHWAEANAESWRAMEEAVKAGKIRAIGVSNFRKHHLEELLKTAEIKPAVNQIMLNPSDLQSDVVKVNEELGLLSEAYSPLGTGGLLGNEVVNEIANEVGKSPAQVLIRWSLEHGFLPLPKSVHDKYIAANIDVFDFELNDEQMSKLDSLHGVSDLATDPDTANF

SEQ ID NO: 3961 - protein, 116 aa, Arabidopsis thaliana
TLLLCGTIQLAICRSEEKSTEKTMMLGGVHDLRGNQNSGEIESLARFAIQEHNKQQNKILEFKKIVKAREQVVAGTMYHLTLEAKEGDQTKNFEAKVWVKPWMNFKQLQEFKESSS

SEQ ID NO: 3962 - protein, 580 aa, Triticum aestivum
  misc_feature (221)..(221): Xaa can be any naturally occurring amino acid
MYRAAAAAISRSSSSALRRQLARGGGGEQRQWARGYAAKEVTFGVGARAAMLRGVNDLADAVKVTMGPKGRNVVIERPNRSPKVTKDGVTVAKSIEFEDSAKNVGASLVKQVADATNKAAGDGTTCATVLTQAILTEGCKAVAAGVNVMDLRKGINKAISAVTAHLKSKAWVIDSPDEINQVATISANGEKEIGDLISKAMGIVGKDGPVSRADPRARDNXELEAVQGMKLTRGYISPYFVTDHKTQKCELKDPLILIHDKKISNMNSLLPAVQISIQNRRPLLIFAEDVDGEALSMLVLNKHRAGLKICAVKAPGFGENRRANLDDMAVLTGGQVISEDQGLDLDKVELQMLGTAKKVTVSLDDTIILDGGGERQQIEERCQQLRESLENSTSMFDKEKAQERLSKLSGGVAILKIGGASEAEVGEKKDRVTDALNAARAAVEEGIVPGGGVALLYATKELDNISTSHEDEKIGVQIIKNALKAPLMTIAANAGIDGAIVIGKLLEQDNLSLGYDAAKGEYVDMIKAGIIDPVKVIRTALQDAASVSLLMTTTEAAVAELPSTKARIASRMPDMSGMGF

SEQ ID NO: 3963 - protein, 294 aa, Listeria monocytogenes str. 4b F2365
MTKTLQDRMILPGNETIPYIGLGVFQVTEQEFIAGAVEKAIEVGYRLFDTAAVYNNEAIVGQAIASSAVSREELFISSKVWNGDLGFDETLFAFERTLRNLKLDYLDLYLIHWPVAGKYRDSWRAMERLHDEKLIKSIGVANFKQHHLSDLLVAANEKPVLNQVETHPLLPQNDLRKYLAEQNIAHAAWSPLAKGILMQNPVITEIAKKHQASVDQVILQWHLNRNTIIFPKSITSSRIEENSRLSYFQLDAIDMEKIDRLETGKRVGPDPDDLEYFLSSIERERAYLSGENAE

SEQ ID NO: 3964 - protein, 412 aa, Burkholderia pseudomallei K96243
MKPIQKSNKLLNVCYDIRGPVLEHAKRLEDEGHRIIKLNIGNLAPFGFDAPDEIIQDMIRNLPASSGYSDSKGVFAARKAIMHYTQQKGVHGVGLDDIYIGNGASELIVMATQALLNDGDEVLLPAPDYPLWTAAVSLSGGTPVHYVCDESNRWMPDPDDIRRKITPNTKALVVINPNNPTGALYSDALLIELIAIAREHGLIIFADEVYDKIVYDGKSHTALASLAEDVITVTFNSLSKSYRSCGYRAGWMSVAGLTAENRRRAHDYLEGLGILSSMRLCANVPGQYAIQTALGGYQSINELIMPSGRLYKQRELAYDMLTSIPGVSCVKPEAALYMFPRLDPKLYPIENDQQFILELLLRERVLLVQGTGFNWPTPDHFRVVFLPNVDDLTDSIERIARFLDGYRKRNSV

SEQ ID NO: 3965 - protein, 358 aa, Zea mays
MVGGGGGGPLRRVGKYEVGRTIVEGTFAKVKFAQNTETGESVAMKVLDRSSILKNKMAEQIKREISIMKLVRHPNVVRLHEVLASRKKIFIILEFITGGELFDKIIRHGRLSEADARRYFQQLIDGVDFCHKKGVYHRDLKPENLLLDSQGNLKISDFGLSAWPAQGSFLLRTTCGTPNYVAPEVLSHKGYNGALADTWSCGVILYVLLAGYLPFDEVDLTTLYGKDDNEDAFEDETGPLTLNAFDLIILSQGLNLAALFDRRQDCDKLQNRFLSRNPAKVILSSMEVVAQSMGFKTHIRNYKMRVEGLNADKTSHLSVMVEVFEVAPSIFMVELQRAAGDTSEYNTIHPKGQIYIGQ

SEQ ID NO: 3966 - protein, 479 aa, Streptomyces sp.
MVPAAQQTATAPDAALTFPEGFLWGSATASYQIEGAAAEDGRTPSIWDTYARTPGRVRNGDTGDVATDHYHRWREDVALMAELGLGAYRFSLAWPRIQPTGRGPALQKGLDFYRRLADELLAKGIQPVATLYHWDLPQELENPGGWPERPTAERFAEYAAIAADALGDRVKTWTTLNEPWCSAFLGYGSGVHAPGRTDPVAALRAAHHLNLGHGLAVQALRDRLPADAQCSVTLNIHHVRPLTDSEADADAVRRIDALANRVFTGPMLQGAYPEDLVKDTAGLTDWSFVRDGDLRLAHQKLDFLGVNYYSPTLVSEADGSGTHNSDGHGRSAHSPWPGADRVAFHQPPGETTAMGWAVDPSGLYELLRRLSSDFPALPLVITENGAAFHDYADPEGNVNDPERIAYVRDHLAAVHRAIKDGSDVRGYFLWSLLDNFEWAHGYSKRFGAVYVDYPTGTRIPKASARWYAEVARTGVLPTA

SEQ ID NO: 3967 - protein, 196 aa, Glycine max
  misc_feature (184)..(184): Xaa can be any naturally occurring amino acid
MINCLGLYPLISAPSTIACTTHIVRSKQYLATQKPVNLALGYRNPHGYGFSFGSRRSIHERVSSHFKGIAVMTDDKSTMSSTEEDLENIGIFHIDPSLKPYKDHFKYRLKRYVDQKKLIEEYEGGLEEFSQGYLKFGFNREEGGIVYCEWAPAAQEAQIIGDFNGWDGSNHQMEKNQFGVWSIXIPDTDGNSAIPH

SEQ ID NO: 3968 - protein, 137 aa, Nicotiana tabacum
IFDPFEGFPFSGTVANVPSSARETSAFANARIDWKETPDSHIFKMDVPGIKKEEVKVEVEEGRVLQISGERSREQEEKNDTWHRMERSSGKFMRRFRLPENAKMEEIKAAMENGVLTVTVPKEEEKKSEVKAIDISG

SEQ ID NO: 3969 - protein, 203 aa, Magnetospirillum magnetotacticum MS-1
MTDNRPILTTRQGHPVRDNQSTRTVGERGPATLENYQFIEKITHFDRERIPERVVHARGAGAHGWFEAYGKIGDEPASKYTRARVLNETGVKTPMFVRFSTVAGAKESPETERDPRGFAVKFKTVEGNWDLVGNNLKVFFIRDAIKFPDMIHAFKPDPVTNRQEAWRFFDFVAQHPESIHMVTWLKSPWGIPANYREMEGYGR

SEQ ID NO: 3970 - protein, 481 aa, Nostoc punctiforme PCC 73102
MSDLILFWHRRDLRISDNTGLAAAKRRSPKVVGVFCLDPHILERDDVAPVRVTYMIGCLQKLQERYAQVGSQLLILHADPVQAIPALAEAINAKAVFWNWDVEPYSQERDRTIINALKEKGIEFLNQNWDQILNSPDEIRTGGNSPYTVYTPFWKNWITKPKANPVETLQNVEGLTEAEQEIAKLSGSLTLPSAKDLGFIWDEQLIISPGEAAAQERLEEFTNKAITEYQEQRNFPAVDGTSQLSAALKFGVIGIRTVWQATIEALENSRSEETAVNIRTWQQELAWREFYQHAMYNFPELADGAFRDTFKNFPWETNEEHFQAWCEGRTGYPIVDAAMRQMNESGWMHNRCRMIVASFLTKDLLINPQLGEKYFMKHLIDGDLSANNGGWQWSASSGMDPKPVRIFNPASQTQKFDPEGEYIRQWVSELRSVDTEYLVTGKIPPLERHAVGYPDPIVDHKIQQNQFKLRYQQQKNTSGGE

SEQ ID NO: 3971 - protein, 377 aa, Echinocactus platyacanthus
TDVPAAAAGAFKSYKLAAKAISRLQSLPSRNMALLCDVLVKEMSELTGYDRVMVYKFHEDEHGEVISEYRRPDMEPYLGLHYPATDIPQASRFLFLKNRVRMICDCLATPVKVIQGKKWAQPLSLGGSILRAPHGCHALYMANMGSIASLVMAVTINEDEDEVKSDPSTGKRLWGLVVCHHTSSRFIPFPLRYACELLLQVFGIQINKEVELAAQIRESHILRIQTVLCDMLLRDSPVAIVTQSPNVMDLVKCDGAALHYKGQVWLLGITPTEEQIKNITQWLLKYHGSTKGLSTDSLMEAGYPGASELGDAVCGMAAVRISSKDVLFWFRSHTAKVIKWGGAKHDPVDSDDGRKMHPRSSFKAFLEVVKWRSQPWE

SEQ ID NO: 3972 - protein, 377 aa, Pereskia stenantha
TDVPAAAAGAFKSYKLAAKAISRLQSLPSRNMSLLCDVLVKEVSELTGYDRVMVYKFHEDEHGEVISEYRRPDLEPYLGLHYPATDIPQASRFLFLKNRVRMICDRLATPVKVIQDKKLAQPLSLGGSILRAPHGCHAQYMANMGSIASLVMAVTINEDEDEVKSDPSTGKRLWGLVVCHHTSSRFIPFPLRYACELLVQVFGIQINKEVELAAQIRESHILRIQTVLCDMLLRDSPVAIVTQSPNVMDLVKCDGTALYYKGQVWLLGITPTEEQIKNITRWLLEYHGSTKGLSTDSLMEAGYPGASELGDAVCGMAAVRISSKDVLFWFRSHTAKEIKWGGAKHDPVDSDDGRKMHPRSSFKAFLEVVKWRSQPWE

SEQ ID NO: 3973 - protein, 581 aa, Glycine max
MCGILAVLGCSDDSRAKRVRVLELSRRLKHRGPDWSGLHQHGDCFLAHQRLAIVDPASGDQPLFNEDKSVIVTVNGEIYNHEELRKQLPNHNFRTGSDCDVIAHLYEEHGEDFVDMLDGIFSFVLLDTRDNSFIVARDAIGVTSLYIGWGLDGSVWISSEMKGLNDDCEHFECFPPGHLYSSKERGFRRWYNPPWFSEAIPSAPYDPLVLRHAFEQAVIKRLMTDVPFGVLLSGGLDSSLVASITSRYLANTKAAEQWGSKLHSFCVGLEGSPDLKAAKEVADYLGTVHHEFTFTVQDGIDAIEDVIYHIETYDVTTIRASTPMFLMSRKIKSLGVKWVISGEGSDEIFGGYLYFHKAPNKEEFHRETCRKIKALHQYDCLRANKSTFAWGLEARVPFLDKAFINAAMSIDPEWKMIKRDEGRIEKWILRRAFDDEEHPYLPKHILYRQKEQFSDGVGYSWIDGLKAHAAKHVTEKMMLNAGNIYPHNTPKTKEAYYYRMIFERFFPQNSARLTVPGGASVACSTAKAVEWDAAWSNNLDPSGRAALGVHISAYENQNNKGVEIEKIIPMDAAPLGVAIQG

SEQ ID NO: 3974 - protein, 290 aa, Arabidopsis thaliana
MANAITFFKLNTGAKFPSVGLGTWQASPGLVGDAVAAAVKIGYRHIDCAQIYGNEKEIGAVLKKLFEDRVVKREDLFITSKLWCTDHDPQDVPEALNRTLKDLQLEYVDLYLIHWPARIKKGSVGIKPENLLPVDIPSTWKAMEALYDSGKARAIGVSNFSTKKLADLLELARVPPAVNQVECHPSWRQTKLQEFCKSKGVHLSAYSPLGSPGTTWLKSDVLKNPILNMVAEKLGKSPAQVALRWGLQMGHSVLPKSTNEGRIKENFNVFDWSIPDYMFAKFAEIEQVRS

SEQ ID NO: 3975 - protein, 445 aa, Pseudomonas syringae pv. tomato str. DC3000
MLHLSRLTSLALAIAIVIGAPLAQAAEKTAPATPAAVAPAKPNANAKPPLPLDELRTFAEVMDRVKAAYVEPVDDKTLLENAIKGMLSNLDPHSAYLGPEDFQELQESTSGEFGGLGIEVGVEDGLVKVVSPIDDTPASKAGIEAGDLIVKINGTPTQGQNMQEAVDKMRGKIGEKITLTLVRDGGTPFDVTLARATIQVKSVKAQMLENGYGYIRITQFQVKTGDEVGKALAKFRKDNGKKMSGLILDLRNNPGGVLQSAVQVADHFLTKGLIVYTKGRIANSELRFSADPADASEGVPLVVLINGGSASASEIVAGALQDQKRGILMGTDTFGKGSVQTVLPLNNDRALKITTALYYTPNGRSIQAQGINPDIVVRRAKVTSEADGENYKEADLMGHLGNGNGGADKPTVKGSAAAKARPQDDDFQLSQALSLLKGLSITRGN

SEQ ID NO: 3976 - protein, 496 aa, Staphylococcus aureus subsp. aureus COL
MDDKQHTSSSDDERAEIATSNQDQETNSSKRVHLKRWQFISILIGTILITAVITVVAYIFINQKISGLNKTDQSNLNKIENVYKILNSDYYKKQDSDKLSKAAIDGMVKELKDPYSEYLTKEQTKSFNEGVSGDFVGIGAEMQKKNDQIMVTSPMKGSPAERAGIRPKDVITKVNGKSIKGKALDEVVKDVRGKENTEVTLTVQRGSEEKDVKIKREKIHVKSVEYKKKGKVGVITINKFQNDTSGELKDAVLKAHKDGLKKIVLDLRNNPGGLLDEAVKMANIFIDKGKTVVKLEKGKDTEAIQTSNDALKEAKDMDISILVNEGSASASEVFTGALKDYNKAKVYGSKTFGKGVVQTTREFKDGSLLKYTEMKWLTPDGHYIHGKGIKPDVTIDTPKYQSLNVIPNTKTFKVGDDDKNIKTIKIGLSALGYKVDNESTQFDKALENQVKAFQQANKLEVTGEFNKETNNKFTELLVEKANKHDDVLDKLINILK

SEQ ID NO: 3977 - protein, 221 aa, Glycine max
MGQKSLIYAFVSRGTVILAEYTEFSGNFNSIAFQCLQKLPATNNKFTYNCDAHTFNYLVDNGYTYCVVADESIGRQLPMAFLERVKDEFVSKYGGGKAATAPANSLNKEFGPKLREHMQYCVDHPEEISKLAKVKAQVSEVKGVMMENIEKVLDRGDKIELLVDKTENLHNQAQDFRTSGTRIRRKMWLQNMKIKLIVLGILIALILIIVLSVCRGFNCGK

SEQ ID NO: 3978 - protein, 330 aa, Arabidopsis thaliana
  misc_feature (99)..(99): Xaa can be any naturally occurring amino acid
  misc_feature (149)..(149): Xaa can be any naturally occurring amino acid
MQAISKVSSAASFFRCSRKLVSQPCVRPCVRQLHVRKGLVSGVMKLFSSPLRTLRDAGKSVRISRFCSVSNVSSSLQIELVPCLKDNYAYILHDEDPGXTVGVVDPSEAVPVMDALQKNRRNLTYILNTHHHYDHTGGNLELKDRYWCXVIGSAMDKDRIPGIDMALKDGDKWMFAGHEVHVMDTPGHTKGHISLYFPGSRAIFTGDTMFSLSCGKLFEGTPKQMLASLQKITSLPDDTSIYCGHEYTLSNSKFALSLEPNNEVLQSYAAHVAELRSKKLPTIPTTVKMEKACNPFLRSSNTDIRRALRIPEAADEAEALGIIRKAKDDF

SEQ ID NO: 3979 - protein, 465 aa, Solanum tuberosum
MKLLSKKAMCNSHGQDSSYFLGWEEYEKNPYDETRNPKGIIQMGLAENQLSFDLLESWLTQNPDAAAFKRNGNSIFRELALFQDYHGLPAFKDALVQFMSEIRGNKVSFDSNKLVLTAGATSANETLMFCLADPGDAFLLPTPYYPGFDRDLKWRTGAEIVPIQCTSSNGFRITESALEEAYKEAERRNLRVKGVLVTNPSNPLGSTLTKKELQLLLTFVSTKQIHLISDEIYSGTVFNSPKFVSVMEVLIENNYMYTEVWDRVHIVYSLSKDLGLPGFRVGAIYSNDDMIVSAATKMSSFGLISSQTQYLLSALLSDQKFMKNYVSENQKRLKKRHEMLVGGLKQIGIRCLESNAGLFCWVDMRHLLSSNTFDGEMELWKKIVYEVGLNISPGSSCHCTEPGWFRACFANMSEDTLNIAIQRLKAFVDSRDNKDDIQNQKHSNKKKSFSKWVFRLSFNERQRER

SEQ ID NO: 3980 - protein, 117 aa, Neurospora crassa
MPTMWLSDSQKIGVAFCSGGGFFLIGGVLLFFDRAMLAMGNQKAKGTAAFFSGLALILMRWPLIGFCVELYGIMILFGDFLGTIAGFARNIPVIGPYIGTAVDRSGVVARQNADLPV

SEQ ID NO: 3981 - protein, 465 aa, Solanum tuberosum
MKLLSKKAMCNSHGQDSSYFLGWEEYEKNPYDETRNPKGIIQMGLAENQLSFDLLESWLTQNPDAAAFKRNGDSIFRDLALFQDYHGLPAFKDALVQFMSEIRGNKVSFDSNKLVLTAGATSANETLMFCLADPGDAFLLPTPYYPGFDRDLKWRTGAEIVPIQCTSSNGFRITESALEEAYKEAERRNLRVKGVLVTNPSNPLGTTLTKKELQLLLTFVSTKQIHLISDEIYSGTVFNSPKFVSVMEVLIENNYMYTEVWDRVHIVYSLSKDLGLPGFRVGAIYSNDVMIVSAATKMSSFGLISSQTQYLLSALLSDKKFTKKYVSENQKRLKKRHEMLVGGLKQIGIRCLESNAGLFCWVDMRHLLSSNTFDGEMELWKKIVYEVGLNISPGSSCHCTEPGWFRACFANMSEDTLNIAIQRLKAFVDSRDNKDDIQNQKHSNKKKSFSKWVFRLSFNERQRER

SEQ ID NO: 3982 - protein, 486 aa, Leuconostoc mesenteroides subsp. mesenteroides ATCC 8293
MYSKESITGFPKDFLWGGATAANQIEGAWQVDGKGLTTAEVVRKAEDRRHGSMGDVNADTLQEAIADHSDVHYPKRRGVDFYHHYKEDIALFAEMGFKVFRLSIAWSRIFPTGLEENPNEAGLAFYDRVFDELDKYHIEPLVTLSHYEMPIELTKRYNGWLDREVIKAFNHYTETVFKRYKDRVKYWLTFNEINTSAWGFHETGAMDGDLSTQEQLQVRYQAVHHQFVASAIATKQLKEIAPNAKIGSMLARMQTYPATANPVDVQAAQVEDQKNLFYTDVQARGEYPEYMNRYFNENGIVINMSADDEKILKQYPVDFISFSYYMTNVTGVDGVEDGIGNMSLGGRNPYLKESEWGWQIDPIGLRVSLNVLWDRYRKPLFIVENGLGAVDELTADYKVHDDYRIDYLRLHIEQMKEAVIDGVDLMGYTMWAPLDIISFSTSEMSKRYGLIYVDQDDAGNGTLKRYKKDSFFWYQKVIESNGKTLE

SEQ ID NO: 3983 - protein, 870 aa, Phaseolus vulgaris
MVYTISGIRFPAVLSLHNSTLRGDRRAASLPVFLRKNNFSRKILAVKSSHDSDSPSSAIAESDKVLIPQDHDNSASLTDQLETPVITSVDAHNLEDLTMEDEDKYNIGEADSSYRQIEDGLGSVASSPVDVDIPAKKTSVSVGKEVKIPSVEAKPKIIPRPGAGQKIYEIDPSLLAYRDHLDFRFGQYKRLHDEINKHEGGLDAFSRGYEQFGFLRSATGITYREWAPGAKSAALIGDFNNWNPNADVMTRNEFGVWEIFLPNNVDGSPPIPHGSRVKIRMDTPSGIKDSIPAWIKFSVQAPGEIPYSGIYYDPPEEEKYVFKHPQPKKPKSLRIYESHVGMSSPEPKINTYANFRDDVLPRIKKLGYNAVQIMAIQEHSYYASFGYHVTNFFAPSSRFGTPEDLKSMIDKAHELGLLVLMDIVHSHSSNNTLDGLNMFDGTDGHYFHPGSRGYHWMWDSRLFNYGSWEVLRYLLSNARWWLDEYKFDGFRFDGVTSMMYTHHGLQVAFTGNYSEYFGLATDVDAVVYLMLANDLIHGLFPEAVTIGEDVSGMPTFCLPTQDGGVGFDYRLQMAIADKWIEILKKQDEDWKMGDIVHTLTNRRWLEKCVAYAESHDQALVGDKTIAFWLMDKDMYDFMSLDRPATPRIDRGIALHKMIRLITMGLGGEGYLNFMGNEFGHPEWIDFPRGEQQLPNGSVIPGNNYSYDKCRRRFDLGDADYLRYRGMQEFDQAMQHLEEKFGFMTTEHQYISRKNEGDKVIIFERGNLVFVFNFHWNNSYSDYRVGCATPGKYKIVLDSDDALFGGFNRLNHSAEYFTSEGWYDDRPRSFLIYAPSRTAVVYALADDLEPAFLDEVEPALADEVEPEPVDP

SEQ ID NO: 3984 - protein, 543 aa, Brevibacillus choshinensis
MAKQVKFSEDAPRSMLRGVETLPNAVKVTLGPKGRNVVLEKKFGSPLITNDGVTIPKEIELEDAYENMGAQLVKEVATKTNGIAGDGTTTATVLAAAMIREGLKNVAAGANPMVIRRGMEKAVGAAVEEIKSIAKPVENKSSIAQVAAISADDQEVGNLIAEAMEKVGKDGVITVEESKGFVTELEVVEGMQFDRGYASPYMITDTDKMEAVLNNPFILITDKKISNIQEVLPVLEQVVQSGKPLLIIAEDVEGEALATLVVNKLRGTFTAVAVKAPGFGDRRKAMLQDIAALTGGEVITEELGLDLKSTKLEQLGRAGKIVVTKENTTVVEGAGDKANIESRVAQIRQQIEDTTSDFDREKLQERLAKLAGGVAVIKVGAATETELKEKKLRIEDALNSTRAAVEEGIVPGGGTTLINAIKAVEGVKVEGEEAVGVHIVLRSLEEPVRQIAANAGLEGSVIVERLKKEPVGIGFNAATEEYVNMLEAGIVDAAKVTRSALSNAASVAAMFLTTEAVIADKPEENKAPMGMPDMGGMGGMGMM

SEQ ID NO: 3985 - protein, 372 aa, Xanthomonas campestris pv. vesicatoria str. 85-10
MINFDWLLMSKSTQSPLFSPVRLGALELANRVIMAPLTRNRAVAGQVPSPLAAEYYGQRATAGLIVAEGTQISPLGQGYLDTPGIYTKEQIEGWRAVTDEVHRRGGKIVLQLWHVGRVSHTSVLPPGEVPVAPSAIRAEGKTFTKNGFEDVSEPRALALDEIPGLIEDYRIAARNAIDAGFDGVEVHAANGYLLDQFLRDSSNQRTDTYGGDIENRTRLLAEVVQAIADEIGADRTGVRLSPVTPVYGAHDSDPQPLFERAVERLNLIGGLAFVHVIEGATGGPRDNIAFDYAALRAKFDGAWIANNGYDRGMSEQAISSGYADAIAYGRPFIANPDLVRRLRENAPLAEIDQATMYGGGAKGYTDYPALPE

SEQ ID NO: 3986 - protein, 432 aa, Zea mays
MDERRTILMDRYEIGRQLGQGNFAKVYFARNLTDGQSVAIKMIDKDKITRVGLIVQIKREISIMRLVKHPNVLQLFEVMASKSKIYFVLEYAKGGELFNKVSKAKLSEDAARRYFHQLVNAVDYCHSRGVYHRDLKPENLLLDENENLRVSDFGLSALSESKRHDGLLHTTCGTPAYVAPEVLGRRGYDGTKADIWSCGVILFVLVAGYLPFHDPNLIEMYRKISRAEYRCPRSFSGELKDLLFRMLDPDPSTRISISRIKRSTWYRKPIEANAAKIKHGTARDTTVRDGEAATASSSIECSNRPEEDQGSSSLPNLNAFDIISLSTGFDLSNLFEERHGRREERFTTRQPVGAVFGRLKELAEAVEAEKFQKEREAGSLNLACAEGKGLKGVPWKLDAEVFELAPSFLLVELKKASRDTIEYQRLREGRKC

SEQ ID NO: 3987 - protein, 893 aa, Oryza sativa
MDGRSILMGRYEVGKQLGQGTFAKVYYARNLTTGQAVAIKMINKDKVMKVGLMEQIKREISIMRLVKHPNVLQLFEVMASKSKIYFVLEYAKGGELFNKIAKEGKLSEDSARRYFHQLINAVDYCHSRGVYHRDLKPENLLLDENENLKVSDFGLSALAESKRQDGLLHTTCGTPAYVAPEVLSRKGYDGAKADVWSCGVILFVLVAGYLPFHDPNLIEMYRKICRADFRCPRYFSAELKDLIHKILDSDPSTRISIPRIKRSTWYRKPVEINAKNSEAATTNSISSGVATTSGSAECSTSEENQGSLSLPNLNAFDIISLSTGFNLSGFFEDTHGHQEERFTTRQPVTTVLGKLKELAKRLKLKVKKKDNGVLRLAAPKEGKKGFLELDAEIFEVTPSFLLVELKKTNGDTMEYRKLVKEDIRPALKDIVWVWQGDEHLNSQSILQGEQQQSPLPPELPQDQLQPSLPQQEKQDMPEPPLLPQVNASTGNHNDHWLVHWLMMKPFRFPPPDSVPSTGRDEEEGSSHHGNGSGAARENPENPLPDLALAKSESDRIKAFYQTVLSAIVVFIVAALSGYKDMKPLYSTTNHKKVHLSNLLVIEGFCMIATFICAAVLMMYEFYTCRDLTVLIAVAGAMLVATDTILVVIANRDNAVFAVLFVPVLLLVGMAVYTGASMEEQPPNSPHDGGYDEATKSTFDLATVSTMAALGLQGTIVFGYLKTPEKKSEHDDPPLDLAVCYIASTVCLTVMAFLDGFVVLSVWPEAVALVLYYAAQLCSGRQPGGGVGSRPWIEFVFRIVATAGFTLMAGLYAAFLGTNHYSVYLKAAMLVLLMAVLSSLSRLANPVYMPEIDGALLEFCVAGVALAFPAVSLLVACPLVLKVFVDLYIHHSSL

SEQ ID NO: 3988 - protein, 429 aa, Arabidopsis thaliana
  misc_feature (388)..(388): Xaa can be any naturally occurring amino acid
MVVRKVGKYELGRTIGEGTFAKVKFAQNTETGESVAMKIVDRSTIIKRKMVDQIKREISIMKLVRHPCVVRLYEVLASRTKIYIILEYITGGELFDKIVRNGRLSESEARKYFHQLIDGVDYCHSKGVYHRDLKPENLLLDSQGNLKISDFGLSALPEQGVTILKTTCGTPNYVAPEVLSHKGYNGAVADIWSCGVILYVLMAGYLPFDEMDLPTLYSKIDKAEFSCPSYFALGAKSLINRILDPNPETRITIAEIRKDEWFLKDYTPVQLIDYEHVNLDDVYAAFDDPEEQTYAQDGTRDTGPLTLNAFDLIILSQGLNLATLFDRGKDSMKHQTRFISHKPANVVLSSMEVVSQSMGFKTHIRNYKMRVEGLSANKTSHFSVILEXGDAEEYLKFYKTFCSKLDDIIWKPPDASMKNRVTKAKSKRR

SEQ ID NO: 3989 - protein, 270 aa, Pleurotus djamor
AHFDRERDPERVVHAKAAGAHGYFEVTHELSDITSNPLLTSVGKKVDLTARFSTVGGESGSADTARDPRGFAFKLRTEQGNWDWVFNNTPIFFIRDPAKFPHFIHTQKRDPQTHLKDADMFWDYLGQNPESIHQMMILFSDRGTPDGVDSMHGYSGHTFKWLKNDGTFVYVQVHVRADQGFKTLDGPTAHKLTADNPDYSTEKMFNRIEKGDYPSWTVYIQTMTPEQAESFRYNILDLTKVWPHAQYPLRPIGKVVLNKNPVTYFAEVEQ

SEQ ID NO: 3990 - protein, 500 aa, Gloeobacter violaceus PCC 7421
MSTKTVLVWYRNDLRVHDHEPLTSALHKNARVVALYCFDPRQFGKAPFGFEKTGPFRARFLLESVADLRRSLRQLGSDLLVRRGHPEEVIPALVSELEIAAVHYHGEVTSEELVVERDLQAALAPLNVPVRSFWGTTLVHPDDLPFAIEAIPELFTDFRKQVERSAAINPPLPAPAKLPPLPAVDPGEIPQLADLGLESPVTDERAVLQFKGGETSGLARLEEYFWQKSLLKSYKQTRNGMLGADYSSKFSAWLALGCLSARYIHEQVQTYETKRIKNDSTYWLIFELLWRDYFRFIAAKHGDRLFYTAGLRGLDIPWKEDWERFELWRTGQTGFPLVDANMRELAATGFMSNRGRQNVASFLTKNLGIHWHMGAEWFESRLIDYDVASNWGNWNYTAGVGNDARGFRFFNILKQARDYDPDGAYVKHWLPELAGLPPARVHEPWKLLPVEQKRFGVRLGVDYPQPVVDLFQSAAANEAIYNAAWEHHHRKRRGQPRSRT

SEQ ID NO: 3991 - protein, 377 aa, Blossfeldia liliputana
TDVPAAAAGAFKSYKLAAKAISRLQSLPSRNMALLCDVLVKEVSELTGYDRVMVYKFHEDEHGEVISEYLRPDMEPYLGLHYPATDIPQASRFLFLKNRVRLICDCLATPVKVIQGTKWAQPLSLGGSILRAPHGCHALYMANMGSIASLVMAVTVNDDEDEVKSDPSTGRRLWGLVVCHHTSSRFIPFPLRYACELLVQVFGIQINKEVELAAQIRESHILRIQTVLCDMLLRDSPVAIVTQSPNVMDLVKCDGAALFYEGQVWLLGITPTEEQIKNITQWLLKYHGSTKGLSTDSLMEAGYPGASELGDAVCGMAAVRISSKDVLFWFRSHTAKEIKWGGAKHDPVDGDDGRKMRPRSSFKAFLEVVKWRSQPWE

SEQ ID NO: 3992 - protein, 305 aa, Corynebacterium glutamicum ATCC 13032
MSVVGTGLFFGSPEEERDKLMQSLMDQKNKLSKSEGIPLVTLNDGKTIPQLGFGVFKVDPDEAERVVTEALEVGYRHIDTAAIYGNEEGVGRAIAKSGIPREELFITTKLWNDRHLDVEAAFEESLQKLGLDYVDLYLVHWPAPKNDNYVAAWKGLEKLGDRARSIGVCNFLPEHLEKLLAEATTVPAINQIELHPALQQRDAVEASLAAGITVESWGPLGQGRFDLGAEEPIAAAAKNHGKTPAQVVIRWHLQNGFVVFPKTVTKSRMVENIDVFDFELSDEEMAAITALERNDRGGSHPNDLN

SEQ ID NO: 3993 - protein, 507 aa, Arabidopsis thaliana
MRTIYLSLLVFIIVLALNEVMAKKHSSTPKLRRSDFPEDFIFGAATSAYQVEGAAHEDGRGPSIWDTFSEKYPEKIKDGSNGSIASDSYHLYKEDVGLLHQIGFDAYRFSISWSRILPRENLKGGINQAGIDYYNNLINELLSKGIKPFATIFHWDTPQSLEDAYGGFLGAEIVNDFRDYADICFKNFGDRVKHWMTLNEPLTVVQQGYVAGVMAPGRCSKFTNPNCTAGNGATEPYIVGHNLILAHGEAVKVYREKYKASQKGQVGIALNAGWNLPYSESAEDRLAAARAMAFTFDYFMEPLVTGKYPIDMVNYVKGGRLPTFTAKQSKMLKGSYDFIGRNYYSSSYAKDVPCSSENVTLFSDPCASVTGEREGVPIGPKAASDWLLIYPKGIRDLLLYAKYKFKDPVMYITENGRDEASTGKIDLKDSERIDYYAQHLKMVQDAISIGANVKGFFAWSLLDNFEWATGYAVRFGLVYVDFNGGRKRYPKKSAKWFKKLLNEKKKN

SEQ ID NO: 3994 - protein, 387 aa, Rhodopseudomonas palustris CGA009
MSQPPLFRPFTLRGITTKNRILISPMCQYSAVDGVANDWHLVHLGKFAQGGTGIVMVEATAVTANGRITHGDLGLWNDDQIRPLERIAAFLRDNGAVPAIQLAHAGRKASMQRPWYGNAALTAEDIARGDQPWEIVAPSPIPMDEGWLTPQELTDDNLDYLLEAWRSATLRAVEAGFEMLEVHCAHGYLLHSFLSPLSNKRTDAYGADRAGRMRFPLEVIETVRAAWPDTLPLAIRVSSVDGVDGGIELADSVVFAREAKARGADIIDCSSGGLLGSATANRIPRGYGFQVPFAEAIRTEAEIPTIAVGLIIHPDQAEKIVEQGQADLIAIGREALFDPNWALHAQLELTEGDEVFADWPKQYGWWLERRESGLRKLDGPKLPFRRS

SEQ ID NO: 3995 - protein, 335 aa, Schizosaccharomyces pombe
MQQTYKPNTSALKDGAPKATVDQKQLLPCKYRVGRVLGGGTYATVREAVHIETNKMYAAKIMNKKMMEKKQDFVKNEIAILKRVSYEHPNILHLVDFFETVNNLYLITELATGGELFDRICAKGSFYEADAAALMRTTTSAVKYLHDNGIVHRDLKPENLLYRSKDPNSDLLIADFGLSHFYEDSQYYMLMTACGTPEYMAPEVFRRTGYGKPVDMWAIGVITYFLLSGYTPFARPSQVEVIEAILANEYTFNDPCWSGISETAKDFIKKCLENDPSKRLTAADALKHPFLSEKRPATSNLLPNVRENFNARKTFRTAYNAVRAFNTWKKLENKH

SEQ ID NO: 3996 - protein, 532 aa, Vibrio vulnificus YJ016
MAAKDVLFANDARQKMLKGVNLLADAVKVTLGPKGRNVVLDKSYGAPSITKDGVSVAKAIELKDKFENMGAQMVKQVASKANDEAGDGTTTATVLAQALINEGLKAVAAGMNPMDLKRGIDKAVDSAVEKLRAMAQPCSDKESITQVGSISANSDRAIGDIIAEAMEKVGRNGVITVEEGQGLSNELSVVEGMQFDRGYLSPYFITNQDSGAVELDNPYILLVDKKVSSIRELLPVLESVAKASRSLLIIAEDIDGEALATLVVNNLRGIVRAAAVKAPGFGDNRKAMLEDIAVLTAGTVISEEIGLELEKATIEQLGSAKKVTITKDTTTIVGGAAQESAIRDRVATIEKQIENTTSSYDKEKLQQRIAKLSGGVAVIKIGAATEVEMKEKKDRVDDALHATRAAVEEGIVAGGGVALTKIASELADLKGDNDDQNVGIRVALRAMEEPLRQIAINAGDEGSVVANAVKAGDAHYGYNAATGEYGNMIEMGILDPAKVTRSALQYAASVAGLMITTEAMITDHVADTSSEI

SEQ ID NO: 3997 - protein, 100 aa, Cryptococcus neoformans var. neoformans JEC21
MPVRGSDIVLILVAIIFPPAAAAIITGCSCDLLINILLTILGYLPGHIHAFWLIYKRIKAEEAYGNGGYTYLGNGNFVGNAPGGVAPGAPAQQPYYGSTR

SEQ ID NO: 3998 - protein, 244 aa, Eucalyptus globulus
MGRGRLQLKRIENKINRQITFSKRRAGLLKKAHEISVLCDAEVALIVFSAKGKLFEYSTDSCMERILERYERYSYAEHQVLASETESIGSWTLEHAKLKARLEVLHRNYRHFMGEDLDSLSLKDLQNLEQQLESALKHIRSRKNQLMHESISVLQKKDRALQEQNNLLTKKIKEKERALAQQAQWEQQDHALDSPVVLPHYLPSLDINGSYQARHNGHDDGENLTQPRAGTLLPPWISASQLRL

SEQ ID NO: 3999 - protein, 634 aa, Lactobacillus plantarum WCFS1
MVKQTTEMNDASYLFNTGAGFNSQDYLGCHLAASGRAVFRVWAPHAKAVGVVGDFNDWQPSALKLLGATGIWQGQVPNVHAGQLYKFQITTPTGQVQLKIDPFAQQFERKPGDAAVVVEPMTMRWHDSLWLARRKKSRAANRPINIYEVHLGSWRRHLDGSYYTYAELAAELIPYVKQRGYTHIELMPVMEHLLDASWGYQQLGYFAPTSRFGKRDSFLSFVDQCHQANIGVFVDWVPGHFIRNYDALYQYDGTPTFEYADPERANNRRWGAWNFDLGKTQVQSFLISSAEYWLDQCHLDGLRVDAVSNMLYCDYDEGREGQVNQYGDNRNLEGIAFLQKLNTTVLTHHPDILMIAEESSAYPQVTGSVANGGLGFNYKWNMGWMHDTLDFFMMDPLYRHDHFNLLTFAFVYMFDERFILPFSHDEVVHGKKSLMHKMSGDRYNQFANLRTMLTYMAAFPGKQLNFMGSEWGQFLEWRDWSALEWVDLKDDLNHRMQQFTTQLNAVYRHNRPLWEQDHDPAGIIYTHTDDPDSSTMGFIRQAKRKYSFVVAAFNFVPVERQDYRIGVPYRGRYELLLNTEAQAFGGTWTKLETTFTAVDKPYRGQPASFTVTLPAMGALLIRPVKVIGGVKHAR

SEQ ID NO: 4000 - protein, 520 aa, Zea mays
MGNSLGCSASGERLVSAARDGDAIEARMLLELSPALARYSTFGGLNTPLHFAAAKGHLDIVTMLLEKGADVNARNYCGQTALMHACRHGHWEVVQMLLLFRCNVTRADYLSGRTALHFAAHDGFVRCIRLLVADFVPSVALEDIASSVVDGGDCQTNSGSSPNSSSGQKFNESARVRYINKPADGGVTALHMAALNGHLDCMQLLIDLGANVSAVSFPYGTTANLIGAGSTPLHYAAGGGKQECCELLISKGASRLTLNCNGWLPVDVARIFGRRSLEPLLSPNSHSNVPVFQPSSYLALPLMSILNIAREFGLQHTTPSIDDNDLCSVCLERSCSVAAEGCSHEFCIKCALYLCSTSNIRVEFTGPPGSIPCPLCRNGIMSFTKLPSTPTEGLKSGSALTFCNPCILNTRSMDSPATFSKAEIRRNRVAAVSSELVCPITCSPFPSSALPTCRCSDDDPCGDTDVQDGPEFQSPRPSHSASMELDKMGEGDLDRASCSGMFWSRRSCHREQQCDAEINA

SEQ ID NO: 4001 - protein, 493 aa, Burkholderia pseudomallei K96243
MRSIAARSSHAGAGLEQEGVMDLEEGVRQLYPYAAEFGALHEFPERGMPRERLLEELRSMAVREDRKWESGRCSGTMYCGDHEHYAFLNEAYGLFSHVNALQRDLCPSMNRMESEIVAMTVALLHGEAVQRHDGAHRACGALSLGGTESILNATLAYREKARAERGIERPRMIWPASAHPAFRKAAHLFGFDVTVAPIDPVTMQVDADFVRDAVDANTVMLVGSACNYPYGTIDPIGALSAIAVEKDVWLHVDGCLGGWMLPWGEALGYPDIPAFDFRLPGVTSISADTHKFGYGPKGGSVLAWRDASFRRHQYFLMTDWVGGVYGSPGLTGSRSGGLIAATWAALRSLGREGYLARAKAIFETAFDMQAAVRAIPELRVLGKPTFCFAFTSDAFDIYHVNDFMRQRGWRFNGLQHPDALHMCVTGPQTQPGVAERFRQDLGEAVEHARHRAHARPQSSGVYGGDAAGLDLRDDARARAFFTQVLDLFTDCPL

SEQ ID NO: 4002 - protein, 467 aa, Listeria monocytogenes EGD-e
MLYSEDDKRKQESYRIPLFGSEEESTSIPKYVLKKEPMEPRIAYQLVKDQLMDEGNARQNLATFCQTYMEKEAEILMAETLEKNAIDKSEYPQTAELENRCVNILADLWNAPKDMSYLGTSTVGSSEACMLGGLAMKFRWRNNAEKRGLDIQAKRPNLIISSGYQVCWEKFCVYWDVDMRVVPMDKNHLSLDVDKVFDLVDEYTIGVVGILGITYTGKFDDIQLLDEKVEAYNETNEHQLVIHIDGASGAMFTPFVNPELPWDFRLKNVVSINTSGHKYGLVYPGVGWILWKDKEYLPKELIFEVSYLGGSMPTMAINFSRSASQIIGQYYNFLRYGFEGYREIHEKTKKTAIYLAKTVEKSGYFEIINDGANLPIVCYKMKEGLDVEWTLYDLADQLLMKGWQVPAYPLPADLSDTIIQRFVCRADLGYNVAEEFAADFADAIHNLEHARVLYHDKERNDSYGFTH

SEQ ID NO: 4003 - protein, 377 aa, Maihuenia patagonica
TDVPVVAAGAFKSYKLAAKAISRLQSLPSRNMSLLCDVLVKEVSELTGYDRVMVYKFHEDEHGEVISEYRRPDLEPYLGLHYPATDIPQASRFLFLKNRVRMICDCLATPVKVIQGKKWAQPLGLGGSILRAPHGCHALYMANMGSIASLVMAVTINEDEDEVKSDPSTGKRLWGLVVCHHTSSRFIPFPLRYACELLVQVFGIQINKEVELAAQIRESHILRIQTVLCDMLLRDSPVAIVTQSPNVMDLVKCDGAALYYKGQVWLLGITPTEEQIKNITQWLLEYHGSTKGLSTDSLMEAGYPGASELGDAVCGIAAVRISSKDVLFWFRSHTAKEIKWGGAKHDPVDGDDRRKMHPRSSFKAFLEVVKWRSQPWE

SEQ ID NO: 4004 - protein, 125 aa, Brassica napus
  misc_feature (12)..(12): Xaa can be any naturally occurring amino acid
ADGQRCDQMFFXELMKEASDIARCFKSRVRHLLHLHVATGMQRYMMRLRRCFTDEKQALIHEGHILIQYITMNAIAIRKILKKYDKVHGSENGKNFKLKMRAERIELLHSPWLIELGAFYLNSGL

SEQ ID NO: 4005 - protein, 377 aa, Austrocylindropuntia subulata
TDVPAAAAGAFKSYKLAAKAISRLQSLPSRNMSLLCDVLVKEVSELTGYDRVMVYKFHEDEHGEVISEYRTPFLESYLGLHYPATDIPQASRFLFLKNRVRMICDCLAAPVKVIQDKKLAQPLSLGGSILRAPHGCHAQYMENMGSIASLVMAVMINEDEDEVKSDPSTGKRLWGLVVCHHTSSRFIPFPLRYACELLVQVFGIQINKEVELAAQIRESHILRIQTVLCDMLLRDSPVAIVTQSPNVMDLVKCDGVALYYKGQVWLLGITPTEEQIKNITQWLLEYHGTTKGLSTDSLMEAGYPGASELGDAVCGMAAVRISSIDVLFWFRSHSAREIKWGGAKHDPVDSDDRRKLHPRSSFKAFLEVVKWRSQPWE

SEQ ID NO: 4006 - protein, 416 aa, Burkholderia fungorum LB400
MPAVKPILKSNKLLNVCYDIRGPVLEHAKRLEEEGHRIIKLNIGNLAPFGFDAPDEIIQDMILNLPGSSGYSDSKGVFAARKAIMHYTQQKGVHGVELDDIYIGNGASELIVMALQGLLNDGDEVLLPAPDYPLWTAGVSLSGGTPVHYICDESNSWMPDLDDIRAKITPNTRALVVINPNNPTGALYSDELLLGLIEIARQHGLVIFADEVYDKIVYDGKKHTSMAALSEDVLTVTFNSLSKSYRSCGYRAGWMFISGLTAGENRRHAKDYFEGLGILASMRLCPNVPGQYAIQTALGGYQSINDLIVPSGRLYKQRELAYDMLTAIPGVSCVKPEAALYMFPRLDPKIYPIQDDQQFILDLLLEERVLLVQGTGFNWPTPDHFRVVFLPNVDDLADSINRIARFLDGYRKRHTA

SEQ ID NO: 4007 - protein, 319 aa, Paracoccidioides brasiliensis
MATDPSKYKFNHTMIRVKDPKRSVEFYNFLGLSQINRLDFPENKFSLYFLAYDGPQALSGSRHWTDRNGIIELTHNYGTENDPSYTVSTGNVEPHRGFGHLAISVDNVELACKRLEDANYSFQKKFAEGRMRNIAFVKDPDGYWVEIIRKHQTDAAVAQTNPSTYRMNHTMVRVKDPEASLKFYQEVFGMTLLRTLELAGADCNLYFLAYPSSNPSLKEGDANPVAEWEGLLELTWNHGTEKQEGKVYHDGNSEPQGFGHICVSVDDLDAACARFEAQNVTWKERLTDGRMKNVAVILDPDGYWIEIIQNESFKNRSHW

SEQ ID NO: 4008 - protein, 375 aa, Pereskiopsis porteri
TDVPAAAAGAFKSYKLAAKAISRLRSLPSRNMSLLCDVLVKEVSELTGYDRVMVYKFHEDEHGEVISEYRTPDLEPYLGLHYPATDIPQASRFLFLKNRVRMICDCLAAPVKVIQDKKLAQPLSLGGSILRAPHGCHAQYMANMGTIASLVMAVTINEDEVKSDPSTGKRLWGLVVCHHTSSKFIPFPLQYACELLVQVFGIQINKEVELAAQIRESHILRIQTVLCDMLLRDSPVAIVTQSPNVMDLVKCDGAALYYKGQVWLLGITPTDEQIKNITQWLLEYHGSTKGLSTDSLMEAGYPGASELGDAVCGMAAVRISSKDVLFWFRSHSAREIKWGGAKHDPVDSDDRSKMHPRSSFKAFLEVVKWRSQPWE

SEQ ID NO: 4009 - protein, 728 aa, Salmonella enterica subsp. enterica serovar Paratyphi A str.
MSSRIDRDVINALIAGHFADPFSVLGMHQTQAGLEVRALLPDATDVWVIEPKTGRKVGKLECLDARGFFCGVLPRRKNFFRYQLAVTWHGQQNLIDDPYRFGPLMQEMDAWLLSEGTHLRPYETLGAHADTMDGVTGTRFSVWAPNARRVSVVGQFNYWDGRRHPMRLRKESGIWELFIPGAHNGQLYKFELLDANGNLRIKADPYAFEAQMRPETASMICGLPEKVTPSEERQKANQFDAPISIYEVHLGSWRRHTDNNFWLSYRELADQLVPYAKWMGFTHLELLPVNEHPFDGSWGYQPTGLYAPTRRFGTLDDFRYFINAAHAAGLNVILDWVPGHFPSDEFSLAEFDGTHLYEHSDPREGYHQDWNTLIYNYGRREVSNYLVGNALYWMERFGIDALRVDAVASMIYRDYSRKEGEWIPNEFGGRENLEAIEFLRNTNRIIGEQVPGAVSMAEESTDFSGVTRPPETGGLGFWYKWNLGWMHDTLDYMKLDPVYRQYHHDKLTFGMLYNHTENFVLPLSHDEVVHGKKSILDRMPGDAWQKFANLRAYYGWMWAFPGKKLLFMGNEFAQGREWNHDASLDWHLLEGGDNWHHGVQRLVRDLNHTYRHHKALHELDFDAYGFEWLVVDDNERSVLIFVRRDKAGNEIIVASNFTPVPRHDYRFGINQPGRWREILNTDSMHYHGSNTGNGGVVHSDEIESHGRQHSLNLTLPPLATIWLMREGE

SEQ ID NO: 4010 - protein, 682 aa, Shewanella oneidensis MR-1
MMRKLILATSIATVFVGFSAWAVPPTIQISELPTLKQEAQHKVASKRVTDLYTRSHYHRFALDDAFSAQIFDRYLQQLDYRRNVLTQADVDSFKPYINQFDDMLSSGELDPAYKMFDLVQKRRYEGFVYALSLLDKEMDFTAPGDVYDYDREDVAWPKDQAEINELWRQRVKYDALNLKLTGKKWLEIVDILQKRYNNAIKRLTQTNSEDVFQAVMNAFSRSIEPHTSYLSPRNAERFQMEMNLSLEGIGAQLQLEDDYTVIKSLIAGGPAAGSEKLSPEDKIVGVGQEGGEIVDVIGWRLDDVVELIKGPKGSKVVLQILPKKGGSNAKPFNVTLVRDKIRLEDRAATSKIIEPKDGVYANRKVGVIQIPGFYMNLSQDVEKELLKLNEAKVEGVVIDLRGNGGGALTEAVLLTGLFIDMGPVVQVRDADGRVSAHRDNDGKTTYTGPLTVMVDRYSASASEIFAAALQDYDRALIVGESSFGKGTVQQHKSLGRIYDMYEKPIGHVQYTIQKFYRINGGSTQLKGVTPNIAYPSALEPGEYGEAEEKNALPWDKVPMAQYGTLNDITPELVASLEKKHLARIQNSVEFNYINQDIADFKKHHKEKTVSLVESERIASREADEKKVLDRTNERRVANGLAPVKSMEDIKDDVVAPDAFLDETAYITLDMVDAKKLANAGTK

SEQ ID NO: 4011 - protein, 841 aa, Glycine max
RNNKVRMIVDCHAKHVRVLQDEKLPFDLTLCGSTLRAPHSCHAQYMANMDSIASLVMAVVVNDNEEDGDTDAIQPQKRKRLWGLVVCHNTTPRFVPFPLRYACEFLAQVFAIHVNKEIELEYQIIEKNILRTQTLLCDLVMRDAPLGIVSESPNIMDLVKCDGAALIYKNKVWRLGVTPSESQIREIAFWLSEYHMDSTGFSTDSLSDAGFPSALSLGDVVCGMAAVRVTAKDVVFWFRSHTAAEIRWGGAKHEAGEKDDGRRMHPRSSFKVFLDVVKARSLPWKEYEIDAMHSLQLILRNAFKDTESMDLNTKAINTRLSDLKIEGMQELEAVTSEIVRLIETATVPILAVDVDGLVNGWNIKIAELTGLPVGEAMGKHLLTLVEDSSTDRVKKMLNLALLGEEEKNVQFEIKTHGSKMDSGPISLVVNACASRDLRDNVVGVCFVAHDITAQKNVMDKFTRIEGDYKAIVQNRNPLIPPIFGTDEFGWCCEWNPAMTKLTGWKREEVMDKMLLGELFGTHMAACRLKNQEAFVNLGVVLNKAMTGLETEKVPFGFFARNGKYVECLLSVSKKLDVEGLVTGVFCFLQLASPELQQALHIQRLSEQTALKRLNALSYMKRQIRNPLCGIIFSRKMLEGTALGTEQKQLLRTSAQCQQQLSKILDDSDLDSIIDGYLDLEMAEFTLHEVLVTSLSQVMTKSNGKSIRIVNDVAEQIVMETLYGDSLRLQQVLADFLLISINFTPNGGQVVVAGTLTKEQLGKSVHLVKLELSITHGGSGVPEALLNQMFGNNGLESEEGISLLISRKLLKLMNGDVRYLREAGKSAFILSAELAAAHNLKG

SEQ ID NO: 4012 - protein, 221 aa, Griffithsia japonica
ARGSLGSIFSVYYRKSAPGKEGDTSDLLQRPGFEQVAAGYCVYGSTTYLTFSMGYGVHVFILDTLSGHFVLAKQHVQTPKAGPIYSVDTSVLPNVVDGVRKYVDLLEAEGSGKKFRHLNNLVANFHNVLTKGGILMLPGPQKQDLAKFLTEAAPLAFVARQAGARASVGKRNLLELSAWSLEMSVPLFVGSTADVDRLEEMVLGHAVEEKNSVDPSTMHKI

SEQ ID NO: 4013 - protein, 785 aa, Ralstonia solanacearum
MKIVCIGGGPAGLYFALLMKRRDPSHDITVVERNRPYDTFGWGVVFSDQTLGHLQRADPESAAQILDAFNHWDDIEVHIRGQVVRSGGHGFCGIGRKRLLNILQARCEAVGVKLVFETDVQDDGAYADADLIIASDGLNSRIRAKYAATYQPDIDTRRCRFVWLGTHKLFEAFTFAFEQTEHGWFQAHAYRFDADTSTFIVETPEEVWRKAGLETMEKDEAIAFCERLFAKYLDGHKLMSNAAHLRGSAQWIRFPRVVCRRWVHDSGRAPVVLMGDAAHTAHFSIGSGTKLALEDAIELARCIGEQPADLRAALEHYEAVRSVEVLRIQNAARNSTEWFENVARYATLPTEQFAYSLLTRSQRISHENLRQRDRAYLESFEDWIAGQAGAPRAPDRAPVPPMFTPFTVRGLTLKNRVVVSPMAQYSCRDGLPADYHLVHLGARAMGGAGLVMAEMTCVSPDARITPGCPGLWNAEQRDGWARIVRFVHDHSEARLGIQLGHAGAKGSTRVAWEGIDLPLPDGNWPLISASPQQYLDGVSQWSRAMTRDDMDRVRDDFVRAARLAVEAGFDWLELHCAHGYLLSSFISPLTNLRSDAYGGALENRLRYPLEVFRAVRAVWPAERPMSVRISAHDWVQGGITPDDAVEIARLFKAAGADMIDCSSGQVSKKEQPVYGRMYQTPFADRVRNEAGIATIAVGAISEADHVNSIIAAGRADLCAVARPHLANPAWTLNEAARIGYLDMPWPRQYRAGKLQLERNLERERALAAQAAGLSPLEQANRMQGV

SEQ ID NO: 4014 - protein, 90 aa, Ricinus communis
RESFPVPSAICSGKREKCVIEKENNFKQPGERYRSWPPDRQERSLNRLVGGFSEPRITQELRTIWISYWIQCDKSLGQKLATRLNVKPSI

SEQ ID NO: 4015 - protein, 507 aa, Burkholderia pseudomallei K96243
MRVACFVDFMQPHPGNIRTHIGVPTDVGTAKENVMDLEEGIRRLYPYAEEFGVMRGFPEQGTPRDELLAQLRSMAEREDRNWESGHSSGAMYSGDRDHHAWLNEAYSVFSHVNALRRDMCPSMNRMESEIVGMTVAMLHGDAVAAHHPGQRACGMITLGGTESILGATLAYREKARAERGIERPRMIWPASAHPVFRKAAHLFGFDVTVAPIDPVTMQVDADFVRDAVDANTVMLVGSACNYPYGTIDPIGALSAIAVEKDVWLHVDGCLGGWMLPWGEALGYPDIPAFDFRLPGVTSISADTHKFGYGPKGGSVLAWRDASFRRHQYFLMTDWVGGVYGSPGLTGSRSGGLIAATWAALRGLGREGYLARAKAIFETAFDMQAAVRAIPELRVLGKPTFCFAFTSDAFDIYHVNDFMRQRGWRLNGLRRPDALQMCVTGPQTQPGVAEQFRCDLGAAADYARAHAQERPKTSGVYASDAAGVDLSDDARTRAFFTQVIDLFTDCPL

SEQ ID NO: 4016 - protein, 284 aa, Glycine max
MKGEYLEQQQQHPKSETTPPSMFSKLQPQHHPFPHHPFQLSAEEENRVGAATTPSTVQKANSSGGDGATIEVVRRPRGRPPGSKNKPKPPVIITRDPEPAMSPYILEVSGGNDVVEAIAQFSRRKNMGICVLTGSGTVANVTLRQPSTTPGSTVTFHGRFDILSVSATFLPQQSGASPAVPNGFAISLAGPQGQIVGGLVAGGLMAAGTVFVIAASFNNPAYHRLPPEEEGASAGDGHSPQVSGGGDSGHGQAESCGMSMYSCHLPSDVIWAPTARPQPPPPPY

SEQ ID NO: 4017 - protein, 377 aa, Xanthomonas campestris pv. vesicatoria str. 85-10
MCAQLRDSFATPSEPHPCVRRSSGLVHLFAGSVRTGSRLLYGESRVPSTGLDPHAAAPQPATAPPRGGLAARVGSLRRWVDSQTDEPLDEARADRIDWLRAVPFIALHLACLAVFWVGASWFAVGMAVALYALRMFALTGFYHRYFSHRAFKTSRVLQFVFAAIGATCVQRGPLWWAAHHRNHHRHTDTGRDPHSPAQHGFWWSHTGWFLTPRNFRTDWEVIPDLRRFAELRFLDRFDIVMPVLLALGLYLLGDWLAVAAPALKTSGAQLLVWGFVISTVALFHATFTINSLAHRFGSRRFDTRDDSRNNWLLALLTFGEGWHNNHHFFPGSARQGLRWWEYDMTWYGLTAMSWVGLVWDLKPMPKLLTQRAERVKR

SEQ ID NO: 4018 - protein, 377 aa, Grahamia bracteata
TDVPVAAAGAFKSYKLAAKAISRLQSLPSRNMLLLCDVLVKEVGELTGYDRVMVYKFHEDEHGEVISEYRRPNLEPYLGLHYPATDIPQASRFLFLKNRVRMICDCLATPVKVIQDKKLTQALSLGGSILRAPHGCHAQYMANMGSIASLVMAVTINEDEDEVKSDPSSGKRLWGLVVCHHASSRFISFPLRYACELLVQVFGIQINKEVELAAQIRESHILRIQTVLCDMLLRDSPVAIVTQSPNVMDLVKCDGAALYYKGQVWLLGSTPTQEQIKNITQWLLEYHGSTKGLSTDSLMEAGYPRASELGDPVCGMAAVRISSKDFLFWFRSHTAKEVKWGGAKHDPIDNDDERKMHPRSSFKAFLEVVKWRSQPWE

SEQ ID NO: 4019 - protein, 377 aa, Maihuenia poeppigii
TDVPVAAAGAFKSYKLAAKAISRLQSLPSRNMSLLCDVLVKEVRELTGYDRVMVYKFHEDEHGEVISEYRRPDLEPYLGLHYPATDIPQASRFLFLKNRVRMICDCLATPVKVIQGKKWAQPLSLGGSILRAPHGCHALYMANMGSIASLVMAVTINEDEDEVKSDPSTGKRLWGLVVCHHTSSRFIPFPLRYACELLVQVFGIQINKEVELAAQIRESHILRIQTVLCDMLLRDSPVAIVTQSPNVMDLVKCDGAALYYKGQVWLLGITPTEEQIKNITQWLLEYHGSTKGLSTDSLMEAGYPGASELGDAVCGIAAVRISSKDVLFWFRSHTAKEIKWAGAKHDPVDGDDRRKMHPRSSFKAFLEVVKWRSQPWE

SEQ ID NO: 4020 - protein, 373 aa, Triticum aestivum
MASSAGDMPEVKFKRTGSLGSSDYVRADKIDLTSLDIQLEQQLNKKWGKTNIKSQGPRARWEIDLAKLEIRHVIAQGTYGTVYRGTYDGQQVAVKLLDWGEDGFATEAETTALRTSFKQEVAVWHKLSHPNVTRFIGASMGTTDLKIPVNDNGARANLPARACCVVVEYLAGGTLKQYLIKNRRRKLAYKVVVQLALDLSRGLSYLHSRKIVHRDVKTENMLLDTQRNLKIADFGVARVEAQNPKDMTGATGTLGYMAPEVLDGKPYNRKCDVYSFGICLWEIYCCDMPYPDLSFADVSSAVVHQNLRPDIPRCCPSAFANIMRKCWDGNPDKRPDMDEVVQLMEALDTSKGGGMIPDGQSSGCLCFTRARGP

SEQ ID NO: 4021 - protein, 479 aa, Arabidopsis lyrata subsp. lyrata
KGEEFTCEENEPFTCDQTKLFNSGSFEKDFIFGVSSSAYQVEGGRGRGLNVWDGFTHRFPEKGGPDLGNGDTTCDSYTNWHKDIDVIDELNATGYRFSFAWSRILPKGKRSRGVNEGGIDYYNRLIDNMIARNITPFVTLFHWDLPQTLQDEYNGFLNRTIIDDFKDYADLCFEKFGDRVKNWITINQLYTVPTRGYAIGTDAPGRCSPKIDKRCPGGNSSTEPYLVAHNQLLAHAAAVDVYKTKYKDQGGKIGPVMITRWFLPFDDTPESKAATERAKEFFHGWFMGPLTEGKYPDIMRKLVGKRLPEFTETETALVKGSYDFLGLNYYVTQYAQNNDAIVPPDVHTAMMDSRATLTSRNATGHAPGPPFAKDSYYYPKGIYYVMEYYKNKYGDPLIYITENGISTPGDESFDEALADYKRIDYLCSHLCFLSKVIKEKAVNVKGYFAWALGDNYEFGNGFTVRFGLSYIDFANVTGD

SEQ ID NO: 4022 - protein, 274 aa, Lactobacillus johnsonii NCC 533
MEYFNLNDGNRIPKIGFGTYKLNGSRGVFAIQAALKNGYRLLDSAVNYENEGAVGRAIKNSGINRDDIFITSKLPGRHHKYQEAIEQIQESLYAANLDYYDLYLIHWPNPKENHYLEAWQAMLDAQRFGLIRSVGVSNFEPSHIEHLYRETGVMPAINQVELHPYWSSKTIREYDNKHNIITEAWSPLQRAGEAFQEKEIIDLAQKYHKSPAQIILRWETQLNVVPIPKASSYEHQISNLDIFDFKLTPEEVQKLINLDKISARRFDPNEHEEF

SEQ ID NO: 4023 - protein, 546 aa, Burkholderia cepacia
MAAKDVVFGDSARSKMVEGVNILANAVKVTLGPKGRNVVLERSFGGPTVTKDGVSVAKEIELKDKLQNMGAQMVKEVASKTSDNAGDGTTTATVLAQSIVREGMKYVASGMNPMDLKRGIDKAVAAAVEELKKISKPCTTNKEIAQVGSISANSDSSIGDRIAEAMDKVGKEGVITVEDGKSLADELDVVEGMQFDRGYLSPYFINNPDKQVAVLDNPFVLLHDKKVSNIRDLLPVLEQVAKAGRPLLIIAEDVEGEALATLVVNNIRGILKTVAVKAPGFGDRRKAMLEDIAILTGGQVIAEETGLTLEKATLAELGQAKRIEVGKENTTIIDGAGEAASIEARVKQVRAQIEEATSDYDREKLQERVAKLAGGVAVIKVGAATEVEMKEKKARVEDALHATRAAVEEGIVAGGGVALIRARTAIAGLTGANADQNAGIKIVLRAMEEPLRQIVTNGGEEASVVVAAVAAGKGNYGYNAATGEYVDMVEAGVVDPTKVTRTALQNAASVAGLLLTTDAAVAELPKEDAPMPGGMPGGMGGMGMDM

SEQ ID NO: 4024 - protein, 494 aa, Arabidopsis thaliana
MVLTKTATNDESVCTMFGSRYVRTTLPKYEIGENSIPKDAAYQIIKDELMLDGNPRLNLASFVTTWMEPECDKLIMDSINKNYVDMDEYPVTTELQNRCVNIIARLFNAPLEESETAVGVGTVGSSEAIMLAGLAFKRKWQNKRKAEGKPYDKPNIVTGANVQVCWEKFARYFEVELKEVNLSEGYYVMDPDKAAEMVDENTICVAAILGSTLNGEFEDVKRLNDLLVKKNEETGWNTPIHVDAASGGFIAPFIYPELEWDFRLPLVKSINVSGHKYGLVYAGIGWVVWRAAEDLPEELIFHINYLGADQPTFTLNFSKGSSQIIAQYYQLIRLGFEGYKNVMENCIENMVVLKEGIEKTERFNIVSKDQGVPVVAFSLKDHSFHNEFEISEMLRRFGWIVPAYTMPADVQHITVLRVVIREDFSRTLAERLVADISKVLHELDTLPSKISKKMGIEGIAENVKEKKMEKEILMEVIVGWRKFVKERKKMNGVC

SEQ ID NO: 4025 - protein, 446 aa, Lupinus albus
MGIEIEKCCVELSKVANSETHGEDSPYFAGWKAYDEDPYHEHTNPSGVIQMGLAENQVSFDLLEKYLEEHSETVKWGKRGRGFRENALFQDYHGLESFRKAMGSFMEQIREGRVKFDPSRIVLTAGATAANELLTFILANPGDALLVPTPYYPGFDRDLRWRTGVNIVPIHCDSSNNFQITPQALEAAYKEAEAMNIKVKGVLITNPSNPLGATIQRKVLEEILDFVTLKNIHLVSDEIYSGSVFSSSEFISIAEILEARNYKNAERVHIVYSLSKDLGLPGFRVGTIYSYNDKVVTTARRMSSFTLISSQTQHLLASMLSDKKFTENYIKTNRERLRKRYTMIIEGLRNAGIECLEGNAGLFCWMNLSPLLVLENKATREGELELWNETLHEMKLNISPGSSCHCSEPGWFRVCFANMSEETLELALKRIHHFMEKRRTRTEKLY

SEQ ID NO: 4026 - protein, 487 aa, Lupinus albus
MDLGSKTNQLLSKIATNDKHGENSPYFDGWKAYDNNPFHPSKNPNGVIQMGLAENQLCFDLIEEWIKNNPKASICTLEGVHKFRDIANFQDYHGLPEFRNALANFMSKVRGGNVRFDPNRIVMSGGATGANEVIMFCLADPGDAFLVPTPYYPAFLRDLCWRTGLQLIPVECDSSNNFKITREALEKAYNKAKEDNINVKGLIITNPSNPLGTTLDRETLKSLITFINENNIHLVCDEIYAATVFSSPSYVSVSELIQEMDQPCKKDLIHIIYSLSKDMGFPGFRVGIVYSFNDEVVNCGRKMSSFGLVSSQTQHMLASMLSDDSFVDKFLAESKKRLAKRHNIFSKVLEEVNITKFPSNAGLFCWMNLKSLLKEQTFEAEMMLWHMIINEVKLNVSPGSSFNCSEPGWFRVCFANMDDETVEVALTRIRTFIGKETKKPEMQVKSWQRNLQLSFSSIRRFVHETIMSPHMMSPHSPIPQSPLVKAT

SEQ ID NO: 4027 - protein, 738 aa, Burkholderia pseudomallei K96243
MTDAPFDRADIDALLGARHPDPFACLGPHRVGDATVVRTLLPGALRVRAIAAGGGVLGELRQVDPAGCFAGALPDGQERGERPRYRLSIDWPDARQDVEDAYAFGTLLDEDALARFAAGDPRAALACLGARALDMDGVPGVRFAVWAPGASRVSVVGDFNGWDARRHPMRLRRPWGVWELFVPRIGAGERYKFALRARDGAALPLKADPCACRTEAPPRTASIVADLDALERFGWHDDAWLRARASLDLAHAPVSIYEVHPESWLRVAAEGNRSATWDELAQRLIPYAAGMGFSHVELTPIAEYPFGGSWGYQSLSPFAPSARFGPPEGFARFVEHAHAAGLGVIVDWVPAHFPDDPHGLGKFDGTALFEHADPREGWHPDWHTHVFNVGRREVGAFLIASALAWAHRYHVDGIRVDAVASMLYRDYSRAAGEWVPNVYGGRENLESIAFLKHFNDTLHGPAAPPGVATFAEESTAWPGVTAPTAEHGLGFDFKWNMGWMHDTLAYLREDPIHRRHHHDRLTFGLVYAFSERFVLPLSHDEVVHGKGSLAAKMPGDAWQRLANLRAYFGFMWAHPGKKLLFMGGEFAQWGEFAHDATPQWDLLDAPAHRGVQRLVRDLNRLHAAEPALHALDDRPAGFAWLVGDDRNNSVFAFVRRDDAGRMLVAVCNFTPVPRTDYRLGLPAPGRWAEVLNTDGAAYGGTDAGNGGAVQADEIPAHGERWSAALRLPPLATLWLRPA

SEQ ID NO: 4028 - protein, 440 aa, Zea mays
MATHAGENGSGHENGGGHAEWRFARAAKEGALAVAGDKMSIRAVRFKISASLDARDPRPVLPLAHGDPSAFPAFRTAAEAEDAVAAALRTGKFNCYPAGVGLPEARRALAEHLSSDLPYKLSSDDIFVTAGGTQAIEVVVSVLAQPGTNILLPRPGYPNYEARAGLHNLEVRRFNLIPERGWEIDIDGLESIADKNTTAMVIINPNNPCGSVYTREHLAKVAEVARKLGILVIADEVYGNLVFGDTPFVPMGVYGHIAPVLTIGSLSKRWIVPGWRLGWVAVCDPNKVLQETKIIASITNFLNVSTDPATFVQGALPHILKNTKEDFFKRIIGLLAETSEICFSGIKDIKCITCPHKPEGSMFVMVKLNLYLLESIHDDIDFCCKLAKEESVILCPGSVLGMENWIRITFAIDSSSLLDGLERLKSFCQRHKKKNLLNGH

SEQ ID NO: 4029 - protein, 555 aa, secondary endosymbiont of Bemisia tabaci
MAAKDLKFGNDARKKMLKGVNILANAVKVTLGPKGRNVVLDKSYGAPSITKDGVSVAREIELEDKFENMGAQMVKEVASKANDAAGDGTTTATVLAQSIVTEGLKAVAAGMNPMDLKRGIDKAVEAAVEELKIISKPCKDSKEIAQVGTISANADAKVGKLISDAMKRVTNEGVITVEEASGLEDDLIVVEGMQFDRGYLSPYFINKQESSSIEFDNPYILLVDKKISNIRDMLSILEVVAKEGKPLLIIAEDVEGEALATLVVNTMRGIVKVSAVKAPGFGDRRKEMLQDIAVLTHGHVISEETGDSLEKATKENLGNAKRVVITKDATTIIDGAGEKSKIEARIQNIKKQIENATSDYDKEKLQERVAKLSGGVAVIKVGAPTEIAMKEKKARVEDALQATRAAVEEGVVPGGGVALIRVASKIANSSLKGDNEDQNVGIRVALRAMESPLRQIVVNAGEEASVIANKIKENKGNDNYGYNAQTEAYGDMIEMGILDPTKVTRSALQYAASIAGLMITTECMVTDLPKEEKASDMGAGGMGGIGGMGGMNGMM

SEQ ID NO: 4030 - protein, 634 aa, Burkholderia pseudomallei K96243
MNDSTATHAYALPFGATCVDARHTRFHLWAPACRSAAVERQDGETVAMTPDGGGGFDAIVRCGPGTLYCYLLDGTLRVPDPASRFQPHGVHGPSEVVDPAAYRWRHDDWRGRPWRETVLYEVHVGAFGGYARIARRLPALAALGITAIELMPVNAFPGARNWGYDGVLPFAPDASYGPPDALKSLVDAAHGLGLQVLLDVVYNHFGPDGNLLPRYAPAFFRRDRDTAWGPAIDFSCPQAGAFFLENALYWLDEYRFDGLRIDAAHAIDDDAWLAGLARRVRAYAGDARHVHLVLENERNTASLLAGGRFDAQWNDDFHNSMHVLLTGEQAGYYRAYADAPIRHLARVLGEGFAYQGEPSPLHGGAPRGEPSADLPPSAFVAFLQNHDQIGNRAFGERLRALVNDDALRAASALALLAPQIPLLFMGEECGTTQPFQFFTDHRGALAAAVREGRRREFAAFPAFADPAHRDAIPDPNDPATFARSSLAAPGAEPPDANAWRRFYRGALAVRARFVTPWLDGARALGATVLARADGGHANALVARWRLGDGNTLAIALNLDARPAALAAPPDGKIVFETPPRARDALADARLAAHACIAWRSGNVNGVARRGRAVDAKHMPAVKHANGVNGQDGAP

SEQ ID NO: 4031 - protein, 216 aa, Triticum aestivum
  misc_feature (86)..(86): Xaa can be any naturally occurring amino acid
ALLMKQLVDLRLYQQSSNLEVQSLIQRLQVMEQNQKQMMALLAIVVQNPSLLNQLVQQQQQQRRNNCVYEDGNKKRRFPALEQGPXVTDHETSGSGAEIIQYRPPVPETSSQVIADEAFLSATAQPISSAALNMPMDIDTQTTLGNLNTQGSSGDIFADMPALPDFEDMHLWFSEDGEPTLTIQDYDEFPQSGQDCQMEAQHNYNNPQHADAITEA

SEQ ID NO: 4032 - protein, 540 aa, Streptococcus agalactiae A909
MAKDIKFSADARSAMVRGVDILADTVKVTLGPKGRNVVLEKAFGSPLITNDGVTIAKEIELEDHFENMGAKLVSEVASKTNDIAGDGTTTATVLTQAIVREGLKNVTAGANPIGIRRGIETAVSAAVEELKEIAQPVSGKEAIAQVAAVSSRSEKVGEYISEAMERVGNDGVITIEESRGMETELEVVEGMQFDRGYLSQYMVTDNEKMVSELENPYILITDKKISNIQEILPLLEEVLKTNRPLLIIADDVDGEALPTLVLNKIRGTFNVVAVKAPGFGDRRKAMLEDIAILTGGTVVTEDLGLDLKDATMQVLGQSAKVTVDKDSTVIVEGAGDSSAIANRVAIIKSQMEATTSDFDREKLQERLAKLAGGVAVIKVGAATETELKEMKLRIEDALNATRAAVEEGIVSGGGTALVNVIEKVAALKLNGDEETGRNIVLRALEEPVRQIAYNAGYEGSVIIERLKQSEIGTGFNAANGEWVDMVTTGIIDPVKVTRSALQNAASVASLILTTEAVVANKPEPEAPTAPAMDPSMMGGF

SEQ ID NO: 4033 - protein, 436 aa, Zantedeschia aethiopica
VNPSLGHGRTSTGTLKVMAADLDESKQTKTDRWAGLYTDTSDDQQDITRGKGMVDSLFQAPMGDGTHNPVLSSYEYISTGLRSFNLDNTVNGLYIAPAFMDKLVVHITKNFMNLPNIKIPLILGIWGGKGQGKSFQCELVFAKMGINPIMMSAGELESGNAGEPAKLIRQRYREAADIIRKGKMCCLFINDLDAGAGRMGGTTQYTVNNQMVNATLMNIADNPTNVQLPGMYNKQENPRVPIIVTGNDFSTLYAPLIRDGRMEKFYWAPTRDDRVGVCTGIFRSDNVPKEDVIKLVDTFPGQSIDFFGALRARVYDDEVRKWIAEIGVDGVGKRLVNSLEGPPTFAQPKMTLDKLLEYGNMLVQEQENVKRVQLADKYLSEAALGDANQDAIKTGSFYGKAAQQANVPVPEGCTDRNATNFDPTARSDDGSCLYTL

SEQ ID NO: 4034 - protein, 270 aa, Pyrus caucasica
AHYKSEADVGEAFAEAFKTGLIKREELFITTKIWNSDHGHVVEACKNSLEKLQLDYLDLYLVHYPMPTRHNAIGKTASLLGEDKVLDIDVTISLQQTWEGMEKTVTLGLVRSIGLSNYDLFLTRDCLAYSKIKPAVSQFETHPYFQRDSLVKFCIKHGVLPTAHTPLGGAAANKDMFGSVSPLDDPILNDVAKKYGKSVAQICLRWGIQRKTAVIPKSSKIQRLKENLVVLEFQLSDEDMQLIYSIDRKYRTSLPSKTWGLRRVCKGEFV

SEQ ID NO: 4035 - protein, 334 aa, Zantedeschia aethiopica
THNPVLSSYEYISTGLRSFNLDNTVNGLYIAPAFMDKLVVHITKNFMNLPNIKIPLILGIWGGKGQGKSFQCELVFAKMGINPIMMSAGELESGNAGEPAKLIRQRYREAADIIRKGKMCCLFINDLDAGAGRMGGTTQYTVNNQMVNATLMNIADNPTNVQLPGMYNKQENPRVPIIVTGNDFSTLYAPLIRDGRMEKFYWAPTRDDRVGVCTGIFRSDNVPKEDVIKLVDTFPGQSIDFFGALRARVYDDEVRKWIAEIGVDGVGKRLVNSLEGPPTFAQPKMTLDKLLEYGNMLVQEQENVKRVQLADKYLSEAALGDANQDAIKTGSFYG

SEQ ID NO: 4036 - protein, 865 aa, Bdellovibrio bacteriovorus HD100
MMPTEQEQNNQLWRRYKTIFESKLVGILSTDMNGQILDANDCFLEMVGYSREDLNEGRLNWKTLTHPNYLEQSRQVAEILKTKGSVPVFEKEYIHKKGHLVPVRLGLTMFEDGTVITLVQDITRQKDIERKLEEAKSLLEERVAERTRQLVESESFLMAIFENMPTMVFVKDARDLRFVRFNKAGENLLGIPRSQLIGKNDYDLFPKEQADFFTTKDRDVLKESKIVDIPEEQINTARGVRYLHTRKIPVFDKEGRPQYLLGVSEDITELKEAEKQRAVLVKEQIARSSAELRAQQMGFLSDLTFAMTQSFDLDNILKAFTEKSIPTLADICIVDLMDEEGLEISHTQVAAKTDEDRQFIQSWRERFPLRWDAPYGAAEVIRSRKTEIINGVDLDQFLKSTFGPEAAMTQRPIHAEAFMTVPILLRDEKPLGTISLITTSPGRHFSPLDQSMAEEVGRRLAVLIENSRLYYRAQEASRAKTAFLANVSHEIRTPLGAMLGFAEILKEDESLREEQKEAVETVLRNGQQLLHIVDEILDISKVESERIQIESIVFDLPDLLHDVIHLLRGRAEEKGIELRLRLGPLPKKIQSDPTRLRQILINVIGNAIKFTDSGFVEMEARSHNGKRRDGRQRIEFLVTDTGIGISSEQRNNLFQPFSQADSSTTRRFGGTGLGLFLSRKLARLLGGDVILNTSSAGIGSSFLISILGREVTDSQIRDLGKKNDKSAEVSSRQVESILVVDDAMDNRELFRRFIVRAGIPEERIETAENGAEAVRKALDRSYSVILMDIQMPEMDGFQALKKLRTQGYRGPIVALTAHAMKGDREKCLAAGFDGYLQKPLDRVELKRVLNLDFSSQQPGPRDAEL

SEQ ID NO: 4037 - protein, 426 aa, Zantedeschia aethiopica
STGTLKVMAADLDESKQTKTDRWAGLYTDTSDDQQDITRGKGMVDSLFQAPMGDGTHNPVLSSYEYISTGLRSFNLDNTVNGLYIAPAFMDKLVVHITKNFMNLPNIKIPLILGIWGGKGQGKSFQCELVFAKMGINPIMMSAGELESGNAGEPAKLIRQRYREAADIIRKGKMCCLFINDLDAGAGRMGGTTQYTVNNQMVNATLMNIADNPTNVQLPGMYNKQENPRVPIIVTGNDFSTLYAPLIRDGRMEKFYWAPTRDDRVGVCTGIFRSDNVPKEDVIKLVDTFPGQSIDFFGALRARVYDDEVRKWIAEIGVDGVGKRLVNSLEGPPTFAQPKMTLDKLLEYGNMLVQEQENVKRVQLADKYLSEAALGDANQDAIKTGSFYGKAAQQANVPVPEGCTDRNATNFDPTARSDDGSCLYTL

SEQ ID NO: 4038 - protein, 203 aa, Pichia angusta
MNNEYDYLFKLLLIGDSGVGKSCLLLRFAEDTYTQDYISTIGVDFKIRTIELDGKTIKLQIWDTAGQERFRTITSSYYRGAHGIIIVYDVTDQESFNNVNQWLQEIDRYATSGVMKLLVGNKCDLTDKKVVDYAVAKEFADSRGIKFLETSASQSTNVEQAFIVMSKQIKSQMANSQPASNTAGKPSVNLSGTSVINQQGGCC

SEQ ID NO: 4039 - protein, 435 aa, Zantedeschia aethiopica
AVSSVGAVNRVRPSLHGSGSGASVTRSGFLGTSLKTVNPSLGHGRTSTGTLKVMAADLDESKQTKTDRWAGLYTDTSDDQQDITRGKGMVDSLFQAPMGDGTHNPVLSSYEYISTGLRSFNLDNTVNGLYIAPAFMDKLVVHITKNFMNLPNIKIPLILGIWGGKGQGKSFQCELVFAKMGINPIMMSAGELESGNAGEPAKLIRQRYREAADIIRKGKMCCLFINDLDAGAGRMGGTTQYTVNNQMVNATLMNIADNPTNVQLPGMYNKQENPRVPIIVTGNDFSTLYAPLIRDGRMEKFYWAPTRDDRVGVCTGIFRSDNVPKEDVIKLVDTFPGQSIDFFGALRARVYDDEVRKWIAEIGVDGVGKRLVNSLEGPPTFAQPKMTLDKLLEYGNMLVQEQENVKRVQLADKYLSEAALGDANQDAIKTGSFYG

SEQ ID NO: 4040 - protein, 475 aa, Prochloron didemni
MSKLILFWHRRDLRISDNMGLAAARKQSSKIVGLFCLDPNILNSNEVAPARVTYMLGCLQELKESYSKIGSQLLIVRGEPIEAIPQLAVALQVTGVFWHKDGEPYARERDGKVEQELLKQGIAVTNYWDQLLHPPEDILTQSGKPYTVYTPFWKNWSQKPKLEVAEKLDRIQGLTAEEIKIAQETGVVSLPTGKDLGYYWDGELILTPGETAAREQLEEFSERAIAQYQEQRNFPAVEGTSLLSPALRFGVIGIRTVWQATLEATKNSYSEEVRANIETWQKELAWREFYQHALYHFPQLTVEPYRQQFKDFPWDNNPEHFQAWCEGKTGYPMVDAAMRQLNETGWMHNRCRMIVASFLTKDLIINWQWGEQYFMQKLCDGDLASNNGGWQWSASCGMDPKPLRIFNPASQAKKFDPEGEYIRQWLPELSSIDTEYLVRGKIPDDERERCDYPQPIVDHNLRQREFKRRYKELSP

SEQ ID NO: 4041 - protein, 563 aa, Clostridium tetani E88
MKKLNNKNNIIKFILYLLFITLINSNNVVFANNNNEHDNYHKLDQQFSELLKDNTYKEYNDGLIEQIKYLINNVYYYDVPESISNAKSVEEIMKNIRDPYTQYYTGEEFKKLQEGINNVFSGIGIYYKKHEDGIIITDMVPGSSAEYAGLKIGDIVIQLNREEIKGLSVEKIDKYIKGEEGTKVILDVKRGTQIVTFILQRRAVEIPTVDSKILDENIGYVHIKSFGNKTPELFKKRIENLLNSNIENLVVDLRGNLGGYTSSAYEIAGYFIGNKTVTIMKDKKGNETLYRGSSQELLRDIPIIFITDKNTASASEILTSAVKDYERAFIIGNKTYGKGVQQTSFILTDESFLKLTTHEFFSPFGSKINKIGVKPNFDTKSIDSLKVAELLFSGGKHREYNSQLVKLSIDNREFIIDLKKGKDRNYRSAFKYIIESSDGENIEIGNKDNWVKFDKNKISNDFYFENLKTMDSLTKSSKDTELIVKFNKDIRPRTANELNVKLVEGAFFQEIQLEYTIDKGNEIHIKCKEDLSTDKEYYLLVEGIESIDGMPLKNGSIARVYVY

SEQ ID NO: 4042 - protein, 246 aa, Brassica napus
  misc_feature (224)..(224): Xaa can be any naturally occurring amino acid
VDPRVRTKLSMYISVCPLWILCFIIITLVSSSSSTIWYEDHVSLREINTQENFSFPKDFLFGTASSAYQYEGAYLTDGKTLSNWDVFTSIPGKIADGTHGKVAVDHYHRYPEDLDLMQDLGVNSYRFSLSWARILPKGRLGDVNMEGIDHYNRMINAILKRGMEPFVTLTHYDIPQELELRYKSWLSPQIREDFEHYAEICFRHFGNRVKFWSTFNEPNVQVIXGLPGKGTYPPFTFVPRTFACTR

SEQ ID NO: 4043 - protein, 483 aa, Streptomyces violaceus
MTQGPLTTEAGAPVADNQNSETAGVGGPVLVQDQLLLEKLAHFNRERIPERVVHARGAGAYGTFTLTRDVSRWTRAAFLSEVGKRTETFLRFSTVAGSLGAADAVRDPRGWALKFYTEEGNYDLVGNNTPVFFIKDAIKFPDFIHTQKRDPYTGSQEADNVWDFWGLSPESTHQVTWLFGDRGIPASYRHMNGYGSHTYQWNNEAGEVFWVKYHFKTDQGIKNLTQDEANRLAGEDPDSHQRDLREAIERGDFPTWTVQVQIMPAADAAGYRFNPFDLTKVWPHEDYPPVEIGTLELNRNPENIFAEVEQSIFSPAHFVPGIGPSPDKMLQGRLFAYGDAHRYRVGINADHLPVNRPHATEARTHSRDGFLYDGRHKGAKNYEPNSFGGPVQTDRPLWQPTPVTGVTGDHAAPSHAEDDDFTQAGDLYRLMSEDEKGRLIDNLSGFIAKVSRDDIAERAIGNFRRADEDFGKRLEAAVQALRG

SEQ ID NO: 4044 - protein, 371 aa, Medicago sativa
MSVESAENNIRGVPTHGGRYLQYNIYGNLFEVSRKYVPPIRSVGRGAYGIVCAAVNAETREEVAIKKIGNAFDNRIDAKRTLREIKLLRHMDHENVMSIKDIIRPPQKENFNHVYIVSELMDTDLHQIIRSNQPMTDDHCRYFVYQLLRGLKYVHSANVLHRDLKPSNLLLNANCDLKIGDFGLARTTSETDFMTEYVVTRWYRAPELLLNCSDYTAAIDIWSVGCILGEIVTRQPLFPGRDYVHQLRLVTELIGSPDDASLGFLRSENARRYVRQLPQYPKQNFSARFPNMSPGAVDLLEKMLIFDPSKRIKVDEALCHPYMAPLHDINEEPVCARPFSFDFEEPMFTEEDIKELIWKESVRFNPDPPIN

SEQ ID NO: 4045 - protein, 480 aa, Saccharophagus degradans 2-40
MSKCPYQTTSAGSPVADNQNSQTAGPRGPVLMQDYQLLEKLAHQNRERIPERVVHAKGWGAFGTFTVTKDISKYTRAKIFDTVGKQTPLLTRFSTVAGELGAADAERDVRGFAVKFYTEEGNWDLVGNNTPVFFIRDPLKFPDFIHTQKRHPKTNLRSPTAMWDFWSQSPESLHQITILMSDRGLPTDVRHINGYGSHTFSFWNNDGERFWVKFHFKTQQGHRHWTNEEAEKVVGKTRESTQEDLFSAIENGNYPKWTVNVQIMPEADAEKTSYNPFDLTKVWPHSEYPLIEVGEMELNRNAENYFAEIEQAAFSPSNVVPGIGFSPDKVLQARIFSYADAHRYRIGTHYEALPVNAPKCPVHHYHKDGSMNFFGNKSGSTDAYYEPNSFGGAVQNPDVAEPPLKISGDADRYNHREGNDDFSQPAALFNLFDDGQKQRLFNNIAGAMQGVPQNIIDKQLALFDKVDPAYGAGIRAALKA

SEQ ID NO: 4046 - protein, 448 aa, Lupinus albus
MGLEIEKGCVKLSNIAISETHGEDSPYFAGWKAYDENPYHEITNPSGVIQMGLAENQVSFDLIEKYLEEHSEAATWGKGAPSFKDNALFQDYHGLKSFRTAMASFMEQIRGGRAKFDPSRIVLTAGATAANELLTFIIANPGDALLLPTPYYPGFDRDLRWRTGVNIVPIHCDSSNNFQITPKALEAAYKEAEAMNMKVKGVLITNPSNPLGATIQRKVLEEILDFVTLKNIHLVSDEIYSGSVFSSSEFISIAEILEARKYKNAERVHIVYSLSKDLGLPGFRVGTIYSYNDKVVTTARRMSSFTLISSQTQQLLASMLSDKVFTENYIKTNRERLRKRYTMIIEGLISAGIECLKGNAGLFCWMNLSPLLVLENKVTREGELELWNETLHEMKLNISPGSSCHCSEPGWFRVCFANMSEQTLELALQRIRDFMAKRSGTEKMIFQN

SEQ ID NO: 4047 - protein, 248 aa, Sinapis arvensis
ENQLCGDLMRKWVLEHPEASICTAEGVNQFSDIAIFQDYHGLPEFRQAVAKFMEKTRNNKVKFDPDRIVMSGGATGAHETVAFCLANPGEGFLVPTPYYPGFDRDLRWRTGVNLVPVTCHSSNGFKITVEALEAAYENARVSNIPVKGLLITNPSNPLGTTLDRDCLKSLVKFTNDKRIHLVADEIYAATTFGQSEFISVAEVIEEVPDCNPDLIHIVYSLSKDMGLPGLRVGIVYSYNDRVVQIARK

SEQ ID NO: 4048 - protein, 441 aa, Solanum tuberosum
MAIEIEQRPTVVRLSNVATSDTHGEDSPYFAGWKAYDENPFDEVHNPSGVIQMALAENQVSFDLLEEYLEKKKDDGIAEISRFRENALFQDYHGLVCFRKAMATFMEQVRGGRARFDPDRVVITAGATAANELLTFILADPGDALLVPTPYYPGFDRDLRWRTGVKIIPVHCDSSNNFQVTLQALEEAYKDAESNNIKVRGVLITNPSNPLGTTVQRCVLEEILEFVARKNIHLVSDEIYSGSAFCCSEFVSIAEILESRNYKDSERVHIVYSLSKDLGLPGFRVGTIYSYNDKVVTTARRMSSFTLISSQTQQLLASMLSDEKFTENYIKKNRERLRRRYEMMIEGLRSAGIECLRGNAGLFCWMNLSTLLEKPTKECELEVWNTILHEVKLNISPGSSCHCSEPGWFRVCFANMSENTLEIALKRIHHFMETRGILQKY

SEQ ID NO: 4049 - protein, 161 aa, Arabidopsis thaliana
  misc_feature (25)..(25): Xaa can be any naturally occurring amino acid
  misc_feature (65)..(65): Xaa can be any naturally occurring amino acid
VSCVHTYTLLAKSGKVLSEKLHWKXTCRRSMISRREHAIITSALHTVSDHGIGCLLHTGNYPEWXLRIQTMDPADDDKCDFDPLDVTKIWPEDIMPLQPVGSLVLNMTIDSFFNETEQLASNPDLEAPGMYYSDDKLLQRTIFAYGDTHRHRLEPNYLQLA

SEQ ID NO: 4050 - protein, 251 aa, Sinapis arvensis
ENQLCFDLIETWLAKNPDAAELKKDGQSIFKELALFQDYHGLPEFKKALAEFMEEIRGNRVSFDPSKIVLAAGSTSANETLMFCLAEPGDAFLLPTPYYPGFDRDLKWRTGAEIVPIHCSSSNGFQITESALQQAYQQAQKLDLKVKGVLVTNPSNPLGTMLTRRELNLLVDFITSKNIHLISDEIYSGTVFGFEQFVSVMDVLKDKKLENSEVSKRVHVVYSLSKDLGLPGFRVGAIYSNDEMVVSAATK

SEQ ID NO: 4051 - protein, 492 aa, Hordeum vulgare
MDPYKHRPTSGANSAYWTTNSGAPVWNNNNALTVGHRGPILLEDYHLIEKLAQFDRERIPERVVHARGASAKGFFEVTHDVSQLTCADFLRAPGVQTPVIVRFSTVVHERGSPETLRDPRGFAVKFYTREGNFDLVGNNMPVFFIRDGMKFPDMVHAFKPSPKTNMQENWRVVDFFSHHPESLHMFTFLFDDVGIPLNYRHMDGFGVNTYTLISRDGKAHLVKFHWKPTCGVKCLLDDEAVTVGGTCHTHATKDLTDSIAAGNYPEWKLFIQTIDADHEDRFDFDPLDVTKTWPEDIIPLQPVGRMVLNKNIDNFFAENEQLAFCPAVTVPGIHYSDDKLLQTRIFSYADTQRHRLGPNYLMLPVNAPKCAHHNNHHDGLMNFIHRDEEVNYFPSRFDPTRHAEKYPMPPRVLSGCREKCIIDKENNFKQAGERYRSFDPARQDRFLQRWVDALTDARVTHEIQSIWVSYWSQCDASLGQKLASRLKIKPNM

SEQ ID NO: 4052 - protein, 492 aa, Nicotiana tabacum
MDLSKFRPSSAYDSPFLTTNAGGPVYNNVSSLTVGPRGPVLLEDYHLIEKLATFDRERIPERVVHARGASAKGFFEVTHDISHLTCADFLRAPGVQTPVICRFSTVVHERGSPESLRDIRGFAVKFYTREGNFDLVGNNVPVFFNRDAKSFPDTIRALKPNPKSHIQEYWKILDFFSFLPESLHTFAWFFDDVCLPTDYRHMEGYGVHAYQLINKAGKAHYVKFHWKPTCGVKCMSEEEAIRVGGTNHSHATKDLYDSIAAGNYPEWKLFIQIMDTEDVDKFDFDPLDVTKTWPEDILPLMPVGRLVLNRNIDNFFAENEQLAFNPGHIVPGLYYSEDKLLQTRIFAYADTQRHRIGPNYMQLPVNAPKCAHHNNHRDGAMNFMHRDEEVDYLPSRFDPCRHAEQYPIPSRVLTGRREMCVIEKENNFKQAGERYRSWEPDRQDRYVSKWVEHLSDPRVTYEIRSIWISYLSQADKSCGQKVASRLTLKPTM

SEQ ID NO: 4053 - protein, 494 aa, Hordeum vulgare
MDPCKFRPSSSFDTKTTTTNAGQPVWNDNEALTVGPRGPILLEDYHLLEKIAHFARERIPERVVHARGASAKGFFECTHDVTGLTCADFLRAPGARTPVIVRFSTVIHERGSPETIRDPRGFAVKFYTREGNWDLLGNNFPVFFIRDGIKFPDVIHAFKPNPKSHVQEYWRVFDFLSHHPESLHTFFFLFDDVGIPTDYRHMDGFGVNTYTFVSRAGKSHYVKFHWRPTCGVSCLMDDEATLVGGKNHSHATQDLYDSIDAGNFPEWKLFVQVIDPDEEDRFDFDPLDDTKTWPEDLVPLQPVGRLVLDRNVDNFFNENEQLAFGPGLVVPGIYYSDDKMLQCRVFAYADTQRYRLGPNYLMLPVNAPKCGFKNNHYDGAMNFMHRDEEVDYYPSRHAPLRHAEPASFPVPTRPVVGKREKTRIKKENDFVQPGERYRSWAPDRQDRFVRRFSDALAHPKVSHELRVIWIDFLSKCDKSCGMKVANRLNVKPSM

SEQ ID NO: 4054 - protein, 865 aa, Saccharomyces cerevisiae
MSYTNKRHTYYGGFTNDLSDTFQYPQRTDEQRRKHVTFGPYILGSTLGEGEFGKVKLGWPKNFSNSSNSTFDFPKQVAIKLIKRDSISNDYRKEVKIYREINALKHLSHPNIVKLEEVLQNSRYIGIVLEYACGGEFYKYIQKKRRLKEMNACRLFSQLISGVHYIHSKGLVHRDLKLENLLLDKNENLVITDFGFVNEFCSRNELMKTSCGSPCYAAPELVISAEPYEARKADIWSCGVILYAILAGYLPWDDDPNNPEGSDIGRLYNYINSTPLKFPDYILPIPRDLLRRMLVSDPKKRINLKQIKKHEWLKPHSSFLSITPDEWDKLNNTQSVFRLAKPRRRYGSRPQSSCSTSSLGSRSDKRDSLVIDSTLITFPAPPQESQNHIITRPASIASDQRLSPIRRSNRHNRSNSAASVALQAVVNADREYVLSHEQSLSPVQNIRQTTGNMTASLSPPPAISPGDIIIETTPIKRNTISGSSIVPSLEEESSTTMQTSKIQPNNMASSQNHQYNKNKTQNSLQSAKNFYRTSSSSHTKPRPTSYHPGSYTTPPYNSNTLSIYEINEKAKSSASSQTLNQRDTSPFDSTPYLALDTCITSSSSIESSPKLITHGQFSVAKPSVDLQSVSGDLIKYKRDADVVTRIYDEKYKQKRKSLRYSGIFSDISCDTVTEESDELRPPESPLQQHEGQESIDKAKTEDTSEKGSKSSNIAKATAQKHVNNHLERSLNEAESTKKRFSFLSLYSYDTSKSSLYSSMDSKRKPSPPSQRRPKKDDSYQTNSKNHYITASNMQTSHQVSKDLPAPTMVQNKCTLETKKAVRSNRSSIMVSEVNKASVDNKAAQSPEHSTAKRVLGFFKRRSMKI

SEQ ID NO: 4055 - protein, 492 aa, Solanum tuberosum
MDPSKYRPSSAYDTPFLTTNAGGPVYNNVSSLTVGPRGPVLLEDYYLIEKLATFDREKIPERVVHARGASAKGFFEVTHDISHLTCADFLRAPGAQTPVICRFSTVVHERGSPESIRDIRGFAVKFYTREGNFDLVGNNVPVFFNRDAKSFPDTIRALKPNPKSHIQENWRILDFFSFLPESLHTFAFFYDDVCLPTDYRHMEGFGVHAYQLINKEGKAHYVKFHWKPTCGVKSMSEEEAIRVGGTNHSHATKDLYDSIAAGNYPEWKLFIQTMDPEDVDKFDFDPLDVTKTWPEDLLPLIPVGRLVLNRNIDNFFAENEQLAFNPGHIVPGIYYSEDKLLQTRIFAYADTQRHRIGPNYMQLPVNAPKCGHHNNHRDGAMNMTHRDEEVDYLPSRFDPCRPAEQYPIPACVLNGRRTNCVIPKENNFKQAGERYRSWESDRQDRYITKWVESLSDPRVTHEIRSIWISYLSQADKSCGQKVASRLTVKPTM

SEQ ID NO: 4056 - protein, 918 aa, Pseudomonas aeruginosa UCBPP-PA14
MSRLCLVLLLLCCALPARAQPPAPLDGEDLRLSLGAYAEYYRDAGGKARLGDILALPAQAFAALRGDHANFGKNAAAWWFRVRLDNRNGADLAGFLEVNYPLLDDLKVYLLTADGRIEQQESGDLFAFSQRPVQVRNFWFPLRLPPGESTLLLRVQSSSTVYVPLYFSTYAASAASQETLMGFNGAFYGVLFGLFCYNLFLFVSLREATYAWYLLYNLSLGLFSASFDGLLFKLLPGHVALESAGIYLLMYLSCLVSIQFSRGYLYTRRDFPRLDRFLRGLLLACVVLLASEPLVGLRAWNVLASLTVMLVSLSLLLAGVHVWRQGLRYGLYYILAWGALLLSFLVTTAASLGFELFGLFGSSVVKIGMTVELVTLSIGLADRINALKEEGFRSRQAAEQARVENEAKSRFLAKMSHEIRTPLNGVLGMLQLLRDTPLDRGQAAYVETIASSGSALMSVINDILDYARIESGKLHLERIDFDLEELLSDTLALFSAQAVEKRLRLHLGLDRGVPRRLNGDPTRLRQVLMNLLSNALKFTAEGHVAVRVQRRFDEGGRERLLYSVSDSGIGISAQAQKTLFESFSQADSSTTRRYGGSGLGLAISRELVQMMGGRIEVSSEPGKGTRFSVDLPLSPALEAGEADELAQLLQHRPALLASEDNLTLDCLQALLERWGLRVERCLQPRRLNAYLEDFSAPPLLVLAAPWPGPPSIWLDTLYAQLEQGQRILLLCPPQHCQDLPPHEGLRLLALAQPVAVKALREALLELYRERRRQPGRSSEAAPDERLDAPCILVAEDNPVNQLVVRGFLAKRGYAVRLAGNGRLALDEYLRDPNGIQLILMDGEMPEMDGFEATRLIRREERAQGWPRVPIVALTAHILDEHRRAGIEAGMDAYLGKPVDRAELYATLERLLGQPSRQA

SEQ ID NO: 4057 - protein, 492 aa, Arabidopsis thaliana
MDPYKYRPASSYNSPFFTTNSGAPVWNNNSSMTVGPRGPILLEDYHLVEKLANFDRERIPERVVHARGASAKGFFEVTHDISNLTCADFLRAPGVQTPVIVRFSTVIHERGSPETLRDPRGFAVKFYTREGNFDLVGNNFPVFFIRDGMKFPDMVHALKPNPKSHIQENWRILDFFSHHPESLNMFTFLFDDIGIPQDYRHMDGSGVNTYMLINKAGKAHYVKFHWKPTCGVKSLLEEDAIRVGGTNHSHATQDLYDSIAAGNYPEWKLFIQIIDPADEDKFDFDPLDVTKTWPEDILPLQPVGRMVLNKNIDNFFAENEQLAFCPAIIVPGIHYSDDKLLQTRVFSYADTQRHRLGPNYLQLPVNAPKCAHHNNHHEGFMNFMHRDEEVNYFPSRYDQVRHAEKYPTPPAVCSGKRERCIIEKENNFKEPGERYRTFTPERQERFIQRWIDALSDPRITHEIRSIWISYWSQADKSLGQKLASRLNVRPSI

SEQ ID NO: 4058 - protein, 681 aa, Silicibacter sp. TM1040
MSHDPLLQPFQLKHLTLRNRIMTTSHEPAYPEDGMPKARYRAYHAERAKAGVALAMTAGSAAVSKDSPPVFNNILAYKDEVVPWIRDLTEGCHEHGCAVMIQLTHLGRRTTWNKGDWLPSVSSSRHREPAHRAFPKLVEDWDIERIITDFADAAERMKAGGMDGIELQAYGHLIDQFWSPLTNDLNGPYGADTLENRLRFPMDVLQAIRKRVGPDFIVGMRFTADEVQKGGITEEEGLEITRILSATGQVDFLNVIRGRIHTDPAMTDVIPVQGMRSAPHLDFAGRVKHETDLPVFHAARIPDVATARHAVQAGLLDMVGMTRAHMADPHVVQKLKEGREEDIRPCVGATYCLDRIYQAGDALCIHNAATGRELTMPHEIAPAEKQRKVAIVGAGPAGLEAARVAAERGHRVVVFEAQPDPGGQIRLTAQSPRRREMISIVDWRMAQCAARDVQFHFNTWAEEEDVLAQNPDLVIIATGGLPNLELFETGQEAAHVVSAWDLIAGDVKPAGRVLIYDESGDHPGLQAAEIAAEAGAEVEVMTPDRTFAPEIMAMNLVPYMRALQEKDVTFTVTRRLLGVARQGNELVATIGTDYSNFTTQKSYDQVVLNYGALPNDDLYQALRPASINHGEVDHDALICGQPQAITRNPRGAFQLFRIGDAVSARNTHAAIYDALRLMKDL

SEQ ID NO: 4059 - protein, 82 aa, Helianthus annuus
SLEIDELARFAVDEHNKKQNALLEFGKVVNTKEQVVAGKMYYITLEATNGGVKKTYEAKVWVKPWENFKELQEFKPVDAATS

SEQ ID NO: 4060 - protein, 476 aa, Mycoplasma penetrans HF-2
MKFKKLEKFPEGFLWGASSSAYQIEGAWDEDGKGMSTQDLPKQNVDGWVDWSKITDFKVASDQYHRYKEDIALMAEMGFKAYRFSIAWTRIIPDGNGAINKKGIQHYHDVIDELLKHGIEPVITMYHFDLPLALEQQGGWTNRDLIVPAFVKYAKVLFKEYGHKVKYWLTINEQNMVAMVGDILGMVSSDPKNRWKHMANLNHNMLLAQSYAFIYLHKMCPNAKIGPAPNICVYYPKSCNPEDFTAAKNAQSLLHWYYLDIAVRGKYNNIVWKFLKDNDALPEIRKDDFKVFKAGKPDFIAFNYYASGTAEKDEGDAVITHGDQHSMFDVPGLYKGAENEYLGKTNYGWAKDPIGFRNTFRELYDRYQLPLLVTENGLGTQDTLTADEKIHDDYRIEYLENHIKEMRNAISDGVEILGYCPWSAVDLVSTHQGITKRYGFVYVNRDEFDLKDLRRIRKDSFYWYQNVIKNNGNNIE

SEQ ID NO: 4061 - protein, 375 aa, Vibrio fischeri ES114
MNQGTKPSIIWLNVFIFTSSFLLAFVATPIYAYYNPLGSEHWIWLLLTFSFCNLSITAGYHRLWSHKAYNAHPALRFIFALGGAFALQNSALHWSSDHRIHHRHVDDNDKDPYSAKRGFWFSHIGWMLRHYKPATYNDYGNCRDLQKDNILMWQHKHYIVLALIMNIGVPLLLGVIYGDIIGMLLMVGAVRLTLSHHTTFFINSLAHIWGSQPYTEKNTARDNGFLAIFTFGEGYHNYHHIFENDYRNGIYWWQYDPTKWFIKTCSLLGLAHKLRVSPQAKIEKAKALMLRKKAESKIATLHNYHAIKEHLEAEYDALIERMAEYYDSKKQLIENKKDTLSKKYELALLNVQHKQIKMQFEHQKRVWNRLVLQYV

SEQ ID NO: 4062 - protein, 477 aa, Mycoplasma penetrans HF-2
MKIKKLNQFPKNFLWGASSSAFQVEGAWNEDGKGLSIQDVPKKDIAGWIDRSKVSDYKVASDQYHRYKEDFALMAEMGFKAYRFSIAWTRILPDGVGKVNPLGIKHYHDVIDELLKHNIEPIITLFHFDMPYALEQQGGWSNRDLIVDAFVNYAKILFKEYGHKVKYWLTINEQNMLAMVGDLFGLTNSQESSNRWQNISKINHNILIAQAKVINELHLTNKNAKIGPAPNIAIYYPKTCHPEDVLASKNAQALMHWYYLDVAVRGQYNNIVWKFLEQENALPEFRKDDEQIFKNGKPDFIAFNYYTSGTVEKALDVAVTTRGDQQNMFDVPGMYKATSNDFLNKTKFNWTIDPVGLRTTYRELYDRYQLPLLVTENGLGSPDELTKDFKVHDDYRIEYLKAHILETRKAISDGIPIIGYCPWSAIDLVSGYQGVNKRYGFVYVNRDEFDLKDLRRIRKDSFYWYQEVIKNNGNNIE

SEQ ID NO: 4063 - protein, 506 aa, Glycine max
  misc_feature (329)..(329): Xaa can be any naturally occurring amino acid
  misc_feature (419)..(419): Xaa can be any naturally occurring amino acid
MGNSFGCSASGERLVSAARDGDLVEAKMLLNCNPCLAKYSTFGGLNSPLHFAAAKGHNEIVALLLENGADVNSRNYCGQTALMQACRYGHWEVAQTLLLFRCNVIRADYLSGRTALHFAAVHGHVRCIRLVVADFVPSAPYQAIHAGTAVDRGGGSNCSALSKFVNKTADGGITALHMAALNGYFDCVQLLLDLNANVNAVTYNYGTSMDLIGAGSTPLHYAACGGNLKCCQILVAHGASRLALNCNGWLPLDIARMWGRHWLEQLLAPSSDATMPTFSHSNYLSLPLMSVLNIAREYGLQSSTASSDEIDFCAVCLERPCSVAAEGCXHELCVRCALYLCSTNNVSSEMVGPPGSIPCPLCRHGVVSFVKLPGSQAKENKLHVSLGLCTPCMLHPRDLDKPSLSHTPEVGRNRVASVXSEILCPVTCSPFPSMAIPLCTCNDGPCPSFEPREVETQDGLPHHSQASTVDQDKIEGPRLDKTTCSSMFWGRRSCSREHQCNSEINA

SEQ ID NO: 4064 - protein, 501 aa, Sinapis alba
DEEITCQENNPFTCGNTDGLNSSSFEADFIFGVASSAYQIEGTIGRGLNIWDGFTHRYPDKSGPDHGNGDTTCDSFSYWQKDIDVLDELNATGYRFSIAWSRIIPRGKRSRGVNQKGIDYYHGLIDGLIKKGITPFVTLFHWDLPQTLQDEYEGFLDPQIIDDFKDYADLCFEEFGDSVKYWLTINQLYSVPTRGYGSALDAPGRCSPTVDPSCYAGNSSTEPYIVAHHQLLAHAKVVDLYRKNYTHQGGKIGPTMITRWFLPYNDTDRHSIAATERMKQFFLGWFMGPLTNGTYPQIMIDTVGARLPTFSPEETNLVKGSYDFLGLNYYFTQYAQPSPNPVNATNHTAMMDAGAKLTYINASGHYIGPLFESDGGDGSSNIYYYPKGIYSVMDYFKNKYYNPLIYVTENGISTPGSENRKESMLDYTRIDYLCSHLCFLNKVIKEKDVNVKGYLAWALGDNYEFNNGFTVRFGLSYINWNNVTDRDLKKSGQWYQKFISP

SEQ ID NO: 4065 - protein, 314 aa, Cryptococcus neoformans var. neoformans JEC21
MGEQPEIDLDSVIDRLLEVRGNRPGKAVQLAEYEIKYLCTKAREIFISQPILLELEAPIKICGDIHGQYYDLLRLFEYGGFPPEANYLFLGDYVDRGKQSLETICLLLAYKIKYPENFFILRGNHECASINRIYGFYDECKRRYNIKLWKTFTDCFNCLPIAAIIDEKIFTMHGGLSPDLQSMEQIRRVMRPTDVPDTGLLCDLLWSDPDKDITGWSENDRGVSFTFGPDVVSRFLQKHDMDLICRAHQVVEDGYEFFAKRQLVTLFSAPNYCGEFDNAGAMMSVDDTLLCSFQILKPAEKKPKYGGYGGSARR

SEQ ID NO: 4066 - protein, 328 aa, Cryptococcus neoformans var. neoformans JEC21
MGEQPEIDLDSVIDRLLEVRGNRPGKAVQLAEYEIKYLCTKAREIFISQPILLELEAPIKICGDIHGQYYDLLRLFEYGGFPPEANYLFLGDYVDRGKQSLETICLLLAYKIKYPENFFILRGNHECASINRIYGFYDECKRRYNIKLWKTFTDCFNCLPIAAIIDEKIFTMHGGLSPDLQSMEQIRRVMRPTDVPDTGLLCDLLWSDPDKDITGWSENDRGVSFTFGPDVVSRFLQKHDMDLICRAHQVVEDGYEFFAKRQLVTLFSAPNYCGEFDNAGAMMSVDDTLLCSFQILKPAEKKPKYGGYGGSARPVTPPRKGKSNKRKA

SEQ ID NO: 4067 - protein, 295 aa, Digitalis lanata
GEVFTEITKPGLEPYVGLHYPATDIPQAARFLFMKNKVRMICDCRAKHVKVVQDEKLPLDLTLCGSTLRAPHTCHLQYMENMDSIASLVMSIVINEGDEEGSEPVQVQNRKRLWGLVVCHNTTPRFVPFPLRYACEFLAQVFSIHVNKELELENQMFEKNILRTQTLLCDMLLRDAPLGIVSQSPNVMDLVKCDGAALLYKDKKYKLGLTPTDFQIRDIVSWLDEYHRDSTGLSTDSLYDAGFPGALSLGGSISGMAAVKISEKDWLFWFRSHTAAEVRWGGAKHEPGEKDDGSR

SEQ ID NO: 4068 - protein, 634 aa, Methanococcoides burtonii DSM 6242
MCGICGYAGFDDEDLLGKMCDAIVHRGPDDSGSFTDKGIGLGHRRLSIIDLEGGHQPVCNEDGTIYVVYNGEIYNFLSLRDELEKRGHRFQTSSDTEVIVHLYEEYGKDLVHHLRGMFAFALWDSNTRTLLLARDRLGVKPLYYTTIDNRLLFASEIKSIVQYSGYEKAVDIGTLHDYLTFRHALGTETMFAGIKKLLPGHVMTYREGEVNISEYWDVPLVTVGNESEDFYIKKTRLLLEESVKMRLMSEVPLGIYLSGGIDSGIVTGLMSKMVDEPIETFSVGFGERGEIGELSQAQEAADFFGTNHHEIIVDQGAFKQNLKDIIWHNDEPIADPSALAMFQLSKMASKHVTVVLNGAGGDEVFGGYISYKVGLANQKYHKIVPKVIRQGLVRPFVNAISPHLSSKMYVGIQSATQEVEEHGFLFTKSVFSEEDKEDIYTDKIKDKIHHNTFEKATTSLFRGKRYSGAIDERSSAKNTDLLSKMMYADTKSYLVDHILLETDKLTMSSSIEARVPIIDHKVVEFAASIPQELKLRGMTEKYILKKVGQGMLPPAAQNRKKRPFRIPIDTWFKDELHEMSQQVLDESSIVEQGYFRPEVVKDIMKKHERAELLYNHQMYALLVFEMWHERFMKM

SEQ ID NO: 4069 - protein, 251 aa, Sinapis arvensis
ENQLCFDLIESWLAKNQDAASLKRNGQSIFRELALFQDYHGMPEFKKAMAEFMEEIRGNRVTFDPKKIVLAAGSTSANETLMFCLAEPGDAFLLPTPYYPGFDRDLKWRTGAEIVPIHCSSSNGFQITESALQQAYQRAHKLDLKVKGVLVTNPSNPLGTALTRRELNLLVDFVNSKNIHLISDEIYSGTMFGFEQFISVMDVLKDKKLEDTEVSKRVHIVYSLSKDLGLPGFRVGAIYSNDEMIISAATK

SEQ ID NO: 4070 - protein, 69 aa, Populus alba
FKADLPGIKKDEVKVEIEDDRVLQISGERSVEKEDRNDTWHRVERSSGKFLRRFKLPENARTDQVKAGM

SEQ ID NO: 4071 - protein, 279 aa, Bacillus cereus ATCC 14579
MKNLQSKTVLSNGVEMPWFGLGVFKVEEGPELVEAIKSAIKAGYRSIDTAAIYGNEAAVGEGIRAGIETTGISREELFITSKVWNADQGYEETIAAYEESLKKLKLDYLDLYLVHWPVEGKYKDTWRALETLYKEKRVRAIGVSNFQIHHLQDVIKDAEIKPMINQVEYHPRLTQKELQAFCKEQGIQMEAWSPLMQGQLLDNETLQEIAEKHGKTTAQVILRWDLQNGVITIPKSTKEHRIIANADVFNFELTKEDMEKIDALNQNHRVGPDPDNFDF

SEQ ID NO: 4072 - protein, 470 aa, Streptococcus pneumoniae R6
MENLQVKALPKEFLLGTATAAYQVEGATRVDGKGINMWDVYLQENSPFLPDPASDFYYRYEEDIALAAEHGLQALRLSISWVRIFPDIDGDANVLAVHYYHRVFQSCLKHNVIPFVSLHHFDSPQKMLETGDWLNRENIDRFIRYARFCFQEFTEVKHWFTINELMSLAAGQYIGGQFPPNHHFQLSEAIQANHNMLLAHALAVLEFHQLGIEGKVGCIHALKPGYPIDGQKENILAAKRYDVYNNKFLLDGTFLGYYSEDTLFHLNQILEANNSSFIIEDGDLEIMKRAAPLNTMFVMNYYRSEFIREYKGENRQEFNSTGIKGQSSFKLNALGEFVKKPGIPTTDWDWNIYPQGLFDMLLRIKEEYPQHPVIYLTENGTALKEVKPEGENDIIDDSKRIRYIEQHLHKVLEARDRGVNIQGYFIWSLQDQFSWANGYNKRYGLFFVDYETQKRYIKKSALWVKGLKRN

SEQ ID NO: 4073 - protein, 515 aa, Arabidopsis thaliana
FLRMDGSGTGSRSGVESILPNYKLGRTLGIGSFGRVKIAEHALTGHKVAIKILNRRKIKNMEMEEKVRREIKILRLFMHPHIIRLYEVIETPTDIYLVMEYVNSGELFDYIVEKGRLQEDEARNFFQQIISGVEYCHRNMVVHRDLKPENLLLDSKCNVKIADFGLSNIMRDGHFLKTSCGSPNYAAPEVISGKLYAGPEVDVWSCGVILYALLCGTLPFDDENIPNLFKKIKGGIYTLPSHLSPGARDLIPRMLVVDPMKRVTIPEIRQHPWFQAHLPRYLAVPPPDTVQQAKKIDEEILQEVINMGFDRNHLIESLRNRTQNDGTVTYYLILDNRFRASSGYLGAEFQETMEGTPRMHPAESVASPVSHRLPGLMEYQGVGLRSQYPVERKWALGLQSRAHPREIMTEVLKALQDLNVCWKKIGHYNMKCRWVPNSSADGMLSNSMHDNNYFGDESSIIENEAAVKSPNVVKFEIQLYKTRDDKYLLDLQRVQGPQFLFLDLCAAFLAQLRVL

SEQ ID NO: 4074 - protein, 589 aa, Candida albicans SC5314
MLELNSITIPRNFTEFQLTALKIYYQLKILFLATYCTQGSLGLNGSVCLARDIFVGYVVYTQLLKLYRVLRGYGIIDSIRRLYLYVSSIVSSQIFSLPFIKSKIDKELQATIGKVEEEIMKNDPQLLQFPELPEQGIDADNVSLELDKLQNLKHSDWINGRVSGAVYHGGENLLSLQVEAYKKYSVANQLHPDVFPGVRKMEAEVVHMVLDIFNAPSDGCGSTTSGGTESLLLAGLSAREYGKKYRGITEPEVIAPVTIHAGIEKACFYFGMKLHKVDLDPVTFQVDVKKVERLINSNTVLICGSAPNYPHGIIDDIESLSKLAVKYNIPLHVDACLGSFIVSFLEKSKVHGDRKLPIFDFRLPGVTSISCDTHKYGFAPKGSSIIMYRSPKLRECQYYIASDWTGGMYGSPTLAGSRPGALVVGCWATLINIGKQGYTKFCYDIVSASMKVKRAIETDPILSKHLQIIGDPIGSVISFQLAPQQSGNLSIYEISDLLTKKGWHFATLQNPSALHFAFTRLTVPVVDELIADLVEATKEAVAIAEEHKKNGVTKAPGDTAALYGIAGSVHTAGLADRLIVAFLDTLYKI

SEQ ID NO: 4075 - protein, 491 aa, Oryza sativa
MDPCKFRPSSSFDTKTTTTNAGAPVWNDNEALTVGPRGPILLEDYHLIEKVAHFARERIPERVVHARGASAKGFFECTHDVTDITCADFLRSPGAQTPVIVRFSTVIHERGSPETIRDPRGFAVKFYTREGNWDLLGNNFPVFFIRDGIKFPDVIHAFKPNPRSHVQEYWRVFDFLSHHPESLHTFFFLFDDVGIPTDYRHMDGFGVNTYTFVTRDAKARYVKFHWKPTCGVSCLMDDEATLVGGKNHSHATQDLYDSIAAGNFPEWKLFVQVIDPEEEERFDFDPLDDTKTWPEDEVPLRPVGRLVLNRNVDNFFNENEQLAFGPGLVVPGIYYSDDKMLQCRVFAYADTQRYRLGPNYLMLPVNAPKCAHHNNHYDGAMNFMHRDEEVDYYPSRHAPLRHAPPTPITPRPVVGRRQKATIHKQNDFKQPGERYRSWAPDRQERFIAVRRRVAHPKVSPELRAIWVNYLSQCDESLGVKIANRLNVKPSM

SEQ ID NO: 4076 - protein, 368 aa, Scytosiphon lomentaria
MTTFFDELTIAGMKLRNRVVMSPLTRDRATVDLVPTDRDAEVSMLVYYEQRASAGLIISEATQVSTDGQGYPLTPGVFTPEQIAGWKKITDAVHAKGAKMVCQIWHCGRTSHESYQPDGKAPPAPSAIACPDGECFTMEGPKPFPVPREMTVEEIKNCVEQFRQGALNSIEAGFDGVEIHAGNGYLIDQFLKDNSNKRTDDYGGSLENRFRFLKEIVVACQEAIGKDKVAVHLTPGGTFNGTKDKAEEATGNHEYFCKQLNGMGISYLHIKLADDQDERHGGVAIPIETIRKNFDGIIITNNRYHEKEDFGEGDLGKVYDAVAFGRSFIANPDLPARIAKKAPMNEWDHTSFFGGTEKGYTDYPFMDE

SEQ ID NO: 4077 - protein, 226 aa, Thalictrum dioicum
MGRGKIEIKRIENTTNRQVTFCKRRNGLLKKAYELSVLCEAEVALIVFSSRGRLYEYSNNSVKKTIERYKKASTDSPNSGSVSEANVQFYQQEASKLHNQIASLQNHNRNLLGESLSNLNIKELRQIEKKIEGGISKIRAKKNELLFAEVEYMQKREIDLQTDNKYLRAMIAANERAPPEHMNLMPANEYHIMSSAPFDSRNFLPANLLDHNNNYSRSDQTTLQLG

SEQ ID NO: 4078 - protein, 175 aa, Bradyrhizobium japonicum USDA 110
MANETKLPVTKKTNEPAFGGETWRPFEALRKEVDRLFEDFGTDDFWRRPFRSLAGFERNLAQKLVSTPAVDVTESDKAYEITAELPGMDEKDIEVNVANDGLTIKGEKKFEREEKQKDYYVSERRYGSFERHFGLPKDVEADKIEASFRNGVLKVTLPKTAEAQKPAKKIEVKAA

SEQ ID NO: 4079 - protein, 464 aa, Klebsiella aerogenes
MKTFPTDFLWGGATAANQVEGAYLEDGKGLSTSDVQPHGVFGEVVERVPGDNGIKDVAIDFYHRYPEDIALFAEMGFNCLRVSIAWTRIYPNGDDAEPNEAGLAFYDKLFDEMAKHNITPLVTLSHYEMPWALVKNYGGWGSREVIGFFERYARTVFSPYKNKVKLWLTFNEINMSLHAPITGVGLPAGSSKGEVYQAIHHQLVASALAVKACHELVPEGKIGNMLLGGLMYPLSCKPEDVFETLQENRSWQFFGDVQARGAYPGYMFVYFRDNGITLTITDADREALKTTVDFISFSYYMTGCVTADERLNQQARGNILSMVPNPHLASSEWGWQIDPLGLRTLLNVLWDRYQKPLFIVENGLGAKDKVEADGSINDDYRISYLNDHLMQAREAIDDGVELMGFTSWGPIDLVSASKAELSKRYGFIYVDRHDDGTGTLARSKKKSFGWYKEVIASRGASLKA

SEQ ID NO: 4080 - protein, 507 aa, Staphylococcus aureus subsp. aureus Mu50
MTMSQQDKKLTGVFGHPVSDRENSMTAGPRGPLLMQDIYFLEQMSQFDREVIPERRMHAKGSGAFGTFTVTKDITKYTNAKIFSEIGKQTEMFARFSTVAGERGAADAERDIRGFALKFYTEEGNWDLVGNNTPVFFFRDPKLFVSLNRAVKRDPRTNMRDAQNNWDFWTGLPEALHQVTILMSDRGIPKDLRHMHGFGSHTYSMYNDSGERVWVKFHFRTQQGIENLTDEEAAEIIATDRDSSQRDLFEAIEKGDYPKWTMYIQVMTEEQAKNHKDNPFDLTKVWYHDEYPLIEVGEFELNRNPDNYFMDVEQAAFAPTNIIPGLDFSPDKMLQGRLFSYGDAQRYRLGVNHWQIPVNQPKGVGIENICPFSRDGQMRVVDNNQGGGTHYYPNNHGKFDSQPEYKKPPFPTDGYGYEYNQRQDDDNYFEQPGKLFRLQSEDAKERIFTNTANAMEGVTDDVKRRHIRHCYKADPEYGKGVAKALGIDINSIDLETENDETYENFEK

SEQ ID NO: 4081 - protein, 621 aa, Listeria monocytogenes str. 4b F2365
MCGFVGCVHDRITEITGADKETFRQMNSMITHRGPDDEGYFTDDHVQFGFRRLSIIDVENGHQPLTYENERYWIIFNGEVYNYVELREQLVAEGMTFETESDTEVIIATYAKYKEKTAERLRGMFGFVIWDKQEELVYGARDPFGIKPFFYAEEDGKLFMGSEKKSILHALKEKELDEVSLQNYMTYQFVPEPDSLTKNVKRLEPGHQFTKKIGQPMEITTYWKASFAPVTKSEDAWIKEVRDVMYDSVKMHMRSDVPVGSFLSGGIDSSIIAAIAKEYHPAIKTFSVGFERDGFSEIDVAKETADKLGVENISYVISPEEYMKELPKIVWHMDDPLADPAAIPLYFLSREARKQVTVALSGEGADELFGGYNIYNEPNSLAMFNKMPSVFKSMLNSVARIMPEGMRGKSFLERGTTPMEERYIGNAKMFTEKEKQILLPKYQAGHDYTNITDPFYAETTNYHPVERMQYIDIHTWLRGDILLKADRMTMANSLEVRVPFLDKEVYNVARNIPDTMKTTNGTTKYILRKAAATFVPEHVLNRRKLGFPVPIRHWLKDEMNAWVKNIIKESPTDHLINKQYVLGLLDDHCAGKFDYSRKIWTVVIFMIWYDVYVADKYDFGK

SEQ ID NO: 4082 - protein, 496 aa, Arabidopsis thaliana
MASTVSVQPGRIRILKKGSWQPLDQTVGPVVYWMFRDQRLKDNWALIHAVDLANRTNAPVAVVFNLFDQFLDAKARQLGFMLKGLRQLHHQIDSLQIPFFLLQGDAKETIPNFLTECGASHLVTDFSPLREIRRCKDEVVKRTSDSLAIHEVDAHNVVPMWAASSKLEYSARTIRGKINKLLPDYLIEFPKLEPPKKKWTGMMDKKLVDWDSLIDKVVREGAEVPEIEWCVPGEDAGIEVLMGNKDGFLTKRLKNYSTDRNNPIKPKALSGLSPYLHFGQVSAQRCALEARKVRSTSPQAVDTFLEELIVRRELSDNFCYYQPHYDSLKGAWEWARKSLMDHASDKREHIYSLEQLEKGLTADPLWNASQLEMVYQGKMHGFMRMYWAKKILEWTKGPEEALSISIYLNNKYEIDGRDPSGYVGCMWSICGVHDQGWKERPVFGKIRYMNYAGCKRKFNVDSYISYVKSLVSVTKKKRKAEEQLTRDSVDPKITIV

SEQ ID NO: 4083 - protein, 255 aa, Prunus persica
MGRGRVQLKRIENKINRQVTFSKRRSGLLKKAQEISVLCDAEVALIVFSTKGKLFEYSTDSCMERILERYERYSYSEKQLLANDHESTGSWTLEHAKLKARVEVLQRNCSHFMGEDLQSLSLKELQNLEQQLDSALKHIRSRKNQVMYESISELQKKDKALQEQNNLLAKKVKEKEKALAPQAESWEQQVQNQGLDCSSTLLPEALQSLNFGSGSNYQGIRNDGSGGDHEDENETPTANRPNTLLPPWMLRHLNE

SEQ ID NO: 4084 - protein, 1413 aa, Aspergillus nidulans FGSC A4
MADLKPPFTEEAARAKVKIAQNLWNAQDPVRVSQAYTPGCIWRNRTSFFSGTEAIVDFLTAKWKRERNYRLRKELFSFTDNRIAVQFWYEFQDANDSMRWKRCYGLEDWTFDRESGKMCKRMMSGNDILLGPDGNGEGRCDYRLLTQRWDHPTYHPYNRNRRLQQLDLNHFCRARISLAMEETSPFPDSKTMRSPLTDASNRINNCHTPTTERRLMREEHALTSPVPMSIVDSPLSPRNNAENNGPPPVGDSRACSKRNSAVSAASIVSAKGKRKTHVGPWQLGRTLGSGATGRVRLAKHAVTGQTAAVKIVSKKCAAISQSDSIAAMDRNAGTFIGAGGRQMPSGIEREVVIMKLIEHPNVISLYDVWENRGELYLVLEYVEGGELFDYVSNHGPLPEEEAVRLFRQIIAGLGYCHRFNICHRDLKPENILLDGEHNIKLADFGMAALQPAGHWLNTSCGSPHYAAPEIIYGRKYRGDKADLWSCGIILFALLTGFLPFDGEDLHATLQLVRKGDYMIPPHVSAEAADLIQRILQKKPDDRISMKDIWKHPLLKKYEKFHQAICNHYLGPPPPLSPQDCGPPVVRQDIDVDLLRNLQTLWHDVKPERLIEKLISLEPTQERLFYHALVKFRNEQLENYEGQPLRYSTSDYHHISRGQARLSKHLRSRSQNGSQRRSRAPSVKETGKRRPSTRELKPSASVETYDPYRSPFNRVPDKSPQYAHVTIHREAPETSPKPAEVEVDSSNPFLDDEQEIECQQSPPFTLVRKRKQNFNSVKSFQSKTSLISSRRALNSASTPRSVSYKRNVTFHHNRNRSQSSASAKAKRAHCNRQPSEASLISGFDDDPFSDSRSSSLLPAQPAVVRGAGIAVKNSVQRRVQHSDFVWRDEARKVSHELSQICEEAFNGSSLSTGCTDTTCVSPETPATSVSLASPGVSNHQMDSSSSTVCLAATPPADSPKTSHVRRELEETRRRLIEHSMKDGSKEIPQCLAPVIDHLDRLIEQEKTRRPGKVSTKEDYSSMSDLFCGSPVEPTQLSVLSEELNTGRRSDDTPSSKKDRQVSGSTAASSQISRGKRSIRMVPHSSYQSISNTEPRAVHRPAAALIDRPENDRGNALASRVGSNHRHNRTPCELDPIDEHPASPRRSAVRSTDHKKWSWFRKSQNIEEDFVKAPTVVKPLHPSSATVIVHEVHPARNTAENQPKLGKPPSDSQKVSFWSFIKRKKGKNADPESTATNPVLESRRDDERQRAHPGPKLSENKTATKPRRSIRSSGISNNWFARVFQFKPATRVVALNASKIKGRKEIYKMLRDWKQYGMEDIYLDKPNSIIYGRVGESNFLHLRPVDFSADFYTVIEDGRQANLSVVRFRQERGAASSFNRVVDTLCMVMKQRGLLVEDPARAKRMAQVLDAFPNA

SEQ ID NO: 4085 - protein, 772 aa, Bradyrhizobium japonicum USDA 110
MRIVCIGGGPAGLYLGLLMKRRHPDHVITVVERNKPYDTFGWGVVFSDAMMSAMRLADPESATEIEDAFNHWDDIELVFKGTRQRTTGHGFIGIGRKHLLNILQRRCEALGVELVFERDVESDLEFPEADLIVACDGVNSRIRARYAEQFQPDMVIRPNRYIWLGTKKAFDAFTFDFQRTEHGWFQAHIYKFDAETSTFIVETTEEAYNAHGLGELDQQASIDFCEKIFAETLDGAKLLTNARHLRGSAWLNFSRLICGKWSVFNGKSHVVLMGDAAHTAHFAIGSGTKLALDDAIELANQFDRHGHGRAGIETVLEAYEEVRRVDVARIQNAARNAMEWFEVVGRRYADTLEPPQFFYSMLTRSQRISHENLRLRDRTWLEGFERWFAARSGIAVKDGERVLPPMLTPHRVRGLSLANRIMVSPMAMYSAEDGLINDFHIAHLGARAMGGAALIFAEMTCVSPDARITPGCLGLWNDAQEAQWRRLVGLIHSLGHAKVGIQLGHAGRKGATRVPWEGIDQPLESGEWPLISASALPYLPHSQLPRAMDRSDMDRVRDDFVAATHRAASAGVEWLELHCAHGYLLSSFLSPLTNRRTDEYGGSHENRARFPLEVFKAMRAAWPSDRPMSVRLSCHDWTEGGNTPADAAIFAAMFKEAGADVIDCSSGQVWKEERPIYGRLFQTPFADLIRNEVGIETIAVGAISEADHANSILAAGRADLCAIARPHLADPAWTLHEAARIGITSVNWPKQYLSAKGQYESNLARAAAASAQ

SEQ ID NO: 4086 - protein, 203 aa, Thalictrum thalictroides
KRRNGLLKKAYELSVLCEAEVALIVFSSRGRLYEYSNNSVKKTIERYKKASTDSPNSGSVSEANVQFYQQEASKLRNQIASLQNHNRNLLGESLSNLNIRELKQIEKKIEGGISKIRAKKNELLFAEIEYMQKREIDLQTDNKYLRAMIAANERAPEHMNLMPANEYHVMSSAPFDSRNFMPANLLDHNNNYCRSDQTTLQLG

SEQ ID NO: 4087 - protein, 367 aa, Azotobacter vinelandii
MPLFNFRGTQRMWYDGFLDPTPWQLIMVTLLITHLTVVSVTVYLHRYSAHRALELHPAVKHAFRFWLWLTTGMNTREWTAVHRKNHACCETPEDPHSPRYKGLANVLWRGAELYKAEAGNTETLRIYGKNCPDDWIERHVYSRFPNGGAMLMLLIDLALFGAFGLSVWAVQMLWIPFWAAGVVNGLGHAVGYRNFECRDAATNLVPWGILIGGEELHNNHHTYPGSAKLSVRPWEFDMGWAWIRLLVLLGLAEVKRTVPVAHRVADKRHLDMDTARAILNNRFQIMAHYRSRVIAPQVRMEAARAEASVRHLFHRDKGLLARESSLLEARQQARIQSLLEQSQTLRVVYERRLALQQVLDPDQRQRA

SEQ ID NO: 4088 - protein, 441 aa, Thermosynechococcus elongatus BP-1
MLSPFPLPVRGIFLWGDDRIGARCFEWLCRVKHWAILGVGVALLGMPPAVGGTSTLKDAPKALVDEAWQIIYKSYLDRSFNRLDWQAIRRELLSQPYRDREAAYRVIQQTLVRLNDPYTRFLPPHEYRQLLLQTQGQQVDVGLTLVEAGELFRIQAIQPGSVAAKADLKVGDEILAINGRGSDRLTLERATLALRGPAGTKLRLLVRREGKPQPFSVELTRAGEIPRTVNFQILNSPRVGYIRLSGFNSRSQQQMQEAIEILQREKVQGFILDLRHNPGGLLEAGIEISRQWLDSGVIVRIQQNQREETIRARQGALSQLPLVVLVNQASASASEILAAALQDQGRAIVVGTPTFGKVRVQAVHELADGSALVVTVARYLTPKGRDIAAGGISPDVLVTVDASTDLELRLNPNLVARPTDPMVAKALELLSTKISNARHVQ

SEQ ID NO: 4089 - protein, 268 aa, Burkholderia sp. 383
MNELEYVPVPAFDDNYIWLVSDGRDAIAVDPGEAAPVRRVLAERGWRLTAILLTHHHADHVGGVAALRDSQPDDAPLTVYGPAAEAIGVVTRPLSGGDRVTLDAPAATFDVLDVPGHTRGHIAYFQAAGQGNAAPHVFCGDTLFSCGCGRLFEGTPAQMLASLDALAALPGDTHVHCAHEYTLSNIRFALACEPGNTALATWRDDAQALRARGVPTLPTTIAHERAVNPFMRADSDAIRATLEAELHETVPDRLTAFTLMREWKNRFR

SEQ ID NO: 4090 - protein, 235 aa, Lycopersicon esculentum
MRVIRSRAILIVLFLVSAFGLSEQGKSGGFCSEEMATLGGVHDSHGSSQNSDEIHSLAKFAVDEHNKKENAMIELARVVKAQEQTVAGKLHHLTLEVMDAGKKKLYEAKVWVKPWLNFKELQEFKHVEDVPTFTSSDLGVKQVEQNSGLKSVPVHDPVVEEAAEHAIKTIQQRSNSIHPYKLQEIVHANAEMADDSTKLHLVIKTSRGGKEEKFKVQVQHNNEGAFHLNRMEPDN

SEQ ID NO: 4091 - protein, 94 aa, Lycopersicon esculentum
GGIREAGGSENSLEINDLARFAVDEHNKKQNALLEFGKVVNVKEQVVAGTMYYITLEATEGGKKKAYEAKVWVKPWQNFKQVEDFKLIGDAATA

SEQ ID NO: 4092 - protein, 154 aa, Mesorhizobium sp. BNC1
MTFTIRSALAYDLALLLFRPQDAIKFPDIIHAVKPEPDRGFPQAQSAHDTFWDFISLTPESMHMIMWVMSDRAIPRSFRFMEGFGVHTFRFVNAKDESTFVKFHWKPKLGLQSVAWNEAVKINGADPDFHRRDLWQAIELAREICTAGISGVSA

SEQ ID NO: 4093 - protein, 156 aa, Lycopersicon esculentum
AHLEYVENLNVKEQLVAGTLYYITLVATDAGKKKIYETKIWVKEWEDFKKVVEFKLVGDDSPNPGGITNVPFPNLPQFKDLARFAVQDYNKKENAHLEFVENLNVKEQVVAGIIYYITLVATDAGKKKIYETKILVKGWENFKEVQEFKLVGDATK

SEQ ID NO: 4094 - protein, 471 aa, Lentinula edodes
MSDVVKKGSDDSSATVTSQVTDSPTIPDVDNYVAYTIKNTKALPPVTWSNLLNELNWLSVYILTIPPLVGFVGAFYVKLQWETAVWAVAYYFLTGLGITAGYHRLWAHRAFNASLPLQYVLAILGAGSLQGSIKWWSRGHRAHHRYTDTELDPYNAHKGFWFSHVGWMLVKPRRKPGVADVSDLRHNPVVKWQHKHYLSLILFMGFILPSIVAYVGWGDAKGGFIYAGVIRLVFVHHSTFCVNSLAHWLGETPFDDKHTPRDHMITAFVTIGEGYHNFHHQFPMDYRNAIKWYQYDPTKWTIWVLAKLGLASHLKVFPDNEVRKGQLTMELKKLRRTQDKLSWPSDSNDLPVISWESFTSQSEKRPLILISGFIHDVSDFIEEHPGGAHFVRNYIGKDATTAFFGGVYDHSNAAHNLLAMKRVGVLHGGSPHGLDDKRAIPPSQRLKIARYTELLSPGSSSAYSDGEDGLL

SEQ ID NO: 4095 - protein, 356 aa, Limnanthes douglasii
LRLSLYFPISISLSLSLEAMASFIATTTPAMPAFASVLDPKIPTKPEPKTETPKPKDDLERFRTSEVVLERKAKGFWRRKWNPRDIQNAVTLLVLHALAAMAPFYFSWDAFWISFILLGFASGVLGITLCFHRCLTHGGFKLPKLVEYFFAYCGSLALQGDPMEWVSNHRYHHQFVDTERDVHSPTQGFWFCHIGWVLDKDLFVEKRGGRRNNVNDLKKQAFYRFLQKTYMYHQLALIALLYYVGGFPYIVWGMGFRLVFMFHSTFAINSVCHKWGGRPWNTGDLSTNNMFVALCAFGEGWHNNHHAFEQSARHGLEWWEIDVTWYVIRTLQAIGLATNVKLPTEAQKQKLKAKSA

SEQ ID NO: 4096 - protein, 134 aa, Alcanivorax borkumensis
MRLVRKLDFPEMKFSLYFLGYLSEEEAGDVPKNDAQRLTFTFGREAMLELTHNWGSEEDPDFSYHDGNAEPQGFGHIGITVPDVYAAAERFEKMDVTFVKRPDDGKMKGLAFIKDPDGYWIEILQADMMEQQQS

SEQ ID NO: 4097 - protein, 106 aa, Triticum aestivum
DGELREYFPRPFCYIEVEMPFICRHLQEEHCFDTRNAVCPTCAENLGRDMSAHFRFQHSHLVKRRKTSRPSSSPWPAAAAPPAYDVNPYMMSSWPCPEPEPDPLVF

SEQ ID NO: 4098 - protein, 665 aa, Oryza sativa
MEEFELQQQPYYSKLLLGSPLEIANVDDSDLQLVAGVPSDPPPAPPTAVKKKKKRSLPGTPDPSAEVVALSPRTLLATNRFVCEICGKGFQRDQNLQLHRRGHNLPWKLRQRGGAGGGGGGEPPRKRVYVCPEASCVHHSPSRALGDLTGIKKHFCRKHGEKKWKCDRCGKRYAVHSDWKAHSKVCGTREYKCDCGTVFSRRDSFVTHRAFCDALAQENNKLAQPMNMAAVTSALQGQQQAHHPVADDDDAAGVKSPHLKMFPDVDNIVAAATAGNPLLPPPLSMAGCMLSSLAAPLSSPFLPGCKLGVDAARDAAMVFPPPPPPAGSAAAIMSATALLQKAAELGATTSTGCYGGVAFPAMGIAGGLDRLPAIGHHLAPYDDVVVPAALQGQTATQLVGFDLGGLLPGQLYGGGGGAMTRAIGSLMHGGDQHAALDHRACSKIPRFRMEDGGKHFVFVHGLGHGAWCWYRVVAALRAAGHRATALDMAAAGAHPARADEVGSLEEYSRPLLDAVAAAAPGERLVLVGHSLGGLSLALAMERFPDKVAAAVFLAACMPAAGKHMGITLEEDLTLATMLVRPGTNYIDDPIMKDETLLTEGNYGSVKRVFLVAMDDASSDEEMQRWTIDLSPGVEVEELAGADHMAMCSKPRELCDLLLRIAAKYD

SEQ ID NO: 4099 - protein, 203 aa, Thalictrum thalictroides
KRRNGLLKKAYELSVLCEAEVALVVFSNRGRLYEYANNSVRKTIDRYKKTCGEGSSTLTVSEANLLFYQQESSKMKQQIEILQNSNRHLMGEALSRLSIKELKQLESRLEKGLSRIRSKKNETLLAEIEYMQKREIELHNDNIYLREQITANERAQQHMNSLPGNVYEAITSAPHSSRDFFQVNLRDSKPNQYCSDATVLQLC

SEQ ID NO: 4100 - protein, 642 aa, Digitalis lanata
MTNESNHTDHNVTRASFNFSNGEKFVFGSATSAYQIEGCAMEFGKGLSVWDTWTLDKPGHIIDGTNGNVAANQYHLFKEDMKIMKRAGLEAYRFSISWPRILPGGKLSTGVNKEGIKYYNDLIDAIIAEGMQPYVTLFHWDLPLALELEYGGFLDKDKRIVEHFRDYAELCFWEFGDRVKHWITINEAWSYTVEGYVNGTCPPGRGASAPSDDMALQTAEILRNRTLSTILDAIGSQAIAELKDIEKLIYTLIPNNIKDLISKFHIEEFVKNIIPEVLKQKCPQLVDFIVDILQSFHVDYKRTGMARACSNGDPGTEPYIVAHNIILAHAAAVRLYKTKFQAYQGGKIGMTNNVTYYLPYDEKYHEDVEASKRGVDFMLYWFVEPIVTGKYPERMVKRVGKRLPCFTVEEEEMVRGSYDFLGVNYYTTYYAINLPIPPIAPPNYFSDMGVLSTPTRGGVPIGIQCGQGGWIYIYPRGLYLILIEMTNKFKDKNDQGPLIYITENGASENANTTFTVCEARYDPIRVLYHNDHLWYLKKAMEDGVNLKGYFIWSFADNFEWNAGYTSRFGIFYVDFVNGQYTRYPKSSALWWTNFLHDVQELKVPDTSNVTNKRSRNTEEENATAKKPKNTSVNSLGFLDNLD

SEQ ID NO: 4101 - protein, 1146 aa, Hordeum vulgare subsp. vulgare
MSSSRSNSRSACSRGSSARSRHSERVAQTPVDAQLHAEFESSHRHFDYSSSVSALNRSGASTSSAVSAFLQNMQRGRYIQPFGCLLAIHPESFALLAYSENAAEMLDLTPHAVPTIDQRDALAVGADVRTLFRSQSAVALHKAAVFGEVNLLNPILVHARTSGKPFYAILHRIDVGLVIDLEPVNPADVPVTAAGALKSYKLAAKAISRLQSLPSGNLSLLCDVLVREVSELTGYDRVMAYKFHEDEHGEVIAECRRSDLEPYLGLHYPATDIPQASRFLFMKNKVRMICDCAASPVKLIQDGNLSQPISLCGSTMRAPHGCHAQYMANMGSIASLVMSVTVNEDDDEDGDTGSDQQPKGRKLWGLVVCHHTSPRFVPFPLRYACEFLLQVFGIQLNKEVELASQAKERHILRTQTLLCDMLLRDAPVGIFTQSPNVMDLVKCDGAALCYQNQIMVLGSAPSEGEIKKIAAWLLECHDGSTGLSTDSLLEAGYPGASALGEVVCGMAAIKISSKGFIFWFRSHTAKEIKWSGAKHEPGDADDNGRRMHPRSSFRAFLEVVKWRSVPWEDVEMDAIHSLQLILRGSLQDEDANDNNVRSIVEAPSDDVRKIQGLLELRIVTNEMVRLIETATAPILAVDIVGSINGWNGKVAEITGLPTTEAIGMLLVDLVEGDSVEVIKQMLNSAMQGTEEQNFEIKLKTFHQQESNGPVVLMVNACCSRDLSDKVVGVCFVAQDLTGHKMVMDKYTQIQGDYVAIVKNPNELIPPIFMINDLGSCLEWNEAMQKITGIKREDAIDKLLIGEVFTLHDYGCRVKDQATITKLSILMNTVISGQEPEKLAFGFFSTDGKYMESLLTANKRTDAEGKITGALCFLHVPSPELQHALQVQKMSEQAAARSFKELTYIRQELKNPLNGMQFTRKLLEPSDLTEEQRQLFASNVLCQEQLKKILHDNDLEGIEQCYMEMNTVEFNLEEALNTVLMQGMSLSKEKQISLDRDWPVEVSSMYLYGDNLRLQQVLADYLACTLQFTRPAEGPIVLQVIPKKEHIGSGMQIAHLEFRVVHPAPGAPEALIQEMFRHGPGVSREGLGLHISQKLVKTMSGTVQYLREAESSSFIVLVEFPVAQLNSKRSKPSTSKWSKPSTSKSNF

SEQ ID NO: 4102 - protein, 373 aa, Nicotiana tabacum
MEAISGDQGVQSNFKGVPTHGGRYAQYNVYGNLFEVSKKYVPLRPVGRGAYGIVCAAMNSETREEVAIKKIGNAFDNRIDAKRTLREIKLLRHMDHDNVIATKDIIRPPQTENFNDVYIVYELMDTDLHQIIRSNQQLTDDHCRYFLYQILRGLKYIHSANVLHRDLKPSNLFLNANCDLKVGDFGLARTTSETDFMTEYVVTRWYRAPELLLNCSEYTAAIDIWSVGCILGEMMTRQPLFPGKDYVHQLKLITELIGSPDDASLGFLRSDNARRYVRQLPQYPRQQFAARFPNSSPGAVDLLEKMLVFDPSRRVTVDQALCHPYLAPLHDINEEPICPKPFSFDFEQPSFTEENIKELIWRESVKFNPDPTH

SEQ ID NO: 4103 - protein, 765 aa, Tolypothrix sp. PCC 7601
MLQLIYNNFIVSLSPENSPENAAIAPFEVDLTNCDREPIHIPGSIQPHGMLLALTEPELTIVQVSRNTDEILGVAATEFINQPLSRLLDAQQIDFFRNCLAQEDLTLVNPIELTIAVGENARAFDGIIHRSDRLLILELEPVLHQKNYTFFNFYHLVKAALSKVQNASTLDELCQIIVKHVRQMNGFDRVMIYRFDENWHGTVIAEDKSAHLSPYLSLRYPASDIPKQARQLYRDNWLRLIPDVDYQPVALLPHHNPVTNQPTDLSHSVLRSVSPLHIEYLHNMGVKASMSISLLKNQKLWGLIACHHESPKYVPYEIRSACEFLGQMTSLELAAKEDSENTEYKMQLKAVQSKLVEYMAAANNFVDGLIGQEPNLLDLVNATGAAVCINGEYQTLGRTPQHREIEQLINWLSQHTQEEVFHTNCLSELLPEASEWKDVASGLMALSISKSQKSYLLWFRPEALQTVDWAGNPHKPVELADDGSLRLSPRKSFDLWKEIVQRQSLPWESYEIEAVWNFRSAIVGVVLRKADELAKMNVELQRSNDELDAFAYIASHDLKEPLRGIHHYSSFLIEDYGNRLDDEGIGRLRTLIRLTQRMENLIDSLLHFSRLGRVELGIQPTDLNDLVQRVIDVLSARIQETGATIRIPRPLPTIMCDRVQVSAIFTNLIANGIKYNDKPEIWVEIGYLEPITLYVRDNGIGIRDRHFESIFRIFKRLHGPTQYGGGTGAGLTIAKKVVERHGGKIWVESTYGEGSTFYFTLQEVK

SEQ ID NO: 4104 - protein, 555 aa, Sulfolobus solfataricus P2
MDLSKLLVPIRVGDVVLKNRIAMSPMISNLGTPEGYPSDAHIAYLAERAKGGVGLIITEYTYVNHVDARGSVNELGMYSDELTPKFTRLTELIHALGSKIFVQLVHVGRKTRKDIIWGNKPIAPSPIPIMDEVREMTKEDIERVKNDFINAAIRAKRAGFDGIELHGAHGYLIAQFLSPATNKRGDEYKDGVKFVEEILKGIREKVRITVGIRISVTEFDNGGLTPEIVAEIGKRLEKAGIDYIHLSAGRDGPLGSSMPYYYKRTSFLEEAKVVRDTVKIPIFLVGSIITPQDAIKAREIADVVVLGRQLLADPYWLEKAKRDLPIRPCIRCNQSCRGVVYKEVRCDVNPELGWELLPPLEKGRGEVTVVGGGVMGLEAARVLALRGFAVTLYEQNNKLGGQFLLYRDPWKVNEFQALIDYYERELRRLNVEIKLNVKMECSDCIMAIPDYEIPKMPDVKGEKVLIDSNLYVYHDYAFELAKYNEVYMTERSFKGLDRTREYLLRKELSEVGVKFIEESNSIKFDVEIHDIVDDQPSIGKAIQRGYWLGRSFKSY

SEQ ID NO: 4105 - protein, 483 aa, Oryza sativa
  misc_feature (286)..(286): Xaa can be any naturally occurring amino acid
MAAPSVAVDNLNPKVLNCEYAVRGEIVIHAQRLQQQLQTQPGSLPFDEILYCNIGNPQSLGQKPVTFFREVIALCDHPCLLEKEETKSLFSADAISRATTILASIPGRATGAYSHSQGIKGLRDAIAAGIASRDGYPANADDIFLTDGASPGVHMMMQLLIRNEKDGILCPIPQYPLYSASIALHGGALVPYYLNESTGWGLEISDLKKQLEDSRLKGIDVRALVVINPGNPTGQVLAEENQRDIVKFCKNEGLVLLADEVYQENIYVDNKKFNSFKKIARSMGYXRDDLPLVSFQSVSKGYYGECGKRGGYMEITGFSAPVREQIYKVASVNLCSNITGQILASLVMNPPKAGDASYASYKAEKDGILQSLARRAKALENAFNSLEGITCNKTEGAMYLFPQLSLPQKAIDAAKAANKAPDAFYALRLLEATGIVVVPGSGFGQVPGTWHIRCTILPQEEKIPAIISRFKAFHEGFMAAYRD

SEQ ID NO: 4106 - protein, 612 aa, Chlamydomonas reinhardtii
MSSKRKATEAPAAGEDGAAGPSSKKQAAASASAAAAAAGAGSAAAGGALVNPKRVRVLKPGSIGKGPVVYWMSRDQRLADNWALLHAIEAAQGAAGSSQVAVAFNLVPAFLGAGARQFGFMLRGLRQLAPRLEARGIKFYLLKGDPAHTLPQLVSGLGAGLLVTDYSPLRLGRTWRDQVCSALGSVPVHEVDAHNVVPVWAASEKREVGARTLRPKIHKALPEFLREFPEVPTLPAWTPAVAPEAVDWDGLISEVLSRGADVPEVEWCTPGEEAALEALTGPRGFLSPARLSLYDTKRNDPATPSALSGLSPYLHFGQLAPQRAALEAAKHRAKYKAAVESYLEELVVRRELADNFCHYCPTYDSLEAAAEWARDSLDKHRTDKREFLYTRDQLECGATHDELWNAAQLEMVHVGKMHGFMRMYWAKKILEWTQGPEQAIEWAIYLNDRYELDGRDPGGYTGVLWSMAGVHDMGWAERAVFGKIRYMNYNGCKRKFDIKAYVAYVSKAVAEAKAKGRAAKLPSAAAAGASGAAAAGATAAAAAAAAPGPSGAQAAKAAKAKAEPKEAKPKAAKAAAKAKGPKDEKAAAAGAKRKAAKPAKSASSGEEGSDDE

SEQ ID NO: 4107 - protein, 468 aa, Zea mays
MALSTTNTNAAESQLHCSTFASRYVRTALPRFKIPEQSIPKEAAYQIINDELMLDGNPRLNLASFVTTWMEPECDKLIQSSINKNYVDMDEYPVTTELQNRCVNMIAHLFNAPIGDDETAVGVGTVGSSEAIMLAGLAFKRKWQNKMKAAGKPYDKPNIVTGANVQVCWEKFARYFEVELKEVKLKEGYYVMDPEKAAEMVDENTICVAAILGSTLNGEFEDVKLLSDLLTAKNAETGWLEWDFRLPLVKSINVSGHKYGLVYAGVGWVIWRSKEDLPDELIFHINYLGADQPTFTLNFSKGSSQIIAQYYQLIRLGFEGYKDVMQNCRDNAAVLREGINKMGYFDVVSKDSGVPLVAFSLKDSSKYTVFEVAESLRRFGWIVPAYTMPADAEHVAVMRVVIREDFSRGLAERLIADLGKTMADMDAHAGRKQAPEQPKKSVHDIEKEVTTFWRRLVANSKKKSSMVC

SEQ ID NO: 4108 - protein, 674 aa, Clostridium perfringens str. 13
MTLVEVKDDKLEIKPVRLRKEKYKTQLKNKIFNEDDLYLFHEGRNYNAYNFMGAHFTSENRKRGVRFTLWAPRAKNIFLVGDFSNWETKEENKLERINETGLWSIFIPRLKEGIKYKYYIEQEDGKAVLKADPYGIYSEVRPNTASILCEKTKIRWSDKKWLNKREETNYFESPINIYELHLGSWKRKDEDEFLSYDELSIILPKYIKEMGYTHVEFMPLNEHPLDASWGYQVTGYYSITSRYGDIKGLKRLINALHKEDIGVILDWVPGHFCKDEQGLYMFDGTPTYEYEEKWKADNKGWGTFNFDLGKPEVKSFLISNAFYFINEFHIDGLRVDAVSNMLYLNYGRNHGEWVPNIYGGNENLEAIQFIKELNEAIKTYSKGVITIAEESTSWPNVTNDTEYGGLGFDFKWNMGWMNDTLEYNELDPIYRKYHHNKLTFPMMYNHSEKFILPISHDEVVHGKKSLIDKMQGDYWNKLANLRAYMAYMYGHPGKKLMFMGCEFGQFIEWREYEELEWKLIDKFDMHRKTHNFFKDLNNFYKNNSELWELDYDQDGFQWIDADNNEQSIYIFIRKSKNIEKYKIFVCNFTPMVYYDFNIGVPEKGVYREIFNTDKEEYGGSGQVIKGNLFSRKGWCHNQQYTLTIKVPPMAVSVFERIIEENKTEEKIVKEDKYI

SEQ ID NO: 4109 - protein, 213 aa, Brassica rapa
MVRGKTQMKRIENATSRQVTFSKRRNGLLKKAFELSVLCDAEVSLIIFSPKAKLYEFASSNMQDTIDRYLRHTKDRVSTKPVSEENLQHLKHEAANMMKKIEQLEASKRKLLGEGIGSCSIEELQQIEQQLEKSVKCIRARKTQVFKVQIEQLKQKEKALAAENKKLTEKWGSHEIEVWSNKNQESGRGDEESSPSSEVETELFIGLPCSSRK

SEQ ID NO: 4110 - protein, 554 aa, Yersinia pestis KIM
MCSIFGVLELKTDPIELRKKALEMSRLMRHRGPDWSGVWANDKAILAHERLSIVDVNTGAQPLYNAAHTHILAVNGEIYNHQALRQQYSDRYAFQTGSDCEVILALYQEKGPAFLDDLQGMFAFVLYDTEKDAYLIGRDHLGIIPLYMGHDEHGNMFVASEMKALVPVCRTIKEFPAGSYLWSQDGEIREYYHRDWFDYDHVKDNVTDKIQLANALEDAVKSHLMSDVPYGVLLSGGLDSSVISAITKKFAARRVEDNERSEAWWPQLHSFAVGLIGSPDLRAAQEVANHLGTVHHEIHFTVQEGLDAIRDVIYHIETYDVTTIRASTPMYLMSRKIKAMGIKMVLSGEGSDEVFGGYLYFHKAPNAKELHEETVRKLLALHMYDCARANKAMSAWGVEARVPFLDKNFLDVAMRINPQDKMCGNGKMEKHILRECFESYLPHSVAWRQKEQFSDGVGYSWIDTLKEKAAEQVTDQQMETAHFRFPYNTPGSKEGYLYREIFEELFPLPSAAECVPGGPSVACSSAKAIEWDESFKNMDDPSGRAVGVHQDAYK

SEQ ID NO: 4111 - protein, 170 aa, Glycine max
IRLEEERDDTLRIQRLRKKFYFHFQDYVDLIIWKVQFLDRHHLLIKFGSVDGGVSRNADHHPAFVAVYNMDTTEIVSFYQNSPDELYLLFEQFCDHFHATSRNSMYMNFISSHSNNIHALEQLRSIKDKASSSAQFVKKMLASLPFSCQSQSPSPYFDQSLFRFDDKVYY

SEQ ID NO: 4112 - protein, 153 aa, Arabidopsis thaliana
MSMIPSFFNNNRRSNIFDPFSLDVWDPFKELTSSSLSRENSAIVNARVDWRETPEAHVFKADLPGLKKEEVKVEIEEDSVLKISGERHVEKEDKNDTWHRVERSSGQFTRRFRLPENVKMDQVKAAMENGVLTVTVPKAETKKADVKSIQISG

SEQ ID NO: 4113 - protein, 497 aa, Chlamydophila pecorum
LAEAVKVTLGPKGRHVVIDKSFGSPQVTKDGVSVAKEIELEDKHENMGAQMVKEVASKTADKAGDGTTTATVLAEAIYSEGLKNVTAGANPMDLKRGIDKAVKLVVDELKNISKPVQHHREIAQVATISANNDSEIGNLIAEAMEKVGKNGSITVEEAKGFETVLDVVEGMNFNRGYLSSYFSTNPETQECVLEDAHILIYDKKISGIKDFLPVLQQVAESGRPLLIIAEDIEGEALATLVVNRIRAGFRVCAVKAPGFGDRRKAVLEDIAILTGGQLVSEELGMKLENTTLAMLGKARKVIVTKEDTTIVEGLGNKADLEARCENIKKQIEDSTSDYDKEKLQERLAKLSGGVAVIRVGAATEIEMKEKKDRVDDAQHATLAAVEEGILPGGGTALIRCIPALESFLSTLTNEDEKIGARIILKSLSAPLKQIAVNAGKEGAIIYQQVLERSANEGYDALKDTYTDMIEAGILDPTKVTRSALESAALLPGLLLTT

SEQ ID NO: 4114 - protein, 444 aa, Glycine max
  misc_feature (130)..(130): Xaa can be any naturally occurring amino acid
MSGMKVAKGRILVGKYELGKTIGEGSFAKVKFARNVQNGNYVAIKILDRKHVLRLNMMEQLKKEISTMKLINHPNVVRIHEVLASKTKIYIVLELVDGGELFNKIAKNGKLKEDEARRYFHQLINAVDYXCHSRGVYHRDLQPENLLLDSNAILKVTDFGLSTYAQQEDELLRTACGTPNYVAPEVLNDRGYVGSTSDIWSCGVILFVLMAGYLPFDEPNHATLYQKIGRAQFTCPSWFSPEAKKLLKRILDPNPLTRIKIPELLEDEWFKKGYKPTTFVEEEDVNVDDVAAAFNDSKENLVTERKEKPVSMNAFELISRSQSFNLENLFEKQTQGIVKRETHFTSQRPANEIMSKIEEAAKPLGFNVHKRNYKMKLQGDKSGRKGHLSVATEVFEVAPSLHMVELRKTGGDTLEFHKFYKSFSSSSGLQDIVWHSEGKKNMKN

SEQ ID NO: 4115 - protein, 572 aa, Saccharomyces cerevisiae
MCGIFAAFKHEDIHNFKPKALQLSKKIRHRGPDWSGNAVMNSTIFVHERLAIVGLDSGAQPITSADGEYMLGVNGEIYNHIQLREMCSDYKFQTFSDCEPIIPLYLEHDIDAPKYLDGMFAFCLYDSKKDRIVAARDPIGVVTLYMGRSSQSPETVYFASELKCLTDVCDSIISFPPGHVYDSETDKITRYFTPDWLDEKRIPSTPVDYHAIRHSLEKAVRKRLMAEVPYGVLLSGGLDSSLIAAIAARETEKANADANEDNNVDEKQLAGIDDQGHLHTSGWSRLHSFAIGLPNAPDLQAARKVAKFIGSIHHEHTFTLQEGLDALDDVIYHLETYDVTTIRASTPMFLLSRKIKAQGVKMVLSGEGSDEIFGGYLYFAQAPSAAEFHTESVQRVKNLHLADCLRANKSTMAWGLEARVPFLDKDFLQLCMNIDPNEKMIKPKEGRIEKYILRKAFDTTDEPDVKPYLPEEILWRQKEQFSDGVGYSWIDGLRDTAERAISDAMFANPKADWGDDIPTTKEAYWYRLKFDAWFPQKTAADTVMRWIPKADWGCAEDPSSRYAKIHEKHVSA

SEQ ID NO: 4116 - protein, 686 aa, Colwellia psychrerythraea 34H
MAQFDALFQPLKINQLTIRNRVVSTAHAEVYATEGGMTTERYVKYYEEKAKGGVGLSICGGSSVVSIDSPQDWWKSVNLSTDRIIPHFQNLADAVHKHGGKIMIQITHMGRRSRWDGGNWSTLVSPSGIREPVHRATCKTIEIEEMQRIVGDYAKAAGRAKAGGLDGIELSAVHQHLIDQFWSPRVNQRDDEYGGSFENRMRFGMEVLHAIREEVGRDFAVGLRICGDEFHPDGLNHEDMKQVAAYYDATGLLDFFSVIGSGCDTHNTLANVIPNMSYPPEPFLHLAAGIKEVVNVPVMHAQNIKDPNQAQRILEAGYVDFVGMTRAHIADPHLIAKIKLGQVDQIKQCVGANYCIDRQYQGLDVLCIQNAATSRESTMPHIIAKTEGKVRKVVVIGGGPAGMEAARVCAERGHDVTLIEKNPELGGQITIASKAPQRDQIAGITRWFALELDRLGIDLRLDTAADEAMIRSLNADVVILAVGGQPFLAQNPHWGVEEGLSVSTWDILSGKVAPGKNVLVYDTICEFSGLSAADFLAQNGSLVEMVTDDIKPGAAVGGTTFPTYYRNLYEKEVIMSSDLILEKVYREGDKLVAVLENEYTGQQEERVVDQVVIENGVRPDEEIYLQLKSDSRNKGQIDIEALYAALPQPMLSEEGEGYLLYRIGDCVSQRNTHAAIYDALRLCKDF

SEQ ID NO: 4117 - protein, 257 aa, Populus tomentosa
CQSIAGRMDWDNNQENHQDSHQNQRECRNGINGTNVNVNVNGNGGNNTLYVKVMTDEQLETLRKQIAVYAAICEQLVEMHKTLSAQQDLAGGRLGNLYCDPLMASGGHKITARQRWTPTPVQLQILERIFDQGNGTPSKQKIKEITSELSQHGQISETNVYNWFQNRRARSKRKQLVASSNNAESEVETEVDSLNEKKKPEIFHAQQNPPRAEDLCFQGPEISSELHFLGDDHLTGKMGVPGNYNLYDQAEDYGMAG

SEQ ID NO: 4118 - protein, 321 aa, Zea mays
PTRPITCGATPAMEILSWCGADPGNAFLVPSPYYPGWDRDIKWRTGVELIPVPCRSTDNFNVSVTALEIAYKQAKKRGIRVRGVLISNPSNPTGGIVPKEILHDLLQFAAEKNIHLISDEIFAGSTYGSDKFVSVADVVDELEDFDKGRVHIIYGLSKDLSLAGFRVGVIYSYNEHIVSAAAKIARFSSVSSPTQRLLVSMLSDQKFISEYIKVNRERLRKMYLLFSDALKQLGIECFKSSGGFYCWADMSRYIRSYSEKGERKLWDRLLEEAKVNVTPGSSCHCIEPGWFRCCFTTLSEEDIPVLVERLRRVTDSFKSKR

SEQ ID NO: 4119 - protein, 404 aa, Streptococcus thermophilus CNRZ1066
MKTFDKSSKLEHVAYDIRGPVLDEANRMIAKGEKILRLNTGNPAEFGFTAPDEVIRDLIMNVRNSEGYSDSKGIFSARKAIMQYCQLKGFPNVDIDDIYIGNGVSEMIPMSMQALLDDGDEVLVPMPDYPLWTACVSLAGGNAVHYVCDEKSNWYPDIDDIKSKITSNTKAIVIINPNNPTGALYPKDVLEQIVDIARQNDLIIFADEIYDRLVMDGKKHIAIASLAPDVFCVSMNGLSKSHRICGFRVGWMVLSGPKKNVRGYIEGLDMLSNMRLCSNVLSQHVIQTSLGGYQSVDELLIPGGRIYEQREFITNTVNDIPGLTAVKPDAGLYIFPKIDRNMYDIDDDEEFCLRLLKKEKVLLVPGKGFNWNEPDHFRIVYLPRVEELADLGNKIERVLLYYKR

SEQ ID NO: 4120 - protein, 278 aa, Lactobacillus acidophilus NCFM
MEKFVTLNNGIKMPRLGFGVYQIDDLAQAQQVVEDGLEVGYRLVDTAQIYGNEQAVGDAIKHSNVPREDIFITSKIWVDDYGYDNTLKAFDDSMKKLQLDYIDLYLIHKPYNDYYGTWRALERLYQEGRIRAIGVSSFWNERLADLITFNDVKPAVNQIETNVWNQEWKSQQYMEKEGVQPEAWAPFAEGANHIFTNPLLEEIAEKHHKTTAQVMLRWFLQRNYVVIPKSVHKKRLAENYDVFDFELDADDMKKIKTLDQGHSILEDEMDPEIAESFR

SEQ ID NO: 4121 - protein, 346 aa, Zea mays
  misc_feature (124)..(124): Xaa can be any naturally occurring amino acid
FFTTLDSQLSYGGPKPANCRSVARYLSRDLPYELSPDDVYLTNGGAQAIEIVCSALARPGANILLPRPGYKLYEARAVFSGMEARYFDLVPGEGWEVDTDGVRALADKNTVAVVIINPGNPCGXETARKLGVFVVADEAYAHLTFGERRFVPMGVFGAVAPVITLGSISKRWLVPGWRLGWIATSDPSGVFQRTKVASSIKTYHYICSDPTTFVQGAVPNLLENTSEEFFRRNIRTLKESADMCWEKLKGVNGIACPSRPMGSMFVMVKLDLSCLQGIEDDMDFCCRLAKEESVVVLPGRVVGCEDWLRITFAIDPSSLEDGLDRLRSFCSRHSKPAAQGSAASVV

SEQ ID NO: 4122 - protein, 475 aa, Solanum tuberosum
TTNSGAPVWNNNSSLTVGARGPVLLEDYHLVEKLANFDRERIAERVVHARGASAKGFFEVTHDIAHLTCADFLRAPGVQTPVIVRFSTVIHERGSPETLRDPRGFAVKFYTREGNFDLVGNNFPVFFIRDGMKFPDMVHALKPNPKSHIQENWRILDFFSHHPESLHMFTFLFDDIGIPQDYRHMDGSGVHTFTLINRAGKSTYVKFHWKPTCGVKSLLEEEAIRVGGANHSHATQDLYDSIAAGNYPEWKLFIQIMDPDHEDKFDFDPLDVTKTWPEDILPLQPVGRLVLNKNIDNFFNENEQLAFCPSIVVPGVYYSDDKMLQTRIFSYSDTQRYRLGPNYLQLPANAPKCAHHNNHYDGSMNFMHRDEEIDYFPSRYDQVRHAEVYPIPSTVCSGKREKCIIQKENNFKQPGERYRTFTPDRQERFIRRWVEALSDPRITYEIRSIWISYWSQADKSLGQKLASRLNVRPSI

SEQ ID NO: 4123 - protein, 497 aa, Chlamydophila abortus
LAEAVKVTLGPKGRHVVIDKSFGSPQVTKDGVTVAKEIELEDKHENMGAQMVKEVASKTADKAGDGTTTATVLAEAIYSEGLRNVTAGANPMDLKRGIDKAVKVVVDQIKKISKPVQHHKEIAQVATISANNDAEIGNLIAEAMEKVGKNGSITVEEAKGFETVLDVVEGMNFNRGYLSSYFTTNPETQECVLEEALVLIYDKKISGIKDFLPVLQQVAESGRPLLIIAEDIEGEALATLVVNRLRAGFRVCAVKAPGFGDRRKAMLEDIAILTGGQLISEELGMKLENTTLSMLGKAKKVIVSKEDTTIVEGLGNKEDIEARCENIKKQIEDSTSDYDKEKLQERLAKLSGGIAVIRVGAATEIEMKEKKDRVDDAQHATLAAVEEGILPGGGTALVRCIPTLEAFIPVLTNEDEQIGARIVLKALSAPLKQIAANAGKEGAIICQQVLARSSNEGYDALRDAYTDMIEAGILDPTKVTRCALESAASVAGLLLTT

SEQ ID NO: 4124 - protein, 492 aa, Triticum aestivum
MDPYKYRPSSSFNAPMWSTNSGAPVWNNDNSLTVGSRGPILLEDYHLVEKIADFDRERIPERVVHARGATAKGFFEVTHDVSHLTCADFLRAPGVQTPVIVRFSTVIHERGSPETLRDPRGFAIKFYTREGNWDLVGNNFPVFFIRDGMKFPDMVHALKPNPKTHIQENWRILDFFSHHPESLHMFTFLFDDIGVPADYRHMDGSGVNTYTLVNRAGKAHYVKFHWKPTCGVKSLLEEEAVTVGGTNHSHATKDLTDSIAAGNYPEWTFYIQTIDPDYEERFDFDPLDVTKTWPEDVVPLQPVGRLVLNRNIDNFFSENEQLAFCPGIIVPGVYYSDDKLLQTRIFSYSDTQRHRLGPNYLLLPANAPKCSHHNNHYDGLMNFMHRDEEVDYFPSRFDPAKHAPRYPIPSRTLNGRREKMVIEKENNFKQPGERYRSMDPARQERFINRWIDALSDPRLTHEIKAIWLSYWSQADKSLGQKLASRLSSKPSM

SEQ ID NO: 4125 - protein, 512 aa, Arabidopsis thaliana
MDHSSNRFGNNGVESILPNYKLGKTLGIGSFGKVKIAEHVVTGHKVAIKILNRRKIKNMEMEEKVRREIKILRLFMHPHIIRQYEVIETTSDIYVVMEYVKSGELFDYIVEKGRLQEDEARNFFQQIISGVEYCHRNMVVHRDLKPENLLLDSRCNIKIADFGLSNVMRDGHFLKTSCGSPNYAAPEVISGKLYAGPEVDVWSCGVILYALLCGTLPFDDENIPNLFKKIKGGIYTLPSHLSSEARDLIPRMLIVDPVKRITIPEIRQHRWFQTHLPRYLAVSPPDTVEQTKKINEEIVQEVVNMGFDRNQVLESLRNRTQNDATVTYYLLLDNRFRVPSGYLESEFQETTDSGSNPMRTPEAGASPVGHWIPAHVDHYGLGARSQVPVDRKWALGLQSHAHPREIMNEVLKALQELNVCWKKIGHYNMKCRWVPGLADGQNTMVNNQLHFRDESSIIEDDCAMTSPTVIKFELQLYKAREEKYLLDIQRVNGPQFLFLDLCAAFLTELRVI

SEQ ID NO: 4126 - protein, 497 aa, Chlamydophila pneumoniae
LAEAVKVTLGPKGRHVVIDKSFGSPQVTKDGVTVAKEIELEDKHENMGAQMVKEVASKTADKAGDGTTTATVLAEAIYSEGLRNVTAGANPMDLKRGIDKAVKVVVDELKKISKPVQHHKEIAQVATISANNDSEIGNLIAEAMEKVGKNGSITVEEAKGFETVLDVVEGMNFNRGYLSSYFSTNPETQECVLEDALILIYDKKISGIKDFLPVLQQVAESGRPLLIIAEEIEGEALATLVVNRLRAGFRVCAVKAPGFGDRRKAMLEDIAILTGGQLVSEELGMKLENTTLAMLGKAKKVIVTKEDTTIVEGLGNKPDIQARCDNIKKQIEDSTSDYDKEKLQERLAKLSGGVAVIRVGAATEIEMKEKKDRVDDAQHATIAAVEEGILPGGGTALVRCIPTLEAFLPMLANEDEAIGTRIILKALTAPLKQIASNAGKEGAIICQQVLARSANEGYDALRDAYTDMIDAGILDPTKVTRSALESAASIAGLLLTT

SEQ ID NO: 4127 - protein, 342 aa, Bordetella bronchiseptica RB50
MNLLSPIDIAGIALRNRIAVAPMSRTQADAHGHPAAETAAYYARYARHGAGLVITEALYTAGPAARAYFNQPGLASEAQAEHWRATVRAVHQEGGRVIAQLQHAGKLAEPGLHARPLGPVDGAAQGLSWQTQQPNAPAHAATAEEIERIIEGFALSARLAHYAGFDGVEIHGARGYLVNDFLSAYNVRDDEWGADRARIAEAVLRAVRQSCPLPIGFNYSIYKMDEYRYQPPGGGAEIAALLARLCQAGADILHISSRRVLKPEPWGGLLAQLARAAAPKALMVNGGLATLQDCETALAATQADLVSLARPFLANPDWLARSLAGEPLRAYEPGMEQRPLLD

SEQ ID NO: 4128 - protein, 281 aa, Physcomitrella patens
MGRGKIEIKKIENTTSRQVTFSKRRGGLLKKAHELAVLCDAEVALVIFSSTGKHFEFASSGSMRDIIERYRKNSDGAVKRGTNTDLLGREVIKLKQQVERLESSQRHMLGEDLSALKVSDLLELEQQLDQGASRVRARKNQLILEEIEDLRRKEHELMIANEALRKKIADAEGAAEAAARANFPDARLESPKPFASDFSRDMSVSSQLAASVYPHPNLLQAQRSQTSLQLGRLSEQQIPSTEEGCAGESSLKWDHPHFHIPNRLHANISPSVRTYKLHVDR

SEQ ID NO: 4129 - protein, 408 aa, Saccharomyces cerevisiae
MSNDEGETFATEQTTQQVFQKLGSNMENRVCFDCGNKNPTWTSVPFGVMLCIQCSAVHRNMGVHITFVKSSTLDKWTINNLRRFKLGGNHKARDFFLKNNGKQLLNTANVDAKTKYTSPVAKKYKIHLDKKVQKDMELYPSELVLNGQDSSDSPLDTDSDASRSTSKENSVDDFFSNWQKPSSNSSSKLNVNTGSLAPKNNTTGSTPKTTVTKTRSSILTACRKKPVLNSQDKKKHSILSSSRKPTRLTAKKVDKSQAEDLFDQFKKEAQQEKEDEFTNSSSSTKIRQNDYDSQFMNNSKGNNNNSIDDINTQPDEFNDFLNDTSNSFDTTRKEQQDTLTPKFAKLGFGMTMNDANDLAKQQKESQKIAQGPRYTGRIAERYGTQKAISSDQLFGRGSFDEAANRGSA

SEQ ID NO: 4130 - protein, 496 aa, Listeria monocytogenes EGD-e
MEESPQNEPNKVEKDEEQKSKPGNGYIKMKLFPFIMLLFAFVFVTALVTTIVMSLGDDKQVKVSIPERKEFTKLYDVYDEITSKYYKDTNSTTMIDGAISGMVNSLDDPYSTFMSKKESSEFNDTISASFEGIGAEIQEKDGAIVIVSPIKNSPAEKAGLRPQDIITQVDGKSVKGDTATEATQKIRGEKGTKVTLTIQRSNEDKPFDVTITRDEIPIETVYKEMGSDKIAHVTISTFSETTYDELEKALKSLEKDGMKGLVLDLRGNPGGLLDQAVSISSLFVPDGKIVVQEQDKDGDKSAIKADSSSHGDYKVKVPTTMLIDGGSASASEILAAAAKESGGIKLVGTKSFGKGTVQTATTLSDDSTLKLTVAKWLTPNSEWIHEKGITPDVVVNMPDYATMTIPSSTKVYKNGDFGDDVKTIETLLKALDYNVGKVDGLYDTDTEYAVQRFQTANKLDVTGIMTGVTTDKLVELTQKHLKETDPQLQKAKALVK

SEQ ID NO: 4131 - protein, 373 aa, Yarrowia lipolytica CLIB122
MAPALFSPINVGDTHLLNRVVMAPLTRFRADEGGVPSDLQKDYYVQRSQTPGTLLVAEATYVSPGAGGMKTFGGHVPGLWNEAQIAGWKKVIDAVHAKGCKFYIQLWDLGRTANQQVLEKEGLPFTGPSAIPQKGDKFGDKIRALTVPEIKQKIKDYATAAENAIKAGADGVEIHSANGYLPDQFIHWNSNHRTDEYGGSIENRCRFSLEIVDAISASIGSDKLAIRLSPWTDVQDVEVDQVNTLPTFEYIFRQLQKRADNGQKLAYVHLIEPRVNGTKTKREDIAWQTNEPFRKIWKGPLVRAGGFTRETALEAAASDPLTLVAFGRFFISTPDLVERLEKDEKLNPYNRKTFYSSGPVGYIDYPTYEKAKL

SEQ ID NO: 4132 - protein, 265 aa, Triticum aestivum
VIHRTSLYKKAGWYRSGIPGISSTHASDFGLSNVMRDGHFLKTSCGSPNYAAPEVISGKLYAGPEVDVWSCGVILYALLCGTLPFDDENIPNLFKKIKGGIYTLPSHLSGPARDLIPRMLVVDPMKRITIREIREHPWFEAQLPRYLAVPPPDTAQQVKKIDEESLVKVISLGFDKNLLVESIHNRLQNEATVAYYLFLDNKSRTTTGYLGAGYQEAMESSFSPITPSETQSPAHGNRQQPYMESPVGLRPHFPADRKWALGLQS

SEQ ID NO: 4133 - protein, 177 aa, Arabidopsis thaliana
  misc_feature (44)..(44): Xaa can be any naturally occurring amino acid
PAKDPGLSTNRDEATRGYIMQQTMFRIKDPKAPLHFYSRVRGMXLLKRLDFSEMKFRLYFLGYEDTTTAPTDPTERTVWTFGQPATIELTEKWGTESDPECGGYHNGHSHPRGFGHIGVTVDHVHKACERFEELGVEFAKKPNDGKMKNIAFIKDPHRYWIEIFDLKTIGTTTVNAA

SEQ ID NO: 4134 - protein, 610 aa, Arabidopsis thaliana
MDKKTIVWFRRDLRIEDNPALAAAAHEGSVFPVFIWCPEEEGQFYPGRASRWWMKQSLAHLSQSLKALGSDLTLIKTHNTISAILDCIRVTGATKVVFNHLYDPVSLVRDHTVKEKLVERGISVSSYNGDLLYEPWEIYCEKGKPFTSFNSYWKKCLDMSIESVMLPPPWRLMPITAAAEAIWACSIEELGLENEAEKPSNALLTRAWSPGWSNADKLLNEFIEKQLIDYAKNSKKVVGNSTSLLSPYLHFGEISVRHVFQCARMKQIIWARDKNSEGEESADLFLRGIGLREYSRYICFNFPFTHEQSLLSHLRFFPWDADVDKFKAWRQGRTGYPLVDAGMRELWATGWMHNRIRVIVSSFAVKFLLLPWKWGMKYFWDTLLDADLECDILGWQYISGSIPDGHELDRLDNPALQGAKYDPEGEYIRQWLPELARLPTEWIHHPWDAPLTVLKASGVELGTNYAKPIVDIDTARELLAKAISRTREAQIMIGAAPDEIVADSFEALGANTIKEPGLCPSVSSNDQQVPSAVRYNGSKRVKPEEEEERDMKKSRGFDERELFSTAESSSSSSVFFVSQSCSLASEGKNLEGIQDSSDQITTSLGKNGCK

SEQ ID NO: 4135 - protein, 261 aa, Triticum aestivum
MSSSAMEALHALIPEQHQLDVEAAAAVSSATSGEESGHVLQGWAKRKRSRRQRSEEENLALCLLMLSRGGKQRVQAPQPESFAAPVPAEFKCSVCGKSFSSYQALGGHKTSHRVKQPSPPSDAAAAPLVALPAVAAILPSAEPATSSTAASSDGATNRVHRCSICQKEFPTGQALGGHKRKHYDGGVGAAASSTELLAAAAAESEVGSTGNGSSAARAFDLNIPAVPEFVWRPCAKGKMMWEDDEEVQSPLAFKKPRLLTA

SEQ ID NO: 4136 - protein, 160 aa, Xylella fastidiosa 9a5c
MNVVRYTPWPGQAALQNEIKQVFDRFFEHNGDTDESAVVTAQWVPRVDIKEEPNQFVLYADLPGIDPADIEVQMDKGILSIKGERKTESSSQTEHFSRIERRYGSFHRRFALPDSADADGITASGSHGVLSIFIPKRAATTPRRIQVGNAVSNDVALQSM

SEQ ID NO: 4137 - protein, 635 aa, Pisum sativum
MMESCECIDTPYPPDELLVKYQYISDVLIALAYFSIPVELIYFVQKSAFFPYRWVLMQFGAFIVLCGATHFINLWTFSAHSKAVAVVMTIAKVSCAIVSCATALMLVHIIPDLLSVKTRELFLKNKAEELDREMGLILTQEETGRHVRMLTHEIRSTLDRHTILKTTLVELGRTLGLEECALWMPSRSGLNLQLSHTLTYHVQVGSTVPTNLPIVNEVFNSPRATRIPHTCPLARIRPLVGRYVPPEVVAVRVPLLHLSNFQINDWPDLSAKSFAIMVLILPTDSARKWRDHELELVDVVADQVAVALSHAAILEESMRARDQLMEQNVALDLARREAEMAIHARNDFLAVMNHEMRTPMHAIIALSSLLLETELTPEQRVMIETVLKSSNVLAALINDVLDLSRLEDGSLELEMGKINFHGVLEEVIELIKPIASVKKLPITLILAPDLPDNAIGDEKRLMQTLLNVVGNAVKYTKEGYVSIRASVAKPESLQDWRPPEFYPASSDGHFYIRVQVKDSGCGILPQDIPHLFTKFTQSQSGAGRSSSGSGLGLAICKRFVNLMGGHIWMESEGPDKGSTATFVVKLGICGNPDSSDHQATTRGQAYSGSGGLARFKHLVNDGDIGFSNRRNQRSF

SEQ ID NO: 4138 - protein, 341 aa, Glycine max
FGSRDHSADAQRTDLMTITRFVLNQQSNHPESRGDFSILLSHIVLGCKFLCSAVNKAGLAKLIGLAGETNVQGEEQKKLDVLSNDVFIKALVSSGRTCILVSEEDEEATFVEASKRGKYCVVFDPLDGSSNIDCGVSIGTIFGIYLIKEDHEPTIEDVLQPGKNMLAAGYCMYGSSCTLVLSTGSGVNGFTLDPSLGEFILTHPDIKIPKKGKIYSVNEGNAKNWDDPTTKYVENCKYPRDGSSPKSLRYIGSMVADVHRTLLYGGIFLYPADKKSPNGKLRVLYEVFPMSFLMEQAGGQAFTGNQRALDLVPKKLHERSPIFLGSYEDVEEIKALYAAEE

SEQ ID NO: 4139 - protein, 396 aa, Zea mays
  misc_feature (55)..(55): Xaa can be any naturally occurring amino acid
MPNGGGKRWLLLLPLSRWVLLLGSLQLPAVGGSGHVVTRMRGFDGPLPFYLETGXYVEVDEQQGVQLFYYFVRSERDPYEDPLLLWLSGGPGCSGISGLAYEIGPLKFDARGQGEFPTLLYRPETWTKVSNIIFVDSPVGTGFSYAKSEEGLETGDTKQVKQLVIFLRKWLQDHPRFVMNPLYIAGDSYSGLIIPTLALVAWARPRYIAGNPLTGGQFDTDSQIPYFHAMGLVSDELYKNARENCGGKYSAPLNAVCAEAVQAINNCTRDINKQYILDPACPDDDLLSPKTVAETDGTSRLMLESADFLLGSKSLYILSYAWGNDDTVQESLGIRKGTIGAWKRYSHALPYNYDIESAVDYHSRLATKGYRALIYSGDHDAVVPPRPAAPSWAGSM

SEQ ID NO: 4140 - protein, 147 aa, Deschampsia antarctica
QIFMGLMVNPPKPGDISYLKYATESKSILESLRRRAQIMTDGFNSCRNVVCNFTEGAMYSFPQIRLPQRAMDTAKSAGKAPDVFYCLMLLEATGISTVPGSGFGQKEGVFHLRTTILPAEEDMPAIMSSFKKFNDSFMEQYQDYSKL

SEQ ID NO: 4141 - protein, 310 aa, Zygosaccharomyces rouxii
MVTLQNSTSTLKLNTGQTIPQVGLGTWRSKENEGYKAVIEALKAGYRHIDGAAVYGNEGEVGKAIQDSGVPRNEIFLTTKLWCTQQRNPQEALDQSLQRLGLDYVDLYLIHWPVPLRTENIKDGNLFQFAEKPDGSKDVDLEWNFIKTWELMQKLLESGKTKAIGVSNFSVNNLKDLLAAPTTKVTPAVNQVELHPLLPQEDLIKFGKENGIVIEAYSPLGGENAPILSDPTVQEIAKANGVEAGHVVISWAVQKGLVTLPKSVTPSRIVGNLKVLTLSDSDVAKVDGLLKAKGERRTCYQDFSPFPIFQ

SEQ ID NO: 4142 - protein, 660 aa, Prosthecochloris aestuarii DSM 271
MAPLKPTPVQEEAEKYISSYLRQHHFRRVSVNDSLSQEILSRYLDEIDNAKTYFLASDIERFKTKYGDILDDQFLVGKADAGFAIYNRFLEQARKKMKFVISLLDTARFDYSLIETFDLKRDDAPWPTDQKELHRLWRQEVKYQLLNMKYSGEEADSSALVLSKRYTNRLSLLDQQNAEDAFRVFSNAITTSFDPHTSYFSPMDFENFQIDMSRSLEGIGAKLQIENEYTMVNEVIPGGPAFKSKLLNKGDKIIGVGQGARGEIVDIVGWRINDVVHLIRGKKGSLVRLKILPVSQGGKGPSKIIQIVRDEVTLEEQSAQKSIVERDGRKIGLITVPAFYLDFEGQKHNRPDYKSTSRDVRKIIEELKLEGVQGIILDLRNNGGGALEEAVKLTGLFIADGPVVQIRNSQGGKLVLRDEEPDVLYSGPLAVLVNRYSASASEILAAAIQDYGRGIVIGGRTFGKGTVQSILNITRPFNFFYKSDDLGQLKLTVAKFYRITGESTQHLGVTPDLVFPSFIDSEVVGEDTYPSSLPWDKISPSDYDRSSNLSDESIERLRQRYLGRLATDSLYTGYVKDLNALKIFRKKDVVSLYEPAFKAEFEKVKNFEANWSRDEEEAENTADDKPDLMVLHAASVVGDMAVGAGQIPRGAASAPWHSQQ

SEQ ID NO: 4143 - protein, 622 aa, Streptococcus agalactiae NEM316
MSNKDELYTFGIGENFHLQNYLGVHSENESFCFRVWAPNAENVQVIGDFTDWRNRPLQMNKNQAGVWEANSLDAREGDLYKYLVTRKGGQVVEKIDPMAVYMERRPGTASVIKVLRNKKWEDGLWMGRRKRLGFQKRPINIYEVHAGSWKKDDFGHPMTFSQLKDYLIPYLVEMNYTHVEFMPLMAHPLDMSWGYQLMGYFAFEHTYGTPEEFQDFVEACHKNNIGVLVDWVPGHFIQNDDALAYFDGTATYEYQNHDRAHNYRWGALNFDLGKNQVQSFLISSALFWIEHYHIDGIRVDAVSNMLYLDYDEGPWEANQFGDNRNLEGYYFLRKLNKVIKERHPNVMMIAEESTASTPITKDLESGGLGFDFKWNMGWMNDILRFYEEDPLYRQYDFNLVTFSFMYIFNENFVLAFSHDEVVHGKKSMMHKMWGDRYNQFAGLRNLYAYQMCHPGKKLLFMGSEFGQFLEWKYNDQLEWENLNDDMNQKMQRYTKQLNQFYKDHKCLWRIDDSFDGIEIIDADNKSETVLSFIRKDDKGDLLLCVFNMTPVERPNFTIGVPQAGIYEEVLNTEMEEFGGVWKNHNPVTKTQVATWKDYDHTLSFTLPALGASVWRIKRRLRK

SEQ ID NO: 4144 - protein, 561 aa, Oryza sativa
MELAMDFALRLRDAANHHLSRYEPLVLLAAPLLALLAARTLHAAAAAVADRGLRTVLLALAMTAIKLLPGVSAYINAEKRKVVDQLQSGGTSTKSTLRTELPTVGLSNQVINDLETLKARDVNWQGKCSGTVYIAGSESEGHFALINKAYSMFSHTNPLHQDVFKSVAQLEAEVVAMTAALLGIKEKSSGGQICGNMTSGGTESILLAVKTSRDYMRTKKGITKPEMIIAESAHSAYDKAAQYFNIKVRRVPVNKEFLADVKGFKRCINGNTIMMVGSAPGFPHGLIDPIEELGELASRYDICLHVDLCLGGFVLPFARKLGYPIPPFDFCVKGVTSISTDVHKYGLAPKGTSIVLYKNHEIRKISWLSLHNYYSLTDMIMLQNCTKMFKQVTEWTGGLYVSPTIAGSRPGGLIAGAWAAMTSLGLNGYMENTGHIMEVSKKIQRGIEDIPGLFVIGKPDMTVVAFGSDSVDIFEVNDIMSSKGWHLNALQRPNSLHICVTLQHTVIYEEFLKDLKDSVDTVKANPGPISGGRAPIYGAAGKMPDRGMVRELLVEFMDASC

SEQ ID NO: 4145 - protein, 280 aa, Streptococcus agalactiae NEM316
METYTLSNTLNIPKIGFGTWQLTEGEEAYKAVTHALKVGYTHIDTAQIYGNEHSVGRAIRDSGLARESIFLTTKIWNDKHDYHLAKASIDESLQKLGVDYIDLLLIHWPNPKALRENDAWKAGNAGTWKAMEEAYKEGKVKAIGVSNFMKHHLEALFETAEIKPMVNQIILAPGCAQEDLVRFCKGNDILLEAYSPFGTGAIFENESIKAIAEKYGKSVAQVALRWSLDNGFLPLPKSATPKNIEANLDIFDFQLNEDDITTLIQLDSGIKPKDPDNVSF

SEQ ID NO: 4146 - protein, 606 aa, Zea mays
MCGILAVLGCADEAKGSSKRSRVLELSRRLKHRGPDWSGLRQVGDCYLSHQRLAIIDPASGDQPLYNEDQSVVVAVNGEIYNHLDLRSRLAGAGHSFRTGSDCEVIAHLYEEHGEEFVDMLDGVFSFVLLDTRHGDRAGSSFFMAARDAIGVTPLYIGWGVDGSVWISSEMKALHDECEHFEIFPPGHLYSSNTGGFSRWYNPPWYDDDDDEEAVVTPSVPYDPLALRKAFEKAVVKRLMTDVPFGVLLSGGLDSSLVATVAVRHLARTEAARRWGTKLHSFCVGLEGSPDLKAAREVAEYLGTLHHEFHFTVQDGIDAIEDVIYHTETYDVTTIRASTPMFLMSRKIKSLGVKMVISGEGSDELFGGYLYFHKAPNKEELHRETCRKVKALHQYDCLRANKATSAWGLEARVPFLDKEFINAAMSIDPEWKMVQPDLGRIEKWVLRKAFDDEEQPFLPKHILYRQKEQFSDGVGYSWIDGLKAHATSNVTDKMLSNAKFIFPHNTPTTKEAYYYRMVFERFFPQKSAILTVPGGPSVACSTAKAIEWDAQWSGNLDPSGRAALGVHLAAYEHQHDPEHVPAAIAAGSGKKPRTIRVAPPGVAIEG

SEQ ID NO: 4147 - protein, 130 aa, Streptococcus agalactiae NEM316
MPFLHTCIRVKDLDASIAFYQEALGFKEVRRNDFPENQFTLVYMALEDDPSYELELTYNYDHEAYDLGNGYGHIAVGVDDLETTYDAHQKAGYSVTKISGLPGKPNMFYFIQDPDGYKIEVIRLSQFKAD

SEQ ID NO: 4148 - protein, 444 aa, Silicibacter sp. TM1040
MTDFTFTRRDFPGDFLFGCATSSYQIEGHQYGGAGPTHWDSFAATPGNVVRSEDGARACDHYHRFEEDLDLAAAAGFECYRFSTSWARVLPEGRGTPNAEGLDFYDRLTDAMLERGLKPCATLYHWELPQPLADMGGWRNRDVSNWFAEFTEVIMSRIGDRMYSVAPINEPWCVGWLSHFLGHHAPGLRDIRATARAMHHVLLSHGRAIEVMRGLGMNNLGAVFNFEWAEPLDQSAQAQAAAETYDAIYNRFFLGGVFKGAYPEAALRGLEPHLPQGWQDDFATITQKVDWCGLNYYTRKVIGPDNGPWPHYAELVGELPTTQMGWEIYPDGLYKFLKRTAEDYTGGLPLIVTENGMANPDVLLEGEVPDAARIAYVEAHLARVRQAIAEGVPVKGYFLWSLLDNYEWALGYEKRFGLVHVDFETLKRTPKASYRALQRALTAS

SEQ ID NO: 4149 - protein, 531 aa, Propionibacterium acnes KPA171202
MAAKQLQFDEEARRSLERGVDTLADTVKVTLGPKGRYVVLDKKWGAPTITNDGVTVAKEVDLTDPYENLGAQLAKEVATKTNDVAGDGTTTATVLAQALVHEGLRAVASGANPVGLKRGIEKAVDAVVEELRSISRAIDTTSDMASVATISSRDETIGALIAEAFDKVGKDGVITVDESQTFGTELDFTEGMQFDKGYLSPYMVTDQDRMEAVIEDPYILIHSGKISSMNDLLPLLEKVIAAHGSLFIVAEDVDGEALSTLVVNKIRGTFSSVAVKAPAFGDRRKAMLQDIATLTGGQVVAPEVGLKLDQVGLEVLGRAKKVVVTKDNTTIVDGAGDKADVEGRVIQLRAEYDNSDSEWDREKLQERIAKLAGGVCVIRVGAATEVELNEKKHRIEDAVSATRAAIEEGIVAGGGSALIHAAHVLDGDLHLEGDEKAGVQIVAKAVREPLRWIAENGGEPGYVIVSKVAEMEPGHGYNGKTGQYVDLIADGVIDPLKVTRSALANAASIASLLLTTETLVVDKPEEDNEDK

SEQ ID NO: 4150 - protein, 610 aa, Wolinella succinogenes
MCGIAGTLNSSCFSSKKLLAALAHRGPSGHGEFSHQGVNLFHARLSIQDLSPAGAQPMHRHHLSIVFNGEIYNHLELRAKVADYPFSTRSDTETILALFERFGERSLEWMDGMFALAILDQRTHKLFLARDRMGKKPLFYYQEGEEFLFASELNALLTLKPLQIDHAKLSAFLRCGFFPHDGAPYQGVQSLPQGSYAFIDLHHPRPLSPQRYFDLLSLYQAPKIEGFEASKEAVELALKESVKNRLESSDLEVGSFLSGGIDSSLITALASFFTPKLKTFTVAFEGAYDESSLAELVAKRYKTDHTTLHLNPSKLKEEVKGILACYGRPFMDSSAIPSYYVSQEAKKHLTVILNGDGADELFGGYRRYVPMSHGWLKLARPLSLLLPLLPLPKEKKSLYNYLHRLLAMSRKRGLDFYLSATIDSFEDAYAFSPNPHTQTLDQEITQILEDSSLSSLSKMLYLDSQNLLLSDLLPKMDIATMAHSLEGRSPFLGKSLLEVAPRIKDEYKIFGKSTKFILRELAKKYLPHALLEQPKRGFEVPLRAWVEGELKELIFDSLSKNCLSRELIESRFVDALLDKPQDFAPEKRAKMLWSLFSLEVWHEHYQKACE

SEQ ID NO: 4151 - protein, 279 aa, Glycine max
  misc_feature (231)..(232): Xaa can be any naturally occurring amino acid
MENRTSSVLPPGFRFHPTDEELIVYYLCNQATSRPCPASIIPEVDIYKFDPWELPEKTDFGEKEWYFFSPRERKYPNGVRPNRATVSGYWKATGTDKAIYSGSKHVGVKKALVFYKGKPPKGLKTDWIMHEYRLIGSRRQANRQVGSMRLDDWVLCRIYKKKNIGKSMEAKEEYPIAQINLTPANNDSEQEMVKFPRTSSLTHLLEMDSLGPISHILSDATYNSPFDFQIXXANGGIDPFVKPHPVEIPYAADSGKYQVKQNSTINPTIFVNQVYYQRG

SEQ ID NO: 4152 - protein, 618 aa, Wolinella succinogenes
MCGIVGYSQNHPQAIQEMLQSIRHRGPDDLGIYCDEGFSLGHTRLSILDLSHAGHQPMEFEHLVIVFNGEVYNFRAIQKELLGLGYTFFSDSDTEVILKAMHCWGEKAVDKFIGMFAFALWDKRKEELLLYRDRVGVKPLYYYFEGGELLFASELRAITAIKPNLALSQAGLYEYFQFGYISSNLSIHQAIHKLPAGHYLRFKAGKIEVKPYWSIHTFLEMPPFEKSEEELIDELEELLVDAFKLRMVADVPVGVFLSGGIDSSLVAAILQKHHGHIHTFTIGFENPRYNEALYAKGVAEHLGTEHTERILSAEEAREILYRFPEVYDEPFGDSSGIPTLLVSKVAKESGVKVVLSADGGDEIFCGYERYPIAHSLSRKILSLPYPLRAFAGRAMESFGAKRAGYLFKVRNLEHKFNQLSEMLRAKDLEEFYELLVHNSKNYEIKELLGETFPPKSRAFKVGERIHPMQGMMSWDYERYMVDDILVKVDRATMFHSIEGREPLLDHRIAEFAARLPFNMKFREGKTKYILRKVLERYLPKEMIERPKMGFGIPMFEWFSQDLRSLFETHFTPERLKSSGVLNPSYVLRELGKLQRGEPVNVNKLWLILVFLMWQEKAR

SEQ ID NO: 4153 - protein, 413 aa, Nicotiana tabacum
MPEKPLFGKYELGKLLGCGASAKVYHAREINNGQSVAIKMINKNNKDNIPNENIEREISILRQLRHPYIVKLYEVLATKSKIYFVMEYVKGGELFTKIADHGRFSEDLSRKYFQQLISALNYCHSRGIYHRDLKPENILIDENGDLKISDFGLSATTDQIQKFDGLLHTVCGSPAYVAPEILTIKGYDGAKTDIWSCGIILYVMIAGYLPFYDQNLMLMYKKIYKGEFKCPKWMSPDVIRILSRLLDTNPATRITIDEIIKDPWFRKGLKFIKFAGEEEDKYSLSSNCLNAFDLISFSQGLDISGLFKSNNPANDLERTVVEQSPESVIERVEEMAKKENFRLRKKKEWGIEMKVQNGKLTMSVDIYRLTERFVIVEVKREAGNGDLYTDLWRNKLKAVILGQQIAEIQDSGS

SEQ ID NO: 4154 - protein, 674 aa, Burkholderia sp. 383
MTSRYPHLTTPLELGFTSLRNRVLMGSMHVGLEEAPNGFERMAAFYAERARGEAGLIVTGGFAPNERGRPAPGGAMLTTEAEAERHRVVTRAVHAEGGKIALQILHFGRYAYHPALAAPSALKAPINPFTPHALSSDEVDETIADFVRCAALAQHAGYDGVEIMGSEGYLINEFIAARTNHRDDAWGGAYENRIRFPVEIVRRVRERVGTNFILIYRLSMLDLVEGGSTLDEVIRLAQAIEAAGATIINTGIGWHEARIPTIATKVPRAAYAWVTRQLMGQVGIPLVATNRINTPEVAEQLLADGYCDMVSMARPFLADAEFVRKAREGRADEINTCIGCNQACLDHTFSGRITSCLVNPRACHETELVIRPAQQRKRIAVVGAGPAGLGFAVTAAERGHAVTLYEAGAEIGGQFNIAKKVPGKEEFNETLRYFRRQIELRGVTLHLNTRATAEMLVQGEFDEVVIATGIVPRTPPIDGVGHAKTLGYLDVLRDDQAVGSRVAIVGAGGIGFDVAEYLVHRAGAEHVDAERFFTEWGVDPSYANAGGLRHAQPEPAARQIHLLQRKASKVGDGLGKTTGWIHRTGLKARGVGMSSAVTYRRIDDDGFHVTIDGVEQTLPVDNVVICAGQEPLRELAEQLEAAGRKVHVIGGAYEAAELDAKRAIHQGTSLAATL

SEQ ID NO: 4155 - protein, 324 aa, Candida tropicalis
MSTTPTIPTIKLNSGYEMPLVGFGCWKVTNATAADQIYNAIKTGYRLFDGAEDYGNEKEVGEGINRAIKEGLVKREELFITSKLWNNFHDPKNVETALNKTLSDLNLDYVDLFLIHFPIAFKFVPIEEKYPPGFYCGDGDNFHYEDVPLLDTWKALEKLVEAGKIKSIGISNFTGALIYDLIRGATIKPAVLQIEHHPYLQQPKLIEYVQKAGIAITGYSSFGPQSFLELESKRALNTPTLFEHETIKLIADKHGKSPAQVLLRWATQRNIAVIPKSNNPERLAQNLSVVDFDLTKDDLDNIAKLDIGLRFNDPWDWDNIPIFV

SEQ ID NO: 4156 - protein, 546 aa, Silicibacter pomeroyi DSS-3
MAAKDVKFNTEARNKMLKGVNILADAVKVTLGPKGRNVVLDKSFGAPRITKDGVSVAKEIELEDKFENMGAQMVKEVASRTNDEAGDGTTTATVLAQAIVREGMKSVAAGMNPMDLKRGIDLATAKVVEAIKAASRPVNDSAEVAQVGTISANGESEIGRQIAEAMQKVGNEGVITVEENKGLETETDVVEGMQFDRGYLSPYFVTNADKMIAELEDCMILLHEKKLSSLQPMVPLLEQVIQSQKPLLIIAEDVEGEALATLVVNKLRGGLKIAAVKAPGFGDRRKAMLQDIAILTGGQVISEDLGMKLESVTMDMLGTAKKISITKDETTIVDGAGEKAEIEARVAQIRTQIEETTSDYDREKLQERVAKLAGGVAVIRVGGMTEVEVKERKDRVDDALNATRAAVQEGVVVGGGVALVQAGKVLADLEGANADQTAGINIVRKAIEAPLRQIAENAGVDGAVVAGKVRESGDASFGFNAQTEEYGDMFKFGVIDPAKVVRTALEDASSVAGLLITTEAMVADKPQKDAPAGGGMPDMGGMGGMM

SEQ ID NO: 4157 - protein, 346 aa, Cytophaga hutchinsonii
MERNLSTVKTLVQFITESQKHVFGASGDLSKILNDIAVAAKIINREVNKAGLLDILGMEGGMNVQNEEVKKLDVYANDQFISALRSGGQCCAIASEENTDIIPIENNGHSKSNYVVLIDPLDGSSNIDVNVAIGSIFSIYRRVSESGPGETVDCMQVGNKQVAAGYIIYGSSTMMVYTTGDGVNGFTLDPSIGEFCLSHPNLKIPEDGFIYSVNEGNYADFPREIQEYIYYCKTPDFETSRPYSSRYIGSMVADFHRNLIKGGIFMYPATAKYPLGKLRLMYECNPLAFIVEQAGGKAIDGEGRILDIEPTNIHQRTGIIIGSKNMVEKVEAFIQMNVGLNVYRLK

SEQ ID NO: 4158 - protein, 546 aa, Vibrio vulnificus YJ016
MAAKDVKFGNDARVKMLEGVNILADAVKVTLGPKGRNVVLDKSFGAPTITKDGVSVAREIELEDKFQNMGAQMVKQVASQANDVAGDGTTTATVLAQAIVNEGLKAVAAGMNPMDLKRGIDKAVAAAVEELKALSKDCSTSTEIEQVGTISANSDSSVGKIIAEAMEKVGRDGVITVEEGQALHDELDVVEGMQFDRGYLSPYFINNQESGSVELESPFILLVDKKISNIRELLPALEAVAKASRPLLIIAEDVEGEALATLVVNNMRGIVKVAAVKAPGFGDRRKAMLQDIAILTGGTVISEEVGLELEKATLEDLGQAKRVSITKENTTIIDGVGEEAMIQGRVAQIRQQIEDATSDYDKEKLQERVAKLAGGVAVIKVGAATEVEMKEKKDRVEDALHATRAAVEEGIVAGGGVALIRAASKIVDLQGDNEEQNVGIRVALRAMEAPLRQITKNAGDEESVVANNVRAGEGSYGYNAATGVYGDMLEMGILDPTKVTRSALQFAASVAGLMITTEAMVTDLPQKDSGMPDMGGMGGMGGMGMM

SEQ ID NO: 4159 - protein, 407 aa, Bacteroides thetaiotaomicron VPI-5482
MESKLFTPVTFGPLTLRNRTIRSAAFESMCPGNAPSQMLLDYHRSVAAGGVGMTTVAYAAVTQSGLSFDRQLWLRPEIISGLREVTGAIHTEGAAAGIQIGHCGNMSHKKICGTTPISASTGFNLYSPTFVRGMKREELPEMARAYGRAVHLAREAGFDAVEVHAGHGYLISQFLSPYTNHRKDDYGGLLQNRMRFMEMVMNEVMTAAGSDMAVIVKMNMRDGFKGGMETDESLQVAKRLLALGAHALVLSGGFVSKAPMYVMRGAMPIRSMAYYMDCWWLKYGVRMFGKWMIPTVPFREAYFLEDALKFRAALPEAPLIYVGGLVSREKIDEVLDAGFDAVQMARALLNEPEFVNRMRREEQARCNCGHSNYCIGRMYTIEMACHQHLKEKLPPCLQREIEKLEKQ

SEQ ID NO: 4160 - protein, 394 aa, Oryza sativa
LATTPLSTPQISPLSISHLPAAMAEDAPSAAAAEGSQHASAAEGGSAAAAASAAPAAKAAEALLPSLSIWPPSQRTRDAVVRRLVQTLVAPSILSQRYGAVPEAEAGRAAAAVEAEAYAAVTESSSAAAAPASVEDGIEVLQAYSKEVSRRLLELAKSRAAPSPAAAAPAEGAASESEAAAAPAPAEDCYVVLNGIPVISAMFFHKCELMIKQDNCIFALAIPLTAVVTSVTVTARVEVELSGGWDEIGLGLSGFGVLFSFLGIIMLFDKGFLAIGNILFVSGVSLTIGPKSTVQFFTKPKNHKGSIAFGIGFFLVLIGWPFFGMLAEAYGFVKLFRGFWPTAAVYLQKSPTFGWIFHHPLVTSVQGKTSPGVIVALLLELDHSKGCRVTSKET

SEQ ID NO: 4161 - protein, 541 aa, Rhodobacter sphaeroides
MSAKEVRFGTDARGRMLKGINTLADTVKITLGPKGRNVILDTSYGAPRITKDGVTVAREIELSDRFENVGAQMVKEVASRTNEEAGDGTTTATVLAQAIAKEGMKAVAAGMNPMDLKRGIDRAVAIVIAEIRSMSRPVGDSAEIAKVGALSANGEAAIGRQIADAMAKVGTAGVIKVENKGLETETEVVEGMQFDRGYLSPYFITHAQKMVVELDDCAILLHEGKLTSLASMVPLLEAVVQAEKQLLVVAEDVEGEALTTLVVNKLRGGLKVAAAKAPGFGDGRAAMLEDLAVLTGAHLISAELGTKLETVTLDMLGFAKKVVLTKDSTILIDSAGDKAAIASRIGQIRNQIEDTTSAYNKEKLQERLARLAGGVAVIRVGGATEIEVKERRDRVEDTLNATRAAVQEGVVPGGGAALIHAGKALAGLKGDNPDQDAGIKIIRRAIQAPLRQIADNAGIDGSVVAGKVIENDSATFGFDAQLETYGDMLQAGIIDPTKVVRIALEDAASIAGLLITTEVIIAHKPERGERMSQMDEMGGMM

SEQ ID NO: 4162 - protein, 510 aa, Saccharomyces cerevisiae
MPTSGTTIELIDDQFPKDDSASSGIVDEVDLTEANILATGLNKKAPRIVNGFGSLMGSKEMVSVEFDKKGNEKKSNLDRLLEKDNQEKEEAKTKIHISEQPWTLNNWHQHLNWLNMVLVCGMPMIGWYFALSGKVPLHLNVFLFSVFYYAVGGVSITAGYHRLWSHRSYSAHWPLRLFYAIFGCASVEGSAKWWGHSHRIHHRYTDTLRDPYDARRGLWYSHMGWMLLKPNPKYKARADITDMTDDWTIRFQHRHYILLMLLTAFVIPTLICGYFFNDYMGGLIYAGFIRVFVIQQATFCINSMAHYIGTQPFDDRRTPRDNWITAIVTFGEGYHNFHHEFPTDYRNAIKWYQYDPTKVIIYLTSLVGLAYDLKKFSQNAIEEALIQQEQKKINKKKAKINWGPVLTDLPMWDKQTFLAKSKENKGLVIISGIVHDVSGYISEHPGGETLIKTALGKDATKAFSGGVYRHSNAAQNVLADMRVAVIKESKNSAIRMASKRGEIYETGKFF

SEQ ID NO: 4163 - protein, 84 aa, Kandelia candel
MDLRVMGLDSPLFSTLQHMIDAGNEEAEKSSHGPTRVYMRDAKAMAATPADVKELPNAYVFVIDMPGLKSGDIKVQVEEDNVLI

SEQ ID NO: 4164 - protein, 133 aa, Kandelia candel
DPLDGFFSSAVANVPFNSANEAAAFANARFDWKETPEAHVFKADLPGLKKEEVKVEVEEGRILQISGERRKEQEEKNDKWHRLERSSGKFLRRFRLPENAKMYQVKASMENGVLTITVPKEEEKKPEVEAIEI

SEQ ID NO: 4165 - protein, 651 aa, Oryza sativa
MAGSERTVVWFRRDLRIDDNPALASAARDGAVLPVFIWCPADEGQFYPGRCSRWWLKQSLPHLSQSLESLGCPLVLIRAESTLEALLRCIDSVGATRLVYNHLYDPVSLVRDDKIKKELSALGISIQSFNGDLLYEPWEIYDDSGLAFTTFNMYWEKCMELPIDASPSLAPWKLVPVPGLESVRSCSVDDLGLESSKDEESSNALLMRAWSPGWRNAEKMLEEFVSHGLLEYSKHGMKVEGATTSLLSPYLHFGEVSVRKVYQLVRMQQIKWENEGTSEAEESIHFFMRSIGLREYSRYLCFNFPFTHEKSLLGNLKHYPWKVDEERFKSWRQGMTGYPLVDAGMRELWATGWTHNRIRVIISSFAVKFLLIPWTWGMKYFWDVLLDADLESDILGWQYISGSLPDGHELSRLDNPEVQGQKYDPDGVYVRTWIPELARMPTEWIHHPWDAPSCILEVAGVELGFNYPKPIVDLHIARECLDDSISTMWQLDTAEKLAELDGEVVEDNLSNIKTFDIPKVVLRETSPCALPIDQRVPHASSKDHNLKSKVLKASNRSSICVDMIRSSKMEATSSVANSPVSRKRSFCETAFHVPSYSSSAEVHSHIQDHGGSLVGPSRYLLQEAGRNCVDEVEDSSTADSGSSISRQRKAA

SEQ ID NO: 4166 - protein, 932 aa, Acinetobacter sp. ADP1
MSNFNKKLSKRLQLNHAYGQLIALIFVPIMVLASVGTVLVLNETSAAAKSQQRHTAAALLTRYEHTASNLLELVERRPEQYDQAQRIMQNMFNERYLKRAAIIDQQGRVYLSIGYRDTRFWPQIPNMVFFGPVTHNHNNIYGQRIQSPLHQAAWLVVEMDNQPLQIAHYRVFLVLIVTGLITLLLLLLCLNFYSRRWIAPMYEIRMQLQRLNADTLDQHMVINSTGELRLLQRDIANVVKRLHFSFLELKEHTEQTEDDLRRTLDTLEVQNITYRQARDQAISANQAKSVFLANISHELRTPLNSIDGFIHLMLRQQNLSNEQRLYMQTIRKSSAHLLALINDVLDFSKIDAGKLELETAAFNLEEAIFDVMDMLSPLAAQKHIDMAFYYGDNIPEIVIGDALRVKQILTNLISNAIKFTPDGEIIVRVRMEHDDIDQCLLHFSVQDSGIGLSGTDRKKLFESFSQGDASVTRQFGGTGLGLAISKQLVQLMHGHIGFEDNQERAPTEKGSTFWFTAQFKTQEAHIIDHPEFPQLQVVSYLAHPATANILRHYLENYEVQHTEITSILELFSRLNHLSSKENTWLIVDHSGDTEALLKEIRQRYTGNLAVYGYQMALEPNMLNEYRARPLYQPLSRSALIQLLSNQPIFEQPPEQFNGRGLHVLAVDDHLPNLIVLEALLSELNVTTSKALSGQEALNIIEQRIEQNEKPFDVVFMDIQMPVMSGIDTTRAIRSLESTLDTQMRLPIIALTAHALADEKQKLLKVGMDDYVTKPIQMEQIIHILNQWSKADFDHPPQNDHQILIDALDPTILDWQQSLQLAANKEDLAYDLLKMLVDSFETELGEMEQLIELEDFPQLEHVLHRLYGATRYVGTPKLQHVTGEFEQFVSTLRKERRKADADFVQNVLKRFEELHLTIREVEGAAKHILSEQQ

SEQ ID NO: 4167 - protein, 541 aa, Bradyrhizobium sp. BTAi1
MSAKDVKFAADARERLIRGVDILANAVKVTLGPKGRNVLIEKSFGAPRITKDGVTVAKEIELEDKYENLGAQLLRQVASKTNDLAGDGTTTATVLAQAIVREGAKAVAASLNPLDLKRGIDLAVAEAIKDIEKRARKVQSSEEVAQVGTISANSDAAVGKIIATAVKKVGNDGVITVEEAKSLETELDVVEGLQFDRGYLSPYFVTNSDKLLVEFEEPYILIHESKLTSLQPLLPVLEAVVQTGRPLLVIAEDVEGEALATLVVNKLRGGLKVAAVKAPGFGDRRKAQLEDIAILTGGQTISQDLGIKLENVTLSQLGRARRIRIDKENTTVVGGTGKKKDIDARIAQIRAQIEETTSDYDREKLQERLAKLSGGVAVIRVGGATEVEVKEKKDRVDDALNATRAAIAEGIVPGGGVALLRAKAAVSKLTNPNPDIQAGIQIVLKALEAPIRQIADNAGVEGSIVVGKILENRSPTFGFDAQKEEYVDLIEAGIVDPAKVVRTALQDAASVAALIVTTEALVVELPKEKAALPAAGAGADF

SEQ ID NO: 4168 - protein, 741 aa, Fragaria x ananassa
MEACNCIEPQWPADELLIKYQYISDFFIALAYFSIPLELIYFVKKSAVFPYRWVLVQFGAFIVLCGATHLINLWTFNMHSRTVAIVMTTAKVLTAVVSCATALMLVHIIPDLLSVKTRELFLKNKAAELDREMGLIRTQEETGRHVRMLTHEIRSTLDRHTILKTTLVELGRTLALEECALWMPTRTALELQLSYTLRQQNPVGHTVPIHLPVINQVFSSNRAVKISPNSPVARLRPLVGKHMPGEVVAVRVPLLHLSNFQINDWPELSTKRYALMVLMLPCDSARQWHVHELELVEVVADQVAVALSHAAILEESRRARDLLMEQNIALDLARREAETAIRARNDFLAVMNHEMRTPMHAIIALSSLLQETELTPEQRLMVETILKSSNLLATLINDVLDLSRLEDGSLQLDIATFNLHSVFIEVHNLVKPVASVKKLSVTLNLAADLPVYAIGDERRLLQIILNVVGNAVKFSKEGSISITAFVAKSESLRDFRAADFFPVQSDNHFYLRVQVKDSGSGINPQDLPKLFTKFAQNQSLATRNSGGSGLGLAICKRFVNLMEGHIWIESDGLGKGCTTTFIVKLGYPERSNESKLPFVPKMHTTHVQTNFPGLKVLVMDDNGVSRSVTKGLLEHLGCDVTTVSSSDEFLQVISQEHKVVFMDVCMPGIDGFELAVQIHEKFTKRHERPVLVALTGNINKMTKESCMRVGMEGVILKPVSVDKMRSVLSELLEHRVLFEAM

SEQ ID NO: 4169 - protein, 248 aa, Rosa hybrid cultivar
MAYENKPNTVLDADAQRRLGRGKIEIKRIENTTNRQVTFCKRRNGLLKKAYELSVLCDAEVALIVFSNRGRLYEYSNNSVRETIERYKKACADSSNNGSVSEATTQYYQQEAAKLRAQITTLQNSNRGYMAEGLSNMSIKELKGVETKLEKAISRIRSKKNELLFAEIEYMQKRELDLHNNNQLLRAKIADNERHQQSINAIAGGHGSYEIMQPTQPFHEARNYFQVNALEPNIHQYSRHDQISLQLV

SEQ ID NO: 4170 - protein, 404 aa, Mannheimia succiniciproducens MBEL55E
MELFPKSNKLEHVCYDIRGPVHKAALRLEEEGHKILKLNIGNPAPFGFEAPDEILIDVIRNLPTAQGYCDSKGLYSARKAIVQYYQSKGIHGATVNDVYIGNGASELITMAMQALLNDGDEVLVPMPDYPLWTAAVTLAGGKAVHYLCDEEQDWFPAIDDIKSKITSRTKAIVIINPNNPTGAVYSKELLLEIAEIARQNGLLIFSDEIYDKILYDGAVHHHIAGLAPDLLTITMNGLSKAYRICGFRQGWMILNGPKDKARGYIEGLDMIASMRLCANVPMQHAIQTALGGYQSINELIVPGGRLYEQRNRAYELLNQIPGVSCVKPMGALYMFPKIDIKKFNIYDDEKLVLDLLAQEKVLLVHGRGFNWHAPDHFRIVTLPYVHQIEEALNKFARFMENYHQ

SEQ ID NO: 4171 - protein, 279 aa, Thermosynechococcus elongatus BP-1
MTSSLELQPQTSRLNWGFVLFLGAVHILAAVALFFFSWSALAVTIFLHWLFGSIGICLGYHRLLSHRSFQVPQWLEYVIAVVGALAMQGGPIFWVAGHRLHHAHTEDEIKDPYSARRGFWWSHMLWLVYPQSQFFNAEEYARFAPDLTRDPFYRWLDRYFLLLQLPLALLLYGLGGWSWLLWGMFMRAVFLWHSTWLINSATHKWGYRRFETEDNSRNLWWAALLTYGEGWHNNHHAYPHVAKAGWYWWEVDPTWWVIRTLQGLGLAAKVQLPPPKALS

SEQ ID NO: 4172 - protein, 829 aa, Arabidopsis thaliana
  misc_feature (337)..(337): Xaa can be any naturally occurring amino acid
  misc_feature (344)..(344): Xaa can be any naturally occurring amino acid
  misc_feature (403)..(403): Xaa can be any naturally occurring amino acid
  misc_feature (437)..(437): Xaa can be any naturally occurring amino acid
  misc_feature (449)..(449): Xaa can be any naturally occurring amino acid
MSEPKVRRWVGKYEVGRLIGECNFGKLRSAVDTETGDPVALMILDKDKVLKHKMAEQIKREISIMKLINHPNVVQLYEVLASKAKIYIVLEFISGGKLFDKIKNDGRMNEDEAQRYFQQLINAVDYCHSRGVYHRDLKPENLLLDAQENLKVAEFGLIALSQQAGGDGLRHTACGNPDYPAPEVLNDQGYDGAKADLWSCGVILFVLLAGYLPFEDSSLTTLYKKISSADFSCPPWLSSGVKNLIVRILDPNPMTRITIPEILEDVWFKKDYKPAVFEEKKEANLADVEAVFKDSEEGRVQLRSFPCVICSGGTSCGDVRSTTKLMHGFIETGRPQXSHSIKEXYKMRLENVTAGRKGNLRVATEIFQVSPSLHMIEVRKTKGDTLEFHKFYKKLSTSLNDVXLEIWRELWSKQIRKKTDDSSPCFDYLLFSFLLIXFFQDSILLNIRXKSHEIDDSVDIEACAVSLCCSYNCKLRLCCVTNILSKNGVKPDVVTFNTLAKAYARIGSTCTAEDMIIPRMLHNKVKPNVRTCGTIVNGYCEEGKMEEALRFFYRMKELGVHPNLFVFNSLIKGFLNINDMDGVGEVVDLMEEFGVKPDVVTFSALMNAWSSVGDMKRCEEIYTDMLEGGIDPDIHAFSILAKGYARAGEPEKAEQILNQMRKFGVRPNVVIYTQIISGWCSAGEMKKAMQVYKKMCGIVGLSPNLTTYETLIWGFGEAKQPWKAEELLKDMEGKNVVPTRKTMQLIADGWKSIGVSNSNDANTLGSSFSTSSKLNIPNNIASSRSPLFLKGMPEKPKLCIKSQFGLRQTLLVVLCRDQIGEAGRFCKFM

SEQ ID NO: 4173 - protein, 1317 aa, Cytophaga hutchinsonii
MEEIEFLKKSLQEEIISRKQLEIELEKNKLEIEKLKKKFSNSHKEILENYIRKEQDLLSNSSRLSSLIVNLDSAILLEDENRKIVLVNQKFCDIFGIPLSPQELIGTDCSNSAQQSKIKFKNPDQFISRIEELLENKKKVLSDELQLIDGKILKRDFIPVYHNNEYLGHLWNYEDLTNYINVKKKIESLSRFPKESPNPILRCSADGMVIYANAAAKPFVSVLSTTKYNSNNNVTYDSLVSNVKASFKTRMLLKNEIRIKDRTYNVSYVPVEHEDYVNIYATDITSTKESEEKIYLLKELLNQLDEFIQVIDKEGNFVFINESSANRFQRTIEEFETLNIKNIVPSFYNNMTWEEQFDFFKQKQNFLLESTHTKPDKTSYPIESSVKYTTVHEKEYIISFSKDISERKRTEQALQDQKQFYEDILNNIPSDIAVFNTNYQYLYVNPAAIKDEETRKWIIGKTDLDYCRYRGKDDSLAIMRRKNHDILHEFKKPIEWEDVFTDKDGNVSYVLRKFHPVLDENDNIKIIIGNGINITEIKQVQEKLAKSEELYRLVIHAANDGIWDWDIASGSLYLSERWKSMLGYTDETLANHISSWEKTMHPDDLSIAKEILQNHFEKRKPYNYTLRYLHVDGSIRWIMCRGFAIRNRKGEPYRMVGSCTDVTDTQIAEEKLKENEEKLQAIFNHSHDAKFLVDPCTNKIIEFNKRTLELFETDKPDTLYTIPLTSLRKYPLTDAELADTQNQFKQLGYWNQEVLYITQKKNEFWGNIVAKTIFINKKEVILVRITDISENKKIEQELIKAKQIAEESTKAKEMFLANMSHEIRTPMNGILGMAELISRTSLDVTQKKHVQLIKNSADNLLIIINDILDIAKIESGKLTIEQIPFDICEVIKSAIQTLTYKAEEKGIDLIIHPIKLDHRVVIGDPFRLTQALLNLINNAIKFTENGSVEISGRIPHSSSTDITFEFTVKDTGIGIPQEKLDSIFEGFTQASPDTSRKYGGTGLGLTISKNLIQMQGGNIWVESVVGKGSKFIFSITYKKGDLLDVSPNNKNKINLYQLHDLKVLLAEDNEVNQYFAKTLMDEIGVKVDVANNGIEAFQFFEQNEYDIILMDIQMPYMGGIETTSKIRSHANKTKAKIPIIALTANALVGDSEKYIEAGMSDYISKPFDRETLFRKLQLHAGSNKNIFQDAKNIHLFQSDTNDAYLPNYSHLEKNFQNNTVFLKKIFTLFIESTPEIVNELKLFSEGKDYEKLQATAHKLKASVDAFKIVALHQTIRNIEKFAANKTNLDEIPDLVKSTDDILKIAQEDITKKLKQIE

SEQ ID NO: 4174 - protein, 610 aa, Arabidopsis thaliana
MDKKTIVWFRRDLRIEDNPALAAAAHEGSVFPVFIWCPEEEGQFYPGRASRWWMKQSLAHLSQSLKALGSDLTLIKTHNTISAILDCIRVTGATKVVFNHLYDPVSLVRDHTVKEKLVERGISVQSYNGDLLYEPWEIYCEKGKPFTSFNSYWKKCLDMSIESVMLPPPWRLMPITAAAEAIWACSIEELGLENEAEKPSNALLTRAWSPGWSNADKLLNEFIEKQLIDYAKNSKKVVGNSTSLLSPYLHFGEISVRHVFQCARMKQIIWARDKNSEGEESADLFLRGIGLREYSRYICFNFPFTHEQSLLSHLRFFPWDADVDKFKAWRQGRTGYPLVDAGMRELWATGWMHNRIRVIVSSFAVKFLLLPWKWGMKYFWDTLLDADLECDILGWQYISGSIPDGHELDRLDNPALQGAKYDPEGEYIRQWLPELARLPTEWIHHPWDAPLTVLKASGVELGTNYAKPIVDIDTARELLAKAISRTREAQIMIGAAPDEIVADSFEALGANTIKEPGLCPSVSSNDQQVPSAVRYNGSKRVKPEEEEERDMKKSRGFDERELFSTAESSSSSSVFFVSQSCSLASEGKNLEGIQDSSDQITTSLGKNGCK

SEQ ID NO: 4175 - protein, 244 aa, Arabidopsis thaliana
  misc_feature (178)..(178): Xaa can be any naturally occurring amino acid
RALCQAPFLLDDPNVGMIFPADAIARAKHYLSLTSGGLGAYSDSRGLPGVRKEVAEFIERRDGYPSDPELIFLTDGASKGVMQILNCVIRGQKDGILVPVPQYPLYSATISLLGGTLVPYYLEESENWGLDVNNLRQSVAQARSQGITVRAMVIINPGNPTGQCLSEANIREILRFCXMRRRARMMTDGFNSCKNVVCNFTEGAMYSFPQIKLPSKAIQAAKQAGKVPDVFYCLKLLEATGIST

SEQ ID NO: 4176 - protein, 610 aa, Arabidopsis thaliana
MDKKTIVWFRRDLRIEDNPALAAAAHEGSVFPVFIWCPEEEGQFYPGRASRWWMKQSLAHLSQSLKALGSDLTLIKTHNTISAILDCIRVTGATKVVFNHLYDPVSLVRDHTVKEKLVERGISVQSYNGDLLYEPWEIYCEKGKPFTSFNSYWKKCLDMSIESVMLPPPWRLMPITAAAEAIWACSIEELGLENEAEKPSNALLTRAWSPGWSNADKLLNEFIEKQLIDYAKNSKKVVGNSTSLLSPYLHFGEISVRHVFQCARMKQIIWARDKNSEGEESADLFLRGIGLREYSRYICFNFPFTHEQSLLSHLRFFPWDADVDKFKAWRQGRTGYPLVDAGMRELWATGWMHNRIRVIVSSFAMKFLLLPWKWGMKYFWDTLLDADLECDILGWQYISGSIPDGHELDRLDNPALQGAKYDPEGEYIRQWLPELARLPTEWIHHPWDAPLTVLKASGVELGTNYAKPIVDIDIARELLAKAISRTREAQIMIGAAPDEIVADSFEALGANTIKEPGLCPSVSSNDQQVPSAVRYNGSKRVKPEEEEERDMKKSRGFDERELFSTAESSSSSSVFFVSQSCSLASEGKNLEGIQDSSDQITTSLGKNGCK

SEQ ID NO: 4177 - protein, 537 aa, Corynebacterium efficiens YS-314
MAKLIAFDQDAREGILRGVDALANTVKVTLGPRGRNVVLDKAFGGPLVTNDGVTIARDIDVEDPFENLGAQLVKSVAVKTNDIAGDGTTTATLLAQALIAEGLRNVAAGANPIELNKGIEAATQKTLDELRARATPISAPQEVASVATVSSRDEVVGKIVAEAMEKVGKDGVVTVEESQSLETTLDITEGISFDKGYLSPYFINDTDTQTAVLENPAILLVRNKISSLPDFLPLLEKIVESNRPVLIIAEDIEGEPLQTLVVNSIRKTIKAVAVKSPYFGDRRKAFMDDLAVVTNATVVDPEVGINLSEAGVEVLGTARRVTVSKDETILVDGAGDAEAVEARRQQIRREIETTDSTWDREKAEERLAKLSGGVAVIRVGAATETEVNERKLRVEDAINAARAAAQEGIIAGGGSALVQIAETLKAYAEEFEGDQKVGIRALAAALSKPAYWIAANAGLDGAVIVARIADLPNNEGFNAATLEYGNLVDQGVIDPVKVTHSAVVNASSVARMVLTTEASIVDKPAEETADHGHGHHH

SEQ ID NO: 4178 - protein, 127 aa, Brassica napus
MSMSSEEENHRKNVEDKAEMGRRKRAIWERKWRRLDIVKAFASFFVHFLCLLAPFNFTWPALRVALVVYTVGGLGITVSYHRNLAHRSFKVPKWLEYLFAYCGLLAIQGDPIDWVSTHRYHHQFTDS

SEQ ID NO: 4179 - protein, 711 aa, Psychrobacter arcticus 273-4
MTASHTANSIDTASLNEHYPHLFEPLDLGFTTLKNRLVMGSMHTGLEDRFYNYGKLAAYFAERAKGGVAMMITGGISPNREGWLLPASGTMNTRADVLNHQRVTRAVHKYDSKIIMQILHSGRYGYHPFVVSSSPIKSPISPFKPRKMSIKNIEQTVKDYARSAKLAKQAGYDGVEIMGSEGYLLNQFLSRHVNKRTDEYGGDIQGRMKLAVDVVKAVREAAGEDFIMLFRLSVIDLVKDGNVMDEVIIVAKALEEAGVTIMNTGIGWHEARVPTIVTSVPRAAFVDFTAEIKKHISIPMMAANRINMPETAEEIVASGQADLIQMARPFLADAHWVNKAKDGQADRINTCIACNQACLDHTFDNKRSTCLVNPQACYETELVYKKTKKPRKVAVIGGGVAGMSAAHVAALRGHEVTLFEAKDILGGQFNYAKVIPGKEEFFETIRYYINELEHLGVEIKLNTKVDKAMLEKAKFHHVIVATGVVPRSLAGKLEGADLPQVMSYAELLSGEKSVGATVAVIGAGGIGFDVSEYLTAKHGQPLDELDPELLKDSSYRPKAQSIEEWREEWGVTSATDYQTEGGLIKTGDITPVRQVYLIQRTKGRLGSGLNKTSGWVHRAHVKSHGVIQVSGAQYDKITNEGIWITNNQGQSQLLRVDSVVVCAGQESVVELMPNVGDAPDAQYHLIGGAKLAAELDAKRAIRDGAEVAASI

SEQ ID NO: 4180 - protein, 367 aa, Psychrobacter arcticus 273-4
MAHDNLFEPVKMGTQTLKNRIIMAPLTRLRSVEPGDVPTALASEYYAQRSGAGLIIAEATQVSFQAKGYAGAPGIHTEEQMTAWKTIVDNVHAKGCKIVVQLWHTGLVAHESVQPDGKAPISASDVNVGVRTSLRDSNNQAIRVDATTPRPATLEEIQQVIADFGLATKNAKEAGFDGVEIHGAHGYLLHQFWVEHTNQRTDEYGGSRENRARLMLAVIDACVDAWDADHVGIRISPLGTFNNVEAGYNEDENIWLIEQINQRGLMYLHLSEPDWAGGTPYSTEFRQRVREAFGQMIIAAGGYTAEKAETNIKDGYIDAVAFGRDYIANPDLAERIREGAPLNEQHPQSFYGGGTEGYTDYPFLNQA

SEQ ID NO: 4181 - protein, 374 aa, Yarrowia lipolytica CLIB122
MTHLFSPIQVGASQLSNRVVLAPLTRIRAEKHVPSDLAVEYYTQRASSSGTLLISEATYIHPSCAGHKNRPGLVPGVWSDDAVLTGWKRVIEGVHSKGSKMYIQLWDLGRVADYETLQDIGGYDLVGPSAIAQEGDDEGSKHIRALSVSEIKQKVRYFVEAAKNAIAAGADGVEIHSANGYLPDQFLHWNSNHRTDEYGGSVENRARFLLEIVDAVADSVGADRVGVRFSPWTTYQDMDVDEDKTLPQYKYLFEQLEKRAVEDETKRLSYIHVVEPRVDGVNDVTTKSWQSNEPFRKIWTGNLIRAGGFKRQSAIEVAQQDNKTLVAFGRYFISNPDLVKRLEEDKALTQYDRATFYLPGAQGYTDYSFYDETE

SEQ ID NO: 4182 - protein, 919 aa, Pseudomonas aeruginosa PAO1
MSRLCLVLLLLCCALPARAQPPAPLDGEDLRLSLGAYAEYYRDAGGKARLGDILALPAQAFAALRGDHANFGKNAAAWWFRVRLDNRNGADLAGFLEVNYPLLDDLKVYLLTADGRIEQQESGDLFAFSQRPVQVRNFWFPLRLPPGESTLLLRVQSTSTVYLPLYFSTYAASAASQETLMGFNGAFYGVLFGLFCYNLFLFVSLREATYAWYLLYNLSLGLFSASFDGLLFKLLPGHVALESAGIYLLMYLSCLVSIQFSRGYLYTRRDFPRLDRFLRGLLLACVVLLASEPLVGLRAWNVLASLTVMLVSLSLLLAGVHVWRQGLRYGLYYILAWGALLLSFLVTTAASLGFELFGLFGSSVVKIGMTVELVTLSIGLADRINALKEEGFRSRQAAEQARVENEAKSRFLAKMSHEIRTPLNGVLGMLQLLRDTPLDRGQAAYVETIASSGSALMSVINDILDYARIESGKLHLERIDFDLEELLSDTLALFSAQAVEKRLHLHLGLDRGVPRRLNGDPTRLRQVLMNLLSNALKFTAEGHVAVRVQRRFDEGGRERLLYSVSDSGIGISAQAQKTLFESFSQADSSTTRRYGGSGLGLAISRELVQMMGGRIEVSSEPGKGTRFSVDLPLSPALDAGEADELAQLLQHRPALLASEDNLTLDCLQALLERWGLRVERCLQPRRLNAYLEDFSAPPLLVLAAPWPGPPSIWLDTLYAQLEQGQRILLLCPPQHCQDLPPHEGLRLLALAQPVAVKALREALLELYRERRRQPGRSSEAAPDERPPDAPCILVAEDNPVNQLVVRGFLAKRGYAVRLAGNGRLALDEYLRDPNGIQLILMDGEMPEMDGFEATRLIRREERAQGWPRVPIVALTAHILDEHRRAGIEAGMDAYLGKPVDRAELYATLERLLGQPSRQA

SEQ ID NO: 4183 - protein, 224 aa, Zea mays
HSIIDNNVACESPQQQRVGHLDPFSLDLWWDPFDMFRSIVPSAASSGGGSETAAFANARVDWKETPEAHVFKADLPGVKKEEVKVEVEDGNVLVISGKRSREEEEEDKNGKWHRVERSSGQFMRRFRLPENAKLDEVKAGLENGVLTVTVPKTEVKKPEVKAIEISGWPSVGRRLELRCTATGPWMSCMLHCSGGCSLRLLRIICSVCVVFVFPVYGLCIVPYR

SEQ ID NO: 4184 - protein, 633 aa, Fragaria x ananassa
MMESCDCVEAQWPPDELLVKYQYISDVFIALAYFSIPLELIYFVHKSAFFPYRWVLMQFGAFIVLCGATHFINVWTFSMHTKTVAIVMTIAKVSCAVVSCATALMLVHIIPDLLSVKTREIFLKNKAEELDREMGLILTQEETGRHVRMLTHEIRSTLDRHTILKTTLVELGRTLGLEECALWMPCRSGMNLQLSHTLNYDAQIGSTVPFSLPIVNEVFKSSQAMRIPYTCPLARIRPLVGRYMQPEIVALRVPLLNHSNFQMNDWPDVYAIMVLILPTDSTRKWRDHELELVDVVADQVAVALSHAAIVEESMRASDQLVEQNVALDLARREAELAIRARNDFLAVLNHEMRTPMHAIIALSSLLLETELTPDHRVMIESVLKNSNLLETLINDVLDLSRLEDGSLDLDIGKFNLHGVFREAIDLIKPIATVKKLSMTLILAPDVPVCAVGDENRLMQTILNVAGNAVKFTKEGYVSVIASIARPESSRDWRPPEFYPAPSDGHFYLRVQVKDSGSGILPQDIPRIFTKFTQPRNGSNRVNDGAGLGLAICKRFVNTMGGHIWIESEGIDKGTLVVFIVKLSICDSCSTTIAHQTVPKGEANHGSADLIGYKPALRDGYGLASTNARYQRSL

SEQ ID NO: 4185 - protein, 468 aa, Streptococcus pyogenes MGAS8232
MTKTLPKDFIFGGATAAYQAEGATHTDGKGPVAWDKYLEDNYWYTAEPASDFYNRYPVDLKLSEEFGVNGIRISIAWSRIFPTGKGDVNPKGVEYYHNLFAECHKRHVEPFVTLHHFDTPEALHSDGDFLNRENIEHFVNYAEFCFKEFSEVNYWTTFNEIGPIGDGQYLVGKFPPGIQYDLAKVFQSHHNMMVSHARAVKLFKDGGYSGEIGVVHALPTKYPFDANNPDDVRAAELEDIIHNKFILDATYLGKYSDKTMEGVNHILEVNGGELDLREEDFVALDAAKDLNDFLGINYYMSDWMQAFDGETEIIHNGKGEKGSSKYQIKGVGRRKAPVDVPKTDWDWIIFPQGLYDQIMRVKADYPNYKKIYITENGLGYKDEFVDNTVYDDGRIDYVKKHLEVISDAISDGANVKGYFMWSLMDVFSWSNGYEKRYGLFYVDFETQERYPKKSAYWYKKVAETQVIE

SEQ ID NO: 4186 - protein, 552 aa, Pseudomonas stutzeri
MAAKEVKFGDSARKKMLVGVNVLADAVKATLGPKGRNVVLEKSFGAPTITKDGVSVAKEIELKDRFENMGAQLVKDVASKANDEAGDGTTTATVLAQAIVNEGLKAVAAGMNPMDLKRGIDKATIAIVAELKNLAKPCTDSKAIAQVGTISANSDSSIGDIIAEAMERVGKEGVITVEEGSGLENELSVVEGMQFDRGYLSPYFINKPDTMVAELDSPLLLLVDKKISNIRELLPVLEAVAKAGRPLLIVAEDVEGEALATLVVNNMRGIVKVAAVKAPGFGDRRKAMLQDIAILTGGTVISEEVGLSLETATLEHLGNAKRVVLNKENTTIIDGAGQQADIEARVAQIRKQVEDTTSDYDKEKLQERLAKLAGGVAVIKVGAGTEVEMKEKKARVEDALHATRAAVEEGVVPGGGVAWVRALQAISELKGENEDQNVGIALLRRAVEAPLRQIVTNAGGEPSVVVDKVKQGEGNYGFNAASDTYGDMIEMGILDPAKVTRSALQAAASIGSLMITTEAMIAEVAEDKAAGGMPDMGGMGGMGGMGGMGGMM

SEQ ID NO: 4187 - protein, 610 aa, Arabidopsis thaliana
MDKKTIVWFRRDLRIEDNPALAAAAHEGSVFPVFIWCPEEEGQFYPGRASRWWMKQSLAHLSQSLKALGSDLTLIKTHNTVSAILDCIRVTGATKVVFNHLYDPVSLVRDHTVKEKLVERGISVQSYNGDLLYEPWEIYCEKGKPFTSFNSYWKKCLDMSIESVMLPPPWRLMPITAAAEAIWACSIEELGLENEAEKPSNALLTRAWSPGWSNADKLLNEFIEKQLIDYAKNSKKVVGNSTSLLSPYLHFGEISVRHVFQCARMKQIIWARDKNSEGEESADLFLRGIGLREYSRYICFNFPFTHEQSLLSHLRFFPWDADVEKFKAWRQGRTGYPLVDAGMRELWATGWMHNRIRVIVSSFAVKFLLLPWKWGMKYFWDTLLDADLECDILGWQYISGSIPDGHELDRLDNPALQGAKYDPEGEYIRQWLPELARLPTEWIHHPWDAPLTVLKASGVELGTNYAKPIVDIDTARELLGKAISRTREAQIMIGASPDEIVADSLEALEANTIKEPGLCPSVSSNDQQVPSAVRYNGSKRLKPEEEEERDMKKSRGFDERELFSTAESSSSSSVFFVSQSCSLASEGKNLEGIQDSSDQITTSLGKNGYK

SEQ ID NO: 4188 - protein, 462 aa, Listeria monocytogenes
MFKTNVEQNNVPVFGSFESGQDLPEKRMNKESVDPRIAYQLVKDQLIDEGSARQNLATFCQTYMEPEAEQIMAETMEKNAIDKSEYPQTAKLESSCVNMLADLWNVDESEHYMGTSTVGSSEACMLGGMAMKFRWRSAALKNGLDIHAKKPNLVISSGYQVCWEKFCVYWDIELREVPMSEEHLSINTDIIMDYVDEYTIGIVGILGITYTGKFDDIMTLNDLVEDYNNTHDNEVVIHVDGASGAMFTPFVEPGLEWDFRLPNVVSINTSGHKYGLVYPGVGWILWRDKEYLPEELVFDVSYLGGHMPTMAINFSRSASQIIGQYYNFLRFGYEGYRQIHMRTRDGALQLSQAVAETGLFEIYNDGANLPIVCYKLKDDANVAWTLYDLADRLQMKGWQVPAYPLPKEMGNTIIQRYVCRGDLGQNMVTAFKNDLSESIEELNNAHILYHDVNTSKTHGFTH

SEQ ID NO: 4189 - protein, 158 aa, Triticum aestivum
MAAISSTSYFSSQPHLPASSAAATTSISKGRQPRRHRTGSCVMLEEASGGGAVGRRTRSLTEEDLEELKGCLDLGFGFSYHEIPGLCGTLPGLELCYSMTRRFLDEQRTLVGQLEPAAVAAPPIPDWKISGPGDDPDQVKARLRYWAQTVACTVKLCT

SEQ ID NO: 4190 - protein, 614 aa, Symbiobacterium thermophilum IAM 14863
MCGIAGWADWKRDLSREGPVLETMIAPLADRGPDAGGIWCSGHCAFGHRRLAVVDLVGGAQPMVRSRGDRTYVLVYNGQLYNTQELKEELTARGHAFSTQSDTEVLLVAYMEWGPECTRRLNGIYAFAVWDEAGQQLFLARDRFGVKPLFYKTMGSAILFGSELKALLAHPLVQPEVDAEGLAEVLYLGPSRTPGHGVFRGVREVLPGHWLLFDRAGVRTQPYWQLESRPHTDGPAETAERVRELLREAVRRQLVADVPVATLLSGGLDSSAITAFAAEAFRAQGRGPLHTWSIDYAENDRHFRAHAFQPDPDSAYAGTMAESLGTVHHEVVIDTPQLVDALEKAALIRDLPGMADVDAALFLFCREIKKGATVVLSGECADEVFGGYPWFHRPGPETGRTFPWIRSLEARTALLQPGVTGPIRAEDYVAQRYSNTVARVPRLPGEEPEEARIRELFYLNLAWFMATLLDRNDRMSMAVGLEARVPFCDHLLVEYVWNIPWRLKTYGGREKGILREALRGVLPEAVRTRRKSPFPKTHHPEYFRAVRDRVLALLDDPACRLHKIVRADRVRALARQDHEATDLPWFGQLMSGPQYFAWLIQLEAWLRHYKVVLV

SEQ ID NO: 4191 - protein, 464 aa, Listeria monocytogenes
MLYSKENKESYLEPVFGSSAEDRDIPKYTLGKEPLEPRIAYRLVKDELLDEGSARQNLATFCQTYMEDEATKLMSETLEKNAIDKSEYPRTPELENRCVNIIADLWHAPKDQKFMGTSTIGSSDACMLGGMAMKFAWRKRAEKLGLDIYAKKPNLVISSGYQVCWEKFCVYWDIDMRVVPMDKEHMQLNTDQVLDYVDEYTIGVVGILGITYTGRYDDIYALNEKLEEYNSKTDYKVYIHVDAASGGFFTPFVEPDIIWDFRLKNVISINTSGHKYGLVYPGIGWVLWKDESYLPEELIFKVSYLGGEMPTMQINFSRSASHIIGQYYNFLRYGFEGYRTIHQKTSDVAQYLAHAVEQTGYFDIFNDGSHLPIVCYKLKTTANVNWTLYDLADRLQMRGWQVPAYPLPKSLENIIIQRYVCRADLGFNMAEEFIQDFQASIQELNNAHILFHDTQQSGVHGFTH

SEQ ID NO: 4192 - protein, 790 aa, Burkholderia fungorum LB400
MRIVCIGGGPAGLYFGLLMKSRNPAYDVTVIERNRPYDTFGWGVVFSDQTLGNLRIADAPSADAILDAFNHWDDIEINFRGRQIRSSGHGFCGIGRKRLLNILQARCEELGVKLVFETQVTDDSAYEADLIIACDGANSAIRQKYAHTYRPAVDMRDCRFVWLGTRKLFDAFTFAFEETEFGWFQAHAYRFDDQTSTFIVETPERVWRAAGLDEMSKEDSIAFCEKLFAKYLDGNALLSNAAHLRGSSQWIRFPRVVNEEWVHWRDNADGTRTPVVLMGDAAHTAHFSIGSGTKLALEDSIELANSIGAHPGDLAAALKHYTDVRSIDVLRIQNAARNSTEWFEHVDRYTSFEPEQFAYSLLTRSQRISHENLRERDAGYLSGFEDWLARRSGVDRAPEKHSVPPMFTPFTLRGVTLKNRVVVSPMAQYSAVDGVAGDYHLMHLGARAMGGAALVMTEMTCVSPEARITPACPGMYAPEHLTAWKRIVDLVHRQSDAKIGIQLGHSGAKGSTRVAWEGIDQPLTEGNWPLVSASPQQYLRGVSQHSREATQDELREIEAQFVRATQMSAEAGFDWLELHCAHGYFLSSFLSPLTNHRTDEYGGSLDNRLRYPLQVFKAIRAVWPQDKPISVRISANDWVEGGTTPDDAVQIARAFKAAGADMIDVSSGQVSKDEKPVYGRMFQTPFADRVRNEAGIATIAVGAISEADHVNSIIAAGRADLCAIARPHLANPAWTLNEAAKIGYFDVTWPKPYTAAKSQLERNLERERAQAAANAGLSPQERAQRAEGTT

SEQ ID NO: 4193 - protein, 166 aa, Triticum aestivum
  misc_feature (139)..(139): Xaa can be any naturally occurring amino acid
MGNSLGCSASGERLVSAARDGDAVEARMLLELSPALARYSTFGGLNSPLHFAAAKGHLDIVTLLLEKGADVNARNYCGQTALMHACRHGHWEVVQMLLLFRCNVTRADYLSGRTALHFAAHDGLVRCVRLLLADFIPSXPLEDTASSVADGGDSQMNSGSSSTSSL

SEQ ID NO: 4194 - protein, 731 aa, Mycobacterium bovis AF2122/97
MSRSEKLTGEHLAPEPAEMARLVAGTHHNPHGILGAHEYGDHTVIRAFRPHAVEVVALVGKDRFSLQHLDSGLFAVALPFVDLIDYRLQVTYEGCEPHTVADAYRFLPTLGEVDLHLFAEGRHERLWEVLGAHPRSFTTADGVVSGVSFAVWAPNAKGVSLIGEFNGWNGHEAPMRVLGPSGVWELFWPDFPCDGLYKFRVHGADGVVTDRADPFAFGTEVPPQTASRVTSSDYTWGDDDWMAGRALRNPVNEAMSTYEVHLGSWRPGLSYRQLARELTDYIVDQGFTHVELLPVAEHPFAGSWGYQVTSYYAPTSRFGTPDDFRALVDALHQAGIGVIVDWVPAHFPKDAWALGRFDGTPLYEHSDPKRGEQLDWGTYVFDFGRPEVRNFLVANALYWLQEFHIDGLRVDAVASMLYLDYSRPEGGWTPNVHGGRENLEAVQFLQEMNATAHKVAPGIVTIAEESTSWPGVTRPTNIGGLGFSMKWNMGWMHDTLDYVSRDPVYRSYHHHEMTFSMLYAFSENYVLPLSHDEVVHGKGTLWGRMPGNNHVKAAGLRSLLAYQWAHPGKQLLFMGQEFGQRAEWSEQRGLDWFQLDENGFSNGIQRLVRDINDIYRCHPALWSLDTTPEGYSWIDANDSANNVLSFMRYGSDGSVLACVFNFAGAEHRDYRLGLPRAGRWREVLNTDATIYHGSGIGNLGGVDATDDPWHGRPASAVLVLPPTSALWLTPA

SEQ ID NO: 4195 - protein, 190 aa, Isoetes velata
DEHGEVVAEIRRSDLEPYLGLHYPATDIPQASRFLFMKNRVRMIYDCSAPPVKIIQDKDLRQPISLAGSTLRAPHGCHSHYMGIMGSIASLVMAVITNDNDEEYGGRGYQQKGRKLWGLVVCHHTSSRAVPFPLRSACEFLMQVFGLQLNMEVELAAQLREKHILRTQTLLCDMLLRDAPIGIVSQSPNI

SEQ ID NO: 4196 - protein, 223 aa, Zea mays
  misc_feature (35)..(35): Xaa can be any naturally occurring amino acid
  misc_feature (86)..(86): Xaa can be any naturally occurring amino acid
MVQSKKKFRGVRQRHWGSWVSEIRHPLLKRRVWLXTFETAEEAARAYDEAAVLMSGRNAKTNFPVPRSGTGELLAPAVPAARGGAXGGGGGTSLSQILSAKLRRCCKTPSPSLTCLRLDPEKSHIGVWQKRAGARADSSWVMTVELNKDAPPPPSSGEEPAPSYGGAATTSTSTPTSSTITAGSPPPEMMDDEESVALQMIEELLGSHGMMLQVQGAAGSLVI

SEQ ID NO: 4197 - protein, 192 aa, Juniperus phoenicea
DDHGEVISEIRRADLEPYLGLHYPATDVPQASRFLFMKNKVRMICDCYANPVEVVEDKRLLRELILCGSSLRRPHGCHAEYMSNMGSIASLVIAVTINAKEEDVDTDAQQQQQKGRRLWGLVVCHHTSPRFVPFPLRYACEFLMQVFAIQLNKEDDLADQLREKHILRTQTLLCDMLLRDAPMGIIREKPNI

SEQ ID NO: 4198 - protein, 251 aa, Shigella flexneri 2a str. 301
MNLNSIPAFDDNYIWVLNDEAGRCLIVDPGDAEPVLNAITANNWQPEAIFLTHHHHDHVGGVKELVEKFPQIVVYGPQETQDKGTTQVVKDGETAFVLGHEFSVITTPGHTLGHICYFSKPYLFCGDTLFSGGCGRLFEGTALQMYQSLKKLSALPDDTLVCCAHEYTLSNMKFALSIFPHDLSINDYYRKVKELRAKNQITLPVILKNERQINVFLRTEDIDLINGINEETLLQQPEERFAWLRSKKDRF

SEQ ID NO: 4199 - protein, 329 aa, Kluyveromyces lactis NRRL Y-1140
MTYLAETVTLNNGEKMPLVGLGCWKMPNDVCADQIYEAIKIGYRLFDGAQDYANEKEVGQGVNRAIKEGLVKREDLVVVSKLWNSFHHPDNVPRALERTLSDLQLDYVDIFYIHFPLAFKPVPFDEKYPPGFYTGKEDEAKGHIEEEQVPLLDTWRALEKLVDQGKIKSLGISNFSGALIQDLLRGARIKPVALQIEHHPYLTQERLIKYVKNAGIQVVAYSSFGPVSFLELENKKALNTPTLFEHDTIKSIASKHKVTPQQVLLRWATQNGIAIIPKSSKKERLLDNLRINDALTLTDDELKQISGLNQNIRFNDPWEWLDNEFPTFI

SEQ ID NO: 4200 - protein, 420 aa, Solanum demissum
MGNCVGSSARVEATLSSTTPSAYEASRFPDRKSNSSVPSSLSIPSYGRKSSSESLPTPRSESEILFSPNVKSFSFNELKNATRNFRPDSLLGEGGFGCVFKGWIDAQTLTASKPGSGIVIAVKKLKPEGFQGHKEWLTEVNYLGQLRHPNLVKLIGYCIDGDNHLLVYEFMPKGSLENHLFRRGPQPLNWATRIKVAIGAARGLAFLHDAKEQVIYRDFKASNILLDAEFNSKLSDFGLAKAGPTGDRTHVSTQVMGTQGYAAPEYVATGRLTAKSDVYSFGVVLLELLSGRRAVDNAKVGIEQNLVDWAKPYLGDKRKLFRIMDTKLEGQYPQKGAYTAANLAWQCLSNEPKLRPKMSEVLTALEELQSPKGVSKLSHTEHRAIPSPVAVSPMRHHRSPLHMTPSASPLQAYQKSPRGR

SEQ ID NO: 4201 - protein, 636 aa, Zea mays
MMESCDCIDTQYPPDELLVKYQYISDVLIALAYFSIPVELIYFVQKSAFFPYRWVLMQFGAFIVLCGATHFINLWTFSPHSKSVAVVMTIAKVSCAIVSCATALMLVHIIPDLLSVKRRESILKNKAEELDREMGLILTQEETGRHVRMLTHEIRSTLDRHTILKTTLVELGRTLGLEECALWMPSRSGLNLQLSHTLTYHVQVGSTVQTNNPIVNEVFNSPQAMRIPPTCPLARIRPLVGRYVPPEVVAVRVPLLNLSNFQINDWPDISAKSYAIMVLILPTDSVRKWRDHELELVDVVADQVAVALSHAAILEESMRARDQLMEQNVALDLARREAEMAIHARNDFLAVMNHEMRTPMHAIIALSSLLLETELTPEQRVMIETVLKSSNVLATLINDVLDLSRLEDGSLELEMGKFNLHGVLGEIVELIKPIASVKKLPITLILSPDLPTHAIGDEKRLTQTLLNVVGNAVKFTKEGYVSVRVSVAKPESSQDWRPPEFYPASSDGHFYIRVQVKDSGCGILPQDIPHLFTKFAQSRSGPARPSSGAGLGLAICKRFVNLMGGHIWIESEGLDKGSTATFIVKLGICGNPDPSDHQAANRSQAYSGSGGLARFKPFITDENDTGFSTRRNQRSF

SEQ ID NO: 4202 - protein, 199 aa, Sulfolobus tokodaii str. 7
MMIVKRFILGEYSTNTYLVVSGDEGILIDVAENPSEVIDYILTNNIKLKSIYATHGHFDHVLGVTEVKKYFNVPFFLHRSDLDLLRRDERTKGIVPDGFIDEKSIIKIGNEELKVIETPGHTMGSVCYIFDDGIFTGDTLFNGSIGRYDLGGDKNLLKKSLNRLMELNDGLTVYPGHGFFTTLGYEKLTNPFLNGEFEW

SEQ ID NO: 4203 - protein, 192 aa, Triticum aestivum
  misc_feature (106)..(106): Xaa can be any naturally occurring amino acid
MSKYGTIPTSSSAAAGAPHLGGASPLDFISRAKARGATALATRRPWRELADVHAVGLPPSLGDAYLRVRANLAHFAMNYAIVVLVVVFLSLLWQPISLIVFLVCMXVGWLRGGEGLRHKPIVLFGRVVGDGVVLAVLAAVTLILLLLTGATSNILTSLLIGFVLVVVHAALHKAEDNVDEEVGRWYAPVPAQ

SEQ ID NO: 4204 - protein, 705 aa, Pseudomonas fluorescens Pf-5
MRYQLPPRRISMKHLFPSTALALFIGFGLLPMSTNTFAANSWDQLQPDRDEVIASLNVVELLKRHHYSKPPLDDARSVIIYDSYLKLLDPSRSYFMASDIAEFDKWKTQFDDFLKSGDLNAGFTIYKRYLDRVKARLDFALAELNKGVDKIDFNTKETLLIDRKDAPWLKTTAELDDLWRKRVKDEVLRMKIAGKEPKQIQETLTKRYKNQLARLDQTRAEDIFQAYINTFAMSYDPHTNYLSPDNAENFDINMSLSLEGIGAVLQSDNDQVKVVRLVPAGPADKTKQVAPADKIIGVAQGDKEMVDVVGWRLDEVVKLIRGPKGTLVRLEVIPASNAPNDQTSKIVPITREAVKLEDQAVKKSILNLKQDGKDYKLGVIEIPAFYLDFKAFRAGDPDYKSTTRDVKKLLTELQKDKVDGVVIDLRNNGGGSLQEATELTSLFIDKGPTVLVRNADGRVDVLEDENPGAFYKGPMALLVNRLSASASEIFAGAMQDYHRALIIGGQTFGKGTVQTIQPLNHGELKLTLAKFYRVSGQSTQHQGVLPDIGYPSIIDTKEIGESALPEAMPWDTIRPAIKPAVDPFKPFLAQLKAEHESRSAKDPEFVFIRDKLALAQKLMAEKTVSLNEADRRAQHADIEAKQLALENARRKAKGEEPLKELKKEDEDALAAAEPDKTKPEDDAYLSETGRILLDYLKLNTSVAKH

SEQ ID NO: 4205 - protein, 392 aa, Stigmaphyllon puberum
DLEPVNPVDVPVTAAGALKSYKLAAKAISRLQSLPSGNISLLCDVLVKEVRDLTGYDRVVVYKFHEDEHGEVVSECRISDLESYLGLHYPATDIPQASRFLFMKNKVRMICDCLAPPVKVIQDERLPQPLSFCGSTLRSPHGCHAQYMTNMGTIASLVMSVTINEDDDTMDGDQQQMTRKLWGLVVCHHNSPQFVPFPLRYACEFLIQVFGVQINKEVELAAQVREKHILQIQTMLCDMLLRDAPVAIITQSPNVMDLVKCDGAALYFKNKIWLLGVTPSKEQIRDIAQWLLEYHSGNTGLSTDSLMEAGYPGASALGDAVCGMAAVSITSRDFLFWFRSHTAKAVKWGGAKHDPDDKDDLRKMHPRSSFKAFLEVVKWRSMPWEDVEMDAI

SEQ ID NO: 4206 - protein, 392 aa, Mascagnia dipholiphylla
DLEPVNPADVPVTAAGALKSYKLAAKAISRLQSLPSGNISLLCDVLVKEVRDLTGYDRVMVYKFHEDEHGEVVSECRRSDWESYLGLHYPATDIPQASRFLFMKNKVRMICDCLAPPVKVIQDERLPQPLSLCGSTLRSPHGCHAQYMTNMGTIASLVMSVTINEDDDMMDGDQQQMTRKLWGLVVCHHAGPRFVPFPLRYACEFLIQVFGVQIHKEVELAAQVREKHILQIQTMLCDMLLRDAPVVIITQSPNVMGLVKCDGAALYFKNKIWLLGVTPAEEQIRDIAEWLLKYHSGNTGLSTDSLMEAGYPGASVLGDAVCGMAAVSITSRDFLFRFRSHTAKEIKWGGAKHDPDDKDDGRKMHPRSSFKAFLEVVKWRSTPWEDIEMDAI

SEQ ID NO: 4207 - protein, 487 aa, Yersinia pestis KIM
MSTHLVWFRNDLRVTDNLALHAACQDPQASVIAVFIATPVQWAAHGMAPRQAAFLRQNLQHLQAALAARGIPLHYHQCDDFQASNTWLVDFCQQQQVDSLFYSQQYELNERLRDDALAVQLSERAITCQSFHDSVLLAPGTVLTGNNEMYKVFTPFRRAFIQRLLMSDNHCVPAPKARHAPPVLLSPLPFDYPQQSVDSQLFPAGEDAALQRLRRFCREQVQDYRQYRDLPAVPGTSCLSPYLVLGVLSPRQCFNRLWAESPEMLENADSGAFTWLNELIWREFYRHLLVAYPRLCQHHPFIGWTDGLVWNRSESQLKAWQQGQTGYPIVDAAMRQMNETGWMHNRLRMISASFLVKDLLIDWRQGERYFMSQLVDGDLAANNGGWQWAASTGTDAAPYFRIFNPTTQGERFDKDGVFIRRWLPELAAVPDSDIHQPWRWAERQQQHLDYPVPLVDHKQARLATLAAFEAAKRDSTRIPNRKEPSCY

SEQ ID NO: 4208 - protein, 276 aa, Arabidopsis thaliana
MTLGCKQAIELAVDILAKPKANVLLPSPGFPWDLVRSIYKNLEVRHYNFLPEKNFEIDFDSVRALVDENTFAIFIINPHNPNGNTYSEAHLKQLAELAKELKIMVVSDEVFRWTLFGSNPFVPMGKFSSIVPVVTLGSISKGWKVPGWRTGWLTLHDLDGVFRNTKVLQAAQDFLQINNNPPTVIQAAIPDILEKTPQEFFDKRQSFLKDKVEFGYSKLKYIPSLTCYMKPEACTFLWTELDLSSFVDIEDDQDFCNKLAKEENLVVLPGHVVCWI

SEQ ID NO: 4209 - protein, 541 aa, Corynebacterium pseudotuberculosis
MAKLIAFNQEAREGILKGVDTLANAVKVTLGPRGRNVVLEKAFGSPTVTNDGVTIAREIDVEDRFENLGVQLVKSVAVKTNDIAGDGTTTATLLAQAVITEGLRNVAAGANPVELNRGILAAADKAVEKLGERAAEVASAADIANVATVSSRDAEIGDMVAAAMEKVGKDGVVTVEESQSIESYLDVTEGVSFDKGYLSPYFITDTDSQRAELDDPYILLVRNKISSLPDFLPLLEKTVEANKPVLIIAEDVEGEPLQTLVVNSIRKTLRAVAVKSPYFGERRKAFMDDLAVVTNATVVDPEVGINLNEAGVEVFGTARRVTVTKDETIIVDGAGTSEAVENRRQQIRREIENTDSSWDREKAEERLAKLSGGVAVIKVGAATETEVSERKLRVEDAINAARAAAQEGVIAGGGSALVQIAKELRVYAEEFEGDAKVGVNALANALSKPAYWIADNAGLDGAVVVSKIADLPNGEGFNAATLEYGNLIEQGIIDPVKVTHSAVVNATSVARMVLTTEASVVEKPVEAKPQAGGHHHHHHHH

SEQ ID NO: 4210 - protein, 1820 aa, Anabaena variabilis ATCC 29413
MNRQHKHHRCNPVNFLSKQNLLPFLLGIVILLVVVMLWLRLQAEEEIKIQQLIKQQAIATQTELVTQLKTRILALKRIGKHWEMHGSIPQAQWELEARAYLEDYGGYQAIKLVDPSWQVLRSVSVAKNKAAENLEIMPKFPQCKGATAQPSHETTLTHTVNLNQGDRVFFACVPLWMGDKFGGAVLGIFQVKQFFESVLHIAPGYKIRVFDGQELIYGQDRQSSTLPSWQQSVNINFDGMTWQLQIYPTPELLKDLYSPLPTVVLVAGIFNAGAVTLLIYFAQATKLSNHQIGRINQELADRIEKQTQVEIALRASENRLRELLETVRVIPWEVDLKTQHFTYVGPQAETLLAYPIAQWYEENFWDNHLHPHDRDWAVRFCQEAANKGQNHELEYRMLAADGRVVWLRDVVNVVEVDGTPVMLRGFMFDITDLKRVEETLRLRERALAASSNGIVISDAKLPNYPVIYVNSAFEQITGYKATEIVGRNCRFLQGNDTTQPAIEELRSALKAGKNCKVILRNYRKDGSLFWNQLSVSPIYNDNGQLSHFIGIQTDISDRQQAEASLRRQALTFENIYDGVIITNLQGQILDWNPAAERMFGYSKDHICGQSISILHKVEEDAALNSAIIAEITKQGRWSGEINFVRQDGSQGICETTIVALQDDQGQTVATISVNRDITERKHAELLLRRSEERFQAFMNHSPTPAWITDIDGTIVYLSETYRRTFQLPTQELIGTNIFDIYPPELIQTFRETIQIVARTHQVMETVESVPCSDGTVRDFLVYKFPISSKPDECLIGGIAIDITERKQAEAALRKSEERWQLVIEGNQDAIWDWNIITNETFRSARWAELIKEQNYQPIADHADCISRIHPDDYERVMAVRQDCLSRKIPNYVVEYRLRCNDDSYKWVLVHATGQWDERGNPVRMVGSIKDITERIEAQEALQRQLHRTLLLEKITQKIRQSLDSKEIFETAATQIGQALAVDRCLIHSYISHHDPHIPLVAEYNNVLDYCSMQKWEFTTTGNRHILQMMSQDKAIASANVYTDPLLQTAVPSCCEIGVKSMLAVRTSYQGEPNGAICLHQCKYFRQWTPEEIELLEAVAAQLGIALAQAQLLEQETRQREELTIKNFALEQAKRAAEAANRAKSEFLAMMSHEIRTPMNAVIGMTGLLLDTELTSQQRDFVETVLTSGDALLSIINDILDFSKIESGKLELEEQPFEVRTCVEQVIDLLAAKAAQKDIELAYLIHPQVPMQIAGDLTRLRQILTNLLNNAIKFTPEGEVVVSVRSQPSPNQKTKNCCEIIFTIKDTGIGIAPETMDLLFQPFVQADASMTRKYGGTGLGLVISKRLGEMMGGYLWVESRGCVGGNPPPGWQRKNSISSASVATGSTFYFSMTVPVVAHADLETSITSPVQLSGKRLLIVDDNPTNRQILRLQAEPWQMETYTAPSGAEALALIDQGMAFDIAILDVQMPEMDGLTLARQIRQRPSYQHLPLVILTSWGQPDTDLSDIEFAACLNKPIKQSQLFDVLAASLGNQPIRASVVPDRSAQVNSCLAQQIPLRILLAEDIVVNQKVALLILKKLGYRADVVANGLEVLEALQRQSYDVVLMDVNMPEMDGLKASQIICQTWSPRSRPYIIAMTANAMRGDREACLAAGMDHYISKPLQLEELAKALGKCHPSTSSTEKALEKTSSQNQTFTDISDLKFATIDTKILQALRDMLGGDKVAFAELINCYLTESPKLIENLNVAINTEDTQGIWKTAHKFKSSSGSVGAVFLAQLCKLLEAKGRNNNLEGCIELGSQLCQEYELVKTALYREVNKETP

SEQ ID NO: 4211 - protein, 451 aa, Oryza sativa (japonica cultivar-group)
MMAAAAEEGEGKKGGGTVLQGRYEMGRVLGHGNFGRVHVARDLRTGRSVAVKVVAKEKVVRAGMMEQIKREIAVMKRVSHPNIVELHEVMATRSKIYLALELVRGGELFGRIVRLGRVREDAARHYFRQLVSAVDFCHSRGVYHRDLKPENLLLDEAGNLKVVDFGLSALADHARADGLLHTLCGTPGYAAPEVLRDKGYDGAKADLWSCGVILYVLLAGSLPFPDDNIVTLYRKAQRGDYRCPAWLSTDARRLIPRLLDPNPTTRISVAQLVETPWFKKTSISRPVSIELPPAFADPAPAKEEAEKDEPETLNAFHLISLSEGFDLSPLFEGDSAKGRRDGGMLFATREPASGVISRLEGVAARGGGRMRVTKSGARGVRLEGAERGGAKGRLAVAADIFSVAPSVLVVDVKKDGGDTLEYRSFCSEELRPALQDIVWGAAADPTPTAAV

SEQ ID NO: 4212 - protein, 547 aa, Caulobacter crescentus CB15
MAAKDVYFSSDARDKMLRGVNILANAVKVTLGPKGRNVVIEKSFGAPRTTKDGVSVAKEIELADKFENLGAQMIREVASKTNDKAGDGTTTATVLAQAIVQEGLKSVAAGMNPMDLKRGIDKAVAIAIEDIKTSSKKVTTNAEIAQVGTISANGDKEVGEMIAKAMDKVGNEGVITVEEAKTAETELDVVEGMQFDRGYLSPYFITNADKMEVQLEEPLILLFEKKLSSLQPLLPVLEAVVQSGRPLLIIAEDVEGEALATLVVNKLRGGLRVAAVKAPGFGDRRKAMLEDIAILTGAQVVSEDIGIKLENVSLEMLGRAKKVSITKDDTTIVDGVGEKADIEARIAQIKRQIEDTTSDYDKEKLQERLAKLAGGVAVIRVGGSTEVEVKEKKDRVDDALNATRAAADEGIVPGGGTALLKASKALAGVVGDNDDQTAGIAIVRRALQAPIRQIAENAGVEGSIVVGKILENDNSAFGFNAQTEQYVDLVVDGVIDPAKVVRTALQNAASVAGLLITTEAAIVEAPKKGGGAPAGGGMPGGMGDMDF

SEQ ID NO: 4213 - protein, 184 aa, Hordeum vulgare
MAPRRRTLLKVIVLGDSGVGKTSLMNQYVNKKFSQQYKATIGADFLTKEVLIEDRLVTLQIWDTAGQERFQSLGVAFYRGADCCVLVYDVNAKRTFNTLGTWHDEFINQAGPSDPKQFPFILVGNKVDLDSGSRRVVPEKKAKDWCVAKGDIPYFETSAKDDCNVDTAFLCIAKLALEHEHDQD

SEQ ID NO: 4214 - protein, 192 aa, Lilium longiflorum
ELSVLCDAEVALIVFSTRGRLYEYANNSVKATIERYKKASTDISNTRSVSEANAQYYQQESTKLRQQINSLQNSNRNLLGESLSNMNLRDLKQLENRLEKAINKIRTKKNELLYAEIEYMQKREMELQSDNMYLRNKVAENEREQQQQMNMMPSTSEYEVMPHFDSRNFLQVNIVDPNQHYSCQQQTALQLG

SEQ ID NO: 4215 - protein, 448 aa, Yarrowia lipolytica CLIB122
MPGTQIFGTLPAEGMTNTEVITEMSKYHDMKRTFWEKGRVSGAVYHGGKELTDLQSEAFSQFTVANQLHPDVFPGVRKMESEVVAMVLALFHGPEGSCGTSTSGGTESLLLTSLAAKMKAYNERGVTHPEIIAPITVHAGFDKAAYYFGMKLRHAPVDPKTMKVDLKAVRRMVTRNTVLLVGSAPNFPHGIIDDIEGLSDIALKHKIPLHVDACLGSFIVPYLERAGFDKILFDFRVPGVTSISCDTHKYGFAPKGSSIIMYRTPELRHYQYFVAPDWTGGIYGSPTLAGSRPGAIMVGCWATMLSVGDNGYLESCKEIVGAARKFRKAVDEEIPDLQIIGDPRASVIAFGSDSVNIYDLSDAMSKKGWHLSTLQNPPAAHVAFTKPAVAAVDDLVSDLKSCIIEMKKAGNTKVEDGTAAFYGVAGSIKTAGVADRLVCGFLDGLYKL

SEQ ID NO: 4216 - protein, 218 aa, Brucella suis 1330
MGQLQAIIVPVTPFQQNCTILFDGETKKGVVIDPGGDLARIREAIESQGIDVEAIWITHGHIDHAAAALNLKEALGVDIIGPHRDDKFLLDNLVAAGLKYGITEGVRNVTPDQWLEEGDKVCVAGHVFDVFHCPGHVPGHVVFFNPEARFAIVGDVLFNGSVGRTDLPGGDHATLIRSIKEKLLPLGDDIGFICGHGPGGRFGEERRSNPFLTDTGYA

SEQ ID NO: 4217 - protein, 109 aa, Debaryomyces hansenii CBS767
MSTTNDFPIVLVKNLPYDVSTKSLYELAGNFGNIHQIRIPVDEQNKGTCFIVYNNLSNAIRASKSLNGINFQGRYLVSMHYSVDKSKLSEEDFKYRKEQLEKLKLEHSI

SEQ ID NO: 4218 - protein, 333 aa, Oryza sativa (japonica cultivar-group)
MVINLEFIRAIVTADEILLLDPLTIDVIPFVEQLTHHLPLKNLVCGNGQPGGDDHGEKHDDSHGDQVPRLNEATGAEHELPFEFQVLELALETVCSSFDVNVSGLERRATPVLEELTKNVSTRNLDRVRTLKSDLTRLLAHVQKVRDEIEHLLDDNEDMAHLYLTRKQLQNQQVEALISSAASNSIVPGGTSLSRLNNSFRRSVSIATSMHLDNDVEDLEMLLEAYFMQLDGIRNRILSVREYIDDTEDYVNIQLDNQRNELIQLQLTLTIASFGIAVNTFIAGAFAMNIQSKLYSIDDGSFFWPFVGGTSSGCFMICIVLLWYARWKKLLGP

SEQ ID NO: 4219 - protein, 392 aa, Aspidopterys elliptica
DLEPVNPADVPVTAAGALKSYKLAAKAISRLQSLPSGNISLLCDVLVKEVRDLTGYDRVMVYKFHEDEHGEVVSECLRSDLESYLGLHYPATDIPQASRFLFMKNKVRMICDCVAPPVKVIQDERLPQPLSLCGSTLRSPHGCHAQYMTNMGIIASLVMSVTVNEDDDMVDGDQPQMARKLWGLVVCHHTSTRFVPFPLRYACEFLIQVFGVQINKEVELAAQVREKHILQIQTMLCDMLLRDAPVAIITQSPNVMDLVKCDGAALYFKNKTWLLGVTPTEEQIRDIAEWLLEYHSGNTGLSTDSLMEAGYPGASALGDAVCGMAAVSITSRDFLLWFRSHTAKEIKWGGAKHDPDDKDDGRKMHPRSSFKAFLEVVKWRSMPWEDIEMDAI

SEQ ID NO: 4220 - protein, 371 aa, Burkholderia fungorum LB400
MSTLFSPLQLRGLQVPNPIVVSPMCQYVAVDGRAGSWHVMHYGGLALSGAGTLFIESTAVEPEGRITPGDLGLWDDATHSALAHVVDGIRAHTPTRVILQLSHAGRKASSEVPWRNGQLLTPEAGGWRPYGPSATPHHPEEAAPVALDTAGLDRVRNAYVAAARRAVRLGVDGIELHGGHGYLLHQFLSPIANERTDAYGGSLENRMRFPLEVIEAVREVLPSGMPLGIKLSASDWMDAGWDLSQSVEFSRQAKRRGIDWVTASSGGISPLQKIQVAPNYQVPFSKRIREEAGVDTIAVGLVTAPTQAEDIVASGSADLVAIARGMLFNPRWGWHAAADLGGTIDGVPPSYWRAAPQGNSGIFAQATFGSR

SEQ ID NO: 4221 - protein, 392 aa, Caucanthus auriculatus
DLEPVNPADVPVTAAGALKSYKLAAKAISRLQSLPSGNISLLCDVLVKEVRDLTGYDRVMVYKFHEDEHGEVVSECHRSDLESYLGLHYPATDIPQASRFLFMKNKVRMICDCVAPPVKVIQEERLPQPLSLCGSTLRSPHGCHAQYMTNMRIIASLVMSVTVNEEDDMVDGDQPQMARKLWGLVVCHHTSTRFVPFPLRYACEFLIQVFGVQINKEVELAAQVREKHILQIQTMLCDMLLRDAPVAIITQSPNVMDLVKCDGAALYFKNKTWLLGVTPTEEQIRDIAEWLLEYHSGNTGLSTDSLMEAGYPGASALGDAVCGMAAVSITSRDFLLWFRSHTAKEIKWGGAKHDPDDKDDGRKMHPRSSFKAFLEVVKWRSMPWEDIEMDAI

SEQ ID NO: 4222 - protein, 496 aa, Staphylococcus aureus subsp. aureus Mu50
MDDKQHTSSSDDERAEIATSNQDQETNSSKRVHLKRWQFISILIGTTLITAVITVVAYIFINQKISGLNKTDQANLNKIENVYKILNSDYYKKQDSDKLSKAAIDGMVKELKDPYSEYLTKEQTKSFNEGVSGDFVGIGAEMQKKNDQIMVTSPMKGSPAERAGIRPKDVITKVNGKSIKGKALDEVVKDVRGKENTEVTLTVQRGSEEKDVKIKREKIHVKSVDYKKKGKVGVITINKFQNDTSGELKDAVLKAHKDGLKKIVLDLRNNPGGLLDEAVKMANIFIDKGKTVVKLEKGKDTEAIQTSNDSLKEAKDMDISILVNEGSASASEVFTGALKDYNKAKVYGSKTFGKGVVQTTREFKDGSLLKYTEMKWLTPDGHYIHGKGIKPDVTIDTPKYQSLNVIPNTKTFKVGDDDKNIKTIKIGLSALGYKVDNESTQFDQALENQVKAFQQANKLEVTGEFNKETNNKFTELLVEKANKHDDVLDKLINILK

SEQ ID NO: 4223 - protein, 392 aa, Malpighia emarginata
DLEPVNPADVPVTAAGALKSYKLAAKAISRLQSLPSGNISLLCDVLVKEVRDLTGYDRVMVYKFHEDEHGEVVSECRRSDLESYLGLHYPATDIPQASRFLFMKNKVRMICDCVAPPVKVIQDDRLPQPLSLCGSTLRSPHGCHAQYMTNMGIIASLVMSVTVNEDDDMVDGDQPQMARKLWGLVVCHHTSTRFVPFPLRYACEFLIQVFGVQINKEVELAAQVREKHILQIQTMLCDMLLRDAPVAIITQSPNVMDLVKCDGAALYFKNKTWLLGVTPTEEQIRDIAEWLLEYHSGNTGLSTDSLMEAGYPGASALGDVVCGMAAVSITSRDFLFWFRSHTAKEIKWGGAKHDPDDKDDGRKMHPRSSFKAFLEVVKWRSMPWEDVEMDAI

SEQ ID NO: 4224 - protein, 110 aa, Sandersonia aurantiaca
MATLGAPRDVPAGGENSADVEELARFAVAEHNKKENALLEFGRVVKAKEQVVAGTLHHLTVEAIDAGNKKLYEAKVWVKPWLNFKELQEFRHAGDSPSVTPADLGAKRGD

SEQ ID NO: 4225 - protein, 392 aa, Madagasikaria andersonii
DLEPVNPADVPVTAAGALKSYKLAAKAISRLQSLPSGNISLLCDVLVKEVRDLTGYDRVMVYKFHEDEHGEVVSECRRSDLESYLGLHYPATDIPQASRFLFMKNKVRMICDCVAPPVKVIQDERLPQPLSLCASTLRSPHGCHAQYMTNMGIVASLVMSVTVNEEDDMVDGDQPQMARKLWGLVVCHHTSTRFVPFPLRYACEFLIQVFGVQINKEVELAAQVREKHILQIQTMLCDMLLRDAPVAIITQSPNVMDLVKCDGAALYFKNKTWLLGVTPTEEQIRGIAEWLLEYHSGNTGLSTDSLMEAGYPGASALGDAVCGMAAVSINSRDFLLWFRSHTAKEIKWGGAKHDPGDKDDGRKMHPRSSFKAFLEVVKWRSMPWEDMEMDAI

SEQ ID NO: 4226 - protein, 189 aa, Psychrobacter arcticus 273-4
MNNNDTFNNDHSIQEQPESSVKADGVQPISAQTTGYTFNHTMLRVKDPVRSLEFYTGVLGMTLLAVKKFPAMGFDLYFLAKLTESERENLPSGNDLEIFAFRQRGILELTHNYGTETKADFSYHDGNQEPQGFGHICFNVPDLNAAVAWFDENHVEFKKRPDEGSMKNIVFIKDVDGYWIEIVQADLMA

SEQ ID NO: 4227 - protein, 80 aa, Glycine max
VKQLNDLLTEKNKDTGWDVPIHVDAAIGGFIAPFLYPELEWDFRLPLVKSINVSGHKYGLVYPGVGWVIWRSKDDLPEEL

SEQ ID NO: 4228 - protein, 475 aa, Lactobacillus gasseri
MKEFKFPKGFYFGGATAAYQCEGATKEDGKGEVIWDKYLREQGTINPDPACDFYHRYPEDLELCKEFHINAIRVSIDWARIFPEGEGRIEPRGVEYYHKLFKKCHEEGVEPFVTLHHFDTPQALQDKGGWLSQEMLDAFVEYAKFCFKEYAGEVRYWITINEPTSMAGQQYVGGTFPPAYKDQFDKCFKAEYNQNLVHARIVNAYKEAGYTGQIGIVHALQTVYPATDSEGDKHAAELKDVLENKFYLDGTLAGKYSKHTLALVKEIIDANGQQMIDIKPEDEKVLLKAAKQLDFVGVNYYFSKFMKEYHGDTEIIHNGTGEKGTDVNRMKGVGEEIHPKDLPATDWDWIIYPQGMYDQLKRVYDDYPLVHSIYITENGMGYKDKFEGEDKIIDDTPRIDYLKQHMEEVAKAIEAGIPVNGYFVWSLQDMFSWTNGYSKRYGLFYVDFKTQKRYAKKSAYWYKKLAETREIPPVD

SEQ ID NO: 4229 - protein, 137 aa, Glycine max
  misc_feature (28)..(28): Xaa can be any naturally occurring amino acid
  misc_feature (101)..(101): Xaa can be any naturally occurring amino acid
  misc_feature (110)..(110): Xaa can be any naturally occurring amino acid
  misc_feature (121)..(121): Xaa can be any naturally occurring amino acid
GSRIKPSISMFLTSCNIKSTGHKMGISXKGSDQILERYLYLHNVPNNEDFDPDTRLKNHALHKYDSVPAIQLTFASGTHTRVLYLDKTTVTTSMNIDPDCXKRSRSDTGXILKCTPRRASXDEQHSYLPQPILYSQK

SEQ ID NO: 4230 - protein, 591 aa, Oryza sativa
MCGILAVLGVADVSLAKRSRIIELSRRLRHRGPDWSGIHCYQDCYLAHQRLAIVDPTSGDQPLYNEDKSVVVTVNGEIYNHEELKANLKSHKFQTASDCEVIAHLYEEYGEEFVDMLDGMFAFVLLDTRDKSFIAARDAIGICPLYMGWGLDGSVWFSSEMKALSDDCERFISFPPGHLYSSKTGGLRRWYNPPWFSESIPSTPYNPLLLRQSFEKAIIKRLMTDVPFGVLLSGGLDSSLVASVVSRHLAEAKVAAQWGNKLHTFCIGLKGSPDLRAAKEVADYLGTVHHELHFTVQEGIDALEEVIYHVETYDVTTIRASTPMFLMSRKIKSLGVKMVLSGEGSDEIFGGYLYFHKAPNKKEFHEETCRKIKALHLYDCLRANKSTSAWGVEARVPFLDKNFINVAMDIDPEWKMIKRDLGRIEKWVLRNAFDDEEKPYLPKHILYRQKEQFSDGVGYSWIDGLKDHANEHVSDSMMMNASFVYPENTPVTKEAYYYRTIFEKFFPKNAARLTVPGGPSVACSTAKAVEWDAAWSKNLDPSGRAALGVHDAAYEDTLQKSPASANPVLDNGFGPALGESMVKTVASATAV

SEQ ID NO: 4231 - protein, 345 aa, Bacillus anthracis str. A2012
  misc_feature (274)..(274): Xaa can be any naturally occurring amino acid
  misc_feature (277)..(277): Xaa can be any naturally occurring amino acid
MNSELFSPYTIKDVTLKNRIVMSPMCMYSSENEDGQVTNFHLIHYGTRAAGQVGLVMIEATAVLPEGRISNKDLGIWDDSLIEGLHKTTTFIHDNGAKAAIQLAHAGRKAELETDALAPSAVPFNETMKIPVEMSIHQIKNTILAFQQAAIRSKQAGFDVIEIHGAHGYLINEFLSPLSNKRTDEYGGSPENRYRFLREIIDSINEVWNGPLFVRISANDYHPDGLTVQDYVQYTKWMKEQGVDLIDCSSGAVVPARIDVYPGYQVQYAKHIKXHAXIATGAVGLITTGAQAEQILNNNEADLIFIGRELLRNPYFPRIAANELGFELEEPHQYERAPGKISTNK

SEQ ID NO: 4232 - protein, 394 aa, Triticum aestivum
MGLAENHLSLDLVREWMEEHAGPAMTPARGDEERDLTISGLATYQPYDGILALKMALAGFMRQIMHESVSFDPSQMVITSGATPAMEILSSCIADPGNAFLVPSPYYPGWDRDIKWRTGIELIPVPCRSTDNFNISITALEIAYNQAKKRGVRVRGVLISNPSNPTGSFVPKQTLRDLLDFATEKNIHLISDEVFAGSTFGSGEFVSVAEVVNELEDFDRGRVHIIYGLSKDLSLAGFRVGVIYSYNESIVEAAAKIARFSSVSTPTQRLLVAMLSDQKFISNYLKVNRERLRKAYNLLVDALKQVGIECFKSSGGFYCWADMSKFIRSYSEKGERRLWDRLLEEAKVNVTPGSSCHCIEPGWLRCCFTTLREQDIPVVVERPRRVTDGHKSNC

SEQ ID NO: 4233 - protein, 606 aa, Delphinium 'MagicFountains dark blue'
MDSCACIETQWPADELLVKYQYISDFFIALAYFSIPLELIYFVQKSAFFPYRWVLMQFGAFIVLCGATHLINLWTFSMHSKTVAMVMTIAKISTAVVSCATALMLVHIIPDLLSVKTRELFLKNKAEELDREMGLIRTQEETGRHVRMLTHEIRSTLDRHTILKTTLVELGRTLGLEECALWMPSRTGMNLQLSHTLRHQIPVGSTVSTNLPIVTQVFNSNQAIKIPHTCPLARIGPTAGRYVPPEVVAVRVPLLHLSNFQINDWPELSAKSYAVMVLMLPTDSARKWHDHELDLIEVVADQVAVALSHAAILEESMRARDMLMEQNIALDMARREAEMAIRARNDFLAVMNHEMRTPMKAVIALSSLLLEIELTPEQRVMIETVLKNSNLLAALINDVLELSRLEDGSLELDIRTFNLHGIFREVLNMIKPITAVKKLSLTLMLSPDLPVVAVGDEKRLMQIMLNVVGNAVKFTKEGYVSVIASVAKAESLREWQAPEIFMVSSDSHFHLCVQVKDSGCGISPQEIPHLFTKFTQLRSGQNRSNDGAGLGLALCKRFLNLMEGHIWVDSDGTDKGCTVTIIVKLGICEGQPEPSNLQVVSRPRLS

SEQ ID NO: 4234 - protein, 641 aa, Rhodospirillum rubrum
MCGLVGIYHPTASRPVDRALVEAMNQRQFHRGPDDGGVFIGPGIGLGHRRLSIVDLGGGRQPMTNDGGGVVLVYNGELYNNAELVAELKAAGHVFRTASDTETVIHAWEEWGEDSVRHLRGMFAYALWDDRSQTLFLARDRLGIKPLHYTCLADGRVMFGSELKSLTGVEDIPKVVDPLAIEDFLAYGYVPDPRSIFKDILKLEAGHTLTFRRGEAPGRPHCYWDVSFTTPSRPAKTDDLCAEVIDRLDEAVRCHLVADVPVGAFLSGGVDSSAMVALMAGATDRPVETCSIAFSEARFDESAYAKTVAERYGTHHRVHTLPAQALSEVGPLTAIYDEPFADSSALPTLKVCQAARETVTVALSGDGGDELFAGYRRYRFHTAEEAVRRILPQAARGPLFGALGRVYPKLDWAPQVLRAKSTFQALGRDRVEGYFNAVSVIPDGLRRGLYSKTMRAELAGYGASEVLRRHMTRAPADHPLSIAQYVDLKTWLPGDILTKVDRASMATSLEVRVPMLDHRFVEWTAGLSPDLKLSGGTGKYLLKRALRPLLPDEVLYRRKMGFSIPLTDWLRGPWSGRTRALAGRSALVTSGLFDGAAVAKLVEQHLGGNWDHGAALYALIVLDDFLTAHVGAACLPARMSA

SEQ ID NO: 4235 - protein, 192 aa, Oryza sativa (japonica cultivar-group)
MSKYGTIPTSSSSSSSGAAPPPLPLGGGGGASPLDFFSRAKARGATALATRRPWRELADPHALGLPPSLADAYLRVRANLAHYAMNYAIVVLAVVFLSLLWHPASLIVFLVCMVAWLVLYFLRDEPIVLFGRVVGDGAVLAALAAVTLVLLLLTGATANIVSSLLIGVLLVVLHAALHKAEENVDDEVGRWI

SEQ ID NO: 4236 - protein, 254 aa, Brassica rapa subsp. pekinensis
MGRGRVEMKRIENKINRQVTFSKRRAGLLKKAHEISILCDAEVSLIVFSHKGKLFEYSSESCMEKVLERYERYSYAEKQLKAPDSHVNAQTNWSMEYSRLKAKIELLERNQRHYLGEDLESISIKELQNLEQQLDTSLKHIRSRKNQLMHESLNHLQRKEKEILEENSMLTKQIKERESILRTHQNQSEQQNRSHHVAPQPQPQLNPYMISHQASPFLSMGGMYQGEDPTAVRRNRLDLTLEPIYNCNLGYFAA

SEQ ID NO: 4237 - protein, 506 aa, Symbiobacterium thermophilum IAM 14863
MSGIAGILGKPDKARIVRMLEQQAHRGPDGRGIWTATAGFGLGHVRLATVDVAGGGQPLSNEDGSLWLAMTGAIYNHGALRRELEGRHAFRTQSDAEVVVHLFEEYGPACVERLDGMFAIAIWGEEVGLFLARDPLGIQPLYWGEDEEGNVLFASEIKALVGETRFVREFPPGHRWRAGEPLEPYERLPAHTGELADPDQIVLALDRLLHAAVRKQLAADVPVGCLLSGGLDSSLVTAIARQHAEGELHTFAVGLEGSADLEQARMVAGELGTIHHERVLTEKEVTAVLPRVVDALESCDPALVRSAVATYYVAELAAGHVKVVLSGEGADELFAGYDYLAEFERDAGALGAELYEITAAMHNCNLQRVDRMTQVHGVEARMPFADQAVVDFAFRIHPRLKRRDGESKWILRRVAEQYLPPAIVWREKQKFAIGSGIAPLLEHYAAKAVPDAAFRRARSPKGVPFASKEEFLYWSLFRERYGREDVLALMGRSRSLNQGQRWVGAL

SEQ ID NO: 4238 - protein, 420 aa, Solanum demissum
MGNCVGSSARVEATLSSTTPSAYEASRFPDRKSNSSVPSSLSIPSYGRKSSSESLPTPRSESEILFSPNVKSFSFNELKNATRNFRPDSLLGEGGFGCVFKGWIDAQTLTASKPGSGIVIAVKKLKPEGFQGHKEWLTEVNYLGQLRHPNLVKLIGYCIDGDNHLLVYEFMPKGSLENHLFRRGPQPLNWATRIKVAIGAARGLAFLHDAKEQVIYRDFKASNILLDAEFNSKLSDFGLAKAGPTGDRTHVSTQVMGTQGYAAPEYVATGRLTAKSDVYSFGVVLLELLSGRRAVDNTKVGIEQNLVDWAKPYLGDKRKLFRIMDTKLEGQYPQKGAYTAANLAWQCLSNEPKLRPKMSEVLTALEELQSPKGVSKLSHTEHRAIPSPVAVSPMRHHRSPLHMTPSASPFQAYQKSPRGR

SEQ ID NO: 4239 - protein, 548 aa, Yersinia pestis KIM
MAAKDVKFGNDARIKMLRGVNILADAVKVTLGPKGRNVVLDKSFGSPTITKDGVSVAREIELEDKFENMGAQMVKEVASKANDAAGDGTTTATVLAQSIITEGLKAVAAGMNPMDLKRGIDKAVIAAVEELKKLSVPCSDSKAIAQVGTISANSDSTVGELIAQAMEKVGKEGVITVEEGSGLQDELDVVEGMQFDRGYLSPYFINKPETGSIELESPFILLADKKISNIREMLPVLEAVAKAGKPLLIIAEDVEGEALATLVVNTMRGIVKVAAVKAPGFGDRRKAMLQDIATLTAGTVISEEIGLELEKTTLEDLGQAKRVVINKDTTIIIDGVGDEAAIQGRVAQIRQQIEDATSDYDKEKLQERVAKLAGGVAVIKVGAATEVEMKEKKARVEDALHATRAAVEEGVVAGGGVALIRAAHAIAGLKGDNEDQNVGIKVALRAMESPLRQIVVNAGEEASVIANKVKAGEGSFGYNAYTEEYGDMIAMGILDPTKVTRSALQYAASIAGLMITTECMVTDLPRDDKGADMGAGGMGGMGGMGGMM

SEQ ID NO: 4240 - protein, 448 aa, Bacillus pseudofirmus
MSNEREMQNKKDQQLESFRVEDEGKKLTTNQGLKVSEDEFSLKAGERGPTLMEDFHFREKMTHFDHERIPERIVHARGFAAHGEFQVYDSMKEFTKAKFLQDPSVKTPVFVRFSTVAGSKGSAETVRDARGFATKFYTEEGNYDLVGNNIPVFFIQDAIKFPDLVHALKPEPHNEIPQAQSAHDTFWDFIANNQESAHMVMWAMSDRSIPRSFRMMEGFGVHTFRFVNEEGKAHFVKFHWKPVLGIHSLVWDEAQKIAGKDPDFHRRDLWESIENGDYPEYELGVQLISEEDEFNFDFDVLDPTKIWPEEEVPVKIIGKMTLNRNVDNVFAETEQVAFHPGHVVPGIDFTNDPLLQGRLFSYTDTQLIRLGGPNFHELPINRPVCPFHNNQRDGYGRQTINKGQVSYHKNSLAANTPQPASEEEGGYAHYQEKVEGRKVRKRSESFKD

SEQ ID NO: 4241 - protein, 215 aa, Yersinia pestis KIM
MRRVLITGFEPFGGERINPSWEVVKQMNDLMMGGVRIVARQLPCAFGEALTALNTAIDDVQPVLVLAIGQAGGRADITIERVAINVDDARIPDNLGNQPVDQPIIQEGPAAYFTRLPIKAMVQGIREAGIPASVSQTAGTYVCNHVMYGLLHRLNQFNNEVKGGFIHIPYLPEQAVDHPGAPSMSAQSVLVALELAISIALQIEHDLHITGGAVH

SEQ ID NO: 4242 - protein, 1076 aa, Ustilago maydis 521
MADAHQSPLLLLPLKTTEEVDLGSAVKSLITNSYGEDSKKYSEQTSQLNRARQDAVKGAASDATGRDLLFKWFHMLEMLELRFPELRVPFPWKDAFTQKTISQSSLAYEKASIIFNIAATLSSLASSQPRMPGNADGLKRAYAALRQAAGMLSYINENFLHAPSTDMSKDVVKCLVGITLAQASEVFLEKTIEEKKGAGLISKLASQTAAAYTGLVDDSRENVTKGIFERSWAYLIQVKARHFTSVMQYYKALADDAAGSHGACLVRLTVAETAAKEARNLLTTFSASATASVTADRPSLPSDAASALVAIVNAQVARCTERKESAVKDNDLIYHDILPSESSLPAVDKLVAANPIPIQEIFAAPEVQRVIGPDLFQNLVPLGVHEKASLYSEEKAKIARAESERHDLATGEMQASLDYLGLPSSLQKYRALAQGSGSNAMLDSLADPGPEVMRWSTEEAEGGGGRGADGLGVGATGVDSALQRIESIKSQAANDIDAALAALDDENRECEKQRVRFGHKWSQDPAGLHTKDMRVNLKENKEAMQQASQNDAQIGGLWKSIRQDVQLLVSGREALEAAFAAALTGQTGLYGEGSAPTSLIDTSAEEESASEGEIASVRAKLAQIDEALIKLNKIKKERGEVLADLKEKIQTDDISQVLVLNRRAQNVDSSIFAAELEKFKPHQNRIAVSLHHQQALLAEVETAFKELIELPASKAAGAKWDEKEQARNKLVARLKRARDSNAQVRAGVAKGLQFYADLQEIVKATRQNVNRYVGERKSERSKLVSELEWEEKGSDGLSSSMAGLSGLGGAGGHPAPPTPHRHTSYASAYGGAGAPGPLSPGPPPAALPGVRQTSNSGPPPPPPLPHQQASYQQQPPPAAAAPAHDPYSSMFSSGPFSAALQQPASPQHQRPPTHYGSQLGYACDAPQRAPALPPPPQQFQPSFAPSVASPTQSRYTSPPPVPQGQQTFSGSSGYGMPPAPLQHGGGYGGSQPYAAHDYSSPPPQSPYGVPIGQQQYGGGHAQNQPQYQAYGAPPQQHASQQVYGSRAQPPPPQQQQYQQPSYAQHGGYQGGYQPPY

SEQ ID NO: 4243 - protein, 139 aa, Oryza sativa
MLNISDGQKIGILLTGFGLFFTFLGVVLFFDRGLLAIGNLLFLTGVTLIIGGRKTFRFFFQWRKIKGTACFLGGIALVIIGWPFIGMIVEVFGFINLFGDFFPVALGFARRLPIIGHILELPAVQYVTDRLIDSKRLPV

SEQ ID NO: 4244 - protein, 673 aa, Yersinia pseudotuberculosis IP 32953
MLAYPHLFTPLDLGFTTLKNRILMGSMHTGLEELPDGPQRLAAFYAERAAGGVGLIVTGGIAPNMKGVVYQGASVLNDAAQIPHHQVVTEAVHQAGGKIALQILHAGRYSYQKHPVAPSALQAPINPFVPQALSHEEILQTIADFAHCAQLAKQAGYDGVEIMGSEGYLINQFLTARTNQRDDEWGGDFTHRMRFAVEIVRAVRQATGHDFILIYRLSMLDLVEEGSNWVEIEQLAQAVEQAGATVINTGIGWHEARIPTIATMVPRAGFSWVTRKLMGKVNIPLITTNRINDPAVAEQVLADGCADMVSMARPFLADAAFVQKAVQGRADEINTCIGCNQACLDQIFDGKLTSCLVNPRACRETEMPELPTDAPKRLAVVGAGPAGLAFAVTAARRGHQVTLFDAAAEIGGQFNIAKQIPGKEEFYETLRYFRRQLVLNGVTLQLNTLVQVKQLAEFDEVILACGIQPRLPCINGIDHPKVLTYLDVLRDKKPVGQRVAIIGAGGIGFDTAEYLSQSGDSPRFDSTAFSTEWGIDQDLAHRGGLSPAGAKVPPSPRQIFLLQRKASKVGEGLGKTTGWIHRTSLAMRGVKMLNSVSYEAIDDKGLHIIRAEQACCLPVDTIIICAGQEPRRELHQPLLDMGKTVYLIGGADKAVELDARRAIDQGTRLALAI

SEQ ID NO: 4245 - protein, 249 aa, Brassica napus
MDEGGSSHDAESSKKIGRGKIEIKRIENTTNRQVTFCKRRNGLLKKAYELSVLCDAEVALVIFSTRGLLYEYASNSVKGTIERYKKACSDAVNPPTVTEANTKHYQQEASKLRRQIRDIQNSNRHIVGESLGSLNFKELKNLEGRLEKGISRVRSKKSELLVAEIEYMQKREMELQHVNMYLRAKIEQGARLNPEQHGSGVIQGTAVYESGLSSSHDQSQHYNRNYIPVNLLEPNQQFSGQDQPPLQLV

SEQ ID NO: 4246 - protein, 552 aa, Mesorhizobium loti
MAAKDVKFSRDARERMLRGVNILADAVKVTLGPKGRNVVIDKSFGAPRITKDGVTVAKEIELEDKFENMGAQMVREVASKTNDIAGDGTTTATVLAQSIVQEGHKAVAAGMNPMDLKRGIDLAVTDVVATLIKNAKKIKTSEEVAQVGTIAGNGDESVGKMIAEAMQKVGNEGVITVEEAKTAETELEVVEGMQFDRGYLSPYFVTNADKMVADLEDVYILLHEKKLSNLQTMLPVLEAVVQTSKPLLIISEDVEGEALATLVVNKLRGGLKIAAVKAPGFGDRRKAMLEDIAILTGGQVISEDLGIKLENVGLNMLGRAKKVSISKENTTIVDGAGKKEEIQGRVAQIKQQIEETTSDYDKEKLQERLAKLAGGVAVIRVGGATEVEVKEKKDRVDDALNATRAAVEEGIVPGGGVALLRASLSINAVGANSDQAAGINIVRRALQAPARQIAANAGAEASIVAGKILENKGATFGYNAQTGEYGDMIAMGIVDPVKVVRTALQDAASVAGLLVTTEAMIAEAPKKESAGGGGMPGGMGGGGMGGMGGMDF

SEQ ID NO: 4247 - protein, 674 aa, Acinetobacter sp. ADP1
MSFYPHLLAPLDLGFTTLKNRIMMGSMHIGLEEAPGGYERMAAFYAERAKGEVGLIVTGGIAPNDAGRTFAHASKLDTREEAVKHKIITQAVHDAGGKIAMQILHTGRYSYQQNIVAPSAIQAPINPIKPQELSSAEVWQTVSDFVNCAKLAQYAGYDGVEIMGSEGYLINEFIAARTNHREDEWGGHYENRIRFPIEIVKRTRAEVGENFIIIYRLSMLDLVEGGSTLDEVIHLAKEIEKAGATIINTGIGWHEARIPTIATKVPRAAFTWVTEKIRPHVKTPLITSNRINTPEMAEHVLANGQADLISMARPMLADPEFALKAGEGRSDEINTCIGCNQACLDHIFTGTVASCLVNPRACHETELKFPQADKVKQIAVIGAGPAGLSFATYAANRGHQVKIFEASEQIGGQFNIAKTIPGKEEFYETLRYFKRQIELQPNIELILNHKATLDELMQASFDEIVIATGVIPRHLNIPGIDHPKVLSYLDVLKNRKPVGKRIAIIGAGGIGFDTAEFLTHEGESASLNPKKFYDEWGIDTSYAHVGGLKQPVIEASEREIYLLQRKASSVGANLGKTTGWIHRTGLKHRNVKMIAGASYEKIDDQGLHIMIGDKATVLEVDNVVICAGQESYTAMYEALRESGKNVHLIGGAKEAGELDAKRAIRQGAELAATL

SEQ ID NO: 4248 - protein, 158 aa, Petroselinum crispum
MDFRLMGFNHPLLNTLSPHCDEDNQDSSNKNKSEQARSYVRDAKAMATTPADVKEYPNSYVFVVDMPGLKSGDIKVQVEEDNVLVVSGERKREEEKEGVKYVRMERKVGKFMRKFVLPENADLENINAVCQDGVLSVTVQKLPPPEPKKPKTIEVKIA

SEQ ID NO: 4249 - protein, 304 aa, Zea mays
SARALVPYYLEEEANWNLDFANIRQAVAEARSKGITVRATVIINPGNPTGQCLSEANIRELVRYCYHENLVLLADEVYQQNVYQDERPFISARKVMFDMGPPISREVQLVSFHTVSKGYWGECGQRGGYFEMTNLPPKTVDEIYKVASIVLSPNVPGQIFMGVMVNPPKPGDISYPKFTAESKSILESLRRRARMMTDGFNSCRNVVCNFTEGAMYSFPQIQLPARAIEAAKRAGKAADVFYCLKLLEATGISTVPGSGFGQKEGVFHLRTTILPAEEDFPTIMSSFKKFNDSFMEQYEGYSRM

SEQ ID NO: 4250 - protein, 242 aa, Petunia x hybrida
MEFQSDLTREISPQRKLGRGKIEIKRIENTTNRQVTFCKRRNGLLKKAYELSVLCDAEVALIVFSSRGRLYEYANNSVKATIERYKKACSDSSNTGSIAEANAQYYQQEASKLRAQIGNLQNQNRNFLGESLAALNLRDLRNLEQKIEKGISKIRAKKNELLFAEIEYMQKREIDLHNNNQYLRAKIAETERSQQMNLMPGSSSYDLVPPQQSFDARNYLQVNGLQTNNHYPRQDQPPLQLV

SEQ ID NO: 4251 - protein, 840 aa, Xanthomonas oryzae pv. oryzae KACC10331
MASAPSGTIDTGRPLARPFAAIVLRNAGGELFGSAGHFHPQLHVIGHPLRIQQVGLDCRAHRTAWLGDMRAIVEAALRRQRLHIRKTAFGQILFAGRLELAHAGRVDQTRTGRQRNQRAVRGGVTAARIVFAHPIGLHLLGAQQGVGQGRFARTGRAHQYRRTAIAQPRPQRSHAGRILGIDRAQRNVLRLQLFQHRQRILGMFGLIGLGQHHHRLRTAAAHQQQIALDATRIEVRIQPAHDEHRIDIGRDHLLVVMRAGRPPLDRSAPRQQRHDALALHQHPIAHRRPLMAGEARPLPLRQRLGLEAGLRRIGHHIAGAVLLHHPRRQRLRMRGEDCLPGRLFRRPRPGPADGLEGGVIGGDVAHGAILAGWPQRLVQSGPAGRLTRHLTSLPMQACPLVIFPIPCQVSRLQPARRMSTAPQKPLAIRERLSEVRYEIRGELARRARELEAQGRKLIKLNIGNPGAFGFRAPEHLQRAIADDMGRTDPYTHQQGLLEAREAVAKAYARRQHPDAHPDRIFIGNGVSELIDLSLRALLNPGDEVLVPSPDYPLWSAATILNDGRPVYYRCAPENGFQPDPVEIETLVSSRTRAIVLINPNNPSGASYSRALLERIVAIATKHNLLLLVDEIYDQVLYDGAAFVPVAPLAGAHPCITFSGLSKVHRACGWRVGWALLSGDQARINDLRNAMDLLGALRLCANVPGQYAIDAAVNGPDTISALCAPGGRLYETRRAVIEACAASEHLSLVAPAGALYAFPAVVGAAARNFDDHAFALDLMNKEGVLVVPGSSFNVPYRHHFRVTLMPEASVMRDVFARIDRALARRAEAVTKVVPLKSRSVA

SEQ ID NO: 4252 - protein, 526 aa, Triticum aestivum
MSAIKPPPPDRPPQAARLPSPSSSSSAAAAAKQGGTGSRGLLMGRYELGRVLGKGTFAKVYHARHVQTGESVAIKVLDREKAVRSGLVSHIKREIAVLRRVRHPNIVHLFEVMATKTKIYFVMELLVRGGELFSRVSKGRLKEDIARRYFQHLISAVGFCHTRGVFHRDLKPENLLVDEAGNLKVSDFGLSAVAEPFQPEGLLHTFCGTPAYVAPEVLARRGYEGAKADIWSCGVILFVLMAGYLPFHDQNLMAMYRKVYKGEFRCPRWFSKDLTSLIMRFLDTNPSTRITLPEVMESRWFKKGFRPVKFYIEDDQLYNVIDAENDMLDLGLPDPLPQPLPPPPPSPSPQQVDGDDSGSESDASVVSCPATSSFEERHRLRGPLPRPASLNAFDIISFSRGFNLSGLFEEKGDEVRFISGEPMPDIITKLEEIANVKSFAVRKKDWRVSLEGTREGVKGPLTICAEIFELTPSLVVVEVKKKAGDKEEYDDFCNKELKPGMQHLVHQMVPVPNTPTISELAERPSR

SEQ ID NO: 4253 - protein, 284 aa, Physcomitrella patens
MGRGKIEIKKIENTTSRQVTFSKRRGGLLKKAHELAVLCDAEVALVIFSSTGKLFEYASSGSIRDIIDRYKKGSDGMQNGARNDFMGCEVVKLREQLEQLKASHRHMLGEDLSLLKVPDLLQLEQQLDLGASRVRARKNQLILEEVESLRRKEHELLIANEDLRQKLADAQGIADAVTARANVSESPRPLTSALTRDIVMSSQQQEVTVHPHPNLRDAQRSQTSLQLGMFSSESYLPSSSRGPSEHPIPVGPEGCAGESAMRWEHPHFHSQNRLHANISPSVRI

SEQ ID NO: 4254 - protein, 436 aa, Thermus nonproteolyticus
MTENAEKFLWGVATSAYQIEGATQEDGRGPSIWDTFARRPGAIRDGSTGEPACDHYHRYEEDIALMQSLGVGVYRFSVAWPRILPEGRGRINPKGLAFYDRLVDRLLAAGITPFLTLYHWDLPQALEDRGGWRSRETAFAFAEYAEAVARALADRVPFFATLNEPWCSAFLGHWTGEHAPGLRNLEAALRAAHHLLLGHGLAVEALRAAGARRVGIVLNFAPAYGEDPEAVDVADRYHNRYFLDPILGRGYPESPFQDPPPAPILSRDLEAIARPLDFLGVNYYAPVRVAPGTGPLPVRYLPPEGPVTAMGWEVYPEGLYHLLKRLGREVPWPLYITENGAAYPDLWTGEAVVEDPERVAYLEAHVEAALRAREEGVDLRGYFVWSLMDNFEWAFGYTRRFGLYYVDFPSQRRIPKRSALWYRERIARAQTGGSAH

SEQ ID NO: 4255 - protein, 511 aa, Oryza sativa (japonica cultivar-group); identical to SEQ ID NO: 96

SEQ ID NO: 4256 - protein, 471 aa, Pyrococcus furiosus DSM 3638
MCLITGGINLTKEEIVKMIITGKHRGPDSFGVWSDGLVIKSEDFSEIKEIRGGNVVLAQCRLAMTGSKNYTQPFYNDIVLVHNGEIYNHESLRKWLIERGASFESDVDSEVILRLLEYFIFDKKMKVEEAVKKAMLMLRGDYAVAFALNGKIYLFRDPIGVRPLYYSPRGRFGSEKKVLWSVGEEAIPVNPGELVKLPEEEKMKLLSPWDIKGSGKGYYDGLKNLLQDAVRIRTAKKVGVLFSGGLDSSLIALLASKYSKVVLYTAGTEDSKDVEWARKVSDELRLELREYIFTREEVEREIKNVMFAIEEPNPMNLAIAIPLYFATKLARKDDVKVLLSGQGADELFGGYAKYLENPSLMRKDIEEIAERNLGRDDKVGMLNGVEVRYPYLDLPFVSLALRVPLEEKIREGVRKAILRRIALDFGLPEEVAFREKKAAQYGSNAQKILSKIAKKSLREFAQKLFSEVFST

SEQ ID NO: 4257 - protein, 164 aa, Pseudomonas putida
MSLNDLNTLPALLPKRTLPLRNSFQPHHRARQGHREVADSIPACLVSNWWTSDFVEAKFSLYFLALVDPATIPADDDARHQWMKSIPGVLELTHNHGTERDADFAYHDGNTDPRGFGHICVSVPDVVAACERFEALQVPFQKRLSDGRMNHLAFIKDPMVTGSK

SEQ ID NO: 4258 - protein, 719 aa, Xanthomonas axonopodis pv. citri str. 306
MSQTLQALADGLPADAFAVLGPKLLADGRRQVRVLAPGAEAMGLIDPRGKLLARMQASAIDGVFEGTLAVDGPYRLRIVWPDRVQEVEDPYAFAATLDESLLLQIAAGDGQALRRALGAQHLHCGDVPGVRFALWAPHAQRVAVVGDFNGWDVRRHPMRQRIGGFWELFLPRVDAGARYKYAVTAADGRVLLKADPVARQTELPPATASVVPSAATFAWTDAAWMANRDPAAVPGPLSIYEVHAASWRRDGHNQPLDWPTLAEQLIPYVQQLGFTHIELLPITEHPFGGSWGYQPLGLYAPTARHGSPDGFAQFVDACHRAGIGVILDWVSAHFPDDAHGLAQFDGAALYEHADPREGMHRDWNTLIYNYGRPEVTAYLLGSALEWIEHYHLDGLRVDAVASMLYRDYGRAEGEWVPNAHGGRENLEAVAFLRQLNRDIATQFPGVLTIAEESTAWPGVTAAISDGGLGFTHKWNMGWMHDTLGYMQRDPAERAHHHSQLTFGLVYAFDERFVLPLSHDEVVHGTGGLLGQMPGDDWRRFANLRAYLALMWAHPGDKLLFMGAEFGQWADWNHDQSLDWHLLDGARHRGMQQLVGDLNAALRRTPALYRGTHRAEGFDWSVADDARNSVLAFVRHDPDGGAPLLAVSNLTPQPHHDYHVGVPRAGLWREILNTDSAHYGGSNLGNSGRLATEPVGMHGHAQRLRLTLPPLATIYLQAEK

SEQ ID NO: 4259 - protein, 285 aa, Arabidopsis thaliana
MDRSVVPISLAPFQFLLVFWIFLTSVHTNPNKQQKTVVSLSLWWNSKNRIRGCVWFFFLLRVTRTMGQQNLIYSFVARGTVILVEYTEFKGNFTAVAAQCLQKLPSSNNKFTYNCDGHTFNYLVENGFTYCVVAVESVGRQIPMAFLERVKEDFNKRYGGGKATTAQANSLNREFGSKLKEHMQYCVDHPDEISKLAKVKAQVTEVKGVMMENIEKVLDRGEKIELLVDKTENLRSQAQDFRTQGTKIRRKMWFENMKIKLIVLGIIITLILIIILSVCGGFKCT

SEQ ID NO: 4260 - protein, 1287 aa, Streptococcus pneumoniae
MRKTPSHTEKKMVYSIRSLKNGTGSVLIGASLVLLAMATPTISSDESTPTTNEPNNRNTTTLAQPLTDTAAGSGKNESDISSPGNANASLEKTEEKPATEPTTPAASPADPAPQTGQDRSSEPTTSTSPVTTETKAEEPIEDNYFRIHVKKLPEENKDAQGLWTWDDVEKPSENWPNGALSFKDAKKDDYGYYLDVKLKGEQAKKISFLINNTAGKNLTGDKSVEKLVPKMNEAWLDQDYKVFSYEPQPAGTVRVNYYRTDGNYDKKSLWYWGDVKNPSSAQWPDGTDFTATGKYGRYIDIPLNEAAREFGFLLLDESKQGDDVKIRKENYKFTDLKNHSQIFLKDDDESIYTNPYYVHDIRMTGAQHVGTSSIESSFSTLVGAKKEDILKHSNITNHLGNKVTITDVAIDEAGKKVTYSGDFSDTKHPYTVSYNSDQFTTKTSWRLKDETYSYDGKLGADLKEEGKQVDLTLWSPSADKVSVVVYDKNDPDKVVGTVALEKGERGTWKQTLDSTNKLGITDFTGYYYQYQIERQGKTVLALDPYAKSLAAWNSDDAKIDDAHKVAKAAFVDPAKLGPQDLTYGKIHNFKTREDAVIYEAHVRDFTSDPAIAKDLTKPFGTFEAFIEKLDYLKDLGVTHIQLLPVLSYYFVNELKNHEHLSDYASSNSNYNWGYDPQNYFSLTGMYSSDPKNPEKRIAEFKNLINEIHKRGMGAILDVVYNHTAKVDIFEDLEPNYYHFMDADGTPRTSFGGGRLGTTHHMTKRLLVDSIKYLVDTYKVDGFRFDMMGDHDAASIEEAYKAARALNPNLIMLGEGWRTYAGDENMPTKAADQDWMKHTDTVAVFSDDIRNNLKSGYPNEGQPAFITGGKRDVNTIFKNLIAQPTNFEADSPGDVIQYIAAHDNLTLFDIIAQSIKKDPSKAENYAEIHRRLRLGNLMVLTAQGTPFIHSGQEYGRTKQFRNPAYRTPVAEDKVPNKSHLLRDKDGNPFDYPYFIHDSYDSSDAVNKFDWTKATDGKAYPENVKSRDYMKGLIALRQSTDAFRLKSLQDIKDRVHLITVPGQNGVEKEDVVIGYQITAPNGDIYAVFVNADEKAREFNLGTAFAHLRNAEVLADENQAGSVGIANPKGLEWTEKGLKLNALTATVLRVSQNGTSHESTAEEKPDSTPSKPEHQNEASHPAHQDPAPEARPDSTKPDAKVADAENKPSQATADSQAEQPAQEAQASSVKEAVRKESVENSSKENISATPDRQAELPNTGIKNENKLLFAGISLLALLGLGFLLKNKKEN

SEQ ID NO: 4261 - protein, 469 aa, Zymomonas mobilis subsp. mobilis ZM4
MSDTRPILIWFRHDFRLRDNAAITAAIQSRNPVICFYIQESADAKTESAADWWVAESLLALNRQLKEKGGQLHLFEGDAEKIIPEIVQQSHACKLFWNRRYDFKGKETDQILKKSIRAMGLEVQSFPNNLLNEPWTVKNDKGQPFRIFSAYWRAVQRHMNIQAVLPCPENWVFSTREIRHCLGYKDIAILAKETQDSSWKIKLKQSHRFGENEAHKQLKSFIENDLAHYAKERDFPAKDGTSLLSAFLRSGQISSKQIWHEVTKNGSGEGTSKFLEELGWREFAWSVLWEHPDLNQHNLRPEFDKMPWKKASDNLQRWKEGQTGYPFIDAGMRALWQTGFMPNRLRMVTASFLVKHLLIDWREGKKWFAQTLVDYDPACNATNWQWVAGSGIESAPYFRIMNPILQSQKFDPDGQYIREWVKELADVSTAFIHTPWKADKQPANYPLPIIAHEEGRNRALRAWKEIRHA

SEQ ID NO: 4262 - protein, 492 aa, Corynebacterium efficiens YS-314
MGAAGVPARFILDSVSMSLSTASPTIVWFRDDLRIRDNAALAWAADRGPVIGLFIDEDQPRALGGAARWWRDRSLTLLVDALATHGVPLLRRSGDPVVLLTEVVRETGAAAVTWNRRYHGPLRERDAEIKTQLREQGLEVHSHAGFLLTEPWEVTSGAGTGYKVYTPFSKAAFPLADESAARLGDPMPAQLTGPDTPVADTGGIDAPDPFWAAEMATHCRPGEQAALDRLGDFLDRMRERGGYADGRDEMARAVTSGLSPHLRFGEISVHRVWEEITAAADAGDIDATDAQVFRKELLWRDFAWHRLYALPDMATTNVREQFNRFGWAWDEHEAARLVDGRHPLSPTSSDEFHVALAAWRAGRTGIPLVDAGMRELWATGSMHNRSRMVVASFLTKNLQIHWRHGEEWFWETLVDADPASNAFNWQWAAGSGDDASPYFRIFNPETQARKFDPDETYIRRWIPEYGTPEYPAPIVDLKESRREALDAYEAVK

SEQ ID NO: 4263 - protein, 486 aa, Crocosphaera watsonii WH 8501
MSNKRILIWYRNDLRIHDHEPLYQAIKQGALIIPFYCFDIRQFKTTSFGFPKTGNFRGQFLLESVTDLKKSLQDLGSNLIIRQGYPEKIIPELIKQLEIDAVYFHEEVTSEETDIENTVEKALKPLNVTFKGFWGATLYHWDDLPFEVSKLPEVFTSFRKKVEKNSTVNPILISPRKLRSLPDIEVGNVPSLEELELEKPKYDSRGVLEFKGGETEGIQRLNNYFWERNCLKEYKETRNGMLGADYSSKFSPWLANGCLSPRYIYEEVQKYEEKRIKNNSTYWLIFELLWRDYFRFISAKHGNKIFYQSGLQGVDIPWKEDQERFKLWQEGNTGYPLVDGNMRELAATGFMSNRGRQNVASFLTKNLGINWIMGAEWFESLLIDYDVCSNYGNWNYTAGVGNDARGFRYFNIPKQSKDYDPKGEYIKHWLPELKMIPGQKIHEPWKLSQEEQKRYNVRIGVNYPRPVVDFFKSVKANEKMYNAAIK

SEQ ID NO: 4264 - protein, 1364 aa, Xanthomonas campestris pv. vesicatoria str. 85-10
MPKGRWDLRRTYGRRAFFGALLILSAGLVAAIVTGVWLQRQNELERQQRFDYVVRTLARNISERMSTFEHGLRGARGAVIGAGSDIISRERFTLYSRSRDYPREFPGVLGYGYIHRVAPADEAAFLQAARADGAPDIHRRPLAPWDGERYMVLYFEPESSGNRPLGIDIASEPRRRAAALQAARSGEPVMTSPISLSGYRVPSESGFLVLLAVYREGMPLQTPQQRMLATSGWVYAPFSVEQMVRSALGERDDVALDLSDRNEPTHNFYRSGTPASDSALRPPVVRLLPIYGRTWVITAHPTAGFVASLNQSSPWLIGGLVMAAAVLFAALLVLYFSNGLRREEVLRKQMELAALVSHSSEAIVAETPDGRITHWNPAAEAMFGYTADEAIDQDLTMLLSPQPYAMPEVDHADAALAGNASAAQTMRHRDGHQVHVLASKAPIIESEGTLSGHSHFFRDISDRVRSHQRIIDLNASLEHQVAERTSELVKFSVLQRAILAHAGYAIIAIDSSGFVTLFNPAAEKLLGYSAAEVIGRRKASQFVEPEELQERAHMLAEQTGTPVAHTLEAIAALTSLGRSDTSEWTYVSHDGRRLPVLLTLSTLRDDHDQVIGYLGVAVDLTEQKLHEKQLRLAMDAAKSANQSKSDFLANMSHEIRTPMNAILGMLYLLQRSELPGAAQDMVAKIDRSARTLLEIINDILDFSKIEAGRIDLECAPFDLNQLFDNIADLMRSSLSAKPVEMIVEPLPRDSRWLLGDALRINQVLVNLVGNAIKFTEQGEVVLSVRRFPSGDPNKFKLLFSVRDTGIGISKEKQSVIFSPFLQADTSTSRRYGGSGLGLTISRRLVELMGGELEVESVPGRGSEFYFVVTLEKSAPPQAQRELPALPPEAMPRVLIADDHDAALNNLVRIATELGWRVDAVASGQAALQAIEHAAEPYDIFLLDWRMPDIDGVAIAREIRARATPGPHPVIVMVTAYERRLLEQHPEQQDLDAVMTKPVTGAALHRLVEQLLEQRPGTRPATPTFVARRLEGAHLLLVDDSDINCEVAQRILEGEGAMVTVAHDGEQAVSTLKRAPNLFHLVLMDVQMPVVDGYEATRRLRQIPALASLPVIALTAGAFRPQQEKALEAGMNGFIAKPFNVEELVTAIRHFLQPGTRRIPSLPHEAQAHVGPEWEYSDPELLDAARARSLWREREPYARYLIKLLRDSPDPAEVAAEHLRRNELPAIGAMAHKLRGAAGSLALPALAGAAGDLETRIEEGHDITASLIALKDVMQRTADAIRAFLQHGDSDVAADEEGVALDADSVQILTSAFASDDADQIDHALLICAPRLPRALQEALQRAVEDFDFRRAEATLREWQATHPH

SEQ ID NO: 4265 - protein, 269 aa, Oryza sativa
MSSASSMEALHAAVLKEEQQQHEVEEATVVTSSSATSGEEGGHLPQGWAKRKRSRRQRSEEENLALCLLMLARGGHHRVQAPPPLSASAPPPAGAEFKCSVCGKSFSSYQALGGHKTSHRVKLPTPPAAPVLAPAPVAALLPSAEDREPATSSTAASSDGMTNRVHRCSICQKEFPTGQALGGHKRKHYDGGVGAGAGASSTELLATVAAESEVGSSGNGQSATRAFDLNLPAVPEFVWRPCSKGKKMWDEEEEVQSPLAFKKPRLLTA

SEQ ID NO: 4266 - protein, 545 aa, Chlorobium tepidum TLS
MTAKDILFDAEARTKLKVGVDKLANAVKVTLGPAGRNVLIDKKFGAPTSTKDGVTVAKEIELVDPVENMGAQMVREVASKTSDVAGDGTTTATVLAQAIYREGLKNVTAGARPIDLKRGIDRAVKEVVAELRNISRSISGKKEIAQVGTISANNDPEIGELIAEAMDKVGKDGVITVEEAKGMETELKVVEGMQFDRGYLSPYFVTNSETMEAELDEALILIHDKKISNMKELLPILEKAAQSGRPLLIIAEDIEGEALATLVVNKLRGTLKVAAVKAPGFGDRRKAMLEDIAILTGGTVISEEKGYKLENATMAYLGQAARITIDKDNTTIVEGKGKQEEIKARINEIKGQIEKSTSDYDTEKLQERLAKLSGGVAVLKIGASTEVEMKEKKARVEDALHATRAAVQEGIVVGGGVALIRAAKGLAKAVADNEDQKTGIEIIRRALEEPLRQIVANTGTTDGAVVLEKVKNAEGDYGFNARTEQYENLIEAGVVDPTKVTRSALENAASVASILLTTEAAITDVKEDKADMPAMPPGGMGGGMY

SEQ ID NO: 4267 - protein, 929 aa, Pseudomonas syringae pv. syringae B728a
MRWLRIAIASTVGLLTLLFMLSAQAEHGAGWSTLLDEKAHLTLDEIRSARYQNQFSPIELERVTAADRDSALWLHYRLQPTQHEQLLRIFAPDLSSADMYVMDGDRQIDHVRTGNDVPIEDQRLPSNDFLLPVPQSSAPLDIYLRLVSAQKMRPSITLEPAIASAANETQPLLFGLLFGALSMLIVQNLTRYGHTRSRSNLWLAACESLLGLSALLLLNLLRPIDPWNIAQTPSAHLALLLAAVAGLIYTYCFFVHRNARKLDRLLLGNAVLMGIGALLVLFDEKLPINFLTFGLVSLTTLSILAVSMWHWQKGYRSARLFVLGMITFNIGYMVVLPGLLWLSLVPPQWLILALLSVFCISGVLMSLALSERHRSITEDRFSISRDQAASTAEINAKAEFLAKISHEIRTPMNGVLGMTELLLGTPLSVKQRDYVQTIHSAGNELLTLINEILDITKLESGQIELDDVQFDIGALVEDCLNIFRAKAEQQQVELISQIQPQVPRVINGDPTRLRQTLLSLLENALKKTDEGEILLAVSLESSKSGNTRLRISVQDSGESLSDEEREELLHAELHSRNFLASSRLGGHLGLVIARQLIVLMDGEFGIQNTGAQGNTLWLNLPLDAKLLEQPTIDLDSPLKDARVLVVDDNDTCRKVLVQQCSAWGLNVSAVASGKEALALLRTKAHLRDYFDVVLLDQNMPGMTGMQLAAKIKEDPSLNHDILLIMLTGISNAPSKIIARNSGIKRILAKPVAGYTLKTTLADELTQLNKGVVSNKPGPVVTPPVNVPGDFRILVAEDNSISTKVIRGMLGKLNLNPDTASNGEEALRAMKAQRYDLVLMDCEMPILDGFSATEQLRAWEVGNQRVRTPVVALTAHILTEHKDRARQAGMDGHMAKPIELSQLRELVEHWVAHRDKARGLTSDGEHYRQN

SEQ ID NO: 4268 - protein, 213 aa, Prosthecochloris aestuarii DSM 271
MYLKQFRTGGDRNFGYLAADETSRLAVAVDTSYNPGMIVEDARREGLTIRYLFSTHSHHDHTNGNEEAARLTGCTPLLYGSLCPVSGVRIEDGAELPLGALQVKVLYTPGHTDDSICLCVGDVVFTGDTLFVGKVGGTDLAEQAVTEFGSLHEKLLSLPETTRVFPGHDYGVAPESTIGHERRTNPFLLQPDLESFIGLKRNWAAYKKAHGIA

SEQ ID NO: 4269 - protein, 324 aa, Neisseria meningitidis Z2491
MDTLTRFLPEHLQQNQLPEALGGVLLSVVSACTEINAKVRLGALAGVLGMAGTGNIQGEDQKKLDVIANNIMIDTLKANPAVAGLASEEEDSFVSAGENGRYLVLFDPLDGSSNIDVNISVGTIFSILEKPEGALATESFLQTGRQQLAAGYVLYGPQTQLVFTFGHGVYMFTLNAENEFVLTKEKPKVPESTKEFAINMSNRRHWLPPVQQYIDELLAGETGTRGKNYNMRWVASMVAEIHRILMRGGVFMYPQDKRDPSKPGKLRLMYEANPMALILEQAGASASNARQDILGIRPESLHQRVAVIMGSSEEVDYLNRLHSK

SEQ ID NO: 4270 - protein, 228 aa, Petunia x hybrida
MGRGKIEIKRIENNTNRQVTFCKRRNGLLKKAYELSVLCDAEIALIVFSTRGRVYEYANNNIKGTIERYKKATAETSNACTTQELNAQFYQQESKKLRQQIQLLQNTNRHLVGEGLSALNVRELKQLENRLERGITRIRSKKHEMILAETENLQKREIQLEQENTFLRSKIAENERLQELSMMPATGQEYNAFQQYFARNMLQLNMMEGGVPSYDPLPAHDKKSLQLE

SEQ ID NO: 4271 - protein, 532 aa, Vibrio parahaemolyticus RIMD 2210633
MAAKDVLFANDARQKMLKGVNLLADAVKVTLGPKGRNVVLDKSYGAPTITKDGVSVAKEIELKDKFENMGAQMVKQVASKANDEAGDGTTTATVLAQSFINEGLKAVASGMNPMDLKRGIDKATEAAVEKLREMSKPCSDKESITQVGSISANSDRAIGEIIAEAMEKVGRNGVITVEEGQGLDNELSVVEGMQFDRGYLSPYFITNQENGSVELDNPYILLVDKKVSSIRELLPVLEEVAKSSRSLLIIAEDIEGEALATLVVNNMRGIVRATAVKAPGFGDNRKAMMEDIAVLTAGTVISEEIGLELEKATLEQLGSAKKVTITKDTTTIVGGAAEASAIADRVASIEKQIETTTSQYDKDKLQQRVAKLSGGVAVIKIGAATEVEMKEKKDRVDDALHATRAAVEEGIVAGGGVALTKIAKELADLKGDNDDQNVGIRVALRAMEEPLRQIATNAGDEASVVANAVKAGDADYGYNAATGEYGNMIEMGILDPAKVTRSALQFAASVAGLMITTEAMITNHVEDKELDI

SEQ ID NO: 4272 - protein, 721 aa, Bradyrhizobium japonicum USDA 110
MPRAKPMPKLPAEAYAIIEGRHADPFHYLGLHPEGGKSVVRAFLPEASNVEAVGEHGEVARLDRVHDAGLFVGALPNGSKHYQLRAKFGDSIVEFEDAYRFPPILTDFDLYLLGEGTHQRLYDKLGAHPMTLDGVDGIGFVVLAPNARRVSVVGDFNFWDSRRHPMRVRGSGYWELFIPHAKRGDHYKFDIVGPHGHQLPLKSDPMAFASEVRPKTASIVFDEAHLPRPRPAPDGINALSAPMSIYEVHLGSWRRKGDNEWLTYRELAEQLPAYARDMGFTHLEFLPVSEHPFDGSWGYQPTGLYAPTSRFGTPEDFAALVDACHREGVGVLLDWVPGHFPDDPHGLGSFDGTSLYEHANPLQGRHLDWGTLIYNYGRTEVTNFLVSNALFWLERYAIDGLRVDAVASMLYLDYSRPPGAWIPNQYGGRENIEAIAFLRRFNTELFARFPQATTAAEESTAWPQVSRPVEFGGLGFGYKWNMGWMHDTLNYISKDPIHRKHHHGEILFGLHYAFSENFILPLSHDEVVHGKRSILGRMPGDEWQRFANLRAYYSFMFGHPGKKLLFMGAEIAQSREWNHDQSLDWHLLEYKYHSGIQALIRDLNRLYRAVPALHQMDCDQAGFEWLITDDANRNVFAWLRKGLDEHARCLVIVNFSPNVYRNYRVRVPFAGKWKEVLNSDSAHYGGSNVGNIGEVHAVDGKTPELRLTIPPLAAIFLVPES

SEQ ID NO: 4273 - protein, 273 aa, Zea mays
FPADREALPHHHHPMLNMMTDLSCGPSSKVKEQVAAAPTGSGDRQGQGRGKIEIKRIENTTNRQVTFCKRRNGLLKKAYELSVLCDAEVALVVFSSRGRLYEYANNSVKSTIERYKKANSDSSNSGTVAEVNAQYYQQESSKLRQMIHSLQNANTRNIVGDSIHTMGLRDLKQMEGKLEKAISKIRARKNELLYAEVDYMQKREMDLQTDNMYLTSKIAESNETGQPAMHMMGVPPPTSEYDHMAPFDSRNFLQVSMPQHYSHQLQPTTLQLG

SEQ ID NO: 4274 - protein, 146 aa, Rhodospirillum rubrum
MRFLHTMVRVADLDASLDFYCAKLGLREISRQDNEKGRFTLVFLAAPADEETARETKAPLVELTYNWDPEVYTGGRNFGHLAYKVDDIYATCQKLMDAGVTINRPPRDGNMAFIRSPDGISIELLQEGAPLAPAEPWASMANTGSW

SEQ ID NO: 4275 - protein, 464 aa, Solanum berthaultii
MVRVTLFLLLLLVSDVVSDHFIVETLPGFHGKLPFTLETGYIGVGEEEKVQLFYFFVPSERDPLNDPLMIWLTGGPGCSGLSSFVYEIGPLTFDYANSNGNFPKLELNSNSWTKVANIIFIDQPAGTGYSYANTSEAYNCNDTLSVTLTYDFLRKWLMDHPEYLNNPLYVGGDSYSGIFVALLTRKIYDGIEVGDKPRLNIKGYIQGNALTDRYIDSNGRIKYANRMGLISDKIYQSAKTNCNGSYFDVDPHNILCLNDLQKVTKCLKNIRRAQILEPYCDLPYLMDILQETPTNGQSVFPIAGPWCREKNYIYSYVWANDKVVQKALNVREGTTLEWVRCNESMHYRGKERTESYVYDVPSAVGDHRHLTSKSCRALIYSGDHDMVVPHLSTEEWIDTLKLPIADDWEPWFVDAQVAGYKVKYLQNDYELTYATVKGAGHTAPEYKPEQCLPMVDRWFSGDPL

SEQ ID NO: 4276 - protein, 285 aa, Kluyveromyces lactis NRRL Y-1140
MELSVPKSYKLSSGYTIPSVGLGTYELPPNKTAYLVHQALEVGYRHFDTAVLYGNEYEVGQGIKKWLNENPAENKRGDVFYTTKLWDSQHGYEKAKKAIDHCLQEVEDLGYIDLLLIHSPLGGKKLRLETYEAMQEAVDAGKVRSIGVSNYGFQHIEELLNWEKLKYKPVVNQIEISPWCMRQELADFCKKKGILVEAYAPLTHGTKLKDPDLVKVANEVGCDVGQALIRWSLQKGYIPLPKTQSVSRLASNLDVFSFEWTTDQMDQLDKPYAYEPTDWECTNAP

SEQ ID NO: 4277 - protein, 456 aa, Solanum berthaultii
  misc_feature (449)..(449): Xaa can be any naturally occurring amino acid
MVLAFIVFVLMLLLTDVVSSHFIVETLPGFDGQLPFKLETGYIGVGEEEKLQLFYFFVESERDPQNDPLMIWLTGGPGCSGLSTFLYEFGPLTFDYANSSGNFPKLELNLHSWTKVANIIFIDQPVGTGYSYAKTSEAYNSNDTLSATLTYDFLRKWLMDHPEYLKNPLYVGSESYAGIYSALVTRKIYDGVEVGDEPQMNIKGYIQGNALTDAYITVNSRVKYVYHMGLISDKIYQSAKANCNGNYVDIDPNNILCLNDLQKVKKCLNNIQSHHILENWCDLSLLRSNVHSGPWCRENNYIYSKIWANDKAVQKALNVREGTILEWVRCNNSMKYSARESMKRSGSYVYEIQSSIDDHRHLTSKSCRALIYSGDHDMIISHVSTEEWIDTLKLPIVDDWEPWFVEDQVAGYKVKYLQNDYELTYATVKGAGHTAPEYKPRQCMSMVDXWFSGDPL

SEQ ID NO: 4278 - protein, 461 aa, Solanum berthaultii
MVRVTLFLLLLLVSDVVSDHFIVETLPGFHGKLPFTLETGYIGVGEEEKVQLFYFFVPSERDPLNDPLMIWLTGGPGCSGLSSFVYEIGPLTFDYANSNGNFPKLELNSNSWTKVANIIFIDQPAGTGYSYANTSEAYNCNDTLSVTLTYDFLRKWLMDHPEYLNNPLYVGGDSYSGIFVAPLTRKIYDGIEVGDKPRLNIKGYIQGNALTDRYIDSNGRIKYANRMGLISDKIYQSAKTNCNGSYFDVDPHNILCLNDLQKVTKNIRRAQILEPYCDLPYLMDILQETPTNGQSVFPIAGPWCREKNYIYSYVWANDKVVQKALNVREGTTLEWVRCNESMHYRGKERTESYVYDVPSAVGDHRHLTSKSCRALIYSGDHDMVVPHLSTEEWIDTLKLPIADDWEPWFVDAQVAGYKVKYLQNDYELTYATVKGAGHTAPQYKPEQCLPMVDRWFSGDPL

SEQ ID NO: 4279 - protein, 344 aa, Vantanea guianensis
DLEPVNPADVPVTAAGALKSYKLAAKAISRLQSLPSGNISMLCDVLVKEVSDLTGYDRVMVYRFHEDEHGEVVAECHRPDLEPYLGLHYPATDIPQASRFLFMKNKVRMICDCLALPVKVIEDKRLAQPLSLCGSTLRSPHGCHAQYMADMGSIASLVMSVTINEDDDEMDSDQQTGRKLWGLVVCHHTSPRFVPFPLRYACEFLIQVFGVLINKEVELAAQMREKHILRTQTVLCDMLLRDAPVAIITQSPNVMDLVKCDGAALYYRNKFWLLGVTPTEAQVRDIAEWLLEYRRGSTGLSTDSLMEAGYPGASVLGNAVCGMAAVSITSKNFLFWFRSITSEF

SEQ ID NO: 4280 - protein, 496 aa, Zea mays
ITMDPTKFRPSSSHDTTVTTTNAGAPVWNDNEALTVGPRGPILLEDYHLIEKVAHFARERIPERVVHARGASAKGFFECTHDVTSLTCADFLRAPGVRTPVIVRFSTVIHERGSPETIRDPRGFAVKFYTREGNWDLLGNNFPVFFIRDGIKFPDVIHAFKPNPRSHVQEYWRVFDFLSHLPESLHTFFFLFDDVGVPSDYRHMEGFGVNTYTFVSAAGKAQYVKFHWKPTCGVRCILTDEEAALVGGRNHSHATQDLYDSIAAGSFPEWTLYVQVMEPDTEEQYDFDPLDDTKTWPEDLLPLRPVGRLVLDRNVDNFFNENEQLAFGPGLVVPGIYYSDDKMLQCRVFAYADTQRYRLGPNYLMLPVNAPRCAHHNNHYDGAMNFMHRDEEVDYYPSRHAPLRQAAPPTPLPPRPVAGRREKATIRKPNDFKQPGERYRSWDADRQDRFVRRFADSLGHPKVSQELRSIWIDLLAKCDASLGMKIATRLNMKANM

SEQ ID NO: 4281 - protein, 227 aa, Zea mays
MARYFRSSNLASRVFERQLISPRPGATHLQVNTIRQFYENLVPSYTIYDIDCPDYSFRKFTDDGKYFVAFSRNHQDLIVYRPIWLTYSCNEECDPHELPPKAKKFDSFFKQLYSIPLASGNEYICKDFFLYMECHRFGLFATSTAQSNESTATEGAIHGVPLIEKITFHLVRLEDGVILDEKAFCNDFINLAHSIGAYMYEDLLCIVSLRYQTIHILQIRDSGNLVE

SEQ ID NO: 4282 - protein, 514 aa, Oryza sativa
MFRSMGTGTGTKPPAMTTERYEFGPLVGEGNFAKVYLGRHRATGEEVAIKVMDKEKLVRLGATELIKREIAVMQRLRHPNVVRIHEVMANKRRICVVMEYVRGGALYRYFRRGPSGGAAGLREHEARRFFQQLVSAVAYCHSRGVFHRDIKLDNLLVDEQGNLKVADFGLSALADMERREAHLQTVCGTPLFLAPEVFKRRGYDGAKADVWACGVVLYVLLTGRKPFPDEHVSRLYRLIGQNQFQCPPSFSPDLARLVRRLLQPDPDRRITIPEIMEMRWFKRGFKEVTYYIDSNDRLRSLDGLDGEPELYDSDTDTIESSSSSESPTPVAGTPRGMHTSVSAPALSELDRMEDSASLPLPLPLPPRPRMPRPKSLNAFDIIASSPSFDLSGLFEERGERMRFVSGAPVADIIAKLQEIAGMVSFTARTKDCQVSIEATRNGQKGALAISAKVFELTRELVMVQVCKKAGDTAEYRRFCDNELKAGLRGLVVDALPPPVEGGGHGGAAAAAEAE

SEQ ID NO: 4283 - protein, 362 aa, Rhodobacter sphaeroides 2.4.1
MTEKLFTPIAVGDLTLKNRVVMAPLTRNRAEPEGDLPTDLTVEYYRQRAGAGLIVTEGSQISPEGKGYAWTPGIHSEAQVAGWRKVTDAVHARGGHIAIQLWHVGRISHTSLLDGQKPVAPSALAAASRTFDGTGFVATSEPRALETDEIARVVEDYRKAARNAKAAGFDAVEIHAANGYLIDQFLRDTSNKRTDAYGGSQENRVRFLEEVVGAVVAEMGPGRTGIRFSPFSNANDVGIDSDTVGLFSRAIDVLNRHGIAFLHMVEGQTGGAREWPEGALETLRERFGGTYVANNGYDREMAVAAVESGKADMVAFGKLYISNPDLAERLAARAPLAPLPTEGLYGGGAEGYTDYPTLTPAA

SEQ ID NO: 4284 - protein, 917 aa, Pseudomonas syringae pv. phaseolicola 1448A
MLTKLGIKGRVLLLTILPASLMAAMLGGYFTWMQLSELQSQLLQRGEMIAQDLAPLAANALGRKDKVLLSRIATQTLEQTDVRAVSFLDTDRTELAHAGPTMISPSPIGSGSQLLSSTGTDATRYLLPVFGSQRHLTSPIIPAEADTLLGWVELEISHNGTLLRGYRSLFASLLLILTGLACTATLAVRMSRTINGPMSQIKQAVSQLKDGNLETRLPPLGSRELDELASGINRMAATLQNAQEELQLSIDQATEDVRQNLETIEIQNIELDLARKEALEASRIKSEFLANMSHEIRTPLNGILGFTHLLQKSELTPRQFDYLGTIEKSADNLLSIINEILDFSKIEAGKLVLDNIPFNLRDLLQDTLTILAPAAHAKQLELVSLVYRDTPLALSGDPLRLRQILTNLVSNAIKFTREGTIVARAMLEDETEEHAQLRISVQDTGIGLSSQDVRALFQAFSQADNSLSRQPGGTGLGLVISKRLIEQMGGEIGVDSTPGEGSEFWISLKLPKAREDKEESLNIPLGGLRAAVLEHHDLARQALEHQLEDCGLQTIVFNNLENLLNGVTAAHETPAAIDLAVLGVTALEISPERLRQHIWDLENLNCKVMVLCPTTEHALFQLAVHDVYTQLQAKPACTRKLQKALSELIAPRAVRADIGPPLSSHAPRVLCVDDNPANLLLVQTLLEDMGAEVVAVEGGYAAVNAVQQEAFDLVLMDMQMPGMDGRQATEAIRTWEAERNQSSLPIVALTAHAMANEKRSLLQSGMDDYLTKPISERQLAQVVLKWTGLALRNPAPERQNEAPEVHVGPLVLDHEEGLRLAAGKADLAADMLAMLLASLDADREAIRVARASQDVHALIERIHRLHGATRYCGVPQLRTACQRAETLLKQNAAHTEEALDDLDKAIIRLESEARVTA

SEQ ID NO: 4285 - protein, 482 aa, Lactobacillus sakei subsp. sakei 23K
MEYQQLAPFPQDFLWGSASAAYQIEGAYQEAGKGQSVWDQFVRIPGKTFKATNGDVAVDHYHRYQEDVALMARAGLKAYRFSISWPRVLPTGRGTVNEEGLAFYDRLIDELIANQIEPIVTIYHWDLPQALQDEYGGWESRQIIPDFTAYAALLFERFGDRVRHWVTLNEQNIFITHGYLTAEHPPAVMDAKRTYQANHMANLANASVIKLFHEKGYQGGNGPSFAYSPTYALDADPVNQIAADDAEQLNANLWLDIYAWGRYPKLILNYWAREGLLPDITAADQALLQDPLARPDFMGLNYYQTTTVTANPLVGGVGLTKQNTSGKKGTSQASGVPGLFKTSDNPYMQQTDWDWNIDPEGLRMALRRIESRYNLPVLITENGLGAYDRLEGAGEVHDEYRIVFLKAHIQAIQEAITDGVTVIGYTTWSFTDLLSWTNGYQKRYGFVYVDRDETDEKELNRYPKDSFYWYQRVIRSNGQQLN

SEQ ID NO: 4286 - protein, 545 aa, Shewanella sp. MR-7
MAAKEVVFGNDARVKMLAGVNILANAVKVTLGPKGRNVVLDKSFGSPLITKDGVSVAKEIELEDKFENMGAQMVKEVASKANDAAGDGTTTATVLAQAIVTEGLKAVAAGMNPMDLKRGIDKAVAAAVIELKNLSQDCADSKAIAQVGTISANSDESIGEIIATAMEKVGKEGVITVEEGQALENELDVVEGMQFDRGYLSPYFINKPETGSVELDHPFVLLVDKKISNIRELLPILEGLAKTGKPLLIVAEDVEGEALATLVVNNMRGIVKVAAVKAPGFGDRRKAMLQDVAILTGGTVIAEEIGLELEKATLEDLGTAKRVVITKDNTTIIDGNGEQAQIEARVSQIKQQIEESTSDYDKEKLQERMAKLAGGVAVIKVGAATEVEMKEKKARVEDALHATRAAVEEGVVPGGGVALVRVASKIADVEVANEDQKHGVVIALRAMEAPLRQIATNAGEEASVVANTVKNGSGNYGYNAGNDTYGDMLEMGILDPTKVTRSALQFAASIAGLMITTEAMVAELPKADAPDMGGMGGMGGMGGMM

SEQ ID NO: 4287 - protein, 195 aa, Glycine max
MRKSAADRFRHLFNRSLILLRHRHHHHPFPSSSSLSPFSRSRFFSSTPFSMASDSPFPVTAQNINPKVLKCEYAVRGEVVTLAQNLQKDLQANPGSHPFDEILYCSLGQQPITFFREVLALCDHPAILDKSETQGLFSTDAIQRAWQIVDQIPGRATGAYSHSQGVKGLRDTIAAGIEERDGSPANPDDIFMTEG

SEQ ID NO: 4288 - protein, 283 aa, Listeria monocytogenes str. 1/2a F6854
MKTVKLNNGVEVPILGFGTYQITDAAEAEQAVKDAIKTGYRHIDTAQSYMNEEAVGRGIAASGVDRKELFITTKIWVENVSYKGVMSSFDRSLKRLGLDYVDLLLIHQPFNDVYGAWIAMEELQASGKIRAIGVSNFSPDRVIDLAAFNEVTPQVNQIEVNPFQQQTANLAILRKEGVAIEAWAPFAEGKNDVFNNPVLTKIGAKYGKSAAQVILRWLVEQDIIVLAKSVKPERMAQNLAIFDFELTEADKEEIAGLNQGESQFFSHADPEMVKWMASRKLNV

SEQ ID NO: 4289 - protein, 583 aa, Bradyrhizobium japonicum USDA 110
MRPSFGARPTKEGVSFRLWAPGARRVDLLLDRRHAMQRRQDGWYVAEIASLTTGSPYKFRIDDEIDVPDPASAFQPEDVFGPSEVIDHDAFAWRARDWRGRPWEETVLIESHVGTFTAEGTYRAMIDRLDHLTATGITALELMPLADFAGYRGWGYDGVLWYAPDSAYGRPEDLKTLIDEAHLRGLMVFLDVVYNHFGPEGNYLGRYAPSFFTDAHTPWGSAIDYRLSQVRAFAVENALSWLSDYRFDGLRLDAANHIMALPGEQSMLQDLSVAAGELAKATGRHIHLVLENGDNRASLLDAAQEPPNGKYRAQWNDDYHHVWHVMLTGELAGYYADYQTPRMDLARALASGFVYQGEISEFWGKKPRGEPSRELPPATFVNFLQNHDQIGNRPLGERLESLASPRQIEAALAVTLLAPMVPMLFQGEEWGSKVPFPFFCDFQGGLADAVRKGRRQEYAWAYEKYGDEVPDPLDPATLQSAVLDWGGRTPEQDARLALVRDLLALRRKEIMPRLKGARFGDAEATDSGLLRAHWRMGDGTTLRLVANLSDHEIISTDNAGTPIWGGAAGDRLPPWSVVWRLGG

SEQ ID NO: 4290 - protein, 332 aa, Escherichia coli O157:H7 EDL933
MKTLGEFIVEKQHEFSHATGELTALLSAIKLGAKIIHRDINKAGLVDILGASGAENVQGEVQQKLDLFANEKLKAALKARDIVAGIASEEEDEIVVFEGCEHAKYVVLMDPLDGSSNIDVNVSVGTIFSIYRRVTPVGTPVTEEDFLQPGNKQVAAGYVVYGSSTMLVYSTGCGVHAFTYDPSLGVFCLCQERMRFPEKGKTYSINEGNYIKFPNGVKKYIKFCQEEDKSTNRPYTSRYIGSLVADFHRNLLKGGIYLYPSTASHPDGKLRLLYECNPMAFLAEQAGGKASDGKERILDIIPETLHQRRSFFVGNDHMVEDVERFICEFPDA

SEQ ID NO: 4291 - protein, 1356 aa, Ustilago maydis 521
MAATLSAQSALPNQPTLMSRQTSSPLPDLASLPTDFLDHLLLVTQTLVNSKPPPAVLRAMSRDPTRKEQSSSNGDLFEAHLADDVASIDLDDPTSHAEGIVSLPLPQFNSAHSDERTKAIEENLAKLAERLWRAEDHLEVVARSQEIVRTPGAEEQPDDPNHARNLFFGKPFPYPLSHAQPQSSTYPLSYPLGMGLNGPVLLGGQHSRTDDPISSFERYNDESGLSAQEELRLLKAQVQDIARVCKAVAFGDLSQHITVPVQGHVMVELKDIINQMVDRLSHFAAEVTRVSLEVGTQGKLGGQAEVHGVEGTWKELKDVVNRLAANLTNQVRGVALVTKAVARGDLSQKIEVEADGEILELKVTINVMVDQLRHFSTEVTRVSREVGSKGQLGGQANVPGVQGVWKELTDNVNRMCSNLTGQVRSIGVVTTAVAKGDLTKTIDIDAEGEMAQLKDTVNSMVGQLRIFASEVIRMSMEVGTYGKLGGQAHVPNVEGTWKDLTENVNKMADNLTSQVREIARVTKCVAEGVLTEFINVDVKGEILDLKLTVNNMVRQLKTLSDEIIRVSVEVGTEGRLGGQAKVNDVKGQWQVLTERVNMMASNLTTQVRSIATVTTAVARGDLSKTINVEVRGEFLDLKLTVNNMVESLRTFSFEVTRVAKEVGTEGKLGGRATVLGVGGTWKDLTDSVNTMAANLTLQVRAIAYATTAVARGDLTQKVTIPVSGEMLDLVNTINNMIDQLSFFASEVTRVAREVGTEGKLGVQAQKKDIEGTWGEITDNVNIMANNLTSQVRAFAQITAAATDGDFTRFVTVEASGEMDSLKTKINQMVYSLRDSIQKNTAAREAAELANRSKSEFLANMSHEIRTPMNGIIGMTALTLETELSRSQRENLVTVSTLAGNLLAIIDDILDISKIEAGRMNVEEIPFSLRGIVFSVLKTLSVRATQKKLNLMYEVAPDCPDPLIGDALRLKQIITNLIGNAVKFTDAGGRVALKCKLSKMVGSNQAMLEFCASDSGIGIKQDKLDVIFDTFCQADGSTTRKYGGTGLGLSISRRLVNLMGGDLWVRSNYGKGSDFFFTMVVKLDQISPDQVKEKIRPYTGRNIFYLDTLHDKTGVQAMIEDLGLKPFTVHSVDEASHRKRGMPRIDAIIADSLAVVEDLRNVEHLRYIPINLVSPAQLTLNLTYCLDHGISSYINTPTSVADLYYALLPSLESSAATPTEGSNEVTYDILLAEDNVVNQKLACKILTNQGHKVDIVDNGHLAVMAVKKRQYDVILMDVSMPVMGGIEATMAIREFEKTLGDEQVPIVALTAHAMLGDKEKCLQAGMSAYVSKPIRRVELISTLHSLLSQKKSVGGKV

SEQ ID NO: 4292 - protein, 422 aa, Galdieria sulphuraria
EFGTRKDVQVYFIQVLLYLYKEECQEITTAKDIFLIRWISIKMIAVQPQPKKTPVAEYLQTSQDTPTSLTRYLLEVAKQNKDMGDMVALINGIQFACKKIASLVGKAGVTDLMGIYQQGIVNVHGEEQKKLDVLSNEVLKNALKYSGKMAVIASEEEDVPIMVEESYSGNYVVVFDPLDGSSNLDAGLPTGTIFGVFQQQFSCLIHDYEESIDNMELACLQNTLQPGRRLIAAGYCIYSSSTMLVLSLGNGLHCFTLDTEVGEFVLTRANIQIPQRGNIYSFNESNFYQWDKGVQDYIERLKKGNNQTNCRYSARYVGSMVADVHRTILYGGIFGYPADKKNVSGKLRLVYECAPMAYLVEQAGGKATTGIENILDLTPKDIHERKPLILGSPADIEEFLQVYGMSRVDREDMHMWDNLSSL

SEQ ID NO: 4293 - protein, 825 aa, Oryza sativa
MAAPASAVPGSAAGLRAGAVRFPVPAGARSWRAAAELPTSRSLLSGRRFPGAVRVGGSGGRVAVRAAGASGEVMIPEGESDGMPVSAGSDDLQLPALDDELSTEVGAEVEIESSGASDVEGVKRVVEELAAEQKPRVVPPTGDGQKIFQMDSMLNGYKYHLEYRYSLYRRLRSAIDQYEGGLETFSRGYEKLGFTRSAEGVTYREWAPGAHSAALVGDFNNWNPNADPMSKNEYGVWEISLPNNADGSPPIPHGSRVKIRMDTPSGIKDSIPAWIKYSVQAAGEIPYNGIYYDPPEEEKYIFKHPQPKRPNSLRIYESHIGMSSPEPKINTYANFRDEVLPRIKKLGYNAVQIMAIQEHSYYASFGYHVTNFFAPSSRFGTPEDLKSLIDKAHELGLLVLMDIVHSHASNNTLDGLNGFDGTDTHYFHSGSRGHHWMWDSRLFNYGNWEVLRFLLSNARWWLEEYKFDGFRFDGVTSMMYTHHGLQVAFTGNYSEYFGFATDADAVVYLMLVNDLIHGLYPEAVAIGEDVSGMPTFGIPVQDGGVGFDYRLHMAVPDKWIELLKQSDESWKMGDIVHTLTNRRWSEKCVTYAESHDQALVGDKTIAFWLMDKDMYDFMALDRPATPSIDRGIALHKMIRLITMGLGGEGYLNFMGNEFGHPEWIDFPRAPQVLPNGKFIPGNNNSYDKCRRRFDLGDADYLRYRGMLEFDRAMQSLEEKYGFMTSDHQYISRKHEEDKMIIFEKGDLVFVFNFHWSNSYFDYRVGCLKPGKYKVVLDSDAGLFGGFGRIHHTAEHFTADCSHDNRPYSFSVYSPSRTCVVYAPAE

SEQ ID NO: 4294 - protein, 222 aa, Pinus resinosa
MGRGKIEIKRIENTTNRQVTFCKRRNGLLKKAYELSVLCDAEVALIVFSSRGRLYEFANHSVKRTIERYKKTCVDNNHGGAISESNSQYWQQEAGKLRQQIEILQNANRHLMGDGLTALNIKELKQLEVRLEKGISRVRSKKNEMLLEEIDIMQRREHILIQENEILRSKIAECQNSHNTNMLSAPEYDALPAFDSRNFLHANLIDAAHHYAHQEQTTLQLG

SEQ ID NO: 4295 - protein, 444 aa, Oryza sativa (japonica cultivar-group)
MRMGKYEMGRALGEGHFGKVKLARHADTGAAFAIKILDRQRILAMKIDEQIKREIATLKLLKHPNVVRLHEVSASKTKIYMVLEYVNGGELFDKIALKGKLSEKEGRKLFQQLMDAVSYCHEKGVYHRDLKPENVLVDAKGNIKVSDFGLSALPQNQRKDGLLHTTCGSPNYIAPEVLLNRGYDGSLSDIWSCGVILYVMLTGNLPFDDQNTVVLYQKILKGDARIPKWLSPGAQDILRKILDPNPITRLDITGIRAHEWFRQDYTPAMPFDDDDDNNISDGNLHMTENQDIETSPAISQINAFQLIGMSSCLDLSGFFEKEDVSERKIRFVSNYSPTSLFEKIESTVTEKGFQVQKNSGKLKVIQVCKEPANPRGHGNLLISAEVFEINESLYVVELKRSSGDCSLYRQLCASLSEDLGICKRQQLLKKDSMRQDLCRYNSSF

SEQ ID NO: 4296 - protein, 185 aa, Pharus virescens
EMRRIENKINRQVTFAMRRNGLLKKAYELSVLCDAEVALIIFSNRGKLYEFCSGQSMTKTLERYQKCSYGGPETAIQNKENELVQSSRNEYLKLKARVENLQRTQRNLLGEDLGSLGIKELEQLEKQLDSSLRHIRSTRTQQMLDQLTDLQRREQMLCEANKCLRRKLEESNQVHGQQVWEHGAN

SEQ ID NO: 4297 - protein, 753 aa, Escherichia coli O157:H7 EDL933
  misc_feature (621)..(621): Xaa can be any naturally occurring amino acid
MSQQNEKNPHQHQSPLHDSSEAKPGMDSLAPEDGSHRPAAEPTPPGAQPTASGSLKAPDTRNEKLNSLEDVRKGSENYALTTNQGVRIADDQNSLRAGSRGPTLLEDFILREKITHFDHERIPERIVHARGSAAHGYFQPYKSLSDITKADFLSDPNKITPVFVRFSTVQGGAGSADTVRDIRGFATKFYTEEGIFDLVGNNTPIFFIQDAHKFPDFVHAVKPEPHWAIPQGQSAHDTFWDYVSLQPETLHNVMWAMSDRGIPRSYRTMEGFGIHTFRLINAEGKATFVRFHWKPLAGKASLVWDEAQKLTGRDPDFHRRELWEAIEAGDFPEYELGFQLIPEEDEFKFDFDLLDPTKLIPEELVPVQRVGKMVLNRNPDNFFAENEQAAFHPGHIVPGLDFTNDPLLQGRLFSYTDTQISRLGGPNFHEIPINRPTCPYHNFQRDGMHRMGIDTNPANYEPNSINDNWPRETPPGPKRGGFESYQERVEGNKVRERSPSFGEYYSHPRLFWLSQTPFEQRHIVDGFSFELSKVVRPYIRERVVDQLAHIDLTLAQAVAKNLGIELTDDQLNITPPPDVNGLKKDPSLSLYAIPDGDVKGRVVAILLNDEVRSADLLAILXALKAKGVHAKLLYSRMGEVTADDGTVLPIAATFAGAPSLTVDAVIVPCGNIADIADNGDANYYLMEAYKHLKPIALAGDARKFKATIKVADQGEEGIVEADSADGSFMDELLTLMAAHRVWSRIPKIDKIPA

SEQ ID NO: 4298 - protein, 334 aa, Zea mays
PRVRGRVGCSVRNCAKLPTSLGPPPSSSIDEIGGWGTVPTLESLGPSVTKAGLASEKGMHFIGGESAALGRVHEYFWKKDQLKDYKVTRNGMLGPDYSTKFSPWLASGSLSPRYICEEVKRYEKQRVANDSTYWVLFELIWRDYFRFLSAKYGNAIFHLGGPRKVVSKWSQDQALFESWRDGRTGYPLIDANMRELSATGYMSNRGRQIVCSFLVRDMGVDWRMGAEWFETCLLDYDPASNYGNWTYGAGVGNDPREDRYFSIPKQAKSYDPEGEYVAYWLPELRSLAKERRNFPGASYIRQVVPLKFDGGNQRKDQQFNRQRRPNNVYIRQVK

SEQ ID NO: 4299 - protein, 727 aa, Physcomitrella patens
MAACTIVWFRRDLRLEDNPALIAAARAGTVVPVFVWSPAEDGQFHPGRVSRWWLKQSLTHLELSLKKLGSPLILRKSPDMLSVLLEIAEATGATQVFYNHLYDPVSLVRDHRVKQGLSQRGIVVHTFNGDLLYEPWEVYDEEGQAFTVYEAFWKKCMSMPFEPEAPLLPPRRLTGPIGKIVGCNAEELGLEDEFEKSSNALLARAWCPGWGFANKSLDSFLRSPLIDYARDRQKADGASGTPTSLLSPHLHFGELSVRKIFHEVRKRQITWAREGNAGGEASVNMFLRALGFREYSRYLSFHFPFTHERSLLANLKSFPWRADEGYFKAWRQGRTGYPLVDAGMRELWATGWAHNRIRVVVASFSVKFLQLPWRWGMKYFWDVLLDADLECDVLGWQYISGSLPDGHELDRIENPEVEGYRFDPDGDYVRRWIPELARLPNEWVHHPWDAPPSALRAAGVELGTNYPRPIVEIGAARERLQASLAEMWERDAAMKAALANGLEEGLGETVEVAGTGGPEHERMDVPRVMVHMQRDADMSCNSSRRDQLVPEIVPNQFHIRAHESIMNRSAAMVEDGEEAGRAAVPMVFASVRRGMGGNYGGHHVEGNGGEVAQASAPIQWPTVTAVDYELDSTAESASVTGRGGSEGGTVPVWSQSVSARTPIQVREGLVPEVRRGPGLSRRQLQASVQRVNLEGMTSNKQAEEEDFYVPKLVKWTQPRKRRVKQDG

SEQ ID NO: 4300 - protein, 445 aa, Legionella pneumophila subsp. pneumophila str. Philadelphia 1
MVIKKLFSSTLALVYALTLMLPLTAFSAEETNSNYSNTKRIPLEDVQRFSNAIGEIKKYYVKPVDDKELFDNAIRGMLTGLDPHSSYLNEEEFKELQTSTSGEFGGLGIEVTMEEGVVKVITPLVDTPAFKAGIKSGDYIIKLGKESVQGLSLKDAVNLMRGKPGTTIELTILRKGVNKPLTFDLIREVIQIKSVKSKMLSEGYGYIRLTQFQALTGKDMIKAIEQLKQQAGGKLKGLVLDLRNNPGGLLDSAIQVSDAFLGNDKAGKQEMIVYTEGRLPGSKFTALANPGDVLDNAPIVVLINNGSASASEIVAGALKDNKRAIILGTKSFGKGSVQTVLPLDGKTGIKLTTALYYTPSGVSIQAKGIIPDIIVEEVDVPKNAVKKDTLAGFTEADLNGHLINKDNSENTESKNNQIQTGDLIHEDYQLYAALTVLEGMALANR

SEQ ID NO: 4301 - protein, 437 aa, Mycobacterium leprae TN
MTLYQQISVDGSGTMSDVTTHQLPMHTPGYHRQRAFAQSSKLQDVLYEIRGPVSQHATRLETEGHRILKLNIGNPALFGFDAPDVIMRDMIQALPYAQGYSDSQGILPARRAVVTRYELVDGFPRFDVDDVYLGNGVSELITMTLQALLDNGDQVLIPSPDYPLWTASTSLAGGTPVHYLCDETQGWQPDIADVESKITERTKALVVINPNNPTGAVYSNEILNQIVDLARKHQLLLLADEIYDKILYDDTKHISVASIAPDLLCLTFNGLSKAYRVAGYRSGWLAITGPKDHASSFIGGINLLANMRLCPNVPAQHAIQVALGGHQSIEDLVLPGGRLLEQRDVAWTKLNEIPGVSCVKPTGALYAFPRLDPEVYGIVDDEQLVLDLLLQEKILVTQGSGFNWPAPDHLRLVTLPWSRDLAAAIDRLGNFLVSYRQ

SEQ ID NO: 4302 - protein, 540 aa, Streptococcus gordonii
MAKDIKFSADARSAMVRGVDILADTVKVTLGPKGRNVVLEKSFGSPLITNDGVTIAKEIELEDHFENMGAKLVSEVASKTNDIAGDGTTTATVLTQAIVREGIKNVTAGANPIGIRRGIEAAVATAVSALKETAIPVSNKEAIAQVAAVSSRSEKVGEYISEAMEKVGNDGVITIEESKGMETELDVVEGMQFDRGYLSQYMVTDSEKMVADLDNPYILITDKKISNIQEILPLLESILKTNRPLLIIADDVDGEALPTLVLNKIRGTFNVVAVKAPGFGDRRKAMLEDIAILTGGTVITEDLGLDLKDATIEALGQASKVTVDKDSTVIVEGSGNPEAIANRVAVIKSQIESATSEFDKEKLQERLAKLSGGVAVIKVGAATETELKEMKLRIEDALNATRAAVEEGIVSGGGTAFVSVLDAVAGLELTGDEATGRNIVLRALEEPVRQIALNAGFEGSIVIDRLKNSEAGTGFNAATGEWVNMIEAGIIDPVKVTRSALQNAASVASLILTTEAVVANQPEPASPAPAMDPSMMGGMM

SEQ ID NO: 4303 - protein, 533 aa, Ustilago maydis
MSIANASSSTASHDLDAADADPCPSACTSVSALCNMSTLPSPRPFGYRPTYVPAMVASGVSAVTVTTNSHRPPSKSHSISSVDSLASVSSNAPSTPTHDADDVRFEMAVIPKLVRASADAYLDRVGKPLPPSPAPQIVATSATTKTNAQAARSVAAAAAAAAAAAAVPPSHSALRNENHKNAISFRVGSKYKVCEIIGEGAYGVVCSAIHRATGQKVAIKKIQPFEHQMFALRTLRELKLLRFFQECDVSENIISILDIIKPSTYEAFTEVYLVQELMETDLHRVIRTQELSDDHCQYFTYQTLRALKPMHCADVIHRDLKPSNVLLNANCDLKVCDFGLARSVLTADQDTGFMTEYVATRWYRAPEIMLTFKQYTKAIDAWAVGCILAEMLTGRPLFPGRDYHQQLSLILDVLGTPTLEEFQNINSRRSRDYIRSMPFRKRREFRTLFPKASPEAIDFLQKTLTFDPRNRLTVEECLQHPYLSAYHDPDDEPGAPRLDPDFFYFDMQKESITKEDLRKELWYQVQEFQPLLR

SEQ ID NO: 4304 - protein, 315 aa, Arabidopsis thaliana
MANAITFFKLNTGAKFPSVGLGTWQASPGLVGDAVAAAVKIGYRHIDCAQIYGNEKEIGAVLKKLFEDRVVKREDLFITSKLWCTDHDPQDVPEALNRTLKDLQLEYVDLYLIHWPARIKKGSVGIKPENLLPVDIPSTWKAMEALYDSGKARAIGVSNFSTKKLADLLELARVPPAVNQVECHPSWRQTKLQEFCKSKGVHLSAYSPLGSPGTTWLKSDVLKNPILNMVAEKLGKSPAQVALRWGLQMGHSVLPKSTNEGRIKENFNVFDWSIPDYMFAKFAEIEQARLVTGSFLVHETLSPYKSIEELWDGEI

SEQ ID NO: 4305 - protein, 474 aa, Streptococcus pyogenes MGAS8232
MGIFPKDFLWGGAVAANQVEGAFEADAKGLSVQDVLPNGGLGEWTDSPTSDNLTLEAIDFYHRYKEDIALFAEMGFKVFRTSIAWSRIFPNGDDDQPNEAGLQFYDDLFDELLNYGIEPLVTLSHYETPLHLAKAYNGWTDRRLIGFFERFAQTVMERYKGKVKYWLTFNEVNSILHMPFTSGGIMTEKEKLSLQDLYQAIHHELVASASVTKLAHEINPDVKVGCMILAMPAYPMTSDPRDILAAHAFENLNLLFSDIHVRGKYPSYIKSYFKENGIEIVFEDGDKELLAEHTVDFLSFSYYMSVTQAHNPEAYTSGQGNILGGLSNPYLESSEWGWQIDPIGLRLVLNQYYDRYQIPLFIVENGLGAKDQLVQTADGSMTVHDDYRIDYMSQHLVQVAKAIEDGVEVMGYTAWGCIDCVSMSTAQLSKRYGFIYVERNDDGTGQLTRYKKKSFDWYRQVIQTNGRYLEDNFS

SEQ ID NO: 4306 - protein, 579 aa, Yarrowia lipolytica CLIB122
MATEHVEHAENAKQSPQPSFSGSESGRIGRYQIIKTLGEGSFGKVKLAYHLATHEKVALKIINRKTLAKSDMQGRVEREISYLRLLRHPHIIKLYDVIKSKDEIIMVIEFAGKELFDYIVQRGKMPEDEARRFFQQIISAVEYCHRHKIVHRDLKPENLLLDENLNVKIADFGLSNIMTDGNFLKTSCGSPNYAAPEVISGKLYAGPEVDVWSCGVILYVMLCGRLPFDDEFIPNLFKKISNGVYTIPPYLSAGAKHLLQQMLVVNPLNRITVQGIMEDPWFKQGIAEYLVPRDLKPDQVEIDDKVVGALSDTMGYDRDQVYEALKAPKSDGTEIRDAYDLMKENRQQLEKDSTVFDKVDESGKPKHQFSRKNPPALTFDSHHMPTIVDHSDLRTPNTTIAVLPSSLPAYHRANMMAHGPATLRKLNPISSRKSKTRWHFGIRSKSYPLDVMGELYRALKNLGAEWAKPSENDLWTIRVRWRYTPEKDESDSTTKPDSGLLKMQIQLYLLEQNSYLVDFKFDGWECETESGEIKTRDVAQVSNSKSANETFTFSAYPFLHLATRLIMELAVSSQKESEK

SEQ ID NO: 4307 - protein, 917 aa, Pseudomonas fluorescens Pf-5
MLKKLGIKGRVLLLTLLPTSLMALVLGGYFTWMQLSDLQTQLLQRGEMIAEQLASLVAPAMGNHNTQMLERIATQALEQQDVRAVSLLAPDRSLLAHAGPSMLNPPPAGNSSHMMQRSGSDATRYQLPVFGRHRNLAGDLIPDESDRLLGWVELELSHSGMLLRGYRSLFASLLLIAAGLAGTALLAVRMGRTINNPLTQIKQAVAQLKDGNLETRLPPLGSQELDELASGINRMASTLQNAQEELQHSIDQATEDVRQNLETIEIQNIELDLARKEALEASRIKSEFLANMSHEIRTPLNGILGFTHLLQKSELTPRQLDYLGTIEKSADSLLGIINEILDFSKIEAGKLVLDSIPFNLRDLLQDTLTILAPAAHAKQLELVSLVYRDTPLSLVGDPLRLKQILTNLVSNAIKFTREGTIVARAMLEEEHEDSVQLRISIQDTGIGLSNQDVRALFQAFSQADNSLSRQPGGTGLGLVISKRLIEQMGGEIGVDSTPGEGSEFWISLNLPKTRDDAEDLPGPPLLGRRVAVLENHELARQALQHQLEDCGLEVTPFNTLEALTNGITGVHQSEQAIDLAVLGITTNDMSPERLSQHIWDLEHLGCKVLVLCPTTEQTLFHLSVPNPHSQLQAKPACTRKLRRALSDLVTPRRARSEPEETLSSRAPRVLCVDDNPANLLLIQTLLEDMGAKVLAVDNGYAALNAIQTEPFDLVMMDVQMPGMDGRQSTEAIRQWESERHGTPLPIVALTAHAMANEKRALLQSGMDDYLTKPISERQLAQVVLKWTGLALRNQGPERASERPELGLELQVLDQDEGLRLAAGKADLAADMLAMLLASLDADREAIKAARAANDQNALIERVHRLHGATRYCGVPQLRAACQRSETLLKQEDAKAFAALDELDHAIGRLAAEARTNA

SEQ ID NO: 4308 - protein, 472 aa, Oryza sativa
KVAFVSQRPKTSLRLRVTPGWPHPPNSGDSGDGGRRGGKRWRFATPNLAVAAAGERSIQRYLLQLHACLDEHGPRPVIPLSHGDPSSSACFRTAPEAEEAVAAAVRSGDYNGYSSPATSLPARRAIAEYLSCDLPYKLCTDDIFLTSGGTQAIEIVMSVFGQPGANILLPKPGYPKHEAHAVFHRMEVRLYDLVPERGWEINVEAVEALADENTVAIVITNPNNPCGNVYTYEHLSKIADTASKFGLLVIADEVYGHLVYGSTPFVPMGVFGETVPVLTLGAISKRWVVPGWRFGWIAICDPKGILKETKVVDSLRSFRNLTTGPATFIQGAIPHIMKNTNDEFFRKTLELLKETAEICFGEIKEIKCITCPHKPEGSFFMMVKLDISQLSDICDDIDFCSKLVKEESVVLLPGRALGMENWLRITFALDPPRLKQGLERVKSFCRRHQSHANMLNISASAKVEPHFGMSKS

SEQ ID NO: 4309 - protein, 630 aa, Mesorhizobium loti MAFF303099
MCGIFGIVLKNEGTPVCAAAVERCADALAHRGPDASGLYINQSVAFAHRRLSIVDAHSRANQPYRDANTGVVVTYNGEIFNYREIRTELRDMGFFFSTVSDTEVLILSYIAWGKSFLNRLDGIFAFALFDPRNSLVLIARDRLGVKPLYYTICDVGLLFASQPNALIRWPGVMRGPDMIGALSFLSYRAVVGARTLFAGISKLEPGHLLEIRNGRHTSERWWNLSERISRCKPDYSDIRRLLGSAVERQLVADVPVAALLSGGLDSSILAYEASARSQIRPICYTGKVETADYDETAYAMEVAAEFGLTHRVVPIGEPSDIYAVSELVRLRGHPLGMHNEIAMFTLAKAISKEHKVVLTGEGADEIFAGYSRLFRTPYDYNRSKIIAALPRALAQVARRRLGLDVHGSQLQFFLARYSYFPTDEIRSLVIDGRVRREHEMALFDHFSTQFAEAGGDFFSKISYVLVSTHLPALLEMVDNTTMAAGLEARVPYTDHQLVTAAMAMPGSQRLRWRSPIASVQALWHPVASFSERLDVSKFPLRREYRSVLPRSVLSRKKMGFPLPLGQWAVGEGATEYRRLLFDKDSPLGDLFDPAALRRWFEAGRRNPSDSFGRKFWLLANLGIFFKEVFS

SEQ ID NO: 4310 - protein, 400 aa, Hordeum vulgare subsp. vulgare
MDCCFPCPGARRKRKPPAPAEKPQIPPAPDKAKPGCSSSSAAARQDSLLEAKKEFVLSNGSEHRHIAAQTFTFRELAAATNGFRADCLLGEGGFGRVYKGYLESINQVVAIKQLDRNGLQGNREFLVEVLMLSLLHHPHLVNLIGYCADGDQRLLVYEYMPLGSLEDHLHDPSPDKPRLDWNTRMKIAAGAAKGLEHLHDKTNPPVIYRDLKCSNILLGEGYHPKLSDFGLAKLGPVGDKTHVSTRVMGTYGYCAPEYAMTGQLTLKSDVYSYGVVLLEIITGRRAIDNTRATGEQNLVAWARPLFKDRRKFPQMADPALEGRYPARGLYQALAVAAMCVQEQPTLRPLIGDVVTALSYLASQPYDPEVHGVHRPSRLTASGTPPRSRNHGADRQRGGSE

SEQ ID NO: 4311 - protein, 206 aa, Triticum aestivum
  misc_feature (168)..(168): Xaa can be any naturally occurring amino acid
MASRRRTLLKVIILGDSGVGKTSLMNQYVNKKFSNQYKATIGADFLTKEVQFEDRLFTLQIWDTAGQERFQSLGVAFYRGADCCVLVYDVNSMKSFDNLNNWREEFLIQASPSDPDNFPFVLLGNKVDVDGGNSRVVSEKKAKAWCASKGNIPYFETSAKDGINVEEXFQCIVKNALKNEPEEELYMPDTVDVVGGNRGQGSSGCC

SEQ ID NO: 4312 - protein, 235 aa, Streptochaeta angustifolia
EMRRIENKISRQVTFAERRNGLPKKAYELSLLCDAEVALIIFSSGRLFEFSSASCMYRTLERYRTCNYRSHEAAAPIETESNYQEYLKLKTRVEFLQTTQRNLPGEDLGPLNMKELEQLENQIESSLKNIRSTKNQTLLDQLFDLRHKQQQLQDLNKDLRRKLQEVGGHDNALQVWEDGGPSGSAGHEHLQGLLQPSEIDPSLQIGYHQAYLDQLNNGQIAQYPNGHLPSSAPWI

SEQ ID NO: 4313 - protein, 219 aa, Sorghum bicolor
EMRRIENKISRQVTFAKRRNGLLKKAYELSVLCDAEVALIIFSSRGRLFEFSTSSCTYKTLERYRSCNFASEASAPLEAELNNYQEYLKLKTKVEFLQTTQRNLLGEDLGPLNVKELEQLENQIEISLKHIRSSKNRQMLDQLFDLKRKEQQLQDANKDLRRKGPETSEENVLRLSCQDIGCSGSSGHPGEANQERLHLALDPSLHIGYQAYRDHMNNN

SEQ ID NO: 4314 - protein, 213 aa, Zea mays
  misc_feature (165)..(165): Xaa can be any naturally occurring amino acid
MVLSHAASAGSSDDSVRSTFASRYVRASLPRFRMPENSIPKEAAYQIINDELMLDGNPRLNLASFVTTWMEPECNKLMMDSINKNYVDMDEYPVTTELQNRCVNMIAHLFNAPLGETETAVGVGTVGSSEAIMLAGLAFKRRWQNKMKAAGKPCDKPNIVTGANXVRFAWEKFARYFEVELKEMKLSEGYYVMDPEEGVEMVDENTICVAAIL

SEQ ID NO: 4315 - protein, 513 aa, Vibrio parahaemolyticus RIMD 2210633
MVSTHWRATMQMSKSFLLITVGLASTSLQAQTLTRDNGAPVGDNQNSITAGENGSVLLQDVHLIQKLQRFARERIPERVVHARGTGAHGEFVASGDFSDLTVSAPFTEKGKVTPVFVRFSTVIHSKGSPETLRDPRGFATKFYTEQGNWDLVGNNLPVFFIRDSIKFPDMVHSLKPSPVTNVQDPNRFFDFFSHEPSATHMLTWVYSNLGTPASYRTMDGFGVHAYKWINQQGDVNYVKFQWKSQQGIKSLRPNKVTEMQGKDFNHLTNDLYAAIGRGNYPKWDLYVKVLSPEALSKLDYNGLDATKVWLNVPDRKVGTMTLNRLPENFFLETEQSAFAPSNLIPGIEPSEDRLLQGRLFAYADTQLYRLGANLFQLPVNRPLTSVNNHNQNGLSNNAQLSNGDVNYEPSRKLNLAEDNQFKAVETKLVGTVQQKAISKPRDFYQAGVLYRSMNEQDRSDLIANLAGDLNKVIDKDIKATMVSYFYRADKEYGSRLAEATDTNLSQVKNKAMM

SEQ ID NO: 4316 - protein, 600 aa, Deinococcus radiodurans R1
MTQTQPVTPTPPASFQTQHDPRTRLGATPLPGGAGTRFRLWTSTARTVAVRVNGTEHVMTSLGGGIYELELPVGPGARYLFVLDGVPTPDPYARFLPDGVHGEAEVVDFGTFDWTDADWHGIKLADCVFYEVHVGTFTPEGTYRAAAEKLPYLKELGVTAIQVMPLAAFDGQRGWGYDGAAFYAPYAPYGRPEDLMALVDAAHRLGLGVFLDVVYNHFGPSGNYLSSYAPSYFTDRFSSAWGMGLDYAEPHMRRYVTGNARMWLRDYHFDGLRLDATPYMTDDSETHILTELAQEIHELGGTHLLLAEDHRNLPDLVTVNHLDGIWTDDFHHETRVTLTGEQEGYYAGYRGGAEALAYTIRRGWRYEGQFWAVKGEEHERGHPSDALEAPNFVYCIQNHDQIGNRPLGERLHQSDGVTLHEYRGAAALLLPMTPLLFQGQEWAASTPFQFFSDHAGELGQAVSEGRKKEFGGFSGFSGEDVPDPQAEQTFLNSKLNWAEREGGEHARTLRLYRDLLRLRREDPVLHNRQRENLTTGHDGDVLWVRTVTGAGERVLLWNLGQDTRAVAEVKLPFTVPRRLLLHTEGREDLTLGAGEAVLVG

SEQ ID NO: 4317 - protein, 222 aa, Chasmanthium latifolium
ELRRIENKISRQETFAKRRNGLLKKAYELSVLCDAEVAHIIFSSRGRLYEFSTSSCIYKTLERYRSCSYASEASAPMEAELSNYQGYLKLKTRVEFLLTTQRNLLGEDLGPLSAKELEQFENQVEISLKHIRSTKSRQLLDQLFELKRKEQQLQDANKDLRRKIQDTSGENMLRMTCKDIGSSGSSSGHARDAKHQELPHSGVCDPSLRIGYQAYMDQLNNE

SEQ ID NO: 4318 - protein, 704 aa, Pseudomonas putida KT2440
MRDQLPPRRISMKHFLPSTALAVMIGLGSLTLGGNAAAANKWDSLQPDRDEIVASLNVVELLKRHHYSKPPLDDARSVIIYDSYIKLLDPARSYFTAADIAEFDKWKTQFDDFLKSGNLDPGFTIYKRYLDRVKQRLDFALAELNKGVDKIDFTTKETLLIDRKDAPWMKNQAELDDLWRKRVKDEVLRQKIAGKEPKQIQETLIKRYKNQLTRLDQTRAEDIFQAYINTFAQSYDPHTNYLSPDNAENFDINMSLSLEGIGAVLQSDNDQVKIVRLVPAGPAAKTKQVAPADKIIGVAQGNKEMVDVVGWRLDEVVKLIRGPKGSVVRLEIIPASNAPSDQTSKIVSITREAVKLEEQAAKKSVLKLKQDGRDYKLGIIEIPAFYLDFKAYRAGDPEYKSTTRDVKKLLTELQKEKVDGVVIDLRNNGGGSLQEATELTSLFIEKGPTVLVRNSDGRVDVLEDENPGAFYKGPLALLVNRLSASASEIFAGAMQDYHRALIIGGQTFGKGTVQTIQPLNHGELKLTLAKFYRVSGQSTQHQGVLPDIDYPSIIDTKEIGESALPEAMPWDTIRPVVKPAADPFRPFLAQLKAQHEARSDKDAEFTYIRDRLALTQKLMNEKTVSLNEQERRARHDSIESKQLALENTRRKAKGEEPLKELKKEDEDALPVEDENTKPEDDAYLAETGRILIDYLSASTKVAKK

SEQ ID NO: 4319 - protein, 221 aa, Pennisetum glaucum
  misc_feature (12)..(12): Xaa can be any naturally occurring amino acid
  misc_feature (202)..(202): Xaa can be any naturally occurring amino acid
EMRRLENKISRXVTSAKRRNGLLKKAYEVAVLCDAEVALIIFSSRGRLFEFSTSSCMYETLEQYRSCNFTSEASSAPIEAELSNYEEYLKLKTRIEFLQTTQRNLLGEDLGPLSTKELEQLENQIEISLKHIRSSKNQQMLDQLFELKRKEQQLQDSNKDLRKKIQETSEENVLRPTFQDLGACGSSGHPRDANQEYLRQLXCDPTLRIGYQSYIDHLSNE

SEQ ID NO: 4320 - protein, 484 aa, Rhodospirillum rubrum
MTTRLTTTAGAPVADNQNSLTAGPRGPVLLQDYQLIEKLAHQNRERIPERVVHAKGWGAHGTLTITHDISRYTRAKLFSAVGKTTPVLARFSTVAGELGAADAERDVRGFSLKFYTEEGNWDLAGNNTPVFFVRDPLKFPDFIHTQKRHPRTHLRSPTAMWDFWSLSPESLHQVTILMSDRGLPLDPMHMNGYGSHTYSFWNDAGERFWVKFHFKTQQGHAHLTNAAAKVVVGESRESYQEALFGTIESGHFPRWTLFVQIMAEREAETTPYNPFDLTKVWPHGDFPLIEVGVLELNRNAENYFAEIEQAAFSPSNVVPGIGHSPDKMLQARVFAYADAHRYRLGTHYEALPVNAPLSPVNHYHKDGPMRFFPNNPNADAYYEPNSFGGPKEDPSVKEPPLRINGDADHYNHREGNDDYVQVGALFALFDEGERQRLFSNIAEAMAGVPEEIIRRQLVHFHRADPAYGEGVAKALGLAPVSQPA

SEQ ID NO: 4321 - protein, 504 aa, Neisseria meningitidis MC58
MTTSKCPVTHLTMNNGAPVADNQNSLTAGPRGPLLAQDLWLNEKLADFVREVIPERRMHAKGSGAFGTFTVTHDITKYTRAKIFSEVGKKTEMFARFTTVAGERGAADAERDIRGFALKFYTEEGNWDVVGNNTPVFFLRDPRKFPDLNKAVKRDPRTNMRSATNNWDFWTLLPEALHQVTIVMSDRGIPAGYRHMHGFGSHTYSFWNEAGERFWVKFHFRTQQGIKNLTNEEAAKIIADDRESHQRDLYEAIERGEFPKWTMYIQVMPEADAEKVPYHPFDLTKVWPKKDYPLIEVGEFELNRNPENFFADVEQSAFAPSNLVPGVGASPDKMLQARLFNYADAQRYRLGVNFRQIPVNRPRCPVHSNQRDGQGRADGNYGSLPHYEPNSFGQWQQQPDFAEPPLKINGDAAHWDYRQDDDDYFSQPRALFNLMNDAQKQALFGNTAAAMGDAPDFIKYRHIRNCYRCDPAYGEGVAKALGLTVEDAQAARATDPALGQAGLL

SEQ ID NO: 4322 - protein, 303 aa, Rosa hybrid cultivar
TKLVCKMPSRLINWQVQFFGREWDFMDLYHLTLFLGVPFVCLLAPFQFTWGALWVAISLYLVSGMGVTISYHRNLAHQSFKVPKWLEYSLAYCAVLSLQGSPLEWVSTHRYHHQFTEKLRDPHSPNKGFWFSHLNWLFDYHSRFGSYDGQLMKNVGDLECQLYYRFLHYTYFLHSVLLGVALYVAGGLPFVIWGMGVRVVVISQVTFSINSICHTWGKQIWDTGDASKNNWLFGLLAFGEGWHNNHHAFEYSARQGLERWQIDTSWYVIKFFQVVGLATHVKLPTEIQKKRKALAKNSIMKDK

SEQ ID NO: 4323 - protein, 329 aa, Beta vulgaris
MTITRFVLNEQSKRPESRGDFTILMSHIVLGCKFVCSAVNKAGLAKLIGLAGETNIQGEEQKKLDVLSNEVFIKALISSGRTCILVSEEDEEATFVEPSLRGKYCVVFDPLDGCSNIDCGVSIGTIFGIYMVKDLNNATLDDVLQPGKNMVAAGYCMYGSSCTLVMSTGSGVNGFTHDPSLGEFILTHPDIKIPKKGKIYSVNEGNAKNWDGPTTKYVEKCKFPKDGSSPKSLRYIGSMVADVHRTLLYGGIFMYPGDKKSPNGKLRVLYEVFPMSFLMEQAGGQAFTGEQRALDLVPKNIHDRSPVFLGSYDDVEDIKALYAAEQKNA

SEQ ID NO: 4324 - protein, 485 aa, Candida tropicalis
MAPTFTNSNGQPIPEPFATQRVGQHGPLLLQDFNLIDSLAHFDRERIPERVVHAKGSGAYGVFEVTDDITDVCAAKFLDTVGKKTRIFTRFSTVGGELGSADTARDPRGFATKFYTEEGNLDLVYNNTPVFFIRDPSKFPHFIHTQKRNPETHLKDANMFWDYLTSNEESVHQVMVLFSDRGTPASYREMNGYSGHTYKWSNNKGEWFYVQVHFISDQGIKTLTNEEAGSLAGSNPDYAQEDLFKNIAAGNYPSWTCYIQTMTEAQAKEAEFSVFDLTKVWPHGKYPMRRFGKFTLNENPKNYFAEVEQAAFSPAHTVPHMEPSADPVLQSRLFSYADTHRHRLGTNYTQIPVNCPVTGAVFNPHMRDGAMNVNGNLGNHPNYLASDKPVEFKQFSLQEDQEVWHGAATPFHWKATPADFKQATELWKVLKKYPNQQEHLAHNVAVHASAADAPIQDRVIAYFTKVHPDLGDLIKKEILELSPRK

SEQ ID NO: 4325 - protein, 275 aa, Xylella fastidiosa Ann-1
MRDPFDMEAERQAWSHSMRLTPLPAFDNNYIWTLIAPDGRAIIVDPGQALPILEAHSKGLIPTAILLTHHHADHIGGVPELLERWPTLPVYAPHDTRIALNYHRIGEGDSLNILGMRFQVIHTPGHTHSHLTFIGNDLLFCGDTLFSLGCGQIFEGTPTQMLASLQRLAALPIQTRVCCGHEYTLSNAAFALHVDPTNTALQKRRQQANAMRLAGLPTLPISLESELNTNPFLRTAAPTIHAATSTHLQRTPIDEVEVFATLRHWKNNFPIKNIP

SEQ ID NO: 4326 - protein, 459 aa, Arabidopsis thaliana
  misc_feature (69)..(69): Xaa can be any naturally occurring amino acid
  misc_feature (433)..(433): Xaa can be any naturally occurring amino acid
MVRRQEEEKKAEKGMRLGKYELGRTLGEGNFGKVKFAKDTVSGHSFAVKIIDKSRIADLNFSLQIQFLXSVQIKREIRTLKMLKHPHIVRLHEVLASKTKINMVMELVTGGELFDRIVSNGKLTETDGRKMFQQLIDGISYCHSKGVFHRDLKLENVLLDAKGHIKITDFGLSALPQHFRDDGLLHTTCGSPNYVAPEVLANRGYDGAASDIWSCGVILYVILTGCLPFDDRNLAVLYQKICKGDPPIPRWLSPGARTMIKRMLDPNPVTRITVVGIKASEWFKLEYIPSIPDDDDEEEVDTDDDAFSIQELGSEEGKGSDSPTIINAFQLIGMSSFLDLSGFFEQENVSERRIRFTSNSSAKDLLEKIETAVTEMGFSVQKKHAKLRVKQEERNQKGQVGLSVTAEVFEIKPSLNVVELRKSYGDSCLYRQXVRETIKRRGHILAGARDSNLGVGVFG

SEQ ID NO: 4327 - protein, 246 aa, Brassica napus
MNIAHTIFGVFGNATALFLFLAPSITFKRIIKNKSTEQFSGIPYPMTLLNCLLSAWYGLPFVSKDNTLVSTINGTGALIERVYVLIFLFYAPKKEKAKIFGVFTAVLAVFATVALVSLFALHGNARKLFCGIAATVFSIIMYASPLSIMRLVIKTKSVEYMPFFLSLFVFLCGTSWFIYGLIGRDPFVAIPNGFGCALGTLQLILSIIYCGNKGEKSAEKDAKSLEMKGEEKKQNVVNGKQQEQQV

SEQ ID NO: 4328 - protein, 466 aa, Streptococcus pyogenes MGAS8232
MKQRKHRYQFPDGFLWGSSTSGPQSEGTVPGDGKGPSNWDYWFSIESAKFHHQIGPEKTSTFYENYKGDIALLKETGHTIFRTSIQWSRLIPEGVGEVNPKAVTFYREVFQDIIAQGIKLIVNFYHFDLPYALQEKGGWENKATVWAYETYAKTCFELFGDLVNTWITFNEPIVPVECGYLGYYHYPCKVDAKAAVQVAYNTQLASSLAVKACHELHSDHKISIVLNMTPAYPRSDAPEDVKAARIAELFQTKSFLDPSVLGVYPAELVSILEEADLLPQYSADELEIIKNNTVDFLGVNYYQPLRVQAPSKSQQEGDPLILDIYFEPYDMPGKKVNPHRGWEIYEPGLYDIALNLKEHYGNIEWLVTENGMGVEGEEAFLADGQIQDDYRITFIEDHLIQLHKALGEGANCKGYLLWTFIDCWSWLNAYKNRYGLVALDLESQKRTIKKSGYWFKALSESNGFDK

SEQ ID NO: 4329 - protein, 192 aa, Welwitschia mirabilis
DDHGEVISEIRRSDLEPYLGLHYPATDIPQASRFLFMKNRVRMICDCYATPVRVIQDKKLPKDLSFCGSTLRAPHGCHAQYMANMGSVACVVMAVMINEREEEEGDSGGQGHQKGRRLWGLIVCHHTSPRFVPFPLRYACEFTMQVFSIQLNKEVELALQLREKNILRTQMLLCDMLLRESPLAIVTQKPNI

SEQ ID NO: 4330 - protein, 364 aa, Vibrio vulnificus CMCP6
MSKLFEPTQLKHLDLQNRVAMAPMTRARTSQPGNIPNAMMATYYKQRASAGLIISEATQISDDSQGYSFTPGVYTDEQVAGWKRVTQAVKSQGAAMFCQLWHVGRVSHPVFQKGEQPIAPSALAPVETKVWIADEQGNGNMVDCVEPRAMTQDDIDRVVSDFAYAAKRAIEAGFDGVEIHGGNGYLIDQFLRTNSNHRTDQYGGSRENRIRFLLQVVDAVSQAIGADKVGVRLAPFITFKDMNCPDIVPTILEASKQLQARDIAYLHLSEADWEDAPEIPESFRIELREYFTNTIIVAGSYTQARADEVLEKGYADLVAFGRPFVSNPDLVARLKHQQPLAELDGATLFGGDERGYTDYTALHV

SEQ ID NO: 4331 - protein, 428 aa, Anabaena variabilis ATCC 29413
MVITKSRLVLGATAVTLSTIAVTSLGIHSRGQALFKASPKELVDEVWQIVQRQYVDGTFNQVDWQAVRKEYLNKSYSNQQEAYKSIREMLKRLNDPYTRFMDPQEFKNMQVDTSGELTGIGITISQDEKTKQLVVIAPIEDTPAFKAGILAKDVILKIDGKSTKGMDTNQAVNLIRGTAGSQVTLTIQRSNQEKQFKITRARIEIHPVRYSQKPTSVGKVGYIRLNQFSANAGKEMQEAIKNLEKQQVAGYILDLRGNPGGLLFSSVEIARMWMDKGTIVSTVDRQGEREREVANGRALTNKPLVILVDKGSASASEILSGALQDNKRAVIVGTQTFGKGLVQSVRPLDDGSGLAVTIAKYLTPNDRDINKHGIDPDVKVELTDAQRQDLWLREREKLGTLDDLQFAKAVEILGKQIAAKGTPTAEKK

SEQ ID NO: 4332 - protein, 221 aa, Petalodiscus platyrachis
DIPQASRFLFMKNKVRMICDCQAPPVQVIQEKRLAQPLSLSGSTLRSPHGCHAQYMANMGSIASLVMSVTINEDDDEMDNDQQRGRKLWGLVVCHHTSPRFVPFPLRYACEFLIQVFGVQVNKEVELAAQMREKHILQTQTVLCDMLLRDAPVAIITQSPNVMDLVKCDGAALYYRSKFWLLGVTPTEAQIRDTAEWLLEYHGGSTGLSTDSLMEAGYPGG

SEQ ID NO: 4333 - protein, 679 aa, Orobanche minor
MGTSGGGCSIVWFRRDLRVEDNPALAAGVRAGAVLPLFIWAPEEEGHYYPGRVSRWWLKQSLSHLDISLRSLGTSLVTRRSTDSVSSLLEVIKLTGAKQIFFNHLYDPISLVRDHRAKEVLTAEGVAVRSFNADLLYEPWEVHDQEGQPFTTFAGFWERCLSMPYDPEAPLLPPKRIISGDLSRCTSDTLVFEDESEKGSNALLARAWSPGWSNADKALTVFTNGPLLEYSKNRRKADSATTSFLSPHLHFGEVSVRKIFHLARIKQVLWANEGNKAGEESINLFLKSIGLREYSRYMSFNHPYSHERPLLGHLKYFPWVIDEGYFKAWRQGRTGYPLVDAGMRELWATGWLHDRIRVVVSSFFVKVLQLPWRWGMKYFWDTLLDADLESDALGWQYISGSLPDGCELDRIDNPQFDGYKCDPNGEYVRRWLPELARLPTEWIHHPWNTPESVLQAAGIELGSNYPLPIVGIDTAKARLQEALSQMWQHETASRAAIENGVEEGLGESSEFTPIAFPPNTQIDMDNEPVRNNPINAITRRYEDQMVPTMTSSLIRVVDEETSIGLDISDNDGRAEVPSNIVNFMEEPRGGPHDDNGVIVDGNDNNGFLQYEFLRGRRHSEDSTAESSSSGRRERDGGVVPVWSPSNSTYPNQFPGEDSGIGTSSSFLPRHPQSASLTSW

SEQ ID NO: 4334 - protein, 224 aa, Petalodiscus leandrianus
DIPQASRFLFMKNKVRMICDCQAPPVKVIQEKGLAQPLSLSGSTLRSPHGCHAQYMANMGSIASLVMSVTINEDDDEMDNDQQRGRKLWGLVVCHHTSPRFVPFPLRYACEFLIQVFGVQINKEVELAAQMREKHILQTQTVLCDMLLRDAPVAIIIQSPNVMDLVKCDGAALYYRSKFWLLGVTPTEAQIRDIAEWLLEYHGGSTGLSTDSLMETGYPGAAIL

SEQ ID NO: 4335 - protein, 243 aa, Zea mays
MGRGRVELKRIENKINRQVTFAKRRNGLLKKAYELSVLCDAEVALIIFSNRGKLYEFCSGQSITKTLERYEKNSYGGPDTAVQNKENELVQSSRNEYLKLKARVDNLQRTQRNLLGEDLGSLGVKELEQLEKQLDSSLRHIRSTRTQHMLDQLTDLQRREQMLCEANKCLRRKLEETSNQVHGQVWEHGANLLGYERHSPQQQAPSHVGNGLFFHPLEAAAEPTLQIGFAPEHMNNFMPTWLP

SEQ ID NO: 4336 - protein, 218 aa, Phyllanthus cf. decipiens Hoffmann et al. 162
DIPQASRFLFMKNKVRMICDCQAPPVKVVQDKQLAQPLSLCGSTLRSPHGCHAQYMANMGTMASLVMSVTINEDDEETDNDQQIGRKLWGLLVCHHTNPRFVPFPLRYACEFLMQVFGVQVNREVELAAQMREKHILRTQTVLCDMLLRDAPVAIVTQSPNVMDLVKCDGAALYYRKKFWLLGVTPTEAQIKEITEWLLEYHGESTGLSTDSLRKLES

SEQ ID NO: 4337 - protein, 438 aa, Arabidopsis thaliana
MANYISSVLKSLLLLLHLVFLIQQHVDSASIVKFLPGFEGSLPFELETGYIGIGEEEEVQLFYYFIKSERNPKEDPLLLWLSGGPGCSSISGLLFENGPLAMKLDVYNGTLPSLVPTTYSWTKTSSMIFLDQPVGTGFSYSRTQQYNKPSDSGEAKRIHEFLQKWLSKHQEFSSNPFYVAGDSYSGMVVPATVQEISKGNYQCCSPPINLQGYVLGNPITEHAIDYNYRIPFAHGMALISDELYESLKRVCKGEYVDPRDTECLKLVEEFSKCTKGVCQEVVIKPLCVTETPNCYIYRYLLTTYWVNDVNVRKALQINKESIGEWVRCYFGIPYTHDIKSSVPYHMNNSINGYRSLIYSGDHDLNVPFLATQAWVRSLNYSIIDNWRPWMIKDQIGGYTKTYANKMTFATVRASGHTAEYKPYETYIMFHRWINGQPL

SEQ ID NO: 4338 - protein, 234 aa, Hordeum vulgare subsp. vulgare
MGRGRIEIKRIENTTNRQVTFCKRRNGLLKKAYELSVLCDAEVALVVFSSRGRLYEYSNNSVKATIERYKKANSDTSNSGTVAEVNAQYYQQESSKLRQQISSLQNSNSRSLVRDSVSTMTLRDLKQLEGRLEKGIAKIRARKNELMYAEVEYMQKREMELHNDNIYLRSKVSENERGQQPMNMMASGSTSSEYDHMVAPYDSRNFLQVNMQQQQHYSQQLQPTALQLGQQYFN

SEQ ID NO: 4339 - protein, 455 aa, Arabidopsis thaliana
MMMNRDILFHQQQQQQMEENMSNLTSASGDQASVSSGNRTETSGSNINQHHQEQCFVPQSSLKRKRNQPGNPDPEAEVMALSPKTLMATNRFICEVCNKGFQRDQNLQLHKRGHNLPWKLKQRSNKDVVRKKVYVCPEPGCVHHHPSRALGDLTGIKKHFFRKHGEKKWKCEKCSKKYAVQSDWKAHAKTCGTKEYKCDCGTLFSRRDSFITHRAFCDALAEESARAMPNPIMIQASNSPHHHHHQTQQNIGFSSSSQNIISNSNLHGPMKQEESQHHYQNIPPWLISSNPNPNGNNGNLFPPVASSVNTGRSSFPHPSPAMSATALLQKAAQMGSTKSTTPEEEERSSRSSYNNLITTTMAAMMTSPPEPGFGFQDYYMMNHQHHGGGEAFNGGFVPGEEKNDVVDDGGGETRDFLGLRSLMSHNEILSFANNLGNCLNTSATAQQQQQHSHQD

SEQ ID NO: 4340 - protein, 611 aa, Fusobacterium nucleatum subsp. nucleatum ATCC 25586 [sequence omitted]

SEQ ID NO: 4341 - protein, 441 aa, Arabidopsis thaliana
MANKYFSSVLKSLLLLLHLVFLSKQHVDSASIVKFLPGFEGPLPFELETGYIGIGEEEEVQLFYYFIKSERNPKEDPLILWLTGGPGCSSISGLLFENGPLTMKLDVYNGTLPSLVSTTYSWTKTSSMIFLDQPVGTGFSYSRTQQFNKPSDSGEAKRIHEFLQKWLGKHQEFSSNPFYVAGDSYSGLVVPATVQEISKGNYECCNPPINLQGYVLGNPLTDYAIDSNSRIPFAHGMALISDELYESLKKTCKGEYTNVHPRNTQCLKFIEEFNKCTNRILQQLILDPLCETETPDCYIYRYLLTTYWANDATVREALQINKESIGEWVRCYRTIPYDNDIKSSMPYHVNNSISGYRSLIYSGDHDLEVPYLGTQAWIRSLNYSIIDDWRPWMIKNQIAGYTRTYANKMTFATIKGGGHTIEFKPEEASIMFQRWINGQPL

SEQ ID NO: 4342 - protein, 232 aa, Hordeum vulgare subsp. vulgare
MGRGRIEIKRIENTTNRQLTFCKRRNGLLKKAYELSVLCDAEVALVVFSSRGRLYEYSNNSVKATIERYKKATSDTSSAGTVAEINAQHYQQESAKLRQQITTLQNSNRTLIGDTMATMSHRDLKQLEGRLDKGLGKIRARKNELLSAEIEYMQRREMELQNNNFYLREKVAETERGQQQTLNMMGAASTSNEYDQNMIQCDPRTFLQFNIMQQPQYYTQQEDRKTLNSVER

SEQ ID NO: 4343 - protein, 210 aa, Phyllanthus nummulariifolius
DLPQASRFLFMKNKVRMICDCQAPPVKVVQDKRLAQPLSLCGSTLRSPHGCHAQYMANMGTIASLVMSVTINDGDEETDNDQQIGRKLWGLVVCHHTKPMFVPFPLRYACEFLMQVFGVQVHREVELAAQTTEKHILQTQTVLCDMLLRDAPVAIVTQSPNVMDLVKCDGAALYYRKKFWMLGVTPTEAQIKDITEWLLEYHGESTGLST

SEQ ID NO: 4344 - protein, 441 aa, Arabidopsis thaliana
MANNNVYSVLKSLLLLLHLVFLSKQHVDSASIVKFLPGFEGPLPFELETGYIGVGEEEEVQLFYYFIKSERNPKEDPLLLWLTGGPGCSAISGLLYQNGPLAMKLDVYNGTLPSLVSTTYSWTKTSSMIFLDQPVGTGFSYSRTQLFNKPSDTGEAKRIHEFLQKWLGKHQEFSSNPFYVGGDSYSGLVVPATVQEISKGNCQCCNRPINLQGYVLGNPLTDCVYDCNYRVPFAHKMALISDELYESLKRTCRGEYVNVHPHDTECLKFVEEFNKLTNRVCERHILHSCCETETPSCYSYRFMLTTYWANDETVRKALQINKESIGEWTRCYRGIPYNHDIKSSVPYHMNNSIDGYRSLIYSGDHDIQVPFLGTQAWIRSLNYSIIDDWRPWMIKDQIAGYTTSYVNKMTFATVTGGGHTAEFTPKETFMMFQRWINGQPL

SEQ ID NO: 4345 - protein, 502 aa, Arabidopsis thaliana; identical to SEQ ID NO: 142

SEQ ID NO: 4346 - protein, 275 aa, Bacillus anthracis str. 'Ames Ancestor'
MHIPTTTLHNGVKMPMIGLGVYKAKEGDEVKQAVKTALEVGYRSIDTATVYENESGVGEAVRESGIPREDIFITTKVWNDDQGYEETLEAFEKSLKKLQMDYVDLYLIHWPIRGKYVDTYRALEKLYEEGKVRAIGVSNFHKHHLELLLPNCKIKPMVNQVELHPMLTQFELRNFCQGEQIQMEAWSPLMRGGEVFQHPIIQAIATKYEKTPAQVILRWDIQSGIVTIPKSVTPSRIQENFSIFDFSLTEEEMTEINTLNRNLHVGTNPDKYDTL

SEQ ID NO: 4347 - protein, 67 aa, Arabidopsis thaliana
KNVVCNFTEGAMYSFPQIRLPTGALQAAKQAGKVPDVFYCLKLLEATGISTVPGSGFWTEKKVLFPF

SEQ ID NO: 4348 - protein, 248 aa, Glycine max
MGRGRVELKRIENKINRQVTFAKRRNGLLKKAYELSVLCDAEVALIIFSTRGKLYEFCSTNSMLKTLERYQKCSYGAVEVSKPGKELESSYREYLKLKARFESLQRTQRNLLGEDLGPLNTKDLEQLERQLDSSLKQVRSTKTQFMLDQLADLQNKEHMLVEANRSLTMKLEEINSRNQYRQTWEAGEQSMPYGTQNAHSQGFFQPLECNPTLQIGSDYRYNPEASEQQLAATTQAQQVNGFIPGWML

SEQ ID NO: 4349 - protein, 365 aa, Yersinia pestis biovar Medievalis str. 91001
MKTAKLFSPLKVGALTLPNRVFMAPLTRLRSIEPGDIPTPLMAEYYRQRASAGLIITEATQISFQAKGYAGAPGLHTQEQLNAWKKVTQGVHNEGGHIAVQLWHVGRISHNSLQPGQQAPVAPSAIAADTRTTVRDETGAWVRVPCSTPRALETEEIPGIINDFRQATANAREAGFDYIELHAAHGYLLHQFMSPASNQRTDQYGGSIENRTRLTLEVVDATAAEWGADRIGIRISPLGPFNGLDNGEDQEEAALYLIDQLNKRNIAYLHISEPDWAGGKPYSDTFRAAVRAHFNGVIVGAGAYSAEKAECLIQKGFIDAVAFGRSYISNPDLVTRLQQHAPLNEPDSNTFYGGGAKGYTDYPTL

SEQ ID NO: 4350 - protein, 612 aa, Arabidopsis thaliana
  misc_feature (386)..(386): Xaa can be any naturally occurring amino acid
MKMDKKTIVWFRRDLRIEDNPALAAAAHEGSVFPVFIWCPEEEGQFYPGRASRWWMKQSLAHLSQSLKALGSDLTLIQTHNTISAILDCIRVTGPTKVVFNHLYDPVSLVRDHTVKEKLVERGISVQSYNGDLLYEPWEIYCEKGKPFTSFNSYWKKCLDMSIESVMLPPPWRLMPITAAAEAIWACSIEELGLENEAEKPSNALLTRAWSPGWSNADKLLNEFIEKQLIDYAKNSKKVVGNSTSLLSPYLHFGEISVRHVFQCARMKQIIWARDKNSEGEESADLFLRGIGLREYSRYICFNFPFTHEQSLLSHLRFFPWDADVDKFKAWRQGRTGYPLVDAGMRELWATGWMHNRIRVIVSSFGVKFLLLPWKWGMKYFWDTLXDADLECDILGWQYISGSIPDGHELDRLDNPALQGAKYDPEGEYIRQWLPELARLPTEWIHHPWDAPLTVLKASGVELGTNYAKPIVDIDTARELLAKAISRTREAQIMIGAAPDEIVADSFEALGANTIKEPGLCPSVSSNDQQVPSVVRYNGSKRVKPEEEEERDMKKSRGFDERELFSTAESSSSSSVFFVSQSCSLASEGKNLEGIQDSSDQITTSLGKNGCK

SEQ ID NO: 4351 - protein, 440 aa, Rhodobacter sphaeroides 2.4.1
MTFSRADFPADFLFGVATSAYQIEGHGAGGAGRTHWDDFAAAPGNVAHAEDGRRACDHYHRWEEDLDFVRDAGFDSYRFSASWARVMPEGRGTVNAEGLDFYDRLVDGMLARGLKPALTLYHWELPSALQDLGGWRNRDIAGWFADYAEVLLGRIGDRVWSTAPVNEPWCVAWLSHFLGHHAPGLRDIRAAARAMHHVLLAHGAAVESARGLGVGNLGAVCNFEHAIPADGSEASAAATRRHDALINRWFVSALFNRQYPEEALDGIAPHLPSGWEKDLDRIAQPLDWFGINYYTRKLVAAAPGPWPGLSEVEGPLPRTRMGWEIHPEGLSDILLRIHEGYTRGLPLIVTENGMAAADRVQAGEVQDPDRIAYLEGHLAAVQRAIAQGVPVRGYHVWSLLDNFEWAFGYDQRFGLVHVDFQNLQRTPKASYHALARALAR

SEQ ID NO: 4352 - protein, 724 aa, Xanthomonas campestris pv. campestris str. ATCC 33913
MTNRWDPGVTRALAEARHGDAFAVLGAHPSTNGRLLRTYHPGAEHVTAVLADGREVPLEAGPEPGLFAGELPAEGRYRLRIGWPGGTQDTADPYAFGPLLSDFDLHLISEGHHLQLADALGANAVEVDGVRGTRFAVWAPNASRVAVVGDFNSWDARRHPMRLRHQAGVWELFVPDVGPGAHYKYQLRGPHGHELPAKADPVARRAELAPGTASIVADPTPHQWSDDGWMATRARRQAHDAPMSIYEIHAGSWLREEGLDLDWDGLADRLIPYVADMGFTHVELMPVTEHPFGGSWGYQPLGLFAPTARFGSPDGFARFVDRCHREGIGVIVDWVPAHFPTDAHGLAHFDGTALYEHADPREGFHRDWNTLIYNHGRREVSGFLIASALEFLQRYHVDGLRVDAVASMLYRDYSRNAGEWVPNIHGGRENYETIAFLRRLNEVVREHAPGAVTIAEESTAWPGVTADVSHGGLGFHYKWNMGWMHDTLHYIGLDPIYRRYHHGELTFSMVYAYSERFVLPISHDEVVHGKGSLLGRMPGDDWQRFANLRAYLGFMFTHPGRKLLFMGCEFGQPTEWNHDAGLPWHLLDDARHRGVQTLVRDLNHLYAQYPALHAHDDDPSGFAWLVGDDAANSVVAFLRKGKRGDAPVLVVINYTPVVQQGYRLGVPQGGLWREVFNSDAGIYGGANLGNGGAVTAEPQSMHGHAQSLPLLLPPLGVIVLAPQG

SEQ ID NO: 4353 - protein, 612 aa, Arabidopsis thaliana
  misc_feature (386)..(386): Xaa can be any naturally occurring amino acid
MKMDKKTIVWFRRDLRIEDNPALAAAAHEGSVFPVFIWCPEEEGQFYPGRASRWWMKQSLAHLSQSLKALGSDLTLIQTHNTISAILDCIRVTGPTKVVFNHLYDPVSLVRDHTVKEKLVERGISVQSYNGDLLYEPWEIYCEKGKPFTSFNSYWKKCLDMSIESVMLPPPWRLMPITAAAEAIWACSIEELGLENEAEKPSNALLTRAWSPGWSNADKLLNEFIEKQLIDYAKNSKKVVGNSTSLLSPYLHFGEISVRHVFQCARMKQIIWARDKNSEGEESADLFLRGIGLREYSRYICFNFPFTHEQSLLSHLRFFPWDADVDKFKAWRQGRTGYPLVDAGMRELWATGWMHNRIRVIVSSFAVKFLLLPWKWGMKYFWDTLXDADLECDILGWQYISGSIPDGHELDRLDNPALQGAKYDPEGEYIRQWLPELARLPTEWIHHPWDAPLTVLKASGVELGTNYAKPIVDIDTARELLAKAISRTREAQIMIGAAPDEIVADSFEALGANTIKEPGLCPSVSSNDQQVPSVVRYNGSKRVKPEEEEERDMKKSRGFDERELFSTAESSSSSSVFFVSQSCSLASEGKNLEGIQDSSDQITTSLGKNGCK

SEQ ID NO: 4354 - protein, 477 aa, Oryza sativa
MGISKGGSGKEAKKPPLLLGRFEVGKLLGQGNFAKVYHARNVATGEEVAIKVMEKEKIFKSGLTAHIKREIAVLRRVRHPHIVQLYEVMATKLRIYFVMEYVRGGELFARVARGRLPEADARRYFQQLVSAVAFCHARGVFHRDIKPENLLVDDAGDLKVSDFGLSAVADGMRRDGLFHTFCGTPAYVAPEVLSRRGYDAAGADLWSCGVVLFVLMAGYLPFQDRNLAGMYRKIHKGDFRCPKWFSPELIRLLRGVLVTNPQRRATAEGIMENEWFKIGFRRFSFRVEDDRTFTCFELDDDAAVDAPTSPPDTPRTVDSGDVGAAPTRPRKAGSLTSCDSAPLNAFDIISFSPGFDLSGLIPEQQKHTARFVSAAPVEVIVATLEAAAAAAGMAVREREDGSISMEGTREGEHGALAVAAEIYELTPELVVVEVRRKAGGAAEYEEFFRARLKPSLRELVCDDRPCPEDSGELSRSL

SEQ ID NO: 4355 - protein, 768 aa, Triticum aestivum
MATFAVSGATLGVARPPAAAQPEELQIPEDIEEQTAEVNMTGGTAEKLESSEPTQGIVETITDGVTKGVKELVVGEKPRVVPKPGDGQKIYEIDPTLKDFRSHLDYRYSEYRRIRAAIDQHEGGLEAFSRGYEKLGFTRSAEGITYREWAPGAHSAALVGDFNNWNPNADTMTRDDYGVWEIFLPNNADGSPAIPHGSRVKIRMDTPSGVKDSISAWIKFSVQAPGEIPFNGIYYDPPEEEKYVFQHPQPKRPESLRIYESHIGMSSPEPKINSYANFRDEVLPRIKRLGYNAVQIMAIQEHSYYASFGYHVTNFFAPSSRFGTPEDLKSLIDRAHELGLLVLMDIVHSHSSNNTLDGLNGFDGTDTHYFHGGPRGHHWMWDSRLFNYGSWEVLRFLLSNARWWLEEYKFDGFRFDGVTSMMYTHHGLQMTFTGNYGEYFGFATDVDAVVYLMLVNDLIHGLHPDAVSIGEDVSGMPTFCIPVPDGGVGFDYRLHMAVADKWIELLKQSDESWKMGDIVHTLTNRRWLEKCVTYAESHDQALVGDKTIAFWLMDKDMYDFMALDRPSTPRIDRGIALHKMIRLVTMGLGGEGYLNFMGNEFGHPEWIDFPRGPQTLPTGKVLPGNNNSYDKCRRRFDLGDADFLRYHGMQEFDQAMQHLEEKYGFMTSEHQYVSRKHEEDKVIIFERGDLVFVFNFHWSNSFFDYRVGCSRPGKYKVALDSDDALFGGFSRLDHDVDYFTTEHPHDNRPRSFSVYTPSRTAVVYALTE

SEQ ID NO: 4356 - protein, 372 aa, Yersinia pestis KIM
MELPMNQSYLWATLLTLAVLCINKSIFNRRFRDCVMKTLGEFIVEKQLDFSHATGELTALLSAIKLGAKIIHRDINKAGLVDILGASGVSNIQGEDQMKLDLFANEKLKAALKARGEVAGIASEEEDDIVIFDGGRAENAKYVVLMDPLDGSSNIDVNVSVGTIFSIYRRITPFGTPITEEDFLQPGTKQVTAGYVVYGSSTMLVYTTGYGVHAFTYDPSLGVFCLSHEKVRYPATGCMYSINEGNYIKFPLGVKKYIKYCQEQDEATKRPYTSRYIGSLVADFHRNLLKGGIYIYPSTASHPQGKLRLLYECNPMAFLAEQAGGKATDGVNRILDIVPEKLHQRAPFFVGTKSMVEDAEGFIAKFPDEEAK

SEQ ID NO: 4357 - protein, 282 aa, Helianthus annuus
MSLVGGFTEVKDFANSIVIDDLARFAVDEYNKKQNTLLEFRKVLNAKEQIVSGTLYYITLDAANGGIIKTYEAKVWVKKWENLKELQEFKPVDAATSVIGGITEVKDFANSLEIEDLARFAVDEHNKKQNTLLEFGKVLNAKEQIVAGKLCYITLEATDGGVKKTYEAKVWVKPWENFKELQEFKPVDAATPVIGGITEVKDFANSLVIDDLARFAVDEYSKKQNTLLEFERVLDAKQQIVAGTMYYFILEATVGGVKNTYVAKVLLKPDNSKELKEFKHLY

SEQ ID NO: 4358 - protein, 219 aa, Arabidopsis thaliana
MAQQSLIYSFVARGTVILVEFTDFKGNFTSIAAQCLQKLPSSNNKFTYNCDGHTFNYLVENGFTYCVVAVDSAGRQIPMAFLERVKEDFNKRYGGGKAATAQANSLNKEFGSKLKEHMQYCMDHPDEISKLAKVKAQVSEVKGVMMENIEKVLDRGEKIELLVDKTENLRSQAQDFRTTGTQMRRKMWLQNMKIKLIVLAIIIALILIIVLSVCHGFKC

SEQ ID NO: 4359 - protein, 520 aa, Candida albicans SC5314
MLRVNSRLLTTRKSQFMFTSNSLRFLATFKPADPLTTHDINPQTVEAKYAVRGKIPIIADELNELIQKQPQSHGLPFSKIINANIGNPQQLEQRPLTWYRQVLSLLQYPDLLKNGDPETVKSLYPEDVIERAQSILKHIGSIGAYSHSQGASYFRQSIAEFITNRDGGYVSHANNIFLTSGASTAVSYLLQILSVNENSGFLIPIPQYPLYTATIALNNAKPIGYYLDESNHWSTNPQEIRELIETNQSQGINIKALVVINPGNPTGAILSSQDIIELIDIAAEYGIVLIADEVYQENIFKGKFVSFKKILSELIEQDPQTYKHVQLASLHSTSKGVSGECGQRGGYMELVGFKPEVKDVVFKLASINLCSVVSGQALMELMINPPQEGDPSYPLYKSETESIHNDLESRAESLYQAFLQMEDIKCNKPMGAMYIFPTLDFDPARYHKLYSRAKNSNLQIDDIYCIELLEGTGICCVPGNGFGQKPDTYHLRTTFLPPGKEWIDKWINFHKSFIKKYKDE

SEQ ID NO: 4360 - protein, 376 aa, uncultured archaeon
MEERGISKHELKLFLKEQKQRDLTYRKVLSSMCTYPHEIAVYAHNLFLDSNLGDSGLFPGTKEIEDELIRMIGALLGNENAHGYISAGGTESNIQAIRAIRNRKRKEGLQQMNIIVPKTAHFSFDKIEDLLSLEVKKAGLDDELRVDVNLVEDLIDDNTISIVGIAGTTEFGQIDPIKELADLAHNSDIFLHVDAAFGGFVIPFLDAEYLFDFSLDAVSSISIDPHKMGLSTIPAGCILFRDVSYLADLAVNTPYLTTNEQCSLIGTRSGAPVAATYAVLKYLGRNGLRAIVDECMQLTRMLVHGAKEMGIYPVIEPVMNVVTLRFPDVERVAKALEARGWQVSTTRAPKALRLVIMPHVTEDTIEMFLNDLENAK

SEQ ID NO: 4361 - protein, 312 aa, Triticum aestivum
  misc_feature (113)..(113): Xaa can be any naturally occurring amino acid
  misc_feature (305)..(305): Xaa can be any naturally occurring amino acid
MARHFLLNTGAKIPSVGLGTWQADPGVVGDAVYAAVKAGYRHIDCARVYGNEKEIGLALKKLFEEGVVKREDLFITSKLWNDHHAPEDVPEALNESLNDLQLDYLDLYLIHWXPFRVKKGTNNNPENFVTPDIPATWGAMEKLHDAGKARAIGVSNFSSKKLGDLLAVARVPPAVDQVECHPCWQQTKLHNFCQSAGVHLSAYSPLGSPGTSWMNGNILKEPIIISISEKLGKTPAQVALRWNIQMGHSVLPKSTNQERIKQNLDVHDWSIPDDVLAKFSEIKEARLLRGNFAVNPQSVYKTHEXELWDGEI

SEQ ID NO: 4362 - protein, 275 aa, Triticum monococcum
MEADASHAPTTSSSSVSSSTLSTSSSSSSLATSALELPKSPKPKHPKKRKRAASDREQDAAANTNGVRGDESSCCSTDEDNAAASVKAAVPKSGFKHPSYRGVRRRSWGKWVSEIREPRKKSRIWLGTFPTAEMAARAHDVAALAIKGRSAHLNFPELAHELPRPDSTSPADIQAAAAKAAATAAVQCEAEPEHEPETPSSSSGAASETPEPAPCAEAAPADSGEVDNALFDLPDLLLDLRDGLFWSPVWPAALAAEEYDGGCCVGLSEPLLWAE

SEQ ID NO: 4363 - protein, 210 aa, Phyllanthus nummulariifolius
DIPQASRFLFMKNKVRMICDCQAPPVKVVQDKRLAQPLSLCGSTLRSPHGCHAQYMANMGTMASLVMSVTINDGDEETDNDQQIGRKLWGLVVCHHTKPMFVPFPLRYACEFLMQVFGVQVHREVELAAQTTEKHILQTQTVLCDMLLRDAPVAIVTQSPNVMDLVKCDGAALYYRKKFWMLGVTPTEAQIKDITEWLLEYHGESTGLST

SEQ ID NO: 4364 - protein, 814 aa, Zea mays
DLPSVLFRRKDAFSRTVLSCAGAPGKVLVPGGGSDDLLSSAEPVVDTQPEELQIPEAELTVEKTSSSPTQTTSAVAEASSGVEAEERPELSEVIGVGGTGGTKIDGAGIKAKAPLVEEKPRVIPPPGDGQRIYEIDPMLEGFRGHLDYRYSEYKRLRAAIDQHEGGLDAFSRGYEKLGFTRSAEGITYREWAPGAYSAALVGDFNNWNPNADAMARNEYGVWEIFLPNNADGSPAIPHGSRVKIRMDTPSGVKDSIPAWIKFSVQAPGEIPYNGIYYDPPEEEKYVFKHPQPKRPKSLRIYESHVGMSSPEPKINTYANFRDEVLPRIKKLGYNAVQIMAIQEHSYYASFGYHVTNFFAPSSRFGTPEDLKSLIDKAHELGLLVLMDIVHSHSSNNTLDGLNGFDGTDTHYFHGGPRGHHWMWDSRLFNYGSWEVLRFLLSNARWWLEEYKFDGFRFDGVTSMMYTHHGLQVTFTGNYGEYFGFATDVDAVVYLMLVNDLIRGLYPEAVSIGEDVSGMPTFCIPVQDGGVGFDYRLHMAVPDKWIELLKQSDEYWEMGDIVHTLTNRRWLEKCVTYCESHDQALVGDKTIAFWLMDKDMYDFMALDRPSTPRIDRGIALHKMIRLVTMGLGGEGYLNFMGNEFGHPEWIDFPRGPQSLPNGSVIPGNNNSFDKCRRRFDLGDADYLRYRGMQEFDQAMQHLEGKYEFMTSDHSYVSRKHEEDKVIIFERGDLVFVFNFHWSNSYFDYRVGCFKPGKYKIVLDSDDGLFGGFSRLDHDAEYFTADWPHDNRPCSFSVYAPSRTAVVYAPAGAEDE

SEQ ID NO: 4365 - protein, 492 aa, Streptococcus mitis
MVRGVDILADTVKVTLGPKGRNVVLEKSFGSPLITNDGVTIAKEIELEDHFENMGAKLVSEVASKTNDIAGDGTTTATVLTQAIVREGIKNVTAGANPIGIRRGIETAVAAAVEALKNNAIPVANKEAIAQVAAVSSRSEKVGEYISEAMEKVGKDGVITIEESRGMETELEVVEGMQFDRGYLSQYMVTDSEKMVADLENPYILITDKKISNIQEILPLLESILQSNRPLLIIADDVDGEALPTLVLNKIRGTFNVVAVKAPGFGDRRKAMLEDIAILTGGTVITEDLGLELKDATIEALGQAARVTVDKDSTVIVEGAGNPEAISHRVAVIKSQIETTTSEFDREKLQERLAKLSGGVAVIKVGAATETELKEMKLRIEDALNATRAAVEEGIVAGGGTALVNVIPAVADLELTGDEATGRNIVLRALEEPVRQIAHNAGFEGSIVIDRLKNAEVGTGFNAATGEWVNMIDQGIIDPVKVSRSALQNAAS

SEQ ID NO: 4366 - protein, 223 aa, Phyllanthus cf. mantsakariva Hoffmann et al. 266
DIPQASRFLFMKNKVRMICDCQAPPVKVVQDKQLAQPLSLCGSTLRSPHGCHAQYMANMGTMASLVMSVTINEDDEETDNDQQIGRKLWGLVVCHHTNPRFVPFPLRYACEFLMQVFGVQVNREVELAAQTREKHILRTQTVLCDMLLRDAPVAIVTQSPNVMDLVKCDGAALYYRKKFWLRGVTPTEAQIKDITEWLLEYHGESTGLSTDSLMEAGYPGAAS

SEQ ID NO: 4367 - protein, 208 aa, Oryza sativa (japonica cultivar-group)
MAGHVLGGAHDAPSAANSVETDALARFAVDEHNKRENALLEFVRVVEAKEQVVAGTLHHLTLEALEAGRKKVYEAKVWVKPWLDFKELQEFRNTGDATTFTNADLGAKKGGHEPGWRDVPVHDPVVKDAADHAVKSIQQRSNSLFPYELLEIVRAKAEVVEDFAKFDILMKLKRGNKEEKFKAEVHKNLEGAFVLNQMQQEHDESSSQ

SEQ ID NO: 4368 - protein, 223 aa, Phyllanthus calycinus
DIPQASRSLFMKNKVRMICDCQAPPVKVVQDKKLAEPLSLCGSTLRSPHGCHSQYMANMGTMASLVISVKINEDDEEIDNDQQIGRKLWGLVVCHHTNPRFVPFPLRYACEFLMQVFGVQVNREVELATQTREKHILQTQSVLCDMLLRDAPIAIVTQSPNVMDLVKCDGAALYYRKKFWLLGLTPTEAQIKDITEWLLEYHGDSTGLTTDSLMEAGYPGAAF

SEQ ID NO: 4369 - protein, 591 aa, Sinorhizobium meliloti 1021
MCGICGEVRFDGGSPSVTAVSIMADVLAPRGPDASGVVVRGNVGLGHRRLRILDLSDKSQQPMVDSDLGLSLVFNGCIYNFRELRLELEEKGYRFFSSGDTEVILKAWHAWGEECVSRFHGMFAFVIHERDSGRVVMARDRFGIKPLYIAEVQGALRFASALPALVKAGGVDTSIDVAALHNYMTFHAVVPPPRTILNGVRKLPPATLRVYERDGSFEDRRYWDPPYRRQAGDAAISREEWQEQLLDALRIAVKRRMVADVPVGVLLSGGVDSSLIVGLLAEAGQRGLMSFSVGFEEANGEKGDEFVYSDLIAGHFGTDHRKIFVPSADLMGALPGTIAAMSEPMVSYDNVGFYLLSKEVSKHVKVVQSGQGADEVFGGYHWYPPLMNSNDVVADYGKAFRDRSHAVLTTQLSDAWIADHDVSGDLLNEHLLREGAATPVDQALRLDSNVMLVDDPVKRVDNMTMAWGLEARVPFLDHELVELAARMPPEEKLRDGGKGILKDVARRVIPSEVIDRKKGYFPVPQLKYIAGPYLDLIRDTLRSQKARERGLFQDAYLDRLFQEPSDHITPLRGSELWQVGLLEMWLEAQGV

SEQ ID NO: 4370 - protein, 675 aa, Haemophilus somnus 2336
MKLPQQLRYLLCLLFGFVLSLNYAVAVEPKLKLTDLVIPQITQENQLATKRTAARLVHSHYQAVELNDEFSQRIFDRYLKALDFNRNTFLQSDIDNMRATYADKIDDVLNEGKLDIAFNMYELLMKRRYERYRYALSLLDEEPDLNGNDQIEIDREKADWPKNETEANKLWEHRVKNDVINLKLKGKKWPEIQTRLVKRYNLAIQHLSKVKSDDIVQLYLNAFAREIDPHTSYLAPRTAKNFNENMNLSLEGIGATLQSEDGETTIKSLVPGAPADRSKKLKAGDKIIGVGQATGEIEDVVGWRIDDVVDKIKGKKGTKVRLEIEPAKGGKSQIITLVRDRVRLEDQAAKLTVETVAGNKIAMIKIPGFYNGLTEDVRKLLAEVEAKKAEALIIDLRGNGGGSLPEAIELTGLFITDGPVVQVRDAHQRIRIYDDPDTEQVYSGPLLVMIDRFSASASEIFSAAMQDYNRAIILGQNTFGKGTVQQSRSLNFVYDSNSMAPLGLLQYTIQKFYRINGGSTQLKGVAPDIIFPSSIDDEEYGEEKEDNALPWDKIPSASYSEVGNARLPVDILNQKHLERIAKDPEFIALDEDLKIRDERKKRKFLSLNFAQRKAENDKDDEKRLKDLNARFKREGKKPLKDLEALPKDYEDPDFYLKEAQKIAVDLIEFNKKMAE

SEQ ID NO: 4371 - protein, 281 aa, Frankia sp. CcI3
MVLSPVPTVPLAHGARMPRLGLGTWPLNDREVQGVVEQALGLGYRLIDTAHNYGNEKGVGAGLRAAGVPREELFVTTKFNKRSHSVRGVRRAAVESTRRMGLDYLDLLLIHWPNPWRDRYVEAWKGLVELLKDGQVRAIGVSNFKTTHLDRLLAQTGVAPDVNQIQLDPRLGRSAIRAYHAEQGIVTEAWSPLGAGTGLLDEPVITRIAAAHERTPAQVALRWHIELGIVVVPKSASPRRMAENIDVFDFTLSAEEIAAISGLDRGAAGEADALDSDVFGH

SEQ ID NO: 4372 - protein, 198 aa, Poranthera corymbosa
VRFLFMKNKARMICDCLATPVEVIQDKRLAQPLSLGGSTLRSPHGCHAQYMANMGSIGSLVMAVTINEDDDEIDNDQLRGRKLWGLVVCHHTSARFVPFLLRYACEFLIQVFGVQINKEVELAAQMKEKHILQTQTVLCDMLLRDAPVGIITQSPNVMDLVKSDGAALYYRKKFWLIGVTPTEAQIRDVADWLLQYHS

SEQ ID NO: 4373 - protein, 416 aa, Streptococcus pyogenes MGAS10394
MVYNMEYEVYETMKIIEKSSKLEHVAYDIRGPVLDEANRMIASGEKILRLNTGNPAAFGFEAPDEVIRDLIVNARLSEGYSDSKGIFSARKAIMQYCQLKGFPDVDIEDIYLGNGVSELISMSLQALLDNGDEVLVPMPDYPLWTACVSLGGGKAVHYLCDEEAGWYPDIADIKSKITSRTKAIVVINPNNPTGALYPKEILEDIVALAREHQLIIFADEIYDRLVMDGKEHIAIASLAPDVFCVSMNGLSKSHRIAGFRVGWMVLSGPKDHVKGYIEGLNMLANMRLCSNVLAQQVVQTSLGGHQSVDALLLPGGRIFEQRNFIYEAINAIPGLSAVKPEAGLYLFPKIDRQMYRIDDDEEFVLQLLKQEKVMLVHGRGFNWKDPDHFRIVYLPSVEELEDVQEKITRVLYQYRR

SEQ ID NO: 4374 - protein, 221 aa, Pseudolachnostylis maprouneifolia
LNLKIPLMKNKVRMICDCLAPPVKVIQDKRLPQPLSLCGSTLRSPHGCHSQYMANMGSIASLVMSVTINEDDNEMDSDQERGIKLWGLVVCHHTSPRFVPFPLRYACEFLIQVFGVQISKEVQLAAESREKHILQTQTVLCDMLLRDAPVAIITQSPNVMDLVKCDGAALYYRKKFWLLGITPTEAQIKYIADWLLEYHGESTGLSTDSLMEAGYPGATIL

SEQ ID NO: 4375 - protein, 210 aa, Haemophilus somnus 2336
MNIEIVPVTAFQQNCSIIWDNNKSAAIIDPGGEATKLIKRIEELGLNLELILLTHGHIDHVGAALKLKQYFNVEIWGSNEKDDFLFNSLPQQSEQFGLLFETEVFKPDRWLNQEYEIVRIGEMNFEVLHLPGHTPGHVGFIEYSKKIAFTGDVLFQNSIGRTDFPRGNHTELIQSIRDKLWKLDDDMIIISGHGNYTTIGKEKKYNPYIR

SEQ ID NO: 4376 - protein, 92 aa, Kluyveromyces lactis
ARPAFVNKLWSMVNDKSNEKFIHWSTSGESIVVPNRERFVQEVLPKYFKHSNFASFVRQLNMYGWHKVQDVKSGSMLSNNDSRWEFENERHA

SEQ ID NO: 4377 - protein, 704 aa, Rhodobacter sphaeroides 2.4.1
MTAAAQPSGLPGLATAPGRPWPLGASFDGEGVNFALFSAHAEKVELCLFAPDGRREALRLPLTERDGDIWHLKVNGLLPGQLYGYRVHGPYQPEQGHRFNPNKLLIDPYARKLEGRLRWSDAVMGYRVGSARADLSFDGRDSAFAVPKSVVVGHNFNWGPDAPPERALTETLIYEAHVKGLTALHPGVEDGLRGTFLGLASDPILEHLTRLGVTAVELLPVQAFLDDRFLVNRGLSNYWGYQTVGFFAPDPRYLAKGALWEFAAMVRRFHAAGIEVILDVVYNHTGESDELGPTLSFRGIDNRSYYRLTEGGRRYANMTGTGNTLDLSHPMVLRMVMDSLRYWVEVMHVDGFRFDLASTLGREEDAFDEQGAFFDAIRQDPVLTRVKLIAEPWDLGPGGYRLGGFPHPFLEWNDKFRDDVRRFWRGEGGMTGDLARRLLGSAERFDHHSRAATSSVNFVTAHDGFTLLDLVSHARKHNEANGEDNRDGHDDNHSDNMGLEGPTTDAGILAARALRRRNLLATLFLSQGTPMLLGGDEIGNGQGGNNNAYAQDNPIGWIDWDRPDETMLAFVARISELRRSLPVLRQKGFLHGRIREADGLRDVVWRLPDGREPGPQDWHSPAMSCLCVEIRMDADRPDAGESPVFAVFNAGEAVPLALPPVPESWSLVLDTTRPEAGPEPAAPGLEAPARSVLVFVPAPPGETG

SEQ ID NO: 4378 - protein, 154 aa, Lycopersicon esculentum
MSLIPRIFGDRRSSSMFDPFSIDVFDPFRELGFPSTNSGESSAFANTRIDWKETPEAHVFKVDLPGLKKEEVKVEVEEDRVLQISGERNVEKEDKNDKWHRMERSSGKFMRRFRLPENAKMDQVKASMENGVLTVTVPKEEVKKPEVKSIEISG

SEQ ID NO: 4379 - protein, 543 aa, Lactobacillus gasseri
MAKDIKFSENARRSLLKGVDKLADTVKTTLGPKGRNVVLEKSYGAPDITNDGVTIAKSIDLKDHFENMGAKLVSEAAQKTNDIAGDGTTTATVLTQAIVREGMKNVTAGANPVGIRRGIETATKAAVDELHKISHKVSTKDEIAQVASVSSASTEVGNLIADAMEKVGHDGVITIEESKGIDTELSVVEGMQFDRGYLSQYMVTDNDKMEADLDNPYILITDKKISNIQDILPLLQEIVQQGKSLLIIADDVDGEALPTLVLNKIRGTFNVVAVKAPGFGDRRKAMLEDIAILTGGTVISSDLGLELKDTKIDQLGKAGKVTVTKDSTTIVEGAGSKDAISERVDQIKKQIADTTSDFDREKLQERLAKLAGGVAVIKVGAATETELKERKYRIEDALNATRAAVEEGYVAGGGTALVDVMKSIQGNVKGDSQDAQTGVNIVMKALGAPVRQIAENAGKDGAVILDHLEHEDPEIGYNAATDKWENMVKAGIIDPTKVTRSALQNAASIAALLLTTEAVVADAPEDDKNQAPAAPNPGMGMGM

SEQ ID NO: 4380 - protein, 485 aa, Oenococcus oeni PSU-1
MTETTKSGLRKDFLWGGAVAANQLEGAWDVDGKGVSVSDIMTAGAYQKPREITDGIIAGKNYPNHEAIDFYHHYKDDIKMFAEMGFKCFRTSIAWTRIFPNGDETEPNEAGLKFYDDMFDECLKYGIEPVITLSHFEMPYHLVTEYGGWRNRKVIDFFVKFATVCFKRYKDKVKYWMTFNEINNQTTFTNDFSIATDSGLIFRNKESEAEREALMYQASHYEVVASALAVKIGHKINPDFEIGNMVNFTPVYPASSDPKDILLAEKAMQRRYWWADVQALGEYPVGMEAYFKNHDLRPDITAEDRVVLREGTVDYVGFSYYNSMTVKYSDDNPEFKFVGDREAVKNPNLKYNDWGWPVDPVGLRYSMNWLTEHYHKPVMIVENGFGAYDKVESDGSIHDDYRVDYLRAHVKQMITAVNEDGVDLMGYTPWGCIDLVSAGTGQMSKRYGFIYVDKDDEGNGTLERSKKDSFYWYQKVIRSNGLDLD

SEQ ID NO: 4381 - protein, 687 aa, Candida glabrata CBS138
MGNTSSKTKTSIKKKGKKLSNVAVPPALSKSDTTQSTKSVRSQSSRHSDVSRPTHSRKSSIHNFGASSEALNTEEPPLASTNDTRKGTENMSANNSISNNIGGLSNSGGNNTEGNNYLTAGTSMNNARRASSSRRSSYNHGELPPSMIQIEPKPPILRNSKTLSSANSFAYDENALTDDDENNNSISNNNDNSIVHTFGRDRNLSATEFQRTSSMSSSSRMRRKSDNSGIDRGDTPIGKSSLHRTNSMASSLLSRKSSFGSNGNTEYSTPLHSPAAVLDGNRGDYFGAQPGENNNLDTIGGNRDKLAELNNDKYRKSSMSSNQSGHSKLQIDAYPSISSDVAIAEAQTEIGIDTKKKKPVKPIDIDETIQKLLDAGYAAKRTKNVCLKNSEIAQICQKAREIFLAQPALLELSPSVKIVGDVHGQYGDLLRLFTKCGFPPMANYLFLGDYVDRGKQSLETILLLLCYKIKYPENFFLLRGNHECANVTRVYGFYDECKRRCNIKTWKTFIDTFNTLPLAAIVTGKIFCVHGGLSPVLNSMDEIRHVSRPTDVPDFGLINDLLWSDPTDSPNEWEDNERGVSYCYNKVAINKFLNKFGFDLVCRAHMVVEDGYEFFNDRSLVTVFSAPNYCGEFDNWGAVMSVSEGLMCSFELLDPLDSAALKQVMKKGRQERKLAAQQQHQQQLQQD

SEQ ID NO: 4382 - protein, 220 aa, Sauropus androgynus
INLKIPVLKNKVRMICDCQAPPVKVVQDKRLAQPLSLCGSTMRSPHGCHAQYMANMGTIASLVMSVTINEEDEETVNDQQIGRKLWGLVVCHHTNPRFVPFPLRYACEFLMQVFGVQVNREVELAAQTTEKHILQTQTVLCDMLLRDAPVAIVTQSPNVMDLVKCDGAALYYRKKFWMLGVTPTETQIKDITEWLLEYHGESTGLSTDSLMEAGYPGAAI

SEQ ID NO: 4383 - protein, 1239 aa, Ustilago maydis 521
MSSSQRPVVQPIPPFKGAPLQATDVQNRRPTAAEAYVALANRKAGANVVSTRATGCENHRPSQHQPTSHHASQRQQPAPAADRRVQQSQPSERPKPASRLEREKKRHHNDPKNIGHWRLDKLIGQGASGRVRLAIHDQTGQKAAVKIIPRTLINASRMSLRDADVKANKMILGIEREIVIMKLIEHPNLLGLWDVYETSKDLFLIMEYVAGGELFDHLVAQGKLSPRDARGYFRQIIFGMDYCHRFNICHRDLKPENLLLDETKKIVKVADFGMAALQPTEKMLETSCGSPHYASPEIVSGKRYKGTASDIWSCGIILFALLCGRLPFDDPNIQQLLGKVRAGKFIMPEWLEPASKDLIWRMLEVDPEKRIKMADIMRHPWFTNNGTESSVNPVSTSLDSLQMEELTLDTIDIDILGNLKTLWFELSEQDIIKELLAPGPSWQKTFYTLLVAHRENHSADDEDDMNDDILDEQIVTASAVPAHALLSTTSAAKTLEKPRPRRTSDAAGATSAPASPRLESVEMDRRHSTPEKGSVYHTTSRRPDNVTPPKVASPHVRPANPSPRLRPSPLDSPASTLDSAFVSASKLKVASPTKPRALGSSHGADKSGYVLPQISLQTASPQRNERPAVDLQRRNTSPTKPNTVGVTAPLSARIALANMYDAPTLSHTATASCGSTSSTASSTVSVSAARNRANRGSGSEMMPPLALPGRASSRPVSPTKSTFGAQATLPPQTAPQPAPPRPSTSRAYTTQPTPCIQVPQVGDATMQRFFQEIADELASIRATGEKPDALQSKLDQLKNSMAWQQQQQQQQLQSQPMAVTASAPSARTRNSEMNQFEDAEDDVSEGESMRSVSQASSHQQTYTPSTPMTPLSPVELIAPLALTDKSGAGARSSVASSSASASARNSVRSARSGTEASSSGTTSRPTSVFSNISTGSTGLGRKRSLLGLRRADKHAQQQHATATEANTIRSIAYESTPTPTALASVFAAPASGRFVPNGGATTASSVRMQRLNPGLGLDIGASSAAGIISPPSTPQSPNTATLSPAPAASASAIASASAPGKKDSWFAGLFNWKPATFTLMSSENFSETLTECIRRLQSYGVRVAMDDSSDVHHTTLKCSINEYRESNGVVTAAKPLRFRVDVHILAVGSPATNSAYMGGGLGLSLHGGAVGTNVNATSIMTHGLPSPALSTYSRASTPGGVTFATSVLVVQEKGALSTFKLIHARLRREWMLDLGSAII

SEQ ID NO: 4384 - protein, 595 aa, Pseudomonas putida KT2440
MCGLAGELRFTPIDQAPRPADLAAVERITHHLAPRGPDAWGFHSQGPIALGHRRLKIMDLSDGSAQPMVDNTLGLSLAFNGAIYNFPELREELQALGYSFWSDGDTEVLLKGYHAWGAALLPKLNGMFALAIWERDNQRLFLARDRLGVKPLYLSRNGERLRFASTLPALLKGGDIDPMLDPVALNHYLNFHAVVPAPRTLLANVQKLEPGTWMRIDRHGEVERQVWWQLHYGPHPDERELDLEGWTTRVLDATRDAVAIRQRAAVDVGVLLSGGVDSSLLVGLLREVGVDDLSTFSIGFEDAGGERGDEFQYSDLIAKHYGTRHHQLRIAEHEIIDQLPAAFRAMSEPMVSHDCIAFYLLSREVAKHCKGVQSGQGADELFAGYHWYPQVDGADDAYAAYREAFFDRSHAEYRDTVQAPWLLETDAAGDFVREHFARPGAPAAVDKALRLDSTVMLVDDPVKRVDNMTMAWGLEARTPFLDYRLVELSARIPARFKLPDGGKQVLKQAARRVIPHEVIDRKKGYFPVPGLKHLEGATLGWVRELLTDPSQDRGLFNPTMLDRLLSNPHGQLTPLRGSKLWQLAALNLWLSEQGI

SEQ ID NO: 4385 - protein, 221 aa, Thecacoris madagascariensis
  misc_feature (220)..(220): Xaa can be any naturally occurring amino acid
YTSSSRFLFMKNKVRMICDCRATPVKVIQDNKLAEPLNFCGSTLRSPHGCHAQYMENMGSIASLVMAVTINEDDDEIENDQSKGSKLWGLVVCHHTDPRFVPFPLRYACDFLIQVFGVQVNKEIQLVAQTREKHILQTQTVLCDMLLRDAPVAIITQSPNVMDLVKCDGAALYYRKKFWLLGVTPTEEQIKDIAEWLLEYHGESTGLNIDTLMEAGYPGXS

SEQ ID NO: 4386 - protein, 382 aa, Arabidopsis thaliana
MNRRQQVKRRVGKYEVGRTIGEGTFAKVKFARNSETGEPVALKILDKEKVLKHKMAEQIRREIATMKLIKHPNVVQLYEVMASKTKIFIILEYVTGGELFDKIVNDGRMKEDEARRYFQQLIHAVDYCHSRGVYHRDLKPENLLLDSYGNLKISDFGLSALSQQVRDDGLLHTSCGTPNYVAPEVLNDRGYDGATADMWSCGVVLYVLLAGYLPFDDSNLMNLYKKISSGEFNCPPWLSLGAMKLITRILDPNPMTRVTPQEVFEDEWFKKDYKPPVFEERDDSNMDDIDAVFKDSEEHLVTEKREEQPAAINAFEIISMSRGLNLENLFDPEQEFKRETRITLRGGANEIIEKIEEAAKPLGFDVQKKNYKVSENSVTEMK

SEQ ID NO: 4387 - protein, 164 aa, Triticum aestivum
MEGRMFGLETPLMTALQHLLDVPDGEAGGPGNAAGEKQGPTPTRAYVRDARAMAATPADVKELPGAYAFVVDMPGLGSGDIKVQVEDERVLVISGERRREEKEDAKYLRMERRMGKLMRKFVLPENADMEKISAVCRDGVLTVTVEKLPPPEPKKPKTIQVQVA

SEQ ID NO: 4388 - protein, 245 aa, Akebia trifoliata
MCILITDFPNRSSNNSPQRKMGRGKIEIKRIENTTNRQVTFCKRRNGLLKKAYELSVLCDAEVALVVFSNRGRLYEYSNNSVKTTIERYKKACVDSSNSGSVSEANAQFYQQESLKLRQQIGNLQNLNRHLMGEALGSMSIKELKQLETRIEKGISRIRSKKNELLFAEIEYMQKREIDLQNDNMYLRAKIAENERAGQHMNLMPGNEYEVMSSAPFDSRNFLQVNLLEPNNHYSHTDQTALQLG

SEQ ID NO: 4389 - protein, 442 aa, Nicotiana tabacum
MATSVSTIGAVNKTPLSLNNSVAGTSVPSTAFFGKTLKKVYGKGVSSPKVTNKSLRIVAEQIDVDPKKQTDSDRWKGLVQDFSDDQQDITRGKGMVDSLFQAPTGTGTHHAVLQSYEYVSQGLRQYNLDNKLDGFYIAPAFMDKLVVHITKNFLKLPNIKVPLILGIWGGKGQGKSFQCELVFRKMGINPIMMSAGELESGNAGEPAKLIRQRYREAAEIIRKGNMCCLFINDLDAGAGRMGGTTQYTVNNQMVNATLMNIADNPTNVQLPGMYNKQENARVPIIVTGNDFSTLYAPLIRDGRMEKFYWAPTREDRIGVCTGIFRTDNVPAEDVVKIVDNFPGQSIDFFGALRARVYDDEVRKWVSGTGIEKIGDKLLNSFDGPPTFEQPKMTIEKLLEYGNMLVQEQENVKRVQLADKYLKEAALGDANADAINNGSFFAS

SEQ ID NO: 4390 - protein, 154 aa, Lycopersicon esculentum
MSLIPRIFGDRRSSSMFDPFSIDVFDPFRELGFPSTNSGESSAFANTRIDWKETPEAHVFKVDLPGLKKEEVKEEVEEDRVLQISGERNVEKEDKNDKWHRMERSSGKFMRRFRLPENAKMDQVKASMENGVLTVTVPKEEVKKPEVKPIEISG

SEQ ID NO: 4391 - protein, 154 aa, Lycopersicon esculentum
MSLIPRIFGDRRSSSMFDPFSIDVFDPFRELGFPGTNSGESSAFANTRIDWKETPEAHVFKADLPGLKKEEVKVEVEEDRVLQISGERNVEKEDKNDKWHRVERSSGKFMRRFRLPENAKMDQVKASMENGVLTVTVPKEEVKKPEVKSIEISG

SEQ ID NO: 4392 - protein, 130 aa, Triticum aestivum
  misc_feature (54)..(54): Xaa can be any naturally occurring amino acid
  misc_feature (71)..(71): Xaa can be any naturally occurring amino acid
  misc_feature (79)..(79): Xaa can be any naturally occurring amino acid
  misc_feature (105)..(105): Xaa can be any naturally occurring amino acid
  misc_feature (111)..(111): Xaa can be any naturally occurring amino acid
  misc_feature (117)..(117): Xaa can be any naturally occurring amino acid
  misc_feature (125)..(125): Xaa can be any naturally occurring amino acid
RVKDPKVSLDFYSRVMGMSLLKRLDFPEMKFSLYFLGYEDLSAAPADPVQRTGXGTFGQKATIDSLNNWGXTESDPGIXKGTIMGIKPSLGSGHIRVTGDMSYKXSNVSKXLGVNFXEEPNYWKXKDPSR

SEQ ID NO: 4393 - protein, 441 aa, Arabidopsis thaliana
MANDYISFVFKSLLLLIHLVFLGQHHVDSASVVKSLPGFEGPLPFELETGYIGVGEEEEVQLFYYFIKSERNPKEDPLLLWLTGGPGCSAISGLLYENGPLTMKLDVYNGTLPSLVSTTYSWTKNSSMIFLDQPVGTGFSYSRTELFNKPSDTGEAKRIHEFLQKWLGKHQEFSSNPFYVGGDSYSGITVPATVQEISKGNYQCCKPPINLQGYMLGNPITDSKIDGNSQIPYAHGMALISDELYESLKRICKGEYEHVDPYNTECLKLLEEFNECTSKLYRSHILYPLCEMTNPDCYIYRYSLSHYWVNDETVRKALQINKESIREWKRCDWSKPYTKDIISSVPYHMNNSINGYRSLIFSGDHDFEVPLIGTQVWIKSLNYAIVDKWRPWMINNQVAGYTRTYANKMTFATVKGGGHTAEYKPDETFIMFQRWINGQAL

SEQ ID NO: 4394 - protein, 372 aa, Oryza sativa (japonica cultivar-group)
MLRRWFCCTQFHAPYREHENEFPDIPEEKEDLNLFVNIWLAGNGFAPKSDDPTKAPPPIEVPELSFDELKEKTDNFGSKALVGEGSYGRVYYATLDNGKQVAVKKLDASTEPEVDNDFLTQVSIVSRLRHENFVEMLGYCVEGNQRLVAYEFATMGSLHDILHGRKGVPGAQPGPALDWMQRVRIAIDAAKGLEYLHEKVQPSIVHRDIRSSNVLLFEDYKAKIADFNPSNQSPDMAARLHSTRVLGTFGYHAPEYAMTGQLTQKSDVYSFGVVLLELLTGRKPVDHTMPRGQQSLVTWATPRLTEDTVKQCVDPRLKGEYPPKGVAKLAAVAALCVQYESEFRPSMSIVVKALSPLLQHKPPPPPAVAPET

SEQ ID NO: 4395 - protein, 430 aa, Mycobacterium avium subsp. paratuberculosis K-10
MDSDGTIGGVTTHQLPVHSSAHHRQQRTFAQSSKLQDVLYEIRGPVHQHAARLEAEGHRILKLNIGNPAPFGFEAPDVIMRDMIQALPYAQGYSDSQGILPARRAVVTRYELVDGFPRFDVDDVYLGNGVSELITMTLQALLDNGDEVLIPSPDYPLWTASTSLAGGTPVHYLCDETQGWQPDIADLESKITERTKALVVINPNNPTGAVYSGEILSQMVDLARKHELLLLADEIYDKILYDDAKHINVASLAPDMLCLTFNGLSKAYRVAGYRAGWLAITGPKDHAGSFIEGINLLANMRLCPNVPAQHAIQVALGGHQSIEDLVLPGGRLLEQRDVAWSKLNEIPGVSCVKPAGALYAFPRLDPEVYDITDDEQLVLDLLLQEKILVTHGTGFNWPAPDHLRIVTLPWARDLAAAIERLGNFLVGYRQ

SEQ ID NO: 4396 - protein, 375 aa, Bacillus cereus G9241
MTSSNNKAASIYEGTNINAWGSFENIEETKLFDPIQIGSWSLRNRIAMAPMTRCFANHETGVVGADVVEYYRKRAADGVGFIITEGIVISPRAKGNPGVPGIYTQEQIDSWKPVTEAVHKEGGTIIAQIWHVGRMSHHEIIGGKMPQAPSAIAAEGNVPRFRKPFDTPEAMTLEEIQEVISQYAQAAKNAIEAGFDGVEIHGAHGYLIDQFTYEFANKRTDKYGGDLKQRLTFMKEVTEAVIEAVGADKTLLRFSAFKGDNPTYMWENPELAIETFVNMFKEVGLTMIHPSTMNYTQVIADGKNFHQLVRKYWDATIVGVGNLNPKEAEEALQEGTIDVAAFGRPLIANPDFVHRIKHAESLVEYDAKEHLATLI

SEQ ID NO: 4397 - protein, 256 aa, Thiobacillus denitrificans ATCC 25259
MLTLIPLPAFEDNYIWVWHDAKYAVAVDPGDPAVLSTYLDSRGLALAAVLVTHHHRDHTGGNTWLRQRYNCAIYAPDNPRIPAVSHVVRGGDSVAVPELGLALAVLATPGHTLDHVSYVGNGHLFCGDTLFGCGCGKLFEGDAAMMSASLDALAALPPTTRVCCAHEYTLSNIDFAKTIDGANPALLERERIDRAARAQNRPTLPSTLALERTTNPFLRFHDADMRAFAVGELGSPDPGPATVFGAIRAAKDRWDG

SEQ ID NO: 4398 - protein, 139 aa, Nicotiana tabacum
LDIFDPFEGFPFSGTVANVPSSARETSAFANARIDWKETPDSHIFKMDVPGIKKEEVKVEVEEGRVLQISGERSREQEEKNDTWHRMERSSGKFMRRFRLPENAKMEEIKAAMENGVLTVTVPKEEEKKSEVKAIDISG

SEQ ID NO: 4399 - protein, 269 aa, Brassica napus
  misc_feature (104)..(104): Xaa can be any naturally occurring amino acid
  misc_feature (110)..(110): Xaa can be any naturally occurring amino acid
  misc_feature (119)..(119): Xaa can be any naturally occurring amino acid
  misc_feature (144)..(144): Xaa can be any naturally occurring amino acid
  misc_feature (156)..(156): Xaa can be any naturally occurring amino acid
PFCLYTFQNKKLILDRLSVHTVIARLSDQSSKIYQYTAQTQKKRKTVPPPHSLISCHVDRRTVIPVVTTDFTGTFTFIAARCLLKLPSFTNKFFGNCEGHIFKXVVDNGXLTYFVEGDXAGRLIPKAFLERVKDDFNKRYGGGXAATAQANSLNKXEFGSKLKEHMQYCMDHPDEISKLAKVKAQVSEVKGVMMENIEKVLDRGEKIELLVDKTENLRSQAQDFRTQGTQMRRKMWFQNMKIKLIVLAIIIALILIIVLSVCGGFNCGK

SEQ ID NO: 4400 - protein, 706 aa, Fusarium oxysporum
MAPRGFEDEELTISLSSSHVRRPQQQQQQQSQQQQQHASSDAPTPGSRPADAPLKERIKTEQRIGAYKVLRTLGEGSFGKVKLAIHNGTGQQVALKIIARKKLISRDMAGRVEREIEYLQLLRHPHIIKLYTPNEIIMVLEYAGGELFDYIVQHGRMKEPEARRFFQQMLCAVEYCHRHKIVHRDLKPENLLLDENLNVKIADFGLSNIMTDGNFLKTSCGSPNYAAPEVIGGKLYAGPEVDVWSCGVILYVLLVGRLPFDDEHIPSLFAKIAKGTYSIPQWMPAGAANLIKKMLVVNPVHRATIEDIRADPWFTTDLPAYLQLPVEEFFNTGVDPNKAIKKNDIAPNASEKVQERLHNEVTEKISKTMGYGKSDVEEALQAAEPAAIKDAYMIVRENKMMQVNHNPEALLAEPEGSSPMLSMSSARSTTSQATTTPRPYVSKVGILPSSLPAYHKDYMEREKAGSVENSPPKVLINDEPPSNRTDAEKEETARRLRPHSRSQLRMDEANTRPQGMTPINPPKKNKPVRWQFGIRSRNSPWEALLCIHKALHKLGATYIPDEDYESRTAEERAEASGEGSFADSHDNNRGSSSSIDPKKRYNLPADPWHINVRWDTSAIKKKAASVPGTPSSPSTPEGQHHPKEPFVALHMDIQIYEMEHGVYLVDFKCSGYETAHGRLLEEKDVTSPFPFLDMAAKLIMQLAEAD

SEQ ID NO: 4401 - protein, 137 aa, Nicotiana tabacum
IFDPFEGFPFSGTVANVPSSARETSAFANARIDWKETPDSHIFKMDVPGIKKEEVKVEVEEGRVLQISGERSREQEEKNDTWHRMERSSGKFMRRFRLPENAKMEEIKAAMENGVLTVTVPKEEEKKPEVKAIDISG

SEQ ID NO: 4402 - protein, 487 aa, Streptomyces avermitilis MA-4680
MTQAPQKAPYTTNNVGIPVESDEHSLTVGPDGPILLQDHYLIEKMAQFNRERVPERVVHAKGSGAYGFFEVTNDVSQFTKADLFQPGKRTEMLARFSTVAGEQGSPDTWRDPRGFALKFYTEHGNYDMVGNNTPVFFVRDTIKFQDFIRSQKRHPVTGLRSNDMQWDFWTLSPESAHQVTWLMGDRGIPKTYRHMNGYSSHTYMWINGAGERFWVKYHFKTDQGIDFLTQAEADELAGSDADKHRRDLFESIESGNAPTWTLKVQIMPFEDAADYRFNPFDLTKVWPHGDYPLIDVGRMVLNKNPEDYFIHIEQAAFEPSNLVPGIGPSPDKMLLGRLFSYPDTHRYRIGPNYAQLPPNRPHAPVNSYAKDGPMRYVPSNAARPYAPNSYGGPAADYGQFGDPASWETAGELVREATKPHREDDDWGQPGTMVRQVLDDAARDRLVSNVSGHLKADVSRPVLDRAVQYWRNIDKEIGDRIASNVNGG

SEQ ID NO: 4403 - protein, 617 aa, Zea mays
  misc_feature (62)..(62): Xaa can be any naturally occurring amino acid
  misc_feature (85)..(85): Xaa can be any naturally occurring amino acid
  misc_feature (103)..(103): Xaa can be any naturally occurring amino acid
  misc_feature (156)..(156): Xaa can be any naturally occurring amino acid
  misc_feature (402)..(402): Xaa can be any naturally occurring amino acid
ITMDPTKFRPSSSHDTTVTTTNAGAPVWNDNEALTVGPRGPILLEDYHLIEKVAHFARERIXPERVVHARGASAKGFFECTHDVXPSLTCADFLRAPGVRTPXVIVRFLDGDPRERGSPGDDPRTPRGVPPVKVLPPARGNWGTCLGKQTFPVFFXIRDGIKFPDVIHAFKPNPRSHVQEYWRVFDFLSHLPESLHTFFFLFDDVGVPSDYRHMEGFGVNTYTFVSAAGKAQYVKFHWKPTCGVRCILTDEEAALVGGRNHSHATQDLYDSIAAGSFPEWTLYVQVMEPDTEEQYDFDPLDDTKTWPEDLLPLRPVGRLVLDRNVDNFFNENEQLAFGPGLVVPGIYYSDDKMLQCRVFAYADTQRYRLGPNYLMLPVNAPRCAHHNNHYDGAMNFMHRDEXVDYYPSRHAPLRQAAPPTPLPPRPVAGRREKATIRKPNDFKQPGERYRSWDADRQDRFVRRFADSLGHPKVSQELRSIWIDLLAKCDASLGMKIATRLNMKANIVGVHTAAFCHPQAAAPQAPRRRPAAAAAASTHGAVASINRQRALRTPAIREKSSIHGVIGCNSPRDPRYLHCPRDPRSLHCHRDAASPSPPPVADFADLHARRGFRLPQAP

SEQ ID NO: 4404 - protein, 144 aa, Glycine max
  misc_feature (62)..(62): Xaa can be any naturally occurring amino acid
  misc_feature (94)..(94): Xaa can be any naturally occurring amino acid
  misc_feature (107)..(107): Xaa can be any naturally occurring amino acid
FAFLISYDNPGILAGLGCSASSQAKRGRGLELSRIQAHRGPDWSQLHQYGDHYLAHHRLAIXDPAHGEHPLFNADYTESVPVNGEIYNHEELMXQLPNDTFQTGCDXDVIAHLHEEHGDYYMDMLDGIFSAALLDSRDSMHIVA

SEQ ID NO: 4405 - protein, 384 aa, Burkholderia sp. 383
MTQQFASLFQPFTFPNGITLRNRVLMAPMTTWSSNPDGTVSDQELAYYRRRVNGVGAVLTGCTHVTENGIGFTDEFAAHDDRYTPSLRALAQAAKSGGAPAILQIFHAGNKAVPALVPDGELVSASAMKAPPGPFNNGELESRALTHDEIGEMIRAFGETTRRAIEAGFDGIELHGAHGFLIQNFFSPRFNQRADAWGGSLENRMRFPLALVAEIRRVIAQHADRPFLLGYRISPEEPDAGGLRVDDALTLIDRLIVAGIDYIHVSLADLLDAKPLDATDERRTIERVVAAVQQRVPVIAAGQIRTPAQAEAALALGLSVVAVGKGLVMNPAWVEQAMRGEAAAIRTQLHPVDVPQLVIPDKLWGVIDAMKGWFPVHRDEPAVA

SEQ ID NO: 4406 - protein, 357 aa, Oryza sativa (japonica cultivar-group)
MTSRTSPGGRVSSTPFSRLPRAVLSSYEYLSQGLRTYDFDNTMGGFYIAPAFMDKLVVHISKNFMTLPNIKVPLILGIWGGKGQGKSFQCELVFAKMGINPIMMSAGELESGNAGEPAKLIRQRYREAADIIKKGKMCCLFINDLDAGAGRMGGTTQYTVNNQMVNATLMNIADNPTNVQLPGMYNKEDNPRVPIIVTGNDFSTLYAPLIRDGRMEKFYWAPTRDDRVGVCKGIFRTDNVPDEDIVKIVDSFPGQSIDFFGALRARVYDDEVRKWVSDTGVENIGKRLVNSREGPPEFEQPKMTIEKLMEYGYMLVKEQENVKRVQLAEQYLSEAALGDANSDAMKTGSFYGSAPSS

SEQ ID NO: 4407 - protein, 432 aa, Sulfolobus tokodaii str. 7
MDCIFIFRRDLRLEDNTGLNYALSECDRVIPVFIADPRQLINNPYKSEFAVSFMINSLLELDDELRKKGSRLNVFFGEAEKVVSRFFNKVDAIYVNEDYTPFSISRDEKIRKVCEENGIEFKAYEDYLLTPKSLFHHRNFTSFYNEVSKVKVREPETMEGSFDVTDSSMNVDFLLTFKKIESPLFRGGRREGLYLLHRNVDFRRRDYPAENNNYRLSPHLKFGTISMREAYYTQKGKEEFVRELYWRDFFTLLAYYNPHVFGHCYRREYDNISWENNESYFEAWKEGRTGYPIIDAGMRMLNSTGYINGRVRMLVAFFLVKVLFVDWRWGERYFATKLVDYDPAINNGNWQWIASTGVDYMFRVFNPWKQQEKFDPEAKFIKEWVEELKDVPPSIIHSIYKTKVPGYPSPIVNWLERVNYVKSEYKNVKAVL

SEQ ID NO: 4408 - protein, 654 aa, Prochlorococcus marinus subsp. marinus str. CCMP1375
MCGIAGLICKDRQILALDEIGSKMNTSLLNRGPDDSGIWIDNDIGILLSHTRLSVNDLSKAGHQPMLSSSNRFVLTFNGEIYNHWDLRQELEITQGSQNWKSHSDTETLIQAIECWGVYKTLTKLIGMFAFGIFDRKENKFYLARDRFGEKPIYWGITGVGTRKVLIFGSDLKALKSYPEFNNTINRESMGLFINYNYVPDPHSIYENIWKLEAGKILEIDVTDDDYSKIYPMSWWQLEDTIKNVDGREIENESEAINLLKQELIKSVKSQSKADVKITSFLSGGIDSSLVSALLQETSNSQINTFTIGFENKRFDEATYARRISNYLGSNHSELIFTNEDALNIVPKINEYYSEPFADPAAIPTLLLCNAAKSQGYTVALSGDGADELFGGYNRYTMAPKIWKYFGIIPNFMKPMLINSVNKLSTQSIDLIGSILKIRQFRERLYKITDKISYSNSLEDLYYRLIREWSDVSSITEYKYNQPFTPISNERLNQSIHELKLDPVTFMMVIDCLSYLPGNNQVKLDRASMAVGLETRSPFLDKNVGELIWRLPINLKIKNNCGKYILKEILADYIPKKLFERPKAGFATPINEWIKGPLREWAEEMLNSNKVRDEGFLNPEITTKLLNEHIQGVKDNSKKLWSALIWESWIDKNI

SEQ ID NO: 4409 - protein, 489 aa, Triticum aestivum
  misc_feature (311)..(311): Xaa can be any naturally occurring amino acid
  misc_feature (481)..(481): Xaa can be any naturally occurring amino acid
MVISHASSSAGEAVYSTFSSRYVREELPRYRMPEGSIPKEAAYQIISDELMLDGNPRLNLASFVTTWMEPECGKLMMDSVNKNYVDMDEYPVTTELQNRCVNMIAHLFNAPIGEDETAIGVSTVGSSEAIMLAGLAFKRKWANKMKEQGKPCDKPNIVTGANVQVCWEKFARYFEVELKEVKLTEGYYVMDPKKAVEMVDENTICVAAILGSTLTGEYEDVKLLNDLLVEKNKKTGWNVPIHVDAASGGFIAPFLQPELEWDFRLPLVKSINVSGHKYGLVYPGVGWVIWRSKDDLPDELIFHINYLGTDXQPTFTLNFSKGASQIIAQYYQLIRLGFEGYKHIMENCKLNAAVLKEGIDATGRFDVLSKADGVPLVAIRLKDSTNFSVFDISENLRRFGWIVPAYTMPADAEHVAVLRIVIREDFNRSLAQRLLADINKIVAELDAHAVHAIKLSNAAAAEGASKSTVDAVTEAFKGLAXGNKKAGVC

SEQ ID NO: 4410 - protein, 336 aa, Pseudomonas putida KT2440
MSRVTLSRYLIEQTRSNNTPADLRFLIEVVARACKEISHHVSKGALGGVLGSMGTENVQGEVQKKLDVISNDILLEANEWGGHLAGMASEEMDNAYQIPGRYPKGAYLLVFDPLDGSSNIDVNVSVGTIFSVLRCPNQYLSQNESLNEEAFLQPGTEQVAAGYAIYGPQTMLILTLGNGVKGFTLDRELGSFVLTHENIRVPETTAEFAINMSNQRHWEAPVQRYVGELLAGETGPLKKNYNMRWIASMVADVHRILTRGGLFMYPRDAREPSKPGKLRLMYEANPMSFIIEQAGGASTNGYDRILDIKPESLHQRVSVILGSKEEVERVTAYHKE

SEQ ID NO: 4411 - protein, 431 aa, Arabidopsis thaliana
  misc_feature (142)..(142): Xaa can be any naturally occurring amino acid
MSLTLEFLLLLIVLILSHHAHSGSIVKFLPGFEGPLPFELETGYIGIGEEEEVQLFYYFIKSEKNPEEDPLLLWLSGGPGCSSLTGLLFENGPVALKFEVYNGSVPSLVSTTYSWTKVKMANIIFLDQPVGSGFSYSRTPLXKISDTGEVKRIYEFLQKWLSKHQQFFSNPFYVGGDSYSGMIVPPLVQEIGKGNYQINLQGYILGNPITDTESEQNYQIPYAHGMALISDELYKSMERICKGNYVKVDSLNTKCYKLIKDYQKCIHKLNKYHILLPDCDITSPDCFLYRYTLITFWANNKSVREALQVNKGSIGKWVQCNYKNISYNYDIKSSVAYHMKNSIDGYRSLIYNGDHDMMVPFLATQAWIRSLNYSITDDWKPWMINDQIAGYTRSYSNKMTFATIKGSGHTAEYKPKETSIMFKRWISAQPL

SEQ ID NO: 4412 - protein, 476 aa, Magnaporthe grisea 70-15
MSLPKDFLWGFATASYQIEGAIDKDGRGPSIWDTFTAIPGKVADGSSGVTACDSYNRTQEDIDLLKSVGAQSYRFSISWSRIIPIGGRNDPINQKGIDHYVKFVDDLLEAGITPLITLFHWDLPDGLDKRYGGLLNREEFPLDFEHYARVMFKAIPKCKHWITFNEPWCSSILAYSVGQFAPGRCSDRSKSPVGDSSREPWIVGHNLLVAHGRAVKVYREEFKAQDKGEIGITLNGDATFPWDPEDPRDVDAANRKIEFAISWFADPIYFGEYPVSMRKQLGDRLPTFTEEEKALVKGSNDFYGMNCYTANYIRHKEGEPAEDDYLGNLEQLFYNKAGECIGPETQSPWLRPNAQGFRELLVWLSKRYNYPKILVTENGTSVKGENDMPLEKILEDDFRVQYYDDYVKALAKAYSEDGVNVRGYSAWSLMDNFEWAEGYETRFGVTFVDYENGQKRYPKKSAKAMKPLFDSLIEKD

SEQ ID NO: 4413 - protein, 250 aa, Arabidopsis thaliana
MGRGRVELKRIENKINRQVTFAKRRNGLLKKAYELSVLCDAEVSLIVFSNRGKLYEFCSTSNMLKTLERYQKCSYGSIEVNNKPAKELENSYREYLKLKGRYENLQRQQRNLLGEDLGPLNSKELEQLERQLDGSLKQVRCIKTQYMLDQLSDLQGKEHILLDANRALSMKLEDMIGVRHHHIGGGWEGGDQQNIAYGHPQAHSQGLYQSLECDPTLQIGYSHPVCSEQMAVTVQGQSQQGNGYIPGWML

SEQ ID NO: 4414 - protein, 339 aa, Colletotrichum gloeosporioides f. sp. malvae
MVVSQPEVDFAREKDRLAEAQPQGQRAASSHDDAAPPPIGMTEPDERRGTRSRHDHSGKRDKVVRFGDYILGNTIGEGEFGKVKLGRKQDGGVQVIPVAVKLIKRDSVGNNPSRLAKIYREIAILRGISHPNIVRLHEMVETERHIGIILEYASGGELFDYILNHRYLKDNAARRLFAQLVSGVGYLHKKGIVHRDLKLENLLLDRNRNIIITDFGFANTFDGTRKGDLMQTSCGSPCYAAPELVVSDSLYTGRKVDVWSCGVILVSTAARYAMLAGYLPFDDDPANPEGDNINLLYKIVNTPLTFPEYVTPTPVTYSAASRSQSPQASGSLRGGRTAG

SEQ ID NO: 4415 - protein, 372 aa, Arabidopsis thaliana
MENGEAKQSVPLLTPYKMGRFNLSHRVVLAPLTRQRSYGNVPQPHAAIYYSQRTTPGGFLITEATGVSDTAQGYQDTPGIWTKEHVEAWKPIVDAVHAKGGIFFCQIWHVGRVSNSGFQPNGKAPISCSDKPLMPQIRSNGIDEALFTPPRRLGIEEIPGIVNDFRLAARNAMEAGFDGVEIHRANGYLIDQFMKDTVNDRTDEYGGSLQNRCKFPLEIVDAVAKEIGPDRVGIRLSPFADYMESGDTNPGALGLYMAESLNKYGILYCHVIEARMKTMGEVHACPHTLMPMRKAFKGTFISAGGFTREDGNEAVSKGRTDLVAYGRWFLANPDLPKRFQVDAPLNKYDRPTFYTSDPVVGYTDYPFLESTA

SEQ ID NO: 4416 - protein, 364 aa, Candida glabrata CBS138
MSSQYVVFQGPENFRHRIIFATLSGKPIKIEKIRSQDLNPGLRDHEVSFLRLMEAVTNGSVIEISYTGTTVIYRPGIIIGGPYTHTCPPSKPVGYFVEPMLYLAPFSKKKFSIVFKGITASHNDAGIEAIKWGLMPVMEKFGVRECALHTLKRGSPPQGGGEVHLVVDSLIAQPITMHELDRPVISSIRGVAYSTRVSPSMVNRMIDGAKQVLKNVKCEVNITADVWRGENSGKSPGWGITIVAETKKKGWCYFAEEIGGSGDIPEEIGSKVAYKLIEEISKSAAVDRNQLPLAITYMVIGKEDIGRLRITREQVDERFIQMLRDIKKIFGTEVFLKPVDDIGSDDFIATVKGIGFTNTNKKIA

SEQ ID NO: 4417 - protein, 434 aa, Oryza sativa
MESRGKILMERYELGRLLGKGTFGKVHYARNLESNQSVAIKMMDKQQILKVGLSEQIRREITTMRLVAHKNIVQLHEVMATRNKIYFVMEYVKGGELFEKVAKRGKLTEVVAHKYFQQLISAVDYCHSRGVYHRDLKPENLLLDENENLKVSDFGLSALSESKRQDGLLHTTCGTPAYVAPEVISKIGYDGAKSDIWSCGVILFVLVAGYLPFQGPNLMEMYRKIQHGEFRCPGWFSRKLQKLLYKIMDPNPSTRISIQKIKESTWFRKGPEENRILKERTLNENTTKNVAPVLGVRRKKNAHEDVKPMSVPNLNALEIISFSKGFDLSGMFIVKEWRNEARFTSDKSASTIISKLEDVAKALNLRVRKKDNGVVKMQGRKEGRNGVLQFDIEIFEVTTSYHIIEMKQTSGDSLEYRQLLEEGIRPALKDIVLA

SEQ ID NO: 4418 - protein, 199 aa, Sesamum indicum
MATLGGVHDSNSNPDTHSLARFAVDQHNTKENGLLELVRVVEAREQVVAGTLHHLVLEVLDAGKKKLYEAKIWVKPWMDFKQLQEFKHVRDVPSFTSSDLGAKTDDQVSGWRPVPVHDPVVQDAAHHAIKTIQERSNSLFPYELSEVVHANAEVVDTSAKFDMLLKVKRGGKEEKYKVEVHKSTEEGGFNLKKVDLDHS

SEQ ID NO: 4419 - protein, 769 aa, Xanthomonas oryzae pv. oryzae KACC10331
MTAQTGGLRAWCIAATLAALTAALAACLQWSSLQGPWRAITAVAAVLAVVCGICAAAAAYRAAPAQHALAQRLEEAERARERLQQELQRHGELEQELLRAKQAAEAAMLAKGEFLATMSHEIRTPLNGIIPMLELISSGQLSLDQRDMLQTATSSSLQLLRIVDDILDYSKLEANKLELEITTFNLRELLDGVVQLLQRTAEGRQLRLSLDIEPSVRLLVRGDPIRLRQVLGNLIGNAIKFTERGSVDIQLRRLGETRAQHLLRFQVRDTGIGIAPDQQTRLFRSFAQADASTTRLYGGTGLGLAICKRIIDLMGGRIGVESEPGRGSTFWFEIPLLKVIGDLQQATRADAVRVMVISSDARLSQRLKRLLDSWGVSHVLMETTQEALERVRRHSDTEGFRCVIADHDTLRYSARAVHRALARPENANSARLIWLYGEEPVPAELRDHATLVPRQSPDETLRPLVLPPDPKPVPTATLASAMIPEPLPPPMANAREVRILLVEDNPVNLLVAQKLLAVLGFEADTATDGETALTRMESIRYDMVFMDCQMPVLDGYAATRRWRAMETESGSRPLPIVAMTANAMACDHERCLAAGMDDYLSKPVAREQLDACLQRWLPRQALLPGPSTAGQFTHDPESASAGAQACALPILDNSVIDELYEVAGADTITILQLFLEDAPPIIEQLEAAAANRDSMQLRDLAHTLKSSSANVGAQAVSNAARRIELAARTGTIERPSAMVALVIAEYARARLALLGQVARLQAAASTPNP

SEQ ID NO: 4420 - protein, 364 aa, Ustilago maydis 521
MASSNPQTVPCAYKTGRTLGQGTYAVVKEAVHIKTGQYYACKVISKKLMEGREHMVRNEIQALKRVSQGHRSIVTLVDYFETMNNLYLVTDLCVGGELFDRICERGNYYEKDAAHIVRTIVDAVVYLHDQGIVHRDLKPENLLFRDKTEESDLLIADFGLSRVVDDEKITVLSTTCGTPGYMAPEIFKKTGHGKPVDMWAIGVITYFLLCGYTPFDRDTTMEEMQAIINADYRFEPTQYWEDVSEDAKDFINKLLTIDPAKRLSAKEALQHRWLQEAAPTEGGAQPVASAEQKDLLPDIKSAFNAKRTFRKAVNGIRLINRLRTNEQQPNKEEIEKLRQTIREAEDESSNLDQVLLAQETRAAN

SEQ ID NO: 4421 - protein, 254 aa, Ipomoea batatas
MRVRFFFYFAYFLITLVFFPSVTLQSYSGGHRQEATGFCGEEGEREDNLIRMATTTLGGISDSASAENSVEIESLARFAVEEHNKKENAMIELVRVVKAEEQVVAGKLHHLTLEVIDAGKRKLYEAKVWLKPWMNFKELQGFNHIEDIPTLTSSDLGAKRDWPNTGLKSVPVNDPVVQEAAQHAVKTIQQRSNSLLPYELQEIVHANAEVIDDSAKVHMLIKTKRGEKEEKFSVEVPKNNEGAFFLNHMAPANS

SEQ ID NO: 4422 - protein, 488 aa, Candida glabrata CBS138
MDVERQTFKVFNQDFTIDKRFELIKEIGHGAYGIVCSARFTEASEETTVAIKKVTNIFSKTLLCKRSLRELKLLRHFRGHKNITCLYDMDIVFYPDGSINGLYLYEELMECDMHQIIKSGQALTDAHYQSFTYQILCGLKYIHSADVLHRDLKPGNLLVNADCQLKICDFGLARGYSENPEENNQFLTEYVATRWYRAPEIMLSYQGYTKAIDIWSTGCILAEFLGGKPLFKGKDYVDQLNRILQVLGTPPDETLRRVGSKNVQDYIHQLGYIQKIPFSELFPNANEDALDLLEGMLAFDPQKRITVDKALEHPYLTIWHDPADEPECNEKFEFSFESVNEMEDLKRMVVDEVQSFREFVRQPLMDDKSQEDEQQQGSPENYQQTSPTNISPQRLHNNGSHDLLQEPEFLTQTPNQNSTIPDQLQESFVGIHSDNLPEHDTDFPPRPQENILASPMGLPSASDRNSMNNDSFLDLERELEFGLDRRYL

SEQ ID NO: 4423 - protein, 137 aa, Nicotiana tabacum
IWDPFEGFPFSGTVANIPTSTRETAAFSSARIDWKETPESHVFKVDLPGIKKEEVKVEVEEGRVLQISGERSREQEEKNDKWHSMERSSGKFLRRFRLPENIKMEEIKATMENGVLTVTVPKMEEKKPEVKAIDISG

SEQ ID NO: 4424 - protein, 219 aa, Arabidopsis thaliana
MAQQSLIYSFVARGTVILVEFTDFKGNFTSIAAQCLQKLPSSNNKFTYNCDGHTFNYLVEDGFTYCVVAVDSAGRQIPMSFLERVKEDFNKRYGGGKAATAQANSLNKEFGSKLKEHMQYCMDHPDEISKLAKVKAQVSEVKGVMMENIEKVLDRGEKIELLVDKTENLRSQAQDFRTTGTQMRRKMWLQNMKIKLIVLAIIIALILIIVLSVCHGFKC

SEQ ID NO: 4425 - protein, 196 aa, Arabidopsis thaliana
MASEARESPANNPGLSTNRDEATKGYIMQQTMFRIKDPKASLDFYSRVLGMSVMGSYILRYSRLLKRLDFSEMKFSLYFLGYEDTTTAPTDPTERTVWTFGQPATIELTHNWGTESDPEFKGYHNGNSEPRGFGHIGVTVDDVHKACERFEELGVEFAKKPNDGKMKNIAFIKDPDGYWIEIFDLKTIGTTTVNAA

SEQ ID NO: 4426 - protein, 433 aa, Crocosphaera watsonii WH 8501
MVNYKKGLVLGATAAVLTAIAVTGAGLRLPRSVAYLQDNPKKLVDEVWQVINDTYVDATFNQVDWLAVRQKYVGKSKTYNSKEEAYKAIREMLEQLDDPYTRFMDPQEFQNMQIDTSGELTGVGIQITKDEETKELTVVAPIEDTPAFEAGILAKDVITKINGKTTEGMEVEDAVKLIRGKPGSKVTLTIRRSNEEFNYPIIRARIELHPVKARIEETPSGKVGYIRLTQFSAQASKEMRDAIRDAEAANVNGYILDLRSNPGGLLYSSIEIARMWLDQGRIVSTVSRNGEVEAQRATNRALTDKPLVIMVDGGSASASEILSGALQDNNRATLVGTKTFGKGLVQSVRRLGDGTSGLAVTIAKYLTPSGRDINKQGIEPDIVVELTEAQRKDLQQERDKIGDFGDPQFDRAYEELEKEIAKSNGTNARGTMR

SEQ ID NO: 4427 - protein, 458 aa, Myxococcus xanthus
MTGSSQPWRAALTAFFLLSAPWAHAAEPLRKDAGTAGRAEQAERDDATYRQLEVFARVLSYVENNYVESPDRQRLMYGAIQGMLETLDPHTVFLPPDVYREMKIDTSGEWGGLGIEIARKGERIVVVAPIDDTPAARAGIKAGDELVGIDGERTEGMDVGRALQKMRGPAGGRVLLTIMREGFSAPREIAIIRDHIRIVSVEGALHGGIGHVKVKNFQDRTDLYLRKELDRLRALNGGKELRGLVLDLRNNPGGLLDQAVAVSDRFLPGNLPIVSTRGRDGRSATVERSKDRDTEKDYPVVVLVNAGSASASEIVAGALQDHGRATILGAPTFGKGSVQTVIELEDGSGLKLTIARYYTPKGRSIQERGITPDFLVPDEPGGKVPRDVVREKDLRRHFRAEPTAATEPAAPEPRGLPENLKPWDVTAKLEDYALRVALDYLHGMASAPARTPSRAAGR

SEQ ID NO: 4428 - protein, 248 aa, Populus tremuloides
MGRGRVQLKRIENKINRQVTFSKRRTGLLKKAHEISVLCDAEVALIVFSHKGKLFEYSTDDCMEEILERYERYSYAERQLVATDLDSQGDWTLEYNRLKAKVELLQRNHRNYVGEDLDSMSLKELQNLEQQIETALKHIRARKNHLMSQSISEMQRKEKAIQVQNNMLVKQIKEKEKKDKAVAQPAFWDQQNHGPDASSFLLSQPAGLPLPCLNIGGSYQEEAPEARRNGLGHTLEPIYSFHLGGYGA

SEQ ID NO: 4429 - protein, 150 aa, Brassica napus
MTNYGSIPTSSHPSPPIDLEYISRAKHRIKSGLATRRPWKTMFDLQSTNLPHGFFDAISRIKTNLVYFRANYAVVVLLVLFLSLVYHPTSLLVLAVLVVFWIFLYFLRDEPLVVFRHQIDDRTVMICLSVLTIVMLLFTHATANVLGAVA

SEQ ID NO: 4430 - protein, 503 aa, Triticum aestivum
METGGKDGNPLKNYRIGKTLGIGSFGKVKIAEHIKTGHKVAVKILNRRKIKNMEMEEKVKREIKILRLFMHPHIIRLYEVIEAPADIYVVMEYVKSGELFDYIVEKGRLQEEEARRFFQQIISGVQYCHRNMVVHRDLKPENLLLDNNCDVKIADFGLSNVMRDGHFLKTSCGSPNYAAPEVISGKLYAGPEVDVWSCGVILYALLCGTLPFDDENIPNLFKKIKGGIYTLPSHLSGPARDLIPRMLVVDPMKRITIREIREHPWFEAQLPRYLAVPPPDTAQQVKKIDEESLVKVISLGFDKNLLVESIHNRLQNEATVAYYLFLDNKSRTTTGYLGAGYQEAMESSFSPITPSETQSPAHGNRQQPYMESPVGLRPHFPADRKWALGLQSRAHPREVMTEVLKALQELNVYWKKIGHYNMKCRWSPPGFPGQENMNHTNYNFSAEPIETDDLGDKLNLIKFELQLYKTRDEKYLLDLQRASGPHLLFLDLCAAFLAQLRVF

SEQ ID NO: 4431 - protein, 375 aa, Staphylococcus aureus subsp. aureus MSSA476
MKSKYEPLFDKVELPNGVELRNRFVLAPLTHISSNDDGTISDVELPYIEKRSQDVGITINAASNVSDVGKAFPGQPSIAHDSDIEGLKRLATAMKKNGAKALVQIHHGGAQALPELTPGGDVVAPSPISLKSFGQKQEHSAREMTNEEIEQAIKDFGEATRRAIEAGFDGVEIHGANHYLIHQFVSPYYNRRNDVWANQYKFPVAVIEEVLKAKEAYGNKDFIVGYRLSPEEAESPGITMEITEELVNKISHMPIDYIHVSMMDTHATTREGKYAGQERLPLIHKWINGRMPLIGIGSIFTADEALDAVENVGVDLVAIGRELLLDYQFVEKIKDGREDEIINYFDPEREDNHHLTPNLWHQFNEGFYPLPRKDK

SEQ ID NO: 4432 - protein, 591 aa, Zea mays
MCGILAVLGVAEVSLAKRSRIIELSRRLRHRGPDWSGLHCHEDCYLAHQRLAIIDPTSGDQPLYNEDKTVVVTVNGEIYNHEELKAKLKTHEFQTGSDCEVIAHLYEEYGEEFVDMLDGMFSFVLLDTRDKSFIAARDAIGICPLYMGWGLDGSVWFSSEMKALSDDCERFITFPPGHLYSSKTGGLRRWYNPPWFSETVPSTPYNALFLREMFEKAVIKRLMTDVPFGVLLSGGLDSSLVASVASRHLNETKVDRQWGNKLHTFCIGLKGSPDLKAAREVADYLSTVHHEFHFTVQEGIDALEEVIYHIETYDVTTIRASTPMFLMSRKIKSLGVKMVISGEGSDEIFGGYLYFHKAPNKKEFHEETCRKIKALHLYDCLRANKATSAWGVEARVPFLDKSFISVAMDIDPEWKMIKRDLGRIEKWVIRNAFDDDERPYLPKHILYRQKEQFSDGVGYSWIDGLKDHASQHVSDSMMMNAGFVYPENTPTTKEGYYYRMIFEKFFPKPAARSTVPGGPSVACSTAKAVEWDASWSKNLDPSGRAALGVHDAAYEDTAGKTPASADPVSDKGLRPAIGESLGTPVASATAV

SEQ ID NO: 4433 - protein, 546 aa, Rhodopseudomonas palustris
MAAKDVKFDTDARDRMLRGVNILADAVKVTLGPKGRNVVIDKSFGAPRITKDGVSVAKEIELSDKFENMGAQMVKEVASRTNDEAGDGTTTATVLAQAIIKEGLKAVAAGMNPMDLKRGIDLATAKVVESIKAASRPVNDQHEVAQVGTISANGEAQIGRFIADAMQKVGNEGVITVEENKGLETEVEVVEGMQFDRGYLSPYFVTNADKMTAELEDVFILLHEKKLSSLQPMVPLLESVIQAQRPLLIVAEDVEGEALATLVVNKLRGGLKIAAVKAPGFGDRRKAMLQDIAILTGGQVISEDLGMKLENVTIDMLGRAKKVSINKDNTTIVDGAGEKAEIEARVSQIRTQIEETTSDYDREKLQERVAKLAGGVAVIRVGGMTEVEVKERKDRVDDALNATRAAVQEGIVVGGGVALIQAGKVLDGLTGENPDQNAGITIVRRALEAPLRQIAQNAGVDGSVVAGKVRESDDKAFGFNAQTEEYGDMFKFGVIDPAKVVRTALEDAASVASLLITTEAMIADKPEPKSAPAGGMGGMGGMDGMM

SEQ ID NO: 4434 - protein, 317 aa, Arabidopsis thaliana
  misc_feature (230)..(230): Xaa can be any naturally occurring amino acid
LKQIQFVDMCDPTRDDGSSRSRVVSTMQKRAYFQRQWPLVDVVRASVVVIVHFLCLLAPFNFKWEALRFGLVLFALTTLSITFSFHRNLSHRSFKIPKWLEYPWAYSAVFALQGDPMDWVSIHRFHHQFTDSDRDPHSPKEGLLFSHILWIFDTQYIKYKCGGRDNVLDLKKQWFYKFLRRTIAVHILMFWTILYLYGGLPYLTCGGGVGIFIGYHVTWLVNSACHIWGXSRSWNTKDTSRNGFDDLVNIFRWLSLFTMGESWHNNHHAFESSARQGLEWWQIDITWYLIRLFEVLGIATDVKLPSELQKQKMALVR

SEQ ID NO: 4435 - protein, 324 aa, Candida tropicalis
MSTTPTIPTIKLNSGYEMPLVGFGCWKVNNETAADQIYNAIKTGYRLFDGAEDYGNEKEVGEGINRAIKEGLVKREELFITSKLWNNFHDPKNVETALNKTLSDLNLDYVDLFLIHFPIAFKFVPIEEKYPPGFYCGDGDNFHYEDVPLLDTWKALEKLVEAGKIKSIGISNFTGALIYDLIRGATIKPAVLQIEHHPYLQQPKLIEYVQKAGIAITGYSSFGPQSFLELESKRALNTPTLFEHETIKSIADKHGKSPAQVLLRWATQRNIAVIPKSNNPERLAQNLSVVDFDLTKDDLDNIAKLDIGLRFNDPWDWDNIPIFV

SEQ ID NO: 4436 - protein, 325 aa, Magnaporthe grisea 70-15
MADQHDVDLDSIIDRLLEVRGSRPGKQVQLLEAEIRYLCTKAREIFISQPILLELEAPIKICGDIHGQYYDLLRLFEYGGFPPEANYLFLGDYVDRGKQSLETICLLLAYKIKYPENFFILRGNHECASINRIYGFYDECKRRYNIKLWKTFTDCFNCLPIAAIIDEKIFTMHGGLSPDLNSMEQIRRVMRPTDIPDCGLLCDLLWSDPDKDITGWSENDRGVSFTFGPDVVSRFLQKHDMDLICRAHQVVEDGYEFFSKRQLVTLFSAPNYCGEFDNAGAMMSVDESLLCSFQILKPAEKKQKYVQRLGGRSSNASSRITSSKP

SEQ ID NO: 4437 - protein, 532 aa, Ralstonia eutropha JMP134
MRKTLKNISLVSVGLVAGVLATLQISATAQNSAGPLPLDQLRLMADIFGQIKREYVEPVDDKKLLTEAIKGMVASLDPHSAYLDEKDFKELQEGTRGRFAGLGIEISQEEGLVKVINPIEDTPAFRAGIQPGDLITRIDDKPVRGLPLEQAVKRMRGEPGTKVTLTIYRKSEERTFPISITRAEIRVQSVKTKMLDNNTIGWVRLTSFQERTVGDLGRRLNEMAQKNPGLKGIVLDLRNNGGGVLQGAVGVAAAFLPDDSTVVSTNGQVPDAKRVYKATFNNYRLSSLEDDPLKDLPALYKKIPMVVLTNAYSASASEIVAGALQDHHRALIMGKTTFGKGSVQTVRPLTNDTGIKLTIAYYYTPTGKSIQAKGIRPDIPVDQNPEGDPDDALITREIDTERHLHNKQESEEPEMNEREQRRVEELRRLEEENAKKTPEEREKERRKKPIEFGSADDFMLQQAIAQLDGRPVKRSKSKLETNPPADKPAKAAPAKKGASAPAAKPAAPAPGKQPPASAPIGEPLGTPTGKAP

SEQ ID NO: 4438 - protein, 196 aa, Brassica napus
  misc_feature (40)..(40): Xaa can be any naturally occurring amino acid
  misc_feature (50)..(50): Xaa can be any naturally occurring amino acid
  misc_feature (87)..(87): Xaa can be any naturally occurring amino acid
SGHGRKEVESTNKNVKKRKILEHNSIKHMSYESVSDISLXSCGYEEDVRXNMKLILGAVIIAVALVALSSTTKFPENRDFLIGCISXSYVVVNGVVELIVYSKEENAIVYTHPPEVSFTSTVLVVSSKLPRFSDEYTLTIDSADPKSISAGKSVQLTKSVTQWFTKDGVLVEGLLWKDVEALIKDYAKEGEPKKKK

SEQ ID NO: 4439 - protein, 349 aa, Zea mays
MSLGKTDMSQERLYHQDRMDVPPVHFSTPPPPPCQQQQQHGGHGEQQKLERFSDEVDSRLSAEQKEPASGGALVVSVSGGGDGASIELSKKRRGRPPGSKNKPKPPVVITREAEPAAAMRPHVIEIPCGCDVADALARFAARRNLGICVLAGTGAVANVSLRHPMPCGGGGAPTAIMLHGQYEVLSISATFLPPAMSAVAPQAAAAAACLSISLAGPHGQIVGGAVAGPLYAASTVVLVAAAFTNPTFHRLPADDDASVSVSVSVSLSAGSGDPADEHRGGHQDRREQPPQEHRPLAVRRQPAPHPASAAQTVEPCGPPDVPIYAACHPQPHDVMWPPPPRAPQMPPPY

SEQ ID NO: 4440 - protein, 374 aa, Petroselinum crispum
MESSSAATADHTHIKGVPTHGGRYVQYNVYGNLFEVSRKYVPPIRPVGRGAYGIVCAAMNSDTREEVAIKKIGNAFDNRIDAKRTLREIKLLRHMNHENVIAIKDIIRPPQIESFNDVYIVYELMDTDLHQIIRSNQQLTDDHCRYFLYQLLRGLKYVHSANVLHRDLKPSNLLLNANCDLKIGDFGLARTTSETDFMTEYVVTRWYRAPELLLNCSEYTAAIDIWSVGCILGEVMTRQPLFPGKDYVHQLRLITELIGSPDDASLGFLRSDNARRYVRQLPQYPKQQFSARFLNKSPGALDLLEKMLIFDPNRRITVDEALCHPYLAALHDINEEPVCPRPFSFDFEQPTCTEENIKELIWKESVKFNPDPIL

SEQ ID NO: 4441 - protein, 558 aa, Onion yellows phytoplasma OY-M
MCSIFGILNIKTDPQILRDQALKLSSLMRHRGPDWSRIFASQKAILAHERLSIIDVNAGAQPLYNKTKTLILAINGEIYNHLDLRKQYKDKYEFQKESDCEVILALYQEKGVNFLDELQGMFAFILYDLTKNTYLIGRDHMGIIPLYMGYYLNQNFYIASEMKALIPICQTLSIFPPGNYLYSESGKMVKYYKRNWMDYQNVYNNQTNTNQLRNFLEASVKKILMSDVPYGVLLSGGLDSSIISGITKKFAKHRIEESSKKEVCFPSLHSFAVGLKGAPDLKAAKEVDNHLGTAHHEINFTIQEGIDALKDVIYHIETYDITTIRASIPMYLMARKIKAMGIKMILSGEGADEIFGGYLYFHKAPNAQEFHKETVRKLASLHLYDCSRANKAMSAWGVEARVPFLDKNFLDVAMRLNPKDKMCGTNGKIEKHILRQTFESYLPKKIVWRQKEQFSDGVGYSWIDALKQLAQTKITDTQLKNAYVRFPYNTPTNKEGYMYREIFEILFPLPSAISLFPGGPSIACCTAKAIEWDKAFKQINDPSGRAALGVHNEAYKDK

SEQ ID NO: 4442 - protein, 279 aa, Bacillus licheniformis ATCC 14580
MVSSLKDTVTLHNGVKMPWFGLGVFKVEEGSQVVESVKAAIKNGYRSIDTAAIYQNEEGVGKGIKESGVPREELFITSKVWNSDQGYEKTLAAFDESLRKLGLDYLDLYLIHWPGKDKYKDTWRALEKLYKDGRVKAIGVSNFNVHHLESLLEDAEIKPMVNQVEFHPRLTQTELRDYCKKQGIQVEAWSPLMQGKLLDDQVLTDIAKKYNKSVAQVILRWDLQNEVVTIPKSIKEHRIIENADIFDFELSAEDVEKINALNKDERVGPDPDTMVNGFE

SEQ ID NO: 4443 - protein, 250 aa, Methylobacillus flagellatus KT
MFEIIPILAFEDNYIWLLHQHGHALVVDPGDAHPVLEILDARGLQLRAILVTHHHQDHTGGVEELIQATSAQVFAPAKEQFSFPHHPVTAGDRLDIPGIALSLSVLDVPGHTVGHVAYYGDGMLFSGDTLFGAGCGRLFEGTPGQMYSSLQQLAQLPVNTRVYCGHEYTERNLAFALSLEPHHEALLSRREATAALRAQGLPSLPSSMALELATNPFLRCHEPGIIAASKSAATDPVSVFAAIREMRNHF

SEQ ID NO: 4444 - protein, 393 aa, Triticum aestivum
  misc_feature (43)..(43): Xaa can be any naturally occurring amino acid
  misc_feature (221)..(221): Xaa can be any naturally occurring amino acid
  misc_feature (292)..(292): Xaa can be any naturally occurring amino acid
  misc_feature (322)..(322): Xaa can be any naturally occurring amino acid
  misc_feature (369)..(369): Xaa can be any naturally occurring amino acid
QVCTKKQAGTGPEFPGYRRPTRPMRTMEMEEKAKREIKILRLXIHPHIIRLYEVIYTPTDIFVVMEYCKYGELFDCIVEKGRLQEDEARRIFQQIISGVEYCHRNMVAHRDLKPENLLLDSKYNVKLADFGLSNVMHDGHFLKTSCGSPNYAAPEVISGKLYAGPEVDVWSCGVILYALLCATRPVPFDDDNIPKLFNKIKGGFYILPSHLSALARDLIPXRMLVVDPMRRITIRDIRDHPWFQNRLPRFLAVPPPDTAQPAKMEIAEDTLQEVANLGYDKDHVCESLCNRXINEETVAYYLLLENRFRATSGYLGANYQQXNESASPSTRNYLPRSNDSQGSGLRPYYRVETKWALGLQSRAQPRAIXIEVLKALKELNVRWKKNVDYNMKC

SEQ ID NO: 4445 - protein, 376 aa, Vitis aestivalis
MGCFPCAGKSNKKGKKNQEKNSKDQIPSTSERLKVNSSVDGRKDASKDGGSDHIAAHTFTFRELAAATKNFRAECLLGEGGFGRVYKGRLESTNKIVAIKQLDRNGLQGNREFLVEVLMLSLLHHPNLVNLIGYCADGDQRLLVYEYMALGSLEDHLHDLPPDKKRLDWNTRMKIAAGAAKGLEYLHDKASPPVIYRDLKCSNILLGEGYHPKLSDFGLAKLGPVGDKTHVSTRVMGTYGYCAPEYAMTGQLTLKSDVYSFGVVLLEIITGRKAIDNSKAAGEHNLVAWARPLFKDRRKFSQMADPMLHGQYPLRGLYQALAVAAMCVQEQPNMRPLIADVVTALTYLASQKYDPETQPVQSSRMGSSTPRSRREL

SEQ ID NO: 4446 - protein, 139 aa, Nicotiana tabacum
LNIWDPFEGFPFSGTVANIPTSTRETAAFSSARIDWKETPESHVFKVDLPGIKKEEVKVEVEEGRVLQISGERSREQEEKNDKWHSMERSSGKFLRRFRLPENIKMEEIKATMENGVLTVTVPKMEEKKPEVKAIDISG

SEQ ID NO: 4447 - protein, 134 aa, Nicotiana tabacum
LDIWDPFEGFPFSGTVANVPTSAFANARIDWKETPEAHVFKVDLPGIKKEEVKVEVEEGRVLQISGERSREQVEKNDKWHRMERSSGKFLRRFRLPENTKMEEIKAAMENGVLTVTVPKMEEKKPDVKAIDISA

SEQ ID NO: 4448 - protein, 477 aa, Bacillus subtilis subsp. subtilis str. 168
MIHQHPESFPKHFLWGSASAAYQIEGAWNEDGKGPSVWDVFTKIPGKTFKGTNGEIAVDHYHRFKEDVALMAEMGLKAYRFSVSWPRVFPKGKGEINEAGLAFYDSLIDELLSHHIEPVLTLYHWDLPQALMDEYGGFESRNIIEDFNHYCITLYKRFGDRVKYWVTLNEQNYNFNHGFITAMHPPGVKDRKRFYEANHIAFLANAKAIESFREYVPEGKIGPSFAYSPAYPLSSHPEDILAFENAEEFTNNWWLDMYCWGTYPQIPFRCLEKQGWAPTIEAGDMDLLAKGKPDFVGVNYYQTITYERNPLDGVSEGKMNTTGQKGTNQETGIPGVFKTKKNPHLTTSNWDWTIDPIGLRIGLRRITSRYQLPVFITENGLGEFDKVEDGTVQDDYRIDYLRSHLEQCRQAISDGVDLIGYCSWSFTDLLSWLNGYQKRYGFVYVNRDEESTSDLKRLKKKSFYWYQDVIKTNGESL

SEQ ID NO: 4449 - protein, 753 aa, Escherichia coli
MSQHNEKNPHQHQSPLHDSSEAKPGMDSLAPEDGSHRPAAEPTPPGAQPTAPGSLKAPDTRNEKLNSLEDVRKGSENYALTTNQGVRIADDQNSLRAGSRGPTLLEDFILREKITHFDHERIPERIVNARGSAAHGYFQPYKSLSDITKADFLSDPNKITPVFVRFSTVQGGAGSADTVRDIRGFATKFYTEEGIFDLVGNNTPIFFIQDAHKFPDFVHAVKPEPHWAIPQGQSAHDTFWDYVSLQPETLHNVMWAMSDRGIPRSYRTMEGFGIHTFRLINAEGKATFVRFHWKPLAGKASLVWDEAQKLTGRDPDFHRRELWEAIEAGDFPEYELGFQLIPEEDEFKFDFDLLDPTKLIPEELVPVQRVGKMVLNRNPDNFFAENEQAAFHPGHIVPGLDFTNDPLLQGRLFSYTDTQISRLGGPNFHEIPINRPTCPYHNFQRDGMHRMGIDTNPANYEPNSINDNWPRETPPGPKRGGFESYQERVEGNKVRERSPSFGEYYSHPRLFWLSQTPFEQRHIVDGFSFELSKVVRPYIRERVVDQLAHIDLTLAQAVAKNLGIELTDDQLNITPPPDVNGLKKDPSLSLYAIPDGDVKGRVVAILLNDEVRSADLLAILKALKAKGVHAKLLYSRMGEVTADDGTVLPIAATFAGAPSLTVDAVIVPCGNIADIADNGDANYYLMEAYKHLKPIALAGDARKFKATIKIADQGEEGIVEADSADGSFMDELLTLMAAHRVWSRIPKIDKIPA

SEQ ID NO: 4450 - protein, 438 aa, Pseudomonas putida KT2440
MLHSPRLTQLALSIALAVGAPLATAAEPAKAAAVPATEVTAKAPLPLEELRTFAEVLDRIKAAYVEPVDDKTLLENAIKGMLSNLDPHSAYLGPEDFQELQESTSGEFGGLGIEVGQEDGFIKVVSPIDDTPASRAGVQAGDLIVKINGAPTRGQTMTEAVDKMRGKVGEKITLTLVRDGGNPFDVNLTRAVIQVKSVKSQLLENDYGYIRITQFQVKTGDEVGKALAKLRKDNGKKLRGVVLDLRNNPGGVLQSAVEVADHFLTKGLIVYTKGRIANSELRFSADPADASAGVPLVVLINGGSASASEIVAGALQDQKRAVLMGTDSFGKGSVQTVLPLANDRALKLTTALYYTPNGRSIQAQGIVPDIEVRPAKLTAEADTENFKEADLQGHLGNGNGGADRPTGSSKRKERPQDDDFQLSQALSLLKGLNITKGD

SEQ ID NO: 4451 - protein, 325 aa, Cryptococcus neoformans var. neoformans B-3501A
MSLGRTLKLNNGVVAPQIGFGTWQAAPGEVEKAVEEAIKVGYRHIDCALIYRVFDATGVYGIVAQGIKASGVPRKDLFLVSKLWNNSHRPEKVEADLDTSLKQLGTDYLDVYLIHWPVPFAPGDNLFPKTEDGKVAIDWDGPSVVDTWKELIRISKETKKVKAIGVSNFNVELLEKLIKETGVVPTMNQIECHPSLIQPELFKYCKEKNIVITAYSPLGNNTTGKPRIIDQPQIIDIAKKLNKEPAQVLINWAAHQGFAVIPKSVTPSRIKSNFEDFKLNDDVFEEINKVGKANAARANIPAEYNPSWPINVFGEKSEEQYKKVW

SEQ ID NO: 4452 - protein, 222 aa, Canavalia lineata
MARQKIKIKKIDNVTARQVTFSKRRRGIFKKAEELSVLCDAEVGLIIFSATGKLFEYPSSSMKDIITKYNQHSHDNNQLGRPQNLQVEQCVDLSKEVAERNQQLRQMKGEDFQGLNLDDLQQLEKTLETGLERVNETKEKRIMDEIVALHKKGLKLEEENKHLKQKMAMLCMGKSSFLVDSDITLQEVVSSESMNVCSCNSGPSLEDDSSDTSLKLGLPFPN

SEQ ID NO: 4453 - protein, 659 aa, Kluyveromyces lactis NRRL Y-1140
MGNSGSKPSKKASKSKKIESASSNGSKSRSSSKASEVSSKKDTSPQLQKSDTMQSNKSGRSIRSLKSRRSQSQLQSPSNPGTPKLSANNHETSLSRKNSSTLPLSRHGSSQSASKEDERNGQTLKTARSSSFSTTGDLPPSMVQMAPKTPILKGSTNNPLYYENALTDDDYDDNNDDSISYKSSSSRHRSSARRASSSSRRRSNGSAHHLEVPQSGNSISMVNHGNSTSGSPIQMSRSSSRSSTHSRKSSMSMGQYSTPMASPGLNAMDPDVQDYFDTAGASQREIDDGNGNDYRGVSNGGTDDHPEGLGNDVELNAEGKPKKKKPIKPIDIDETIQKLLDAGYSAKKTRSVALKNSEITQICQMAREIFLSQPSLLELSPPVKIVGDVHGQYADLLRLFTKCGFPPSANYLFLGDYVDRGKQSLETILLLLCYKIKYPENFFLLRGNHECANVTRVYGFYDECKRRCNIKTWKTFIDTFNALPLAAIVAGKIFCVHGGLSPVLNSMDEIRHVSRPTDVPDFGLINDLLWSDPTDSPNEWEDNERGVSYCYNKVAINKFLNKFGFDLVCRAHMVVEDGYEFFNDRSLVTVFSAPNYCGEFDNWGAVMSVSEGLLCSFELLEPLDSTALKQVMKKGRQERKLANQQQQQQQQQQLEQIQE

SEQ ID NO: 4454 - protein, 401 aa, Pichia angusta
MSQPSLTDTNLFKPIKVGNVELKHGFFSAPTTRFRASDDFVPTDSMLSYYEQRAENNGGLIVAEATFPDYSFGLYPNAPMIKTPEQVAAWKKIVDAVHKQGSFFSIQLWHLGRVAVPQLNKKYNVPLVGPSKLYVDESSEKAAKEAGNELHELTIPEIEAIVKEFAAGAKRVVDEAKADFVEILAGGGYLLDQFNHSNINKRTDKYGGSIENRARLILEVVDACIEAVGAEHVGIKLSPYAAVNGLQGVDTEIHPISRYGYILSELERRGKEGKRIAYITMIEPRVNGTEDSKDTRAFDSSWVGEIWKSTLLRAGAYLNQFSNYLIQDVNKDDRTLIGAARYFTSNPDLIERLRKGQELTPYDRSKFYTPATNDGYITWTKYGEDPEKYKGLVAVKPQPLS

SEQ ID NO: 4455 - protein, 402 aa, Pichia angusta
MTPSTSLASSNLFKPIKVGKVELKNRLVFAPTTRYRASKDFVPTDSMLKYYEQRAENNGGLLTAEATYVDFNFGLYPFTPMIKTPAQVAAWAKIIEAVHKQGSYFSIQLWHLGRAADPKFNKEKGVPFVAPSAIYLDQDSEKAAREAGNELRELTIPEIEAIVKEFAAAAKRAIHEAKADFIELHSAHGYLLDQFIQPNINKRTDKYGGSIENRARLVLEVVDACIEAVGAEHVGIRLSPYAKFQGSEGVDSEINPIASFGYILSELEKRARDGNRLAYVSVVEPRVSGNVDSNDQRKFDTSWIREIWKGILFRAGGYLKENEQSLEHDVNQDDRTLIGVSRYYTSNPDLVERLKKGLSLTPYDRSRFYNHSSNDGYLTWPKYGEDEEKYKAVLDVEPKALA

SEQ ID NO: 4456 - protein, 635 aa, Geobacillus kaustophilus HTA426
MCGFIGCIHDRPRAIEQTWKTTLVEMNRLITHRGPDDEGYFFDDYVSFGFRRLSIIDLEAGHQPLSYENDRYWIIFNGEIYNYLELREELAAKGYSFATHSDTEVIVALYSAEKEKAVEKLRGMFAFVIWDKQEKTVFAARDPFGIKPFFYAEQGDRTFFASEKKSILLALRQESPNGDSLQHYLTFQYVPEPLTMSAGIYKLEPGHYLKKKVGKPLTIHRYWKASFEPIRQSEEELVKKIRDALFDSVNVHMRSDVPVGAFLSGGIDSSFIVAIAKQFHPHLKTFSVGFEREGFSEIDVAKETAEKLGVDNISYVISPQEYMEELPKIMWHMDDPLADPAAVPLYFVAREARKHVTVVLSGEGADELFGGYNIYREPESLRLFARMPNIVKAVLRVIAKMLPDGMKGKSFLERGTTPLEERYVGNAKIYSEKEKAALLKTYQEGREYTAVTAPFYRETLHYPPVNRMQYIDLHTWLRGDILVKADKMTMAHSLELRVPFLDKKVFEVARQIAPDMKTANGTTKYILRKAAEGIVPDHVLNRKKLGFPVPIRHWLKNEMYDWARQLINESETDHLFHKDVLYRLLDEHARHKADHSRKLWTVLAFMVWHQVYVEKKYDFAQSVQNEKRPASVLEA

SEQ ID NO: 4457 - protein, 402 aa, Pichia angusta
MSKTPTLANTNLFKPIKVGKVELKNRLVFAPTTRYRASKDFVPTDSMLKYYEQRAENNGGLLVTEATYPDYSFGLYPDTPMIKTPAQVAGWKKVIEAVHNKGSFVSIQLWHLGRTASAEFNKSKGLPLVGASPIYMDEDSEKAAKEAGNELRALTIPEIENIVTEYAAAAKRAIHEAKADFIELHGAHGYLLDQFNQPGSNKRTDKYGGSIENRARLILEAVDACIEAVGAEHVAIRLSPYAAVQGIKGVDSEIHPISYFGYVLSELERRAQEGKRLAYISVVEPRVNGIYDSKDKREFNTSWISEIWKGVLLRSGAYLNENYKFLQHDVDENDRTLIGVSRYYTSNPDLADRLKNGHELTPYDRSKFYKHSSNDGYLTWTRYGEKEPQYKDLVDVAPEPLA

SEQ ID NO: 4458 - protein, 259 aa, Oryza sativa (japonica cultivar-group)
MISPDAARNVVGIIGNVISFGLFLAPVPTFWRICKRKDVEEFKADPYLATLLNCMLWVFYGIPVVHPNSILVVTINGIGLLVEGTYLLIFFLYSPNKKRLRMCAVLGVELVFMLAVILGVLLGAHTHEKRSMIVGILCVFFGSIMYFSPLTIMGKVIKTKSVEYMPFFLSLVCFLNGVCWTAYALIRFDIYVTIPNGLGALFGAIQLILYACYYRTTPKKTKAAKDVEMPSVVVSGTGAAAAAGGGNTGGGSVSVTVER

SEQ ID NO: 4459 - protein, 683 aa, Pasteurella multocida subsp. multocida str. Pm70
MKLSKTKSYLATFLLSTFLMSFNLVEAVQPKIKLSDIVTPQPTEENQLATKRATTRLTQSHYRKFQLNDAFSEKIFERYLKSLDFSRNTFLQSDIDEMRAKYADKFDDALNEGDLSIAFAMYDLMMKRRYDRYKYALSLLDKEPDLSGQDQIEIDREKSPWPKDNAELDKLWEQRVKNDIINQKLKDKKWSDIKKRLIKRYDLAIRRLTQTKADDILQVYLNAFAREVDPHTSYLAPRTAKSFNESMNLSLEGIGATLQQTEDDGTTIKSLVPGAPAERSKKLKAGDRIIGVGQASGEIEDVVGWRLEDIVDKIKGKKGTKVRLEIEPAKGGKSKIITLVRDKVRIEDQAAKLTISKVEGQIVASIKIPSFYIGLTQDVRKLLAEMKTKKAKALIIDLRDNGGGALTEAVGLSGLFISDGPIVQVRDAFQRIRVHEDPDSEQVYSGPLLVMINRFSASASEIFAAAMQDYNRGIIIGQNTFGKGTVQQSRSLNFAFDANQEPLGLIQYTIQKFYRIDGGSTQLKGVATDIDFPAAIDAKEYGEEREDNALPWDKIPAANYFEVAQARDAVAFLTPKHIERIAKDPEFVALNEELKIRDERNALKYLSLNYQKRKIENDKDDARRLKDLNARFKREGKKPLKDLDDLAKDYEAPDFYLKEAERMAADLVQFETEKMGMNQKSTN

SEQ ID NO: 4460 - protein, 190 aa, Marsilea quadrifolia
DEHGEVVAEIRKSDLEPYLGLHYPATDIPQASRFLFMKNRVRMICDCRSNPVRVIQDKNLRQPLSLAASTLRAPHGCHSQYMANMGSIASLVMAVIVNDNEEETSNRNQQPKMRKLWGLVVCHHTTPRAVPFQLRSACEFLMQVFGLQLNMELELAAQMREKHILRTQTLLCDMLLRDAPIGIVSESPNI

SEQ ID NO: 4461 - protein, 208 aa, Candida glabrata CBS138
MIARKKNILKVIILGDSGVGKTSLMHRYVNDKYSQQYKATIGADFLTKEVVLDDDKVVTMQVWDTAGQERFQSLGVAFYRGADCCVLVYDVTNAKSFENIKSWKDEFLVHANISSPESFPFVILGNKVDIEDSKKVVSEKAGQELAKSLGDVPLFLTSAKSAINVDTAFEEIAKSALQQNQNDAHAFEDDFNDAINIQLEGESNSCSC

SEQ ID NO: 4462 - protein, 138 aa, Nicotiana tabacum
DAWDPFEGWPLFRSISDQFRSNFPSSSSDTTSFDWKETPNAHVFKADVPGLRKEEVKVELEDDRILQISGERQRELEDKGNTRHRVERSSGKFVRRFRLPENAKVDQVKANMENGVLTVTVPKENANKPEMKSIDISG

SEQ ID NO: 4463 - protein, 464 aa, Escherichia coli CFT073
MKAFPETFLWGGATAANQVEGAWQEDGKGITTSDLQPHGVMGKMEPRILGKENIKDVAIDFYHRYPEDIALFAEMGFTCLRISIAWARIFPQGDEAEPNEAGLAFYERLFDEMAQAGIKPLVTLSHYEMPYGLVKNYGGWANRAVIDHFEHYARTVFTRYQHKVALWLTFNEINMSLHAPFTGVGLAEESGEAEVYQAIHHQLVASARAVKACHSLIPEAKIGNMLLGGLVYPLTCQPQDMLQAMEENRRWMFFGDVQARGQYPGYMQRFFRDHNITIEMTESDAEDLKHTVDFISFSYYMTGCVSHDESINKNAQGNILNMIPNPHLKSSEWGWQIDPVGLRVLLNKLWDRYQKPLFIVENGLGAKDSVEADGSIQDDYRIAYLNDHLVQVNEAIADGVDIMGYTSWGPIDLVSASHSQMSKRYGFIYVDRDDNGEGSLTRTRKKSFGWYAEVIKTRGLSLKK

SEQ ID NO: 4464 - protein, 153 aa, Bacillus cereus ATCC 10987
MSEEKKDSSRPPVRNYLKQIDDFFEQTPLRNVIADLNHFFQKGNRLLTFPVDLYEVGEELVVTAELPGIQKEQIQIEIQNEYLKVSVKEEILEEEEQTSHNYYRRERSISEASRLIKLPYSINKKAAKASYQNGVLEIRAPKLPQQHDILSID

SEQ ID NO: 4465 - protein, 605 aa, Bacillus cereus ATCC 10987
MIFHRGPDDEGYFRDEHVQFGFRRLSIIDLEAGHQPLTYENDRYVIIFNGEIYNYVELREMLLEKGATFATQSDTEVIIALYAHMKEKCVDYLRGMFAFMIWDREEKKLFGARDHFGIKPLYIAQQGDTTFFASEKKSIMHVMEDKGVNPTSLQHYFTYQYGPEPETLTIDVNKIEPGHYFVKEIGKEMEIHRYWKPYFNASSATKEEHIQAIRDVLYDSVKVHMRSDVPVGSFLSGGIDSSIIASIAREMNPNLLTFSVGFEQRGFSEVDVAKETAEKLGVKNHNVFISAKEFMDEFPKIIWHMDDPLADPAAVPLYFVAKEARKHVTVVLSGEGADELFGGYNIYREPNSLKMFSYIPSPGKSVLKALSGALKEGFKGKSFLERGCTPIEERYYGNAKIFREEEKAELMKYYNESVNYMDITKPLYNEIKDYDDVSKMQYIDMFTWLRGDILLKADKMTMANSLELRVPFLDKEVFDVASKIPTEFKIANGTTKAILREAARGIVPDHVLDRKKLGFPVPIRHWLKDEMHDWAINIINESKTEHLIDKQYVLNLLEAHCADKGDYSRKIWTVLAFMVWHQIYVEHKYDTNKFHEETKRAYSLV

SEQ ID NO: 4466 - protein, 753 aa, Escherichia coli
MSQHNEKNPHQHQSPLHDSSEAKPGMDSLAPEDGSHRPAAEPTPPGAQPTAPGSLKAPDTRNEKLNSLEDVRKGSENYALTTNQGVRIADDQNSLRAGSRGPTLLEDFILREKITHFDHERIPERIVAARGSAAHGYFQPYKSLSDITKADFLSDPNKITPVFVRFSTVQGGAGSADTVRDIRGFATKFYTEEGIFDLVGNNTPIFFIQDAHKFPDFVHAVKPEPHWAIPQGQSAHDTFWDYVSLQPETLHNVMWAMSDRGIPRSYRTMEGFGIHTFRLINAEGKATFVRFHWKPLAGKASLVWDEAQKLTGRDPDFHRRELWEAIEAGDFPEYELGFQLIPEEDEFKFDFDLLDPTKLIPEELVPVQRVGKMVLNRNPDNFFAENEQAAFHPGHIVPGLDFTNDPLLQGRLFSYTDTQISRLGGPNFHEIPINRPTCPYHNFQRDGMHRMGIDTNPANYEPNSINDNWPRETPPGPKRGGFESYQERVEGNKVRERSPSFGEYYSHPRLFWLSQTPFEQRHIVDGFSFELSKVVRPYIRERVVDQLAHIDLTLAQAVAKNLGIELTDDQLNITPPPDVNGLKKDPSLSLYAIPDGDVKGRVVAILLNDEVRSADLLAILKALKAKGVHAKLLYSRMGEVTADDGTVLPIAATFAGAPSLTVDAVIVPCGNIADIADNGDANYYLMEAYKHLKPIALAGDARKFKATIKIADQGEEGIVEADSADGSFMDELLTLMAAHRVWSRIPKIDKIPA

SEQ ID NO: 4467 - protein, 205 aa, Eucalyptus globulus
MGRGRVQLKRIENKINRQVTFSKRRCGLLKKAHEISVLCDADVALIVFSTKGKLFEYATDCCMERILERYERYSYAESQVLTNNAETNGNWTLEHAKLKARMEILQKNQKNLMGEELDSLSLKELQNLEHQLDTALKNIRSRKIQLMCESISELQRKDKALQEQNNMLAKKVKEKEKALAQQTQWDNPQDDGLTSSSGSLPSEWN

SEQ ID NO: 4468 - protein, 932 aa, Vibrio parahaemolyticus RIMD 2210633
MTRYGLRARVITLTLAPTLIIGLLLSGFFSFNRYQDLEKQVITTGNSIIEPLAIASESHLLAESREAVRRLISYAHRKNSKLVRSIAVFDEHHELFVTSNFHPNFEALMFPKDKPIPKLGNSEIYENSLILRVPILSEGHYLSELSNENQGTKAIGYIAVEMDLSSLRLQQYQEVFSAFLVLILGLGLASVFASRLMHDVTQPITHMKNVVDRIRRGHLDVRIEGKMHGELDQLKNGINAMAVSLSEYHVEMQHSIDQATSDLRETLEQLEIQNVELDIAKKRAQEAARVKSEFLANMSHELRTPLNGVIGFTRQMLKTQLSNSQTDYLQTIEKSANNLLNIINDILDFSKLEAGKLALENIPFDFRESLEEVINLQATSAHEKGLEITLKVDPKIPPGLVGDPLRIQQILTNLVGNSIKFTERGNIDVSVEMRSQAGDSVELQFMVRDTGIGISERQQAQLFQAFSQADASISRRYGGTGLGLVITQKLVSQMGGEISLTSRLHQGSTFWFTLRLNSTEMPMSDLIEVELLTGKQLLLVEPNMQAASVTQQILSQEGILVTYRSSLPENEEHYDYVLLNLAANQTYDEQSVAAWIEQAKRMAPSVIMGTPSTELALADQIMTEHQIQCLTKPLSRRKLLQSLINEHVEAPQAITAPVETEESERLPLTVLAVDDNPANLKLISALLKERVETVTACSNGQQAVNLATEKKYDLIFMDIQMPLMDGVTACQNIKELELNKDTPVIAVTAHAMAGERDRLLAAGMDDYLTKPIEEHVLQQVLVHWNPNTCTESIGKVAPSYVDEPESEAPATAENTQPDVIIDWQAALKQSANKEDLAKDMLRMLIDFIPEVEEVVDHALEQDDYSREELIHVIHKLHGSSSYCGVPRLKSLCATLEHALRSGASIEEIEPEMFELQDEMIKVTTTAKLYLEQ

SEQ ID NO: 4469 - protein, 132 aa, Triticum aestivum
  misc_feature (69)..(69): Xaa can be any naturally occurring amino acid
  misc_feature (102)..(102): Xaa can be any naturally occurring amino acid
MVSFEMNDLKKIGLGLTGFGVFFSFLGIVFFFDKGLIAMGNILFLSGLGLTIGLKSTMQFFTKPKNYKXFSRVLIGWPFFGMLLEAYGFIVLLSGYSGNSRXFLQRILLAGFSTTSLVPDVTETIRVIHSSS

SEQ ID NO: 4470 - protein, 466 aa, Shigella flexneri 2a str. 301
MDQKLLTDFRSELLDSRFGAKAISTIAESKRFPLHEMRDDVAFQIINDELYLDGNARQNLATFCQTWDDENVHKLMDLSINKNWIDKEEYPQSAAIDLRCVNMVADLWHAPAPKNGQAVGTNTIGSSEACMLGGMAMKWRWRKRMEAAGKPTDKPNLVCGPVQICWHKFARYWDVELREIPMRPGQLFMDPKRMIEACDENTIGVVPTFGVTYTGNYEFPQPLHDALDKFQADTGIDIDMHIDAASGGFLAPFVAPDIVWDFRLPRVKSISASGHKFGLAPLGCGWVIWRDEEALPQELVFNVDYLGGQIGTFAINFSRPAGQVIAQYYEFLRLGREGYTKVQNASYQVAAYLADEIAKQGPYEFICTGRPDEGIPAVCFKLKDGEDPGYTLYDLSERLRLRGWQVPAFTLGGEATDIVVMRIMCRRGFEMDFAELLLEDYKASLKYLSDHPKLQGIAQQNSFKHT

SEQ ID NO: 4471 - protein, 440 aa, Rhodospirillum rubrum
MTWKTWISASAIAFTAFTAGQLYHTEQAEAARGEETYQLLDLFADVFERVKRDYVEEVGDDQLIEAAINGMLTSLDPHSSYLNAKHFEDMQVQTKGEFGGLGIEVTQEDGFIKVVSPIDETPAALAGLQPGDFITHLDGESVLGLSLADAVEKMRGPVGKEIRLTIQRVGKEPFDVTLKRDTIKIQSVKSRMEGDVGYVRITSFSEQTEKSLREALDDLRSKGGDSIKGYVLDLRNNPGGLLEQAIAVSDVFLDKGEIVSTRARDAKDTQRFNARPGDLTKGMPVVVLINSGSASASEIVAGALQDHHRALIVGTKSFGKGSVQTIMPLPGHGAMRLTTARYYTPSGRSIQALGIDPDIQVEPARIEAISAQNEMRSEAELRNALKNDTLKPSLGVKPANGLPPSQVRNDQTPQADTDYQLARAVDLIRGLAIYRSKSIQ

SEQ ID NO: 4472 - protein, 753 aa, Escherichia coli
MSQHNEKNPHQHQSPLHDSSEAKPGMDSLAPEDGSHRPAAEPTPPGAQPTAPGSLKAPDTRNEKLNSLEDVRKGSENYALTTNQGVRIADDQNSLRAGSRGPTLLEDFILREKITHFDHERIPERIVHARGSAAHGYFQPYKSLSDITKADFLSDPNKITPVFVRFSTVQGGAGSADTVRDIRGFATKFYTEEGIFDLVGANTPIFFIQDAHKFPDFVHAVKPEPHWAIPQGQSAHDTFWDYVSLQPETLHNVMWAMSDRGIPRSYRTMEGFGIHTFRLINAEGKATFVRFHWKPLAGKASLVWDEAQKLTGRDPDFHRRELWEAIEAGDFPEYELGFQLIPEEDEFKFDFDLLDPTKLIPEELVPVQRVGKMVLNRNPDNFFAENEQAAFHPGHIVPGLDFTNDPLLQGRLFSYTDTQISRLGGPNFHEIPINRPTCPYHNFQRDGMHRMGIDTNPANYEPNSINDNWPRETPPGPKRGGFESYQERVEGNKVRERSPSFGEYYSHPRLFWLSQTPFEQRHIVDGFSFELSKVVRPYIRERVVDQLAHIDLTLAQAVAKNLGIELTDDQLNITPPPDVNGLKKDPSLSLYAIPDGDVKGRVVAILLNDEVRSADLLAILKALKAKGVHAKLLYSRMGEVTADDGTVLPIAATFAGAPSLTVDAVIVPCGNIADIADNGDANYYLMEAYKHLKPIALAGDARKFKATIKIADQGEEGIVEADSADGSFMDELLTLMAAHRVWSRIPKIDKIPA

SEQ ID NO: 4473 - protein, 524 aa, Arabidopsis thaliana
MDSFSYSSMKSMLIQARGSLNSRLSEFEPLVLLLVPLVSLFLAQIIGSVFGVVHEKGLKACLIGFIMGLLKMIPGVQNYIDAEKQKVVDQLQSGSSSKKKNKTEVLPVKGLGVEVLEKMENEKRNDAIWQGKCSGTVFAHTNPLHIDVFQSVVRFESEVVAMTAALLGSKETASGGQICGNMTSGGTESIVLAVKSSRDYMKYKKGITRPEMIIPESGHSAYDKAAQYFKIKLWRVPVDKDFRADVKATRRHINRNTIMIVGSAPGFPHGIIDPIEELGQLALSYGICFHVDLCLGGFVLPFARKLGYQIPPFDFSVQGVTSISVDVHKYGLAPKGTSTVLYRNHEIRKHQFVAVTEWSGGLYVSPTIAGSRPGSLVAGAWAAMMSLGEEGYLQNTSKIMEASKRLEEGVREIHELFVIGKPDMTIVAFGSKALDIFEVNDIMSSKGWHLNALQRPNSIHICITLQHVPVVDDFLRDLREAVETVKANPGPITGGLAPIYGAAGKMPDRGMVNELLVSFMDSQY

SEQ ID NO: 4474 - protein, 671 aa, Idiomarina loihiensis L2TR
MCGIAGVFHHQTERAIEPQTLVNMAAIMHHRGPDGFGYEVQQDYGVGFSHARLSIIDLDEKRGRQPFISADKRLMLTHNGEFYDFKRIRADLTARGARFNSKSDSEIVLHLFERYGLEDTLKELRGEFAFGLFDAKDESLYLVRDRFGIKPLYWTETEHGVVFGSELKVLFAHPDVKREFSAEGLYHQLIQVMVPGSTAFEGINQVQPGYVVKLQRKNGKVVATEHKYWDVDFPPEESYPGADVDEESYIEGVRAKLLEAVQHRMTADVPVGCYLSGGIDSCAILGLASASTQTSVKAFTIGFDSADYDETPIAEEMAAATKADHHIMRLKADDLYDHFVKTLWHTERTIYNTLGVAKYLMSKEVHEAGYKVVMTGEGSDELFAGYPAFRKDMFLHGLDHLPEVERVEWQELLEKNNKLFKGAMLAREEFVSEAFNQKMGFTPSCVQPWLSCSSVALPLMSENKRKQVEGYDPSLAIANTLDKDMLDGRHPLDRAQYVWIKTMLEGQILTWGGDRVDMANSMEARPAFLDHHLAEYAFTVPPHLRIKGNKEKYVLREAMKGLLPETLYKREKFAFMAPPAHTDPEKWKAVEKLAEQFLNAEAVKSAGLLDYDEVVRTFERHQDENVPNEERVQLDAVINHMLGVQVLHHHFVATDVPAQAQQRATELGWTA

SEQ ID NO: 4475 - protein, 373 aa, Sinorhizobium meliloti
MASLFDPITIGDISLSNRVVMAPLTRNRSPQAVPNDLNVAYYEQRASAGLLITEGTAISHQGQGYADVPGLYKPEALAGWRKVTDSVHKAGGKIVVQMWHVGRISHDSLQPQGGKPVAPSAIRAKSKTYLVNPDGTGSFAETSEPRALEPAEIAGIVEDYRKASRAAIEAGFDGVEIHAANGYLIDQFLRSGSNERTDAYGGSIENRARFLFEVVDAVTKEIGAGRVGIRISPVTPANDAFDPDPQPLFTYVVEGLARYPLAYVHVIEGATGGARDHQQGDRPFDYTSLRAAYAAAGGRAAWMTNNGYDRGLALKTVESGEADLVAFGKPFIANPDLVRRLRDNVALNAPDQATFYGGGAKGYTDYPSLENVA

SEQ ID NO: 4476 - protein, 370 aa, Photorhabdus luminescens subsp. laumondii TTO1
MRNIMLFERYSLNGLSLSNRIVMPPMTRSRAGTNGIATDLMAEYYAQRASAGLIISEGTQISQQGQGYAWTPGIYKPEQIIGWKKVTDAVHMAGGKIFAQLWHVGRVSHTILQPNNSEPVSPSALQAKGVKVFLDVAGRGPEHGIGEMVQHSQPRALTLDEIPDIVNDYVQAANNAIAAGFDGVELHAANGYLINQFIDSQTNLRDDEYGGTLQNRLRFLREVATSVASAIGKDKLGVRLAPLTTLMGSKDDTPEATYLAAASVLNDIGIAYIHIAEADWEDAPVMPVTFKEAFRLLYHGTLIYSGKYTLERAEEALTKGWADLIGFGRPFIANPDLPYRLANKLELNPPIKEKFFGGNMEGYTDYLAIN

SEQ ID NO: 4477 - protein, 753 aa, Escherichia coli
MSQHNEKNPHQHQSPLHDSSEAKPGMDSLAPEDGSHRPAAEPTPPGAQPTAPGSLKAPDTRNEKLNSLEDVRKGSENYALTTNQGVRIADDQNSLRAGSRGPTLLEDFILREKITHFDHERIPERIVHARGSAAHGYFQPYKSLSDITKADFLSDPNKITPVFVRFSTVQGGAGSADTVRDIRGFATKFYTEEGIFDLVGHNTPIFFIQDAHKFPDFVHAVKPEPHWAIPQGQSAHDTFWDYVSLQPETLHNVMWAMSDRGIPRSYRTMEGFGIHTFRLINAEGKATFVRFHWKPLAGKASLVWDEAQKLTGRDPDFHRRELWEAIEAGDFPEYELGFQLIPEEDEFKFDFDLLDPTKLIPEELVPVQRVGKMVLNRNPDNFFAENEQAAFHPGHIVPGLDFTNDPLLQGRLFSYTDTQISRLGGPNFHEIPINRPTCPYHNFQRDGMHRMGIDTNPANYEPNSINDNWPRETPPGPKRGGFESYQERVEGNKVRERSPSFGEYYSHPRLFWLSQTPFEQRHIVDGFSFELSKVVRPYIRERVVDQLAHIDLTLAQAVAKNLGIELTDDQLNITPPPDVNGLKKDPSLSLYAIPDGDVKGRVVAILLNDEVRSADLLAILKALKAKGVHAKLLYSRMGEVTADDGTVLPIAATFAGAPSLTVDAVIVPCGNIADIADNGDANYYLMEAYKHLKPIALAGDARKFKATIKIADQGEEGIVEADSADGSFMDELLTLMAAHRVWSRIPKIDKIPA

SEQ ID NO: 4478 - protein, 345 aa, Bacillus anthracis str. 'Ames Ancestor'
MNSELFSPYTIKDVTLKNRIVMSPMCMYSSENEDGQVTNFHLIHYGTRAAGQVGLVMIEATAVLPEGRISNKDLGIWDDSLIEGLHKTTTFIHDNGAKAAIQLAHAGRKAELETDALAPSAVPFNETMKIPVEMSIHQIKNTILAFQQAAIRSKQAGFDVIEIHGAHGYLINEFLSPLSNKRTDEYGGSPENRYRFLREIIDSINEVWNGPLFVRISANDYHPDGLTVQDYVQYTKWMKEQGVDLIDCSSGAVVPARIDVYPGYQVQYAKHIKEHANIATGAVGLITTGAQAEQILNNNEADLIFIGRELLRNPYFPRIAANELGFELEEPHQYERAPGKISTNK

SEQ ID NO: 4479 - protein, 479 aa, Glycine max
MILLFGYILSKGNNIHSRLLCPSCISIGYRAPPRVSYVGPPPTTPTPEIESKPEIMEKVGVAVNSKNQESKATSTITIKGFMSLLMKSVDENGDGSKRVISLGMGDPTLTTYFPISNVAEKAVAEALQSHRFRGYAPTAGLPQARIAIAEYLSRDLPYQLSSDDVYITCGCTQAIDVSVAMLARPGANIILPRPGFPLYELSASFRGVEVRHYDLLPEKGWEVDLDAVEALADQNTVALVIINPGNPCGNVYSYHHLEKIAETAKRVGTIVIADEVYGHLAFAGKPFVPMGVFGSIVPVLTLGSFSKRWIVPGWRLGWFVTNDPSGTFRNPKVDERFKKYFDLLGGPATFIQAAVPQIIEHTEKVFFKKTIDNLRHVADICCKELKDIPYIICPYKPEGSMAMMVKLNLSLLEDISDDIDFCFKLAKEESVIILPGTAVGLNNWLRIIFATDPVALVEGLKRVKSFCERHARKWSMTTE

SEQ ID NO: 4480 - protein, 682 aa, Cryptococcus neoformans var. neoformans B-3501A
MVTGDAKYRQMAEYTIDQDDKTPYTTYFGVKVSDTDNSLRAGARGPTLLEDFHNREKIQHFDHERIPERVVHARGAGAFGEFKLHTPLTGITTAKVLTDTSKVVPAYVRFSTVAGSRGSADTVRDVRGFATRLYTDEGNWDIVGNNIPVFFINAQTAHDNAWDFMSLHKPALHMQQWITSDRAIPRSYRMMQGFGVHTFRLINEEGKSTFVKYHWIPHLGTHSLVWDEALKIAGQDPDFHRRDLWDAIEAGTYAKWDLGVQLIKEEDEHKFDFDLLDATKLIPDELVPVQKIGTLTLNRNPVDYFSEVEQVAFCTQHIVPGMDFTDDPLLAGRNFSYPDTQVSRLGINWKHIPVNRPVCPFMTTMREGQMSMFSKNNRTPYHPNRNENLPLTSPKEGGFKSYPAKVSGIKERVQAPKFNDHSSQATLFWNSMSDVEKKHIIDAYKFELSHCTDNLVIQNVINCINEIDHGLATAVHSGFPHLSLPEAKPNHGKRTEYLSQITGKNQIFTAAGRKIGIFLVPGYVYSQVAPLLAAFKAAGCMVKFVGPTLGPVEASDGQSFTTEFTFEGCRSTYFDALIFAGGPDNAFLSKLKVGRLIHAAREAYMHLKAVGAVGNATQWLVDTCLPGEFSPKVKTESSVVQENGVVFAPINPTLHSAQFAKQFLDGVANHRVWDREVSHIAA

SEQ ID NO: 4481 - protein, 100 aa, Zea mays
  misc_feature (72)..(72): Xaa can be any naturally occurring amino acid
  misc_feature (85)..(85): Xaa can be any naturally occurring amino acid
  misc_feature (90)..(90): Xaa can be any naturally occurring amino acid
  misc_feature (93)..(93): Xaa can be any naturally occurring amino acid
  misc_feature (96)..(96): Xaa can be any naturally occurring amino acid
  misc_feature (99)..(99): Xaa can be any naturally occurring amino acid
MDWGNRTKAAAAAAAPDERAGGGEGLGGYVKVMTDEQMEVLRKQISIYATICEQLVEMHRVLTEHQDTIAGXGCLAHLYCDPLIXPGGHXITXARXRWXP

SEQ ID NO: 4482 - protein, 581 aa, Oryza sativa
MYRAAAAAASSISRSSSALRKQLSRGGCGEQRLWARGYAAKEVAFGVGARAALLQGVNDLADAVKVTMGPKGRNVIIERSHRAPKVTKDGVTVAKSIEFEDSAKNVGANLVKQVAEATNKVAGDGTTCATVLTQAILTEGCKAVAAGVNVMDLRNGINKAISSITTHLKSKAWIINSSEEINQVATISANGEKEIGDLISKAMEKVGKDGVITITDGKTLDNELEAVQGMKLSRGCISPYFVTDQKTQKCEMENPLILIHDKKISTMNSLLPVLEMSIKNRRPLLIIAEDVEGEALSMLVLNKHRAGLKICAVKAPGFGENRRANLDDVAVLTGGEVVSEDQGLDLGKVELQMLGTAKKVTVSLDDTIILDGGGDKQQIEERCQQLRESMDKSTAVFDKEKAQERLSKLSGGVAVLKIGGASEVEVGEKKDRVTDALHAARAAVEEGIVPGGGVALLYATKELDKIITANEDEKIGVQIIKNALKAPLMTIAANAGIDGGVVIGKLIEQDNLNMGYDAARGEYVDMIKAGIIDPVKVIRTALQDASSVSLLMTTTEAAVAEPPAAKARMASRMPQMSGMDF

SEQ ID NO: 4483 - protein, 260 aa, Chromobacterium violaceum ATCC 12472
MGESLMAAMFSIAPVGAFTDNYIWVLREGARAVAVDPGEAAPLLRHLEQEQLRLEAVLITHHHADHCGGLADVLRAWPGIPVYGPAGLPGVSHPVMEGDAVSLSMGRAEVLEVPGHTLDHLAYLLEDALFCGDTLFAAGCGRLFEGTPGQMLASLKKLAGLPPNTKVYPAHEYTLSNLRFALAADQHNPILAMRHSRDSALRDRGLPTLPSTIALETASNPFLRSGEPALREALRRRGGQPGDSEETCFALLREWKNDFR

SEQ ID NO: 4484 - protein, 282 aa, Bacillus licheniformis ATCC 14580
MMTAKNLQDRIKLNNGTAMPWFGLGVFKVEEGPELVQAVKTAIKHGYRSIDTAAIYGNEEGVGQGIREGLKEAGISREDLFVTSKVWNDDLGYDETIAAYEASLEKLGLDYLDLYLIHWPVEGRYKAAWKALETLYEQGRVKAIGVSNFQIHHLEDLLKDAAVKPAINQVEYHPRLTQKELQAFCRAHGIQLQAWSPLMQGQLLSHPLLKDIADKYGKTPAQVILRWDLQNGVVTIPKSTKAERIAQNADIFDFELTTEEMKQIDALNENTRVGPDPDNFDF

SEQ ID NO: 4485 - protein, 134 aa, Zea mays
MRKHRIVSLVAALLILLALAVSSNRNAQEDSMADNTGTLVGGIQDVPENENDLHLQELARFAVDEHNKKANALLGFEKLVKAKTQVVAGTMYYLTIEVKDGEVKKLYEAKVWEKPWENLKGLQEFKPVEEGASA

SEQ ID NO: 4486 - protein, 595 aa, Agrobacterium tumefaciens str. C58
MMNAANYRKWGAQRHQSGDTDFSIWAPASATVKLWLNDAEFDMHTAGDGWHDITKPALPGDRYGFVLADRTRVADPASNRQQEGPRGPSLIVNHDFAWKNPNWKGRPWHEAVVYELHIGTFTPEGTFAAAAEKLEYLADVGITTIELMPLATFAGSRGWGYDGVLQFSPQRDYGTPDELKAFIDQAHGHGIMVLLDVVYNHFGPAGNTLQAYAPAFFKKHETPWGPAPDFNRAEVRSFFLQNAFYWLETYRFDGLRIDAADHLAGGDGEVDFLIEMAREVKRTIRNRHVHLVIEDARNAASPMTPMADGAILVDAQWNDDFHHVIHVATTNEEGGIYEDFASRPYENLRRSLATGFVYQGEPRPSRNFAASGEPSGHLPPHRFVNFLHNHDQAGNRLRGERLRALIPPPLFGTLEAILLLCPQTPLVFMGDEHGSANPFFFFSDHPDHNREQEIRNRLKQAESFQGELPPDASQMVMDPNDQHTMQLSTLKWTHAETTEGRQSRADMAALLAKRRGHIWPLLCSHFEKGISLDCEPRCLAIDWHFKAGRLEMRANLSENMCELPAVKGEILHRNGSVGNTRYEGYAAQFAIYAGR

SEQ ID NO: 4487 - protein, 484 aa, Proteus mirabilis
  misc_feature (53)..(53): Xaa can be any naturally occurring amino acid
MEKKKLTTAAGAPVVDNNNVITAGPRGPMLLQDVWFLEKLAHFDREVIPERRXHAKGSGAFGTFTVTHDITKYTRAKIFSEVGKKTEMFARFSTVAGERGAADAERDIRGFALKFYTEEGNWDMVGNNTPVFYLRDPLKFPDLNHIVKRDPRTNMRNMAYKWDFFSHLPESLHQLTIDMSDRGLPLSYRFVHGFGSHTYSFINKDNERFWVKFHFRCQQGIKNLMDDEAEALVGKDRESSQRDLFEAIKRGDYPRWKLQIQIMPEKEASTVPYNPFDLTKVWPHADYPLMDVGYFELNRNPDNYFSDVEQAAFSPANIVPGISFSPDKMLQGRLFSYGDAHRYRLGVNHHQIPVNAPKCPFHNYHRDGAMRVDGNSGNGITYEPNSGGVFQEQPDFKEPPLSIEGAADHWNHREDEDYFSQPRALYELLSDDEHQRMFARIAGELSQASKETQQRQIDLFTKVHPEYGAGVEKAIKVLEGKDAK

SEQ ID NO: 4488 - protein, 472 aa, Spinacia oleracea
MATAVSTVGAATRAPLNLNGSSAGASVPTSGFLGSSLKKHTNVRFPSSSRTTSMTVKAAENEEKNTDKWAHLAKDFSDDQLDIRRGKGMVDSLFQAPADAGTHVPIQSSFEYESQGLRKYDIDNMLGDFYIAPAFMDKLVVHITKNFLNLPNIKIPLILGVWGGKGQGKSFQCELVFAKLGINPIMMSAGELESGNAGEPAKLIRQRYREAADLIAKGKMCALFINDLEPGAGRMGGTTQYTVNNQMVNATLMNIADNPTNVQLPGMYNKQDNARVPIIVTGNDFSTLYAPLIRDGRMEKFYWAPTREDRIGVCTGIFKTDKVPAEHVVKLVDAFPGQSIDFFGALRARVYHDEVRKWVNSVGVDNVGKKLVNSKDGPPVFEQPEMTLQKLMEYGNMLVQEQENVKRVQLADQYMSSAALGDANKDAIDRGTFFGKAAQQVSLPVAQGCTDPEAKNYDPTARSDDGSCTYNL

SEQ ID NO: 4489 - protein, 464 aa, Listeria monocytogenes str. 4b F2365
MLYSKENKESYLEPVFGSSAEDRDIPKYTLGKEPLEPRIAYRLVKDELLDEGSARQNLATFCQTYMEDEATKLMSETLEKNAIDKSEYPRTAELENRCVNIIADLWHAPKNQKFMGTSTIGSSEACMLGGMAMKFAWRKRAEKLGLDIYAQKPNLVISSGYQVCWEKFCVYWDIDMRVVPMDKDHMQLNTDQVLDYVDEYTIGVVGILGITYTGRYDDIYALNEKLEEYNSKTDYKVYIHVDAASGGFFTPFVEPDIIWDFRLKNVISINTSGHKYGLVYPGIGWVLWKDESYLPEELIFKVSYLGGEMPTMQINFSRSASHIIGQYYNFLRYGFEGYRTIHQKTSDVAQYLAHAVEQTGYFDIYNDGSHLPIVCYKLKDDANVKWTLYDLADRLQMRGWQVPAYPLPKNLENIIIQRYVCRADLGFNMAEEFIQDFQASIQELNNAHILFHDTQQSGVHGFTH

SEQ ID NO: 4490 - protein, 435 aa, Spinacia oleracea
MATAVSTVGAATRAPLNLNGSSAGASVPTSGFLGSSLKKHTNVRFPSSSRTTSMTVKAAENEEKNTDKWAHLAKDFSDDQLDIRRGKGMVDSLFQAPADAGTHVPIQSSFEYESQGLRKYDIDNMLGDFYIAPAFMDKLVVHITKNFLNLPNIKIPLILGVWGGKGQGKSFQCELVFAKLGINPIMMSAGELESGNAGEPAKLIRQRYREAADLIAKGKMCALFINDLEPGAGRMGGTTQYTVNNQMVNATLMNIADNPTNVQLPGMYNKQDNARVPIIVTGNDFSTLYAPLIRDGRMEKFYWAPTREDRIGVCTGIFKTDKVPAEHVVKLVDAFPGQSIDFFGALRARVYHDEVRKWVNSVGVDNVGKKLVNSKDGPPVFEQPEMTLQKLMEYGNMLVQEQENVKRVQLADQYMSSAALGDANKDAIDRGTFFG

SEQ ID NO: 4491 - protein, 124 aa, Nicotiana tabacum
LGFPGSNSGETSAFANTRVDWKETPEAHVFKADLPGLKKEEVKVEIEDDRVLQISGERNVEKEDKNDTWHRVERSSGKFMRRFRLPENAKMDQVKAAMENGVLTVTVPKEEVKKPDVKSIDISG

SEQ ID NO: 4492 - protein, 124 aa, Nicotiana tabacum
LGFPGSNSRETSAFAHTRVDWKETPEAHVFKADLPGLKKEEVKVEIEDDRVLQISGERNVEKEDKNDTWHRVERSSGKFMRRFRLPENAKMDQVKAAMENGVLTVTVPKEEVKKPDVKSIDITG

SEQ ID NO: 4493 - protein, 145 aa, Bacillus cereus ATCC 10987
MRNLFPEITKRQNGIFDFGPSLLEGMTDAFFKPMNMDTFKVDVHEQSDKYTVKADLPGFQKENIQVEFEQDVLTIQATNHNEVEEKNENGIYIRKERSIGSVTRRFNFQQVEEENVKANYKDGVLTIELPKLKEEKNSKTTINIE

SEQ ID NO: 4494 - protein, 124 aa, Nicotiana tabacum
LGFPGSNSGETSAFANTRVDWKETPEAHVFKADLPGLKKEEVKVEIEDDRVLQISGDRNVEKEDKNDTWHRVERSSGKFMRRFRLPENAKMDQVKAAMENGVLTVTVPKEEVKKPDVKSIEITG

SEQ ID NO: 4495 - protein, 407 aa, Candida albicans SC5314
MTIESTNSFVVPSDTKLIDVTPLGSTKLFQPIKVGNNVLPQRIAYVPTTRFRASKDHIPSDLQLNYYNARSQYPGTLIITEATFASERGGIDLHVPGIYNDVQAKSWKKINEAIHGNGSFSSVQLWYLGRVANAKDLKDAGLPLIAPSAVYWDENSEKLAKEAGNELRALTEEEIDHIVEVEYPNAAKHALEAGFDYVEIHGAHGYLLDQFLNLASNKRTDKYGCGSIENRARLLLRVVDKLIEVVGANRLALRLSPWASFQGMEIEGEEIHSYILQQLQQRADNGQQLAYISLVEPRVTGIYDVSLKDQQGRSNEFAYKIWKGNFVRAGNYTYDAPEFKTLINDLKNDRTIIGFSRFFTSNPDLVEKLKLGKPLNYYNREEFYKYYNYGYNSYDESEKQVIGKPLA

SEQ ID NO: 4496 - protein, 338 aa, Listeria monocytogenes EGD-e
MSKLFSEYKLKDVTLKNRIVMSPMCMYSVENKDGIATDFHFAHYVSRAAGGTGLVILEATAVQEVGRISEFDLGLWNDEQVPALKKLVGGLHYHGAKAGIQLAHAGRKAVLPGEIVAPSAIAFDEKSDKPVELTKEAIKEVVADFKRAAYRAKEAGFDVIEIHAAHGYLIHQFLSPITNRREDNYGGPAGNRYKILSDIIKAVKEVWDGPIIVRVSATDYAHGGLQLEDHIPFAKWMKADGVELIDVSTGGLVNVAPPVFPGYQVPFADEIRRGAGIATGALGLITRGEQAEEILCNERADLIIVGRELLRNPYFAKDAAKQLGETIEAPKQYSRAWK

SEQ ID NO: 4497 - protein, 255 aa, Rhodobacter sphaeroides 2.4.1
MPLELVTVPCLSDNYAFLVHDAGTGETSVVDVPEAGPILKALEERGWHLSQILLTHHHSDHVAGVEELRAATGARVAGAAADAHRLPPLDLELAEGDLVRVGASEGRVIEVPGHTVGHIAFHFPDSSLAFTGDSLMAMGCGRLFEGTAEAMWQSLRKLSALPPETMICSGHEYAASNARFAATLEPDSPMLIFRVGSIAAARKEGRPTVPSHLSDEIATNPFLRAGEASLKAAVGMVDAEDAEVFAEIRRRKDKF

SEQ ID NO: 4498 - protein, 272 aa, Brassica napus
MAAAVSTVGAINRAPLSLNGSGAGAASVPATTFLGKKVVTASRFTQSNNKKSNGSFKVVAVKEDKQTDGDRWKGLAYDTSDDQQDITRGKGMVDSVFQAPMGTGTHNAVLSSYEYISQGLKQYNLDNMMDGLYIAPAFMDKLVVHITKNFLTLPNIKVPLILGVWGGKGQGKSFQCELVMAKMGINPIMMSAGELESGNAGEPAKLIRQRYREAADLIKKGKMCCLFINDLDAGAGRMGGTTQYTVNNQMVNATLMNIADNPTNVQLPGMYN

SEQ ID NO: 4499 - protein, 515 aa, Glycine max
MDRSTGRGGGGSVDMFLRNYKLGKTLGIGSFGKVKIAEHVRTGHKVAIKILNRHKIKNMEMEEKVRREIKILRLFMHHHIIRLYEVVETPTDIYVVMEYVKSGELFDYIVEKGRLQEDEARHFFQQIISGVEYCHRNMVVHRDLKPENLLLDSKFNIKIADFGLSNIMRDGHFLKTSCGSPNYAAPEVISGKLYAGPEVDVWSCGVILYALLCGTLPFDDENIPNLFKKIKGGIYTLPSHLSPGARDLIPRMLVVDPMKRMTIPEIRQHPWFQVHLPRYLAVPPPDTLQQAKKIDEEILQEVVNMGFDRNQLVESLSNRIQNEGTVTYYLLLDNRFRVSSGYLGAEFQETMDSGFNRMHSGEVASPVVGHHSTGYMDYQGVGMRQQFPVERKWALGLQSRAQPREIMTEVLKALQELNVCLEEDWTLYHECRWVAGTAGHHEGMINNSLHSNHYFGNDSGIIENEAVSKSNVVKFEVQLYKTREEKYLLDLQRVQGPQFLFLDLCAAFLSQLRVL

SEQ ID NO: 4500 - protein, 137 aa, Arabidopsis thaliana
  misc_feature (106)..(106): Xaa can be any naturally occurring amino acid
  misc_feature (109)..(109): Xaa can be any naturally occurring amino acid
MEMESFIDDLLNFSVPEEEEDDDEHTQPPRNITRRKTGLRPTDSFGLFNTDDLGVVEEEDLEWISNKNAFPVIETFVGVLPSEHFPITSLLEREATEVKQLSPVSXVLXTGSHSSTTAYLKQAGKPEGWVTGPLPTT

SEQ ID NO: 4501 - protein, 217 aa, Brassica napus
  misc_feature (172)..(172): Xaa can be any naturally occurring amino acid
MAQQSLIYSFVARGTVILVEFTDFKGNFTTVAAQCLQKLPSSNNKFTYNCDGHTFNYLVEDGFTYCVVAVDSAGRQIPMAFLERVKEDFNKRYGGGKAATAQANSLNKEFGSKLKEHMQYCMDHPDEISKLAKVKAQVSEVKGVMMENIEKVLDRGEKIELLVDKTENLRSXDFRTTGTQMRRKMWLQNMKIKLIVLAIIVALILIIVLSVCHGFKC

SEQ ID NO: 4502 - protein, 83 aa, Cucumis sativus
ERVVHARGASAKGFLRVTHDITNLSCADFLRAPGVQTPVIVRFSTVIHERGSPETLRDPRGFAVKFYTREVRILVVYAFIGCT

SEQ ID NO: 4503 - protein, 682 aa, Salmonella typhimurium LT2
MNTFFRLTALAGLLALAGQSFAVEDITRADQIPVLKEETQHATVSERVTSRFTRSHYRQFDLDEAFSAKIFDRYLNLLDYSHNVLLASDVEQFAKKKTVLGDELRTGKLDVFYDLYNLAQKRRFERYQYALKVLERPMDFTGNDTFNLDRSKAPWPKDEAELNALWDGKVKFDELSLKLTGKSDKEIRETLTRRYKFAIRRLAQTNSEDVFSLAMTAFAREIDPHTNYLSPRNTEQFNTEMSLSLEGIGAVLQMDDDYTVINSLVAGGPAAKSKSISVGDRIVGVGQAGKPMVDVIGWRLDDVVALIKGPKGSKVRLEILPAGKGTKTRIITLTRERIRLEDRAVKMSVKTVGKEKVGVLDIPGFYVGLTDDVKVQLQKLEKQNVNSIVIDLRSNGGGALTEAVSLSGLFIPSGPIVQVRDNNGKVREDSDTDGVVYYKGPLVVLVDRFSASASEIFAAAMQDYGRALIVGEPTFGKGTVQQYRSLNRIYDQMLRPEWPALGSVQYTIQKFYRVNGGSTQRKGVTPDIIMPTGNEETETGEKFEDNALPWDSIDAAKYVKSDDLAPFGPELLKEHNARIAKDPEFQYIMKDIARFNAMKDKRNIVSLNYAQREKENNEEDALRLARINDRFKREGKPLLKKLDDLPKDYQEPDPYLDETVKIALDLAHLEKEKPAEQAAANK

SEQ ID NO: 4504 - protein, 431 aa, Arachis hypogaea
GRGEFGVTYLCIDRGSRELLACKSISKRKLRTAVDVEDVRRKVAIMRHLPRSSSIVSLREACEDDNAVHLVMELCEGGELFDRIVARGRYTERAAAVVARTVVEVVQLCHRHGVIHRDLKPENFLFANKKENSPLKAIDFGLSVFFKPGEKFSEIVGSPYYMAPEVLKRNYGPEIDIWSAGVILYILLCGVPPFWAESEQGGAQAILRGLIDFKREPWPSISESAKSLVKQMLEPDPKLRLTAKQVLEHPWIQMLRRAPNIPLGDAVKSRLKQFSMMNRFQKKALRVIADFLSNEEVEDIKDIFQKMDTDNDGIVSIEELKAEFQNFGSQLAESEIQMLLEAVNTNGKGTLDYGEFVAVSLHLKRMANDEHLRKAFSYFDKDGNGYIEPDELRNALMEDGTDDCADVANDIFQEVDTDKDGRISYEEFVAM

SEQ ID NO: 4505 - protein, 289 aa, Salmonella enterica subsp. enterica serovar Typhi Ty2
MEYSILSNNLKMPMVGFGVFKVTDKEECQQSVLSAIRSGYRLIDTAAVYGNEDAVGDAVREAIATGLCTREELFITSKLWVQDMANYDLAKAGIEASLKKSGLDYFDLYLLHQAMGDYFSAWRALEDAYEAGKLKAIGVSNFYAHVLANFCETVRITPMVNQVELHPYFAQPAALETMKHYNVQPEAWAPLGGGRHKPYENVMLQRIADAHQKTIAQVVLRWNVQRGVTVIPKSTRQERIEENFAIWDFSLTDNEMAQINALDLGYVGEAVKHFNPEFVRGCLGVKIHD

SEQ ID NO: 4506 - protein, 687 aa, Ralstonia solanacearum
MRYPHLFKPLQLNQLTLRNRIVSTAHAEVYAEPDGLPGERYIRYYEEKAKGGVGLAVCGGSSPVSIDSPQGWWKSVNLATDRIIDPLARLAETMHRHGAKIMIQATHMGRRSAFHGEHWPHLMSPSGVREPVHRGNAKIIEVEEIQRIITDFAAAAKRVKAAGMDGIEISAAHQHLIDQFWSPRTNHRTDEWGGSLENRLRFGVEVLKAVREAVGKDFCVGLRMCGDEFHEDGLDHEQLKEIAQAMSETGLIDYLGVIGSGADTHNTLANCMPPMALPPEPFVHLAAGIKSVVKVPIMHAQSIRDAGQAERLLASGMIDLVGMTRAQMADPHMVIKIRDGREDEIKQCVGANYCIDRQYNGLDVLCIQNAATSREETMPHVIEKSRGPKRKVVVVGAGPAGLEAARVARSRGHDVVLFEKNHEVGGQIMLAAKAPQREQMSGIVRWFDMETKRLGVDRRLGVEVDTKAIMAEKPDIIVLATGGRAFSDQVPDWGVADGLAVSSWDILSGKVEPKQNVLVYDGVSTHAGAGVADFIASRGSKVEIVTPDVKVADDCGGTTFPIFYRRLYAQGVIHTPNYWLDRVYEEDGKKIAVIRNEYTEELEERAIDQVVIENGITPNDALYWKLKPESVNRGQIDVHKLFAAEPQPWLSEELGNGRFLLFRVGDCISMHNIHGAIYDALRLVKDF

SEQ ID NO: 4507 - protein, 102 aa, Nicotiana tabacum
PNSYVFVVDMPGLKSGDINVQVEDDNVLLISGERKREEEKEGAKYIRMERRVGKFMRKFTLLENANTDAISAVCQDGVLTVTVQKLPPPEPKKPKTIEVKIA

SEQ ID NO: 4508 - protein, 471 aa, Streptococcus pneumoniae TIGR4
MTIFPDDFLWGGAVAANQVEGAYNEDGKGLSVQDVLPKGGLGEATENPTEDNLKLIGIDFYHKYKEDISLFSEMGFNVFRTSIAWSRIFPKGDEEEPNEAGLKYYDELFDELHAHGIEPLVTLSHYETPLYLARKYHGWVDRRMIHFYEKFARTVLERYKDKVKYWLTFNEVNSVLELPFTSGGIDIPKENLSKQELYQAIHHELVASSLVTKIAREINSEFKVGCMVLAMPAYPMTPNPKDVWATHEYENLNYLFSDVHVRGYYPNYAKRYFKENDINIEFAAEDAELLKNYTVDFLSFSYYMSVTQSALPTQYNSGEGNIIGGLVNPYLESSEWGWQIDPIGLRIILNRYYDRYQIPLFIVENGLGAKDQLIKDELNNLTVQDDYRIQYMKEHLLQVAEALQDGVEIMGYTSWGCIDCVSMSTAQLSKRYGLIYVDRNDDGSGTLNRYKKMSFTWYKEVIESNGESLFK

SEQ ID NO: 4509 - protein, 642 aa, Streptococcus pneumoniae R6
MDNREALKTFMTGENFYLQHYLGAHREELNGEHGYTFRVWAPNAQAVHLVGDFTNWIENQIPMVRNDFGVWEVFTNMAQEGHIYKYHVTRQNGHQLMKIDPFAVRYEARPGTGAIVTELPEKKWKDGLWLARRKRWGFAERPVNIYEVHAGSWKRNPDGSPYSFAQLKDELIPYLVEMNYTHIEFMPLMSHPLGLSWGYQLMGYFALEHAYGRPEEFQDFVEECHTHNIGVIVDWVPGHFTINDDALAYYDGTPTFEYQDHNKAHNHGWGALNFDLGKNEVQSFLISCIKHWIDVYHLDGIRVDAVSNMLYLDYDDAPWTPNKDGGNLNYEGYYFLQRLNEVIKLEYPDVMMIAEESSSATKITGMKEIGGLGFDYKWNMGWMNDILRFYEEDPIYRKYDFNLVTFSFMYVFKENYLLPFSHDEVVHGKKSMMHKMWGDRYNQFAGLRNLYTYQICHPGKKLLFMGSEYGQFLEWKSEEQLEWSNLEDPMNAKMKYFTSQLNQFYKDHRCLWEIDTSYDGIEIIDADNRDQSVLSFIRKGKKGEMLVCIFNMVPVERKDFTIGLPVAGIYEEVWNTELEEWGGVWKEHNQTVQTQEGLWKDYEQTLTFTLPAMGASVWKIKRRLKSTKTVTNKNPKGVENEK

SEQ ID NO: 4510 - protein, 115 aa, Brassica napus
  misc_feature (6)..(6): Xaa can be any naturally occurring amino acid
  misc_feature (14)..(14): Xaa can be any naturally occurring amino acid
  misc_feature (75)..(75): Xaa can be any naturally occurring amino acid
  misc_feature (100)..(100): Xaa can be any naturally occurring amino acid
  misc_feature (102)..(102): Xaa can be any naturally occurring amino acid
MTSEHXFISRKDEXDRVIVFERGDLVFVFNFHWTSSYFDYRIGCSNPGKYKIVLDSDDPLFGGFGRLDRTAEYFXFEGSYDGRPSSFMVYTPCTTAVVYXLXDRDDGLETLGPKP

SEQ ID NO: 4511 - protein, 106 aa, Nicotiana tabacum
PNCYIFIVDMPGTKANEIKVQVEDDNVLVVSGERKRDKEKKDEKESVKYLRMERRVGKFMRKFVLPENANIDSITAVCQDGVLKVTVEKLPPPERKKPKTIDVKLA

SEQ ID NO: 4512 - protein, 466 aa, Pseudomonas sp. ND6
MQGARRAVAAGFDAIEFHGAHGYLLGQFLSPFTNKRTDQWGGSLENRARFALEVVRAVRTQVGPDFPLLYRLSVTEPYEGGLSLEDGLAFCQMLEPYVDALDVSAGNYDTAMVLLPMGAPGSLVNYAKAVKQRVSLPVIGVGRLTWLLEDMAKAIDNNELDFVALGRAGLADPDTVIKTRRGEPESVRRCIAVNECISRWMFNGKGTQCVINPTLGEERRAQLARRPAAVKQRVLVVGAGPAGCEAAILAAQRGHQVVLLERRNRVGGQLHAWAAASPFRQEILNMITFYETELGKAGVEVRLNAVADEVVPAEWDHVLLATGTAPATGPMDVVDMLADNALPTALELIVYGETETAMYAAIWLAENQRKVTLVSPSDKVGVDSNDMQRDHLESVLKQLGVSIALNGKPPEAGTVVMATARQPSTAHAALERYLNVQPIGTRLRGGRMYEATQSGFWAAANLGELQ

SEQ ID NO: 4513 - protein, 235 aa, Arabidopsis thaliana
MSSYSIASAISRISPLIRYAYHYSPNSSTLQSQPQSTRRPKRFDQLCVFSMASEARESPANNPGLSTNRDEATKGYIMQQTMFRIKDPKASLDFYSRVLGMSLLKRLDFSEMKFSLYFLGYEDTTTAPTDPTERTVWTFGQPATIELTHNWGTESDPEFKGYHNGNSEPRGFGHIGVTVDDVHKACERFEELGVEFAKKPNDGKMKNIAFIKDPDGYWIEIFDLKTIGTTTVNAA

SEQ ID NO: 4514 - protein, 639 aa, Geobacillus stearothermophilus
MIAVGPTDLEIYLFHEGSLYKSYELFGAHVIKKNGMVGTRFCVWAPHAREVRLVGSFNEWNGTNFNLMKVSNQGVWMIFIPENLEGHLYKYEITTNDGNVLLKSDPYAFYSELRPHTASIVYNIKGYQWNDQTWRRKKQRKRIYDQPLFIYELHFGSWKKKEDGSFYTYQEMAEELIPYVLEHGFTHIELLPLVEHPFDRSWGYQGIGYYSATSRYGTPHDLMYFIDRCHQAGIGVILDWVPGHFCKDSHGLYMFDGAPAYEYANMQDRENYVWGTANFDLGKPEVRSFLISNALFWMEYFHVDGFRVDAVANMLYWPNSDVLYKNTYAVEFLQKLNETVFAYDPNILMIAEDSTDWPRVTAPTYDGGLGFNYKWNMGWMNDILTYMETPPEHRKYVHNKVTFSLLYAYSENFILPFSHDEVVHGKKSLLSKMPGTYEEKFAQLRLLYGYLLTHPGKKLLFMGGEFGQFDEWKDLEQLDWMLFDFDMHRNMNMYVKELLKCYKRYKPLYELDHSPDGFEWIDVHNAEQSIFSFIRRGKKEDDLLIVVCNFTNKVYHGYKVGVPLFTRYREVINSDAIQFGGFGNINPKPIAAMEGPFHGKPYHIQMTIPPFGISILRPVKKGSVKSFMKTPHPPSHGAS

SEQ ID NO: 4515 - protein, 164 aa, Zea mays
MDAVMFGLETPLMAALQHLLDVPDGDAGAGGDNKTGSGGSATRTYVRDARAMAATPADVKELPGAYAFVVDMPGLGTGDIRVQVEDERVLVVSGERRREEREDDAKYLRMERRMGKFMRKFVLPDNADVDKVAAVCRDGVLTVTVEKLPPPEPKKPKTIEVKVA

SEQ ID NO: 4516 - protein, 673 aa, Oceanobacillus iheyensis HTE831
MSNQEQNKKNQQLDQFRVNDKDKSLTTNQGLKMNEDEFSLKAGERGPSLLEDFHLREKITHFDHERIPERVVHARGFAAHGEFEVYESLAPYTKANFLGEAGKKTPVFVRFSTVAGSRGSGDMARDVRGFATKFYTDEGNYDLVGNNIPVFFIQDGIKFPDLIHAVKPEPHNEIPQAQSAHDTFWDFVANNQETAHMIMWHLSDRAIPRSFRMMEGFGVHTFRFVNEEGQAFFVKFHWKPVLGVHSVIWDEALKLNGNDPDFQRRDLYDAIENGQYPEYELGLQIIKEEDEFNFDFDVLDPTKIWPEEDVPVKIVGKMTLNQNIDNYFAETEQVAFHPGHVVPGIDFTNDPLLQARLFSYTDTQLIRLGGPNFHEIPINRPVCPFHNNQRDGYGRQTINSGQVSYHKNSLADNTPTPVSEENGGYKHYQEKVEGKKVRARSISFEDHFTQAALFWNSMSDVEKNHIIDAFSFELGKCKEVAIREQVLDMFSNVSHDLVTGIAENLGLAIPKKKEIDYTKSSPALSQANTKKKADTRKVGIIVADGFDEELFSHIKALNEANINPEIISDHQGSISSKEGNKIPVHHTFKTADSVLFDSILIASKEGTKPLFTKEAPNFVKEAYMHYKPISALQDGASVLHDLGLTDEKGVVTNNASQFVEAVAEARFWNRDGK

SEQ ID NO: 4517 - protein, 713 aa, Pseudomonas fluorescens PfO-1
MSTKKPANDKSQLAGTDTPDRANTNAKLDSLEKFRSDATGQALRTNQGVKVADNQNTLKAGARGPSLLEDFIMREKITHFDHERIPERIVHARGTGAHGFFQSYENHSTLTKAGFLQDPGKKTPVFVRFSTVQGPRGSGDTVRDVRGFAVKFFTDEGNFDLVGNNMPVFFIQDAIKFPDFVHAVKPEPHNEIPTGGSAHDTFWDFVSLVPESAHMVIWAMSDRAIPKSLRSMQGFGVHTFRLINAEGKSRFVKFHWRPTAGTCSLVWDEAQKLAGKDTDYHRRDLWEAIEMGDYPEWELGVQVIEEENEHDFDFDILDPTKLIPEEIVPITPLGKMTLNRNPDNFFAETEQVAFCPGHIVPGIDFSNDPLLQGRLFSYTDTQISRLGGPNFHELPINRPVAPFHNGQRDAQHRTVIDKGRASYEPNSIDGGWPKETPPAAQDGGFESYPERIDANKIRQRSESFSDHFSQARLFFNSMSAHEKEHIIAAYSFELGKVEREFIRARQVNEILANIDLELAKRVAANLGLPAPGKGTVDVPKTSLDRSPSLSQANLLPENIKTRKVAILAANGVDGAAIDAMKKALAAEGAHAKLLGPTSAPVKTADGKSLAVDASMEGLPSVAFDAVFVPGGAASVKALSGDGVALHYLLEAYKHLKAIALQGEAKQLLDVLKLEADAGLLEGKDVGALTKPFFSAIGQHRVWDREAKAKAIPA

SEQ ID NO: 4518 - protein, 644 aa, Crocosphaera watsonii WH 8501
MTQQSIETIKRDYPYQYFGAHPSQNETIFRVYAPRATRVSLLREGNGWDCFAETMTKNDEGVWEITIPENLTWKEYKYYIENHSDYLGQPYEMSRIDPFSPQLAVTWGNDDTRNFNSIVGDRNYFNWSHKHIDLPHEPMSIYEMHLSTFHDGNYRDIAHKIVGHLGYMGFTHVQIMPPFQTPIHQSWGYLVGCPYAIYERHGTVDDFKYLVNHCHAHGIGVIVDVPLGFGVQDWDCGLANYDGTDLYHHSGSKGWNNQWNSRIYNVGDVYVQNYLIGLCTYLYHELGVDGARIDAVAAQIFFDYDRGFWDWPKNDREQVDSENWDLFNGLGGDRYFEERGYWLSEAVDFAGMRFLKDLHARLQHTAPKFITIAEESRRVFPRLACPVHEGGLGFTYAQNMGEMHRVRSYLQIPIEQRLIEHIEILIHNNSAETMVNAMNTHDECANGKVRLITELGNHVPLIGLAALCWFRPGAPMIFQGDEFGEEGYFDVFQGVDWSKTGDYAAIHQQQISNNFHDLNQLLRNEPALARHNIHSMIRNGSNNERKWFSFIRWGSDVGFDSDKWEDHKDDIIFVRNETPYQVECNVEIYVPVVGEYKVIYNSIDQRYIGSQHYNQHDPYWTIHSSGQFLYFDVHPFQNIAFKLK

SEQ ID NO: 4519 - protein, 759 aa, Paracoccidioides brasiliensis
MASKATEGLRKIQGMVESMHPGNKKVADLARDTVDVHAPAPFTTDHGTKVSNTDNWLRAASENQTGPSLLEDQIAREKIHRFDHERIPERVVHARGTGAFGHFKLVESAEDATSAGVLTDTSRTTPVFVRFSTVQGSKGSFDTVRDVRGFATKFYTQEGNWDLVGNNIPVFFIQDAIKFDISKQSIPFSFLSRCYLSSVHAVKPERQRSPQGNCHNNFWDFVSCILKATHMFMWAMSDRAIPRILPVCRGFGVNTFVLVNRQGKRHFVKFHWMPELGVHSLVPDESFKLGGQDPDYHRKDLMEAIDNKVYPKWKFGIQVIPEEKEHEFEFDILDATKIWPEDLVPVRYIGEMELNRNVDEFFPQTEQVAFCTSHIVPGIEFSDDPLLQGRNFSYFDTQISRLGVNWEELPINRPVCPVMNHNRDGAMRHKITQGTVNYWPNRFEACPPTNPEDGGFVTYPQKITRTLSYMVSNKFANTSPAQLFYNSLSYEQLHIQNAFCFELDHCYDPVVTTDSSSDLLKSPYRSHELSQSKSALQHQTGLDVPTKGQKTINLSQEYINERQPFCTHNPRGENTILIGDGTTQSPSPLSNRGNSHECSAHHNGTKRQPIFADHEDRETGAGVIPDHNYIGQRSTLLTPRSYPVARISRSCASLGAFRHWIAEQFGHCKAIGATGEAVDLIAQVLNSLPGLNVALASSSDVVEWYGVVTSSKLHEPHTLTEGFKLFPEAKDFLGKFLYQVSQHRNYQRDMVGLTDQVAF

SEQ ID NO: 4520 - protein, 444 aa, Prochlorococcus marinus str. MIT 9312
MKIRKLLKKNFIILFATTFSGLFLNNFAEATVLNNSYKEVIDHVWQIVYRDFLDSSGKFQKSNWINLRKEVLSKTYSDSNEAYDAIRDMLSNLDDSYTRFLEPKEFNQMRIDTSGELTGVGIQIVKDKESDDLIIISPIEGTPAFDAGIKARDKILSIDDISTEGMNIEEAVKLIRGQRGTKVKLEILRGSKSFFKILSRERIEIKTVSTKVNQAKNGLLIGYVRIKQFNANASKETRDAIKDLETKKVAGYVLDLRSNPGGLLESSIEISRHFINKGVIVSTVSKDGLKETKRGNGQALTKKPLVVLVNEGSASASEIVSGAIKDNKRGKLVGKKTFGKGLVQSMRTLVDGSGLTVTVAKYLTPNGTDINESGIIPDIEVKMNINPILQREIGTRKDKQYRAGEKELVNIIKRNNNISEFNPNTANLNALLKINKENKVFSLN

SEQ ID NO: 4521 - protein, 510 aa, Sorghum bicolor
MAVFISSSGSPGRATATTTTTTTLLLAVLAAAAAAGLLLAPVAARGSPPEHDKQLQLQQQEDDRIPGLPGQPNGVAFGMYGGYVTIDDNNGRALYYWFQEADTADPAAAPLVLWLNGGPGCSSIGLGAMQELGPFRVHTNGESLLLNEYAWNKAANILFAESPAGVVFSYSNTSSDLSMGDDKMAQDTYTFLVKWFERFPHYNYREFYIAGESGHFIPQLSQVVYRNRNNSPFINFQGLLVSSGLTNDHEDMIGMFELWWHHGLISDETRDSGLKVCPGTSFMHPTPECTEVWNKALAEQGNINPYTIYTPTCDREPSPYQRRFWAPHGRAAPPPLMLPPYDPCAVFNSINYLNLPEVQTALHANVSGIVEYPWTVCSNTIFDQWGQAADDLLPVYRELIQAGLRVWVYSGDTDSVVPVSSTRRSLAALELPVKTSWYPWYMAPTEREVGGWSVQYEGLTYVSPSGAGHLVPVHRPAQAFLLFKQFLKGEPMPAEEKNDILLPSEKAPFY

SEQ ID NO: 4522 - protein, 478 aa, Chromobacterium violaceum ATCC 12472
MHHPSLKPFPDDFLWGAASAAYQVEGAFDADGKGPSVWDVFVREPGRTFQGSNGDVAVDHYHRMEEDVALMAEMGLTAYRFSVSWPRVLPRGRGEPNEAGLAFYDRLIDALLARGIEPVLTLYHWDMPQALQDEYGGWEDRRIVDDFGDYCALLFRRYGDRVKTWVSLNEQNYNLSNAYLLATHPPAAADRKRFYAANHIAFLANARAIRLFRQWVPDGRIGPSFAYSPAYPASCAPADMLAFDNAEEFTNHWWLDVYCRGRYPQIALAWLRERGEAPDIRPGDIEALAAARPDFIGLNYYYTLSYAHNPPDGVGMQRINTTGQKGSTPASGVPGLYRTAPNPALETSNWDWAIDPAGLRIALRRLTSRYGLPVLITENGLGEFDRLEDGDRVRDDYRIAYLRSHLHACREAISDGVALLGFCAWSFTDILSWLNGYQKRYGFVYVNRDETDARDLRRVRKDSFFWYQRAIASGGREL

SEQ ID NO: 4523 - protein, 280 aa, Streptococcus agalactiae A909
MTDTMILNDNHKIPTLGLGTWMIDNDRVAQVVKDAIELGYRHINTAQAYNNEKGVGVGIKESGITRESLFVTTKIAAEHKDYESATKSIDQSLEALGLDCIDLMIIHSPQPWKEWRETDKHFDQGNLEAWRALEDAQKSGKVKSIGVSNFLEKDLKNGHVKPAVNQILAHIGNTPFDLIDYCQSKGIQVEAYSPIAHGQALKSDGIQKMAEKYGVSVAQLCIQYLLQLNLIVLPKASSKEHLQSNLDFDFVISDEDMSILKSLMFDDYGEFSNFPVFSEK

SEQ ID NO: 4524 - protein, 759 aa, Streptomyces coelicolor A3(2)
MSEANPLKRVARKVTEGLHGEAGGPPDGIPGRPGPESPSAAEPTEPREPLPPKPDQTGPDTVSPTGQPTGADQARVAQSGSYLTNAQGTRLYDTDHSLKAGPRGPVLLQDHHLREKVMHFDHERIPERVVHARGAGAHGVFQSYGTAASVTKAGFLAADVETPVFTRFSTVVGSRGSSDTVRDTRGFATKFYTSEGVFDLVGNNIPVFFIQDAIKFPDVVHAAKPHPDREIPQAQSAHDTFWDFVSLHTEATNHTIFFMGDRGIPRSFRMMEGFGVHTFRLVNAEGATTLVKFHWKPKLGVHSLVWDEAQLINGVDPDFHRRDLADAIEAGAYPQWELGIQTFPDNPEQTFEGIDLLDPTNFVPEELAPVQPVGLLTLNRNPSNFFAETEQVAFHVGHLVPGIDVTDDPLLAGRLFSYLDTQITRLGGPNFPQLPINRPQAPVNDMLRDGMHQSAVHRGVAPYRPNSLDGGCPFTAGADTSAFVEAPVRVPEGRKVREASESFADHFSQPRRFWLSMSPVEREHIIGAYTFELGKCYEQAIRERTLQVLANIDPELCAGVAEGLGLPAPEPTVPLAEVEPSPALSQVGGVWPLDGRVVGIVTGGADLEGVGAVREAVLNAGMVPLVVAPTGGTLGSGDAALTVQRSYVTARSVEFDAVLIAGTPDMGGDAYTPRDYKAGPAPAGPGTVDPRVSLLLSEAFRHGKAIGVWAGGTPALEASGVPADAPGVIVADSGTAALERVTELMGSHRVWERFTTPRG

SEQ ID NO: 4525 - protein, 332 aa, Salmonella enterica subsp. enterica serovar Typhi Ty2
MKTLGEFIVEKQHEFSQATGELTALLSAIKLGAKIIHRDINKAGLVDILGASCAENVQGEVQQKLDLFANEKLKAALKARDIVAGIASEEEDEIVVFEGCEHAKYVVLMDPLDGSSNIDVNVSVGTIFSIYRRVTPVGTPVTEEDFLQPGNKQVAAGYVVYGSSTMLIYTTGCGVHAFTYDPSLGVFCLCQERMRFPEKGKTYSINEGNYIKFPNGVKKYIKFCQEEDSSTSRPYTSRYIGSLVADFHRNLLKGGIYLYPSTASHPQGKLRLLYECNPMAFLAEQAGGKASDGKERILDIIPESLHQRRSFFVGNRHMVDDVERFIREYPDA

SEQ ID NO: 4526 - protein, 655 aa, Burkholderia vietnamiensis G4
MCGIDGFLNSVAFDEETARGTLARMTASLAHRGPDGQGMWVDPEAGIALGHRRLAIVDLSVQGRQPMASACGRYVLVFNGEIYNHRELRAELERTGRAPAWRGRSDSEVLVAAIAAWGVDATLRRATGMFAFALWNRASRVLTLARDRIGEKPLYYGRIGDALVFASELKALRGYPGFDGAVDRDALCLYLRQSSVPAPHTIYRGISKLPPGTFIQFEHARDTPRVRAYWALEQAIEAGRERPFDGNADDAVGQLDAVLRQAVARQMEADVPLGAFLSGGIDSSAIVALMQAQSAKPVDTFTIGFHEAGYDEAGYAKAVARHLGTRHTELYVTADHALAVVPKLPSIYDEPFSDASQIPTFLVSDLTRRHVKVSLSGDGGDELFGGYTRYFLTPRLWRKLHRVPAAVRARIAAALHALRPDHADQLAAVAQGAWGGVDARDGASRIGDRLHKLGHVMTAESRIGLYRLLMSSVHHPERLALAGQEPPTPLDTVSAWPAHLSFAEQAMAIDTLTYLPTDILAKVDRAAMAVGLETRMPFLDHHVVEFAWRLPAAVRLPQGQPKALLRRLLDQYVPRALIDRPKQGFCAPVDHWLRGALRDWAEALLEPSRLRAEGFFDAAAVERLWRQHLTGRMNWQHQLWTVLMFQAWLEGQRAA

SEQ ID NO: 4527 - protein, 505 aa, Helicobacter pylori 26695
MVNKDVKQTTAFGAPVWDDNNVITAGPRGPVLLQSTWFLEKLAAFDRERIPERVVHAKGSGAYGTFTVTKDITKYTKAKIFSKVGKKTECFFRFSTVAGERGSADAVRDPRGFAMKYYTEEGNWDLVGNNTPVFFIRDAIKFPDFIHTQKRDPQTNLPNHDMVWDFWSNVPESLYQVTWVMSDRGIPKSFRHMDGFGSHTFSLINAKGERFWVKFHFHTMQGVKHLTNEEAAEVRKYDPDSNQRDLFNAIARGDFPKWKLSIQVMPEEDAKKYRFHPFDVTKIWYLQDYPLMEVGIVELNKNPENYFAEVEQAAFSPANVVPGIGYSPDRMLQGRLFSYGDTHRYRLGVNYPQIPVNKPRCPFHSSSRDGYMQNGYYGSLQNYTPSSLPGYKEDKSARDPKFNLAHIEKEFEVWNWDYRADDSDYYTQPGDYYRSLPADEKERLHDTIGESLAHVTHKEIVDKQLEHFKKADPKYAEGVKKALEKHQKMMKDMHGKDMHHTKKKK

SEQ ID NO: 4528 - protein, 145 aa, Bacillus thuringiensis serovar konkukian str. 97-27
MRNLFPEITKRQNGIFDFGPSLLEGMTDAFFKPMNMDTFKVDVHEQSDKYTVKADLPGFQKENIQVEFEQDVLTIQATNHNEVEEKNENGTYIRKERSIGSVTRRFSFKQVEEENVRANYKDGVLTIELPKLKEEKNSKTTINIE

SEQ ID NO: 4529 - protein, 263 aa, Polaromonas sp. JS666
MIVERIWTGNAYRNFNYLIACPETGEALAIDPLDHEKTLATARVKGWQITQVLNTHEHHDHTGGNAAVIAATGAKLIAHHKAGGRIAGVDRGVKAGDVIKVGKTVELECLDTPGHTMCHICLRSHTEQPALFSGDTLFNAGAGNVHNGGDVNALYATFAEQLARLPDDTLVYPGHDYIENNLRFTLAREPDNAAAKALLPSVTDHDPAKSAVTTLKDEKEFNTFLRLSSPSVIARLRESFPDLPDEPDARTVFAKLRELRNQW

SEQ ID NO: 4530 - protein, 140 aa, Brassica napus
  misc_feature (132)..(132): Xaa can be any naturally occurring amino acid
TINQKKTAKIKMESFMEELLNFSVPEEEGGAVVRSPKNIARRKTGLRQTESFGLLNPDEDLGEGEVEEEDLEWISNKDAFPVIETFVGVLPSEHFSVSSPEREATEGKQLSPVSVLETSSQNISITTTTTTXNNSSGGSN

SEQ ID NO: 4531 - protein, 178 aa, Zea mays
MAEAPASPGGGGGSHESGSPRGGGGGGSVREQDRFLPIANISRIMKKAIPANGKIAKDAKETVQECVSEFISFITSEASDKCQREKRKTINGDDLLWAMATLGFEDYIEPLKVYLQKYREMEGDSKLTAKSSDGSIKKDALGHVGASSSAAEGMGQQGAYNQGMGYMQPQYHNGDISN

SEQ ID NO: 4532 - protein, 547 aa, Rhodobacter sphaeroides 2.4.1
MAAKDVKFDTDARDRMLRGVNILADAVKVTLGPKGRNVVIDKSFGAPRITKDGVSVAKEIELSDKFENMGAQMVKEVASRTNDEAGDGTTTATVLAQAIIKEGLKAVAAGMNPMDLKRGIDLATSKVVEAIKAAARPVNDSHEVAQVGTISANGEAQIGRFIADAMQKVGNEGVITVEENKGLETEVEVVEGMQFDRGYLSPYFVTNADKMTAELDDVYILLHEKKLSSLQPMVPLLEAVIQSQKPLLIIAEDVEGEALATLVVNKLRGGLKIAAVKAPGFGDRRKAMLQDIAILTGGQVISEDLGMKLENVTIDMLGRAKKISINKDNTTIVDGNGDKAEIDARVAQIRNQIEETSSDYDREKLQERVAKLAGGVAVIRVGGMTEVEVKERKDRVDDALNATRAAVQEGIVVGGGVALIQGGKALDGLTGENPDQNAGITIVRRALEAPLRQIAQNAGVDGSVVAGKVRESNEKSFGFNAQTEEYGDMFKFGVIDPAKVVRTALEDAASVASLLITTEAMIADKPEPKSPAGGPGMGGMGGMDGMM

SEQ ID NO: 4533 - protein, 272 aa, Rhodobacter sphaeroides 2.4.1
MTATLEFHDGSRIPQLGFGLWQVPEDRTAEVVREALELGYRLADGAAIYGNEEGLGHGLRTSGLPRDKVFVTTKVWNDAQGFESALRAVEESLKRLGLDRLDLCLIHWPAPKRNLYVETWRALIRLRDEGRITSIGVSNFDLDQIDRLTAETGVTPVLNQIELHPMLQQAELRAGHAERGIVTQSWSPLGRGMAFETPAIREIAERTGRSPAQVVLRWHIELGCAVIPRSTRRAGLAENLALFDFELTEADHAAISALDAGTRTGPDPQSFG

SEQ ID NO: 4534 - protein, 586 aa, Lotus corniculatus var. japonicus
MCGILAVLGCSDFTQAKRVRVLELSRRLKHRGPDWSGLHQHGDCYLAHQRLAIVDPASGDQPLFNEDKSIIVTVNGEIYNHEELRKQLPNHQFRTGSDCDVIAHLYEEHGENFMDMLDGIFSFVLLDTRDNTFIVARDAIGVTSLYIGWGLDGSVWISSEMKGLNDDCEHFEVFPPGHLYSSRERAFRRWYNPTWFSESIPSAPYDPLAVRHAFEKAVIKRLMTDVPFGVLLSGGLDSSLVASITSRYLATTKAAEQWGSKLHSFCVGLEGSPDLKAAKEVADYLGTVHHEFTFTVQDGIDAIEEVIYHVETYDVTTIRASTPMFLMSRKIKSLGVKWVISGEGSDEIFGGYLYFHKAPNKEEFHTETCRKIKALHQYDCLRANKSTFAWGLEARVPFLDKEFINVAMNIDPEYKMIKRDEGRIEKYILRRAFDDEEKPYLPKHILYRQKEQFSDGVGYSWIDGLKDHAAKHVTDKMILNAGNIFRHNTPLTKEAYYYRMIFERFFPQNSARLTVPGGPTVACSTAKAVEWDAAWSNNLDPSGRAALGVHLSAYDDKQNNLINNKPVEFEKLIPMEAPSLGVAIHS

SEQ ID NO: 4535 - protein, 1081 aa, Candida albicans
MNPTKKPRLSPMQPSVFEILSDPELYSQHCHSLRETLLDHFNHQATLIDTYEHELEKSKNANKAFQQALSEIGTVVISVAMGDLSKKVEIHTVENDPEILKVKITINTMMDQLQTFANEVTKVATEVANGELGGQAKNDGSVGIWRSLTDNVNIMALNLTNQVREIADVTRAVAKGDLSRKINVHAQGEILQLQRTINTMVDQLRTFAFEVSKVARDVGVLGILGGQALIENVEGIWEELTDNVNAMALNLTTQVRNIANVTTAVAKGDLSKKVTADCKGEILDLKLTINQMVDRLQNFALAVTTLSREVGTLGILGGQANVQDVEGAWKQVTENVNLMATNLTNQVRSIATVTTAVAHGDLSQKIDVHAQGEILQLKNTINKMVDSLQLFASEVSKVAQDVGINGKLGIQAQVSDVDGLWKEITSNVNTMASNLTSQVRAFAQITAAATDGDFTRFITVEASGEMDALKTKINQMVFNLRESLQRNTAAREAAELANSAKSEFLANMSHEIRTPLNGIIGMTQLSLDTELTQYQREMLSIVHNLANSLLTIIDDILDISKIEANRMTVEQIDFSLRGTVFGALKTLAVKAIEKNLDLTYQCDSSFPDNLIGDSFRLRQVILNLAGNAIKFTKEGKVSVSVKKSDKMVLDSKLLLEVCVSDTGIGIEKDKLGLIFDTFCQADGSTTRKFGGTGLGLSISKQLIHLMGGEIWVTSEYGSGSNFYFTVCVSPSNIRYTRQTEQLLPFSSHYVLFVSTEHTQEELDVLRDGIIELGLIPIIVRNIEDATLTEPVKYDIIMIDSIEIAKKLRLLSEVKYIPLVLVHHSIPQLNMRVCIDLGISSYANTPCSITDLASAIIPALESRSISQNSDESVRYKILLAEDNLVNQKLAVRILEKQGHSVEVVENGLEAYEAIKRNKYDVVLMDVQMPVMGGFEATEKIRQWEKKSNPIDSLTFRTPIIALTAHAMLGDREKSLAKGMDDYVSKPLKPKLLMQTINKCIHNINQLKELSRNSRGSDFAKKMTRNTPGSTTRQGSDEGSVEDMIGDTPRQGSVEGGGTSSRPVQRRSATEGSITTISEQIDR

SEQ ID NO: 4536 - protein, 1559 aa, Nostoc punctiforme PCC 73102
MKAPLPDNEIQRIESLLEYKILDTHSEAAFDDLTHLASYICGTPIALISLIDSDRQWFKSKVGMEALETPRDLAFCAHAILQPEVFVVPDATQDERFATNPLVTSDPDIRFYAGVPLTNPEGYALGTLCVIDRVPRNLSPEQVEALRIIGRQVIKQLEMRRNLASLVLVTHTRKQAHKRRKQFFKTVAGGFGLASAILVLIGVISYQNTRILIDASNQVQKTQGKINKLEELLSEMKDAETGQRGYILTGQESYLEPYQAVVVNIDQKIVELKDLIADQPSQQNQFAALESLIAAKFAILKQTIYLRQNQGFEAALQVIQTNHGKYIMDDIRKVIHEIENEDKRLLQQQSQAAKASANNTVLTLAIAICLGFITLAIVYYFIYREVKERKLTEETLNQERNFISAVLDTASALVIVLDTQGQIVRFNQACEQTTGYSFDEVRGRHFWNLFLIPEQVEPVKAVFEQLRTGEAPKEYENYWVAKDGSLRLISWANAILQDHEGCVEYIVATGIDISDAYDELRLRKRAEQHLKAQYSTTRVLAESTTISEAMPQILQGICESLEWDLSEIWMVNQRVNLLSLLNSWYKMSSEMQEFEILSQQIIFAPGIGLPGRVWVSSEPVWIVDVVKDKDFIRSQMAVQAELHGAFGFPIHSGKKILGVITCFSHEIQQPDPDLAKVMNSIGEQVGQFIERKQAEEELQRQNLRSQLFTEITLKIRQSLKIQEILQVSVTEVQKILHSDRVLIYQPLTDGSGSTVVEAVVSGWLTIKEKKLTDSYFQAEYTQQYYLQQYRQKRNLELADLDIVEIQKRHIELLQQFGVKSNLVIPILVKEELCGLLIVHQCGSSRQWSSFETHLLRQIADQVGIALAQAQMLYAETQQRRELEVARHQAELASKTKSAFLANMSHEIRTPMNAVLGMTGLMLETPLNSEQQDFIETIRISGDALLSLINEILDLSKLEAGEMALETLDFDLSTCLEEVLELLAPSAHNKGLEIAALIYPNVPTQLQGDAGRLRQILMNLISNAIKFTSNGEVVVRAELRSLSSTTATIYFAITDTGLGITFEDQCRLFTPFTQVDASNTRKYGGTGLGLAICKQLVSLMGGEIGVESRLGKGSKFWFEVTFAQQLYPISSESERELLINRRLLVVDDNATNRKIIHHQATRWGMLVDQAASATIALKAIEETAKQKNLYDIAVIDMHMPEVDGMTLGEQIKANSAIAGLPLIMLTSTNQRDEIQRALKIGFAAYLVKPVKPSRLLDTIMTILGTQIKEETEVRSQEFKLKDYENNSNDHSSSSRLLARDFHKLRILLAEDNLVNQKVALKQLQSLGYSADVAGNGKEVLQLLEKIPYDLILMDCQMPVLDGLETTKEIHRWQESSFVSSRRPVVIAMTANAMKEDQQMCLDAGMDDYLSKPVIKEKLAAALQRWGSVIFQAKEIYVLEQKKGSKTDVGSVDLPIDWERLHQLSENNPEFELELLEIFVEDMQPRLEIIKIAIADNDYEQLALQTHQIKGASANVGATTMHLAAQKLEQLAHNQERRGTTHLISELEDFVKCIQEFLITR

SEQ ID NO: 4537 - protein, 586 aa, Lotus corniculatus var. japonicus
MCGILAVLGCSDDSQAKRVRVLELSRRLKHRGPDWSGLHQHGDNFLAHQRLAIVDPASGDQPLFNEDQSIIVTVNGEIFNHEELRKQLPNHKFRTGCDCDVIAHLYEEHGENFVDMLDGIFSFVLLDTRDNSFLVARDAIGVTSLYIGYGLDGSVWIASELKGLNDDCEHFELFPPGHLYSSKEKEFRRWYNPPWFSEAIPSAPYDPLALRQAFEKAIIKRLMTDVPFGVLLSGGLDSSLVASVTARYLADTKAAKQWGSKLHSFCVGLEGAPDLKAAREVADYIGTVHHEFQYTIQDGIDAIEDVIYHVETYDVTTIRAGTPMFLMSRKIKSLGVKMVLSGEGSDEIFAGYLYFHKAPNKEELHQETCSKIKALHKYDCLRANKSTYAWGLEARVPFLDKKFIDVAMGIDPENKMIKRDEGRIEKWVLRKAFDDEENPYLPKHILYRQKEQFSDGVGYGWIDGLKDHAAKHVTDKMMLNASNIYPFNTPNTKEAYYYRMIFERFFPQNSARLSVPGGASIACSTEKAIEWDAAWSNNLDPSGRAALGVHDSAYDDQLNKSVSKGVEPEKIIPKMEVSPLGVAILS

SEQ ID NO: 4538 - protein, 327 aa, Glycine max
NEVNFFVCDENVESRFKMPEKSIPKDAAFQIINDELMLDGAPRLNLASFVTTWMEPECDKLIMASLNKNYVDMDEYPVTTELQNRCVNIIANLFHAPISEEETAVGVGTVGSSEAIMLAGLAFKRKWQTKRKAEGKPYDKPNIVTGANVQVCWEKFARYFEVELKEVKLKEGYYVMDPAKAVEMVDENTICVAAILGSTMTGEFEDVKLLNELLTEKNKETGWDTPIHVDAASGGFIAPFLYPDLEWDFRLPLVKSINVSGHKYGLVYPGVGWVVWRSKDDLPDELVFHINYLGSDQPTFTLNFSKGSSQIIAQYYQLIRLGFEGYK

SEQ ID NO: 4539 - protein, 375 aa, Bacillus cereus E33L
MTSSNNKAASIYEGTNVNAGGSFVSIEETKIFNPIQIGSWPLRNRIAMAPMTRCFADNETGAVGADVVEYYRKRAADGVGLIITEGIVISARAKGNPGVPGIYTQEQIDSWKPVTEAVHKEGGTIIAQIWHVGRMSHHEIIGGKMPQAPSAIAAEGNVPRFRKPFDTPEAMTLEEIQEVISQYAQAAKNAIEAGFDGVEIHGAHGYLIDQFTYEFANKRTDKYGGDLKQRLTFMKEVTEAVIEAIGADKTLLRFSAFKGDNPTYMWENPELAIETFVNMFKEVGLTMIHPSTMSYTQVIADGKNFHQLVRKYWDGAIVGVGNLNPKEAEEALQEGTIDVAAFGRPLIANPDFVHRIKSAESLVEYDAKEHLATLI

SEQ ID NO: 4540 - protein, 249 aa, Fragaria x ananassa
MGRGRVELKRIENKINRQVTFAKRRNGLLKKAYELSILCDAEVALIIFSNRGKLYEFCSSSSMLKTLERYQKCSYGAMEVQKPAKELEESSYREYLKLKTRCESLQQTQRNLLGEDLGPLNTKELEQLERQLESSLKHVRSTKTQHMIDLLSDLQSKEHMLIEANRDLKTKLDEIDSRTQLRQTWEHGHDHQTMLYGTQHAQTQGLMFQPLDCNPTLQIGYNAVVSQEMPAATPAHAQPVNGFIPGWML

SEQ ID NO: 4541 - protein, 590 aa, Pseudomonas syringae pv. tagetis
MCGLAGELRFDHQPADLAAVERITHELAPRGPDAWGFHSQGPVALGHRRLKIMDLSDGSAQPMIDSHLGLSMAFNGAIYNFPELRAELESLGYQFHSGGDTEVLLKGYHAWGADMLPKLNGMFAFAIWERDSKQLFIARDRLGVKPLYLSKTDKRLRFASSLPALLKGGDISGMLDPVALNHYLNFHAVVPAPRTLLAGVEKLPPASWMRIDASGKVEQKVWWTLPYGPHDDEKNLTLEDWRDRVLDSTREAVAIRQRAAVDVGVLLSGGVDSSMLVGLLREVGVEDLSTFSIGFQDAGGERGDEFQYSDLIAKHYGTRHHQLRIQESEIIEQLPAAFRAMSEPMVSHDCIAFYLLSREVSKHCKVVQSGQGADELFAGYHWYPQVDGASDPVAAYRDAFVDRSYAEYAETVQPKWRTPNDAAGDFVRDHFAQPGASAAVDKALRLDSTVMLVDDPVKRVDNMTMAWGLEARTPFLDYRLVELSARIPGKFKLPDGGKQVLKEAARLVIPSEVIDRKKGYFPVPGLKHLQGDTLNWVRELLTDSSQDRGLFNPAMVDKLLTNPEGQLTPLRGSKLWQLAALNLWLSEQGL

SEQ ID NO: 4542 - protein, 275 aa, Francisella tularensis subsp. tularensis SCHU S4
METQSNKLTIVAFAIMHLACLAIFFVNYNITALVVFVVTFSARTFALTAGYHRYFAHKAFQTSRVFQFILALVGTWASQKGPLWWSGHHRYHHIHSDKDTDLHSPKNGIFQSHVGWVFESRSDHVDPKFTKDWVKYPELVWIDKYAHVSFALYLVGLFALGSLISHFYPSLETSGLAFVFWGGILSTVLLYHTTFSVNSICHIFGSKDYETDNSCNNWFIALITFGEGWHNNHHKFAYSVRNNLKVWQIDITYMILCVLRKFRIVWDFKQPKKTI

SEQ ID NO: 4543 - protein, 169 aa, Bdellovibrio bacteriovorus HD100
MSNIPGVCVSPDKETQKYVFNHTMLRIKDPKASLDFYTRVLGMKLVRKLDFAEWKFSLYFLAYVPEGTDVPTENEANARYAFGREAVLELTHNWGTEEQETTPYHNGNTEPRGFGHICISVPDIQQACARFESLGVNFQKRLGEGGMKNIAFVKDPDQYWIEVVQPGLL

SEQ ID NO: 4544 - protein, 878 aa, Bdellovibrio bacteriovorus HD100
MFQRLLKNWAVQIFLIFVLYYLTGRLGLLLALPPGYASLVWPPFGISIAALLLLGINRWPGVLIGAFLVNARHMESISNLLLPLGISMGNTISVIVAALLIRRFLHFPKRFYLEREVILFLFLAGPVAALLSASAGVGLLYLNDVVSQKNASMNWIYWFVGDAIGGLIFAPLALMFSTQSRRYWLKSVTKVLVPVCVAFALILSASQYLTLSEQEKQSAEFTRKAEFTFNVLEKDFNGNIDMLESLKSFFDSSTSVTRQEFRDFSSTLHSRRPEVQALAWIPYNQDKPETLRIEYIEPLPTNSQVLGTDFGTHPDRQALLKKALEKRRLITSGPMNLREFYPQARGIFLLLAIGRPEGVLLEVLRLDGILRDLTGVLNDPSYRVLIEDVTQTSNRELMVDTLSGGRDFHADFRWSSHLEIGDRLWEVTIQQDTSLRQGSAFNTAVFLLTSLVFVFLICTLLLTIANRIITVEEIVDEKTQHLIDLNVQLKKASETKSEFLANMSHEIRTPLNVIVGMSDLLEESPLNEDQKHYVDISKKAGHNLLSIINDILDISKIEAGLLTLEKTEVDLHSLVNDITEMFELKAREKNLELSVYLSEDTHSIFMGDPTRIRQVLSNLISNSLKFTTDGSIRVEVMKNQTEMEGNLIFHVSDTGIGIPRDKIPQLFQPFTQADSTITRKFGGTGLGLSISKRLVKMMNGDITVESELHRGSRFSFSLNLPWLRDVPAEGEHTAEEISQVPTGPAAEQEPLSILIVDDTEDNRLLIKAYLKNTPHQISEACNGRQALELAQKQRFDLILMDMQMPVMDGFTATQKIRKWEQDHQRPASTIWALTAFALKNEIDRSLSVGCNLHLIKPLRKADLLNHIQKLSEERHQHR

SEQ ID NO: 4545 - protein, 648 aa, Desulfitobacterium hafniense DCB-2
MAWVGEDNALQVQDIKMQSKIQKDSPLLTQEEMYLFNCGEFYYSYRKLGAHFLEHKGRWGTYFAVWAPQARQVSVVGDFNGWCGMNHSLQKWEEQGIWTLFIPGLPTGEIYKYEILNSSGESVLKADPYAFFSEVRPHTASVIYSLEDYAWGDQAWLAQRKTRNPKVLPLSSYEIHLGSWRRTEDGRFLNYAQLVTVLIPYVKSLGYTHIEILPLMEHPYDGSWGYQITGFYACTSRYGTPHDLMYLIDQCHQAGIGVILDWVPGHFCMDAHGLGKFDGSPLYEREVHEQWGTYKFDYSRSEVRSFLISNAVFWLDVFHVDGLRVDGVSSMLYLDYGKEKGAWQPNRYGGRENLEAVGFIKQLNATLHGLYPDALLIAEEATDWQGVTGPLDQEGLGFTFKWNMGWMNDTLRYIGLDFNERRSFHQLLTFPMMYAYAESYILPLSHDEVVHGKKSLLDKMPGDYGQKFAGLRGLTTYFMTSPGKKLLFMGGEIPQFIEWREDRELDWFLMDYELHRKYHGFVQQLNGLYLREKALWEIDGDWTGFEWIDVHNHEQGVIVFCRKGKSFQDRLVVLINFQPYNYERYRIGVEMAKGYREILNTDSTDFGGWGMTNPGLLKVEGVPWHGREFSLEIRVPALGAMILKPELA

SEQ ID NO: 4546 - protein, 210 aa, Papaver somniferum
MSIIPSFFSNQRSNVFDPFSLDIWDPFQGFPFSTGALTANWQGGSDTARETSQLANTRIDWKETPEAHVFRADLPGVTKEEVKVEVEEGRVLQISGERRSRESEEKNDKWHRVERSSGKFLRRFRLPENTKMDEVKATMENGVLTVCVPKVEQRRPEVKSIEISGASEGSTQVPMETPVLRLHKTRLLRDVAMTGNLQASYVVSCLVLFS

SEQ ID NO: 4547 - protein, 438 aa, Chenopodium quinoa
MATAVSTVGAATKAPLNLNGSSAGASVPTSAFLGSSLKKHTSVRFPSSSRASSMTVKAADYEESKQSNTDRWAHLATDISDDQLDIRRGKGMVDSLFQAPMDSGTHVPVQSSLEYESQGLRKYNIDNMLGNFYIAPSFMDKIVVHITKNYLNLPNIKVPLILGIWGGKGQGKSFQCELVFAKMGINPIMMSAGELESGNAGEPAKLIRQRYREAADIIAKGKMCALFINDLDAGAGRMGGTTQYTVNNQMVNATLMNIADNPTNVQLPGMYNKQENARVPIIVTGNDFSTLYAPLIRDGRMEKFYWAPTREDRIGVATGIFRTDNVPEDHVVKLVDTFPGQSIDFFGALRARVYDDEVRKWVSEVGIDAVGKKLVNSRDGPPVFEQPKMTLEKLLEYGNMLVQEQENVKRVQLADKYLSEAALGDANKDAIASGAFFG

SEQ ID NO: 4548 - protein, 307 aa, Burkholderia pseudomallei K96243
MGSRRNLVTTASTMTVEGFFDPATCTISYLLFDSGSGECALIDSVLDYDPKSGRTRTASADQLIARVAALGARVRWLLETHVHADHLSAAPYLKTRVGGEIAIGRHVTRVQDVFGKLFNAGPAFAHDGSQFDRLLDDGDTLALGALSIRAMHTPGHTPACMTYVVTEAHAAHDARDAAAFVGDTLFMPDYGTARCDFPGGDARSLYRSIRKVLSLPPATRLYMCHDYQPNGRAIQYASTVADELRENVHIREGVTEDDFVAMRTARDATLDMPVLMLPSVQVNMRAGRLPEPEDNGVRYLKIPLDAI

SEQ ID NO: 4549 - protein, 460 aa, Bifidobacterium breve
MTMIFPKGFMFGTATAAYQIEGAVAEGGRTPSIWDTFSHTGHTLNGDTGDVADDFYHRWEDDLKLLRDLGVNAYRFSIGIPRVIPTPDGKPNQEGLDFYSRIVDRLLEYGIAPIVTLYHWDLPQYMASGDGREGGWLERETAYRIADYAGIVAKCLGDRVHTYTTLNEPWCSAHLSYGGTEHAPGLGAGPLAFRAAHHLNLAHGLMCEAVRAEAGAKPGLSVTLNLQICRGDADAVHRVDLIGNRVFLDPMLRGRYPDELFSITKGICDWGFVCDGDLDLIHQPIDVLGLNYYSTNLVKMSDRPQFPQSTEASTAPGASDVDWLPTAGPHTEMGWNIDPDALYETLVRLNDNYPGMPLVVTENGMACPDKVEVGTDGVKMVHDNDRIDYLRRHLEAVYRAIEEGTDVRGYFAWSLMDNFEWAFGYSKRFGLTYVDYESQERVKKDSFDWYRRFIADHSAR

SEQ ID NO: 4550 - protein, 548 aa, Oleispira antarctica
MAAKDVLFGDSARAKMLVGVNILADAVRVTLGPKGRNVVIEKSFGAPIITKDGVSVAREIELKDKFENMGAQMVKEVASQANDQAGDGTTTATVLAQAIISEGLKSVAAGMNPMDLKRGIDKATAAVVAAIKEQAQPCLDTKAIAQVGTISANADETVGRLIAEAMEKVGKEGVITVEEGKGLEDELDVVEGMQFDRGYLSPYFINNQEKMTVEMENPLILLVDKKIDNLQELLPILENVAKSGRPLLIVAEDVEGQALATLVVNNLRGTFKVAAVKAPGFGDRRKAMLQDLAILTGGQVISEELGMSLETADPSSLGTASKVVIDKENTVIVDGAGTEASVNTRVDQIRAEIESSTSDYDIEKLQERVAKLAGGVAVIKVGAGSEMEMKEKKDRVDDALHATRAAVEEGVVAGGGVALIRALSSVTVVGDNEDQNVGIALALRAMEAPIRQIAGNAGAAGAAVVDKVKSGTGSFGFNASTGEYGDMIAMGILDPAKVTRSSLQAAASIAGLMITTEAMVADAPVEEGAGGMPDMGGMGGMGGMPGMM

SEQ ID NO: 4551 - protein, 155 aa, Laccaria bicolor
MSVFYYEPYYDFDRLLDGIFTPRTARNGVHKRALQSDATPEGAVRALKPRMDLHEDKEKNLVTATFEFPGSKKEDVHLEIHNGRLVVSVENKISEEHDESGYAVRERRYGKFSRTLQLPQGVKDDEIKAGMEDGVLTVTFPKSGAELAPKKISIS

SEQ ID NO: 4552 - protein, 592 aa, Bacillus thuringiensis serovar konkukian str. 97-27
MAETLAKRGPDDNKVWIKGNVAFGHKRLIVVDPEGGKQPMTCLKDEANYAICYNGELYNTEDIRKELLRRGYTFKGHSDTEVLLASYIEWKEECVDHLNGIYAFAVWDEQKEQVFIARDRLGVKPLFYKYDSGRLLFGSELKAILAHPDVKAEVTLEGLSEIFGLGPSRTPGHGIYAGIKELRPGHAMTFSKNGLCIWRYWNVESKKHEDSFEETVEKTRFLLQDAITRQLVSDVPLCTFLSGGVDSSAITAIAAKEYERSGKGQLHTYSVDYEDNDKYFKANAFQPNSDAPFIHLMTETFQTIHHRCVISNEQLAQYLTEAVLVRDLPGMADIDSSLLWFCREIKQDFVVGLSGECADEIFGGYPWFYREDDLQSSAFPWMRSTEAREQLLKKEWRNKLNLQQYVQQRYEESIQEVPILDGESPLEAKRRQLFYLNMVWFMTTLLDRKDRMSMGASLEVRVPFADHRLVEYAWNIPWEMKMYKNREKGLLRKALEGLLPNEILYRKKSPYPKTHNPHYTKAVTVWIQDLLTDKGSILHELFDKEQLSGLIESGGSAFQTPWYGQLMTGPQLLAHLAQIHVWFKEYGVNIKE

SEQ ID NO: 4553 - protein, 548 aa, Oleispira antarctica
MAAKDVLFGDSARAKMLVGVNILADAVRVTLGPKGRNVVIEKSFGAPIITKDGVSVAREIELKDKFENMGAQMVKEVASQANDQAGDGTTTATVLAQAIISEGLKSVAAGMNPMDLKRGIDKATAAVVAAIKEQAQPCLDTKAIAQVGTISANADETVGRLIAEAMEKVGKEGVITVEEGKGLEDELDVVEGMQFDRGYLSPYFINNQEKMTVEMENPLILLVDKKIDNLQELLPILENVAKSGRPLLIVAEDVEGQALATLVVNNLRGTFKVAAVKAPGFGDRRKAMLQDLAILTGGQVISEELGMSLETADPSSLGTASKVVIDKENTVIVDGAGTEASVNTRVDQIRAEIESSTSDYDIEKLQERVAKLAGGVAVIKVGAGSEMEMKEKKDRVDDALHATRAAVEEGVVAGGGVALIRALSSVTVVGDNEDQNVGIALALRAMEAPIRQIAGNAGAEGSVVVDTVKGGTGSFGFNASTGEYGDMIAMGILDPAKVTRSSLQAAASIAGLMITTEAMVADAPVEEGAGGMPDMGGMGGMGGMPGMM

SEQ ID NO: 4554 - protein, 385 aa, Zea mays
MVLSHASSGRDDDAVASTFASRYVRERLPRYRMPERSIPREAAQQIISDELMLDGNPRLNLASFVTTWMEPECDKLIMDSINKNYVDMDEYPVTTELQNRCVNMIAHLFNAPIKEDETAIGVGTVGSSEAIMLAGLAFKRKWQNKRKEQGKPCDRPNIVTGANVQVCWEKFARYFEVELKEVKLSEGYYVMDPVKAVEMVDENTICVAAILGSTLTGEFEDVKQLNDLLTDKNKETGWDVPIHVDAASGGFIAPFLYPELEWDFRLPLVKSINVSGHKYGLVYPGVGWVIWRSKEDLPEELIFHINYLGTDQPTFTLNFSKGSSQIIAQYYQLIRLGFEVLLFFDRFFLLLIEHSEYICAGEQKGVLSDTLLEGVSFLFQFSLVL

SEQ ID NO: 4555 - protein, 281 aa, Lactococcus lactis subsp. lactis Il1403
MTLTDTYTLNNGIKIPKVGFGTWQSASGEEAYNAVKAALEAGYRHIDTAAVYKNEESVGQAIADSGIPREELFVTTKLWGVGTTEDAAKALDESLKKLGLDYVDLYLIHWPNPKAFRPDFETRNLAVWKAMEAGVKAGKIRAIGVSNFHPRHLKPLLKFAEIKPAVNQIMVNPSDQQEEIVSFNVDNNILTEAYSPLGTGKIFEVPELADLASKYNKSIAQVVLRWSLHKGYLPLPKSVTPARIKENAEIFDFDLSIEDIAFIDSLHGKAGLAKNPDEVDF

SEQ ID NO: 4556 - protein, 441 aa, Arabidopsis thaliana
MNRRQQVKRRVGKYEVGRTIGEGTFAKVKFARNSETGEPVALKILDKEKVLKHKMAEQIRREIATMKLIKHPNVVQLYEVMASKTKIFIILEYVTGGELFDKIVNDGRMKEDEARRYFQQLIHAVDYCHSRGVYHRDLKPENLLLDSYGNLKISDFGLSALSQQVRDDGLLHTSCGTPNYVAPEVLNDRGYDGATADMWSCGVVLYVLLAGYLPFDDSNLMNLYKKISSGEFNCPPWLSLGAMKLITRILDPNPMTRVTPQEVFEDEWFKKDYKPPVFEERDDSNMDDIDAVFKDSEEHLVTEKREEQPAAINAFEIISMSRGLNLENLFDPEQEFKRETRITLRGGANEIIEKIEEAAKPLGFDVQKKNYKMRLENVKAGRKGNLNVATEIFQVAPSLHMVQVSKSKGDTLEFHKFYKKLSNSLEQVVWTNNEVKKETAK

SEQ ID NO: 4557 - protein, 259 aa, Vibrio sp. Ex25
MGDGERIVLEIKSIPAFNDNYIWLIQNSDKRCAVVDPGDAKPVLEYLQANELTLEAILITHHHNDHIGGVPDLVRAFPEVAVVGPKSEPIPTLTTPMEEGDKLELFGEIFLVLGLPGHTLGHIGYVGDGKLFCGDVLFSAGCGRIFEGTPEQMFESLNKLTSLPEETQVFCAHEYTASNVAFALAVEPDNEQLRQYRDDVNRLRALNIPTLPTTIRKEKWINPFLRTTNPDVVQSVASRIKNSDPCSVFTALREWKNEF

SEQ ID NO: 4558 - protein, 86 aa, Daucus carota
  misc_feature (45)..(45): Xaa can be any naturally occurring amino acid
  misc_feature (72)..(72): Xaa can be any naturally occurring amino acid
MKKVGEKAETHHTLVPMRKAFHGTFIVAGGYDREDGNTAVAENCXDLVAYGRQFLANPDLPKRFELNAPLNXYDRNTFYISDPVVG

SEQ ID NO: 4559 - protein, 253 aa, Glycine max
  misc_feature (196)..(196): Xaa can be any naturally occurring amino acid
  misc_feature (235)..(235): Xaa can be any naturally occurring amino acid
  misc_feature (239)..(239): Xaa can be any naturally occurring amino acid
ARGGDSTSLLSPYLHFGELSVRKVFQVTRMKQILWTNEGNSAGEESVNLFLRAIGLREYSRYLCFNFPFTHEKALLGHLKFFPWNPDADIFKNWRQGRTGFPLVDAGMRELWATGWIHNRIRVIVSSFAVKMLLLPWKWGMKYFWDTLLDADLESDILGWQYISGGLPDGHELERLDNPEIQGVKFDPEGEYVRQXLPELARMPTEWIHHPWDAPLTVLRAAGVELGQNYPKPIXDIDXARERLTEAIFKMWE

SEQ ID NO: 4560 - protein, 209 aa, Bacillus cereus E33L
MKWIQMPLGPLQTNAYILKNDQNECVIFDPGHEGEKLVTYLQEEQLKPLAVLLTHAHFDHIGAVDTVRDAFHIPVYVHKEEEDWLGDATVNGSQIFMMNRSITAKPADHIIDAEGTLAIGSFNFEIFETPGHSPGSISYYCKEASAVFSGDVLFQMSIGRTDLPGGSFAELIGSIEEKLFVLPDETAVLCGHGPETSIGFEKENNPFLQ

SEQ ID NO: 4561 - protein, 575 aa, Glycine max
MYRFATSLASKARIARSSTQQIGSRVSWNRNYAAKDIKFGVEARALMLKGVEELADAVKVTMGPKGRNVVIEQSFGAPKVTKDGVTVAKSIEFKDKVKNIGASLVKQVANATNDVAGDGTTCATILTKAIFTEGCKSVAAGMNAMDLRRGINMAVDTVVTNLKSRARMISTSEEIAQVGTISANGEREIGELIAKAMEKVGKEGVITISDGKTLYNELEVVEGMKLDRGYISPYFITNDKNQKCELEDPLILIHEKKISSINAIVKVLELALKRQRSLLIIAEDVESDALATLILNKLRAGIKVCAIKAPGFGENRKANLQDLAVLTGGALITEELGLKLEKVDLDMLGTCKKITVSKDDTVILDGAGDKKALEERCEQIRSAIENSTSDYDKEKLQERLAKLSGGVAVLKIGGASEAEVGEKKDRVTDALNATKAAVEEGIVSGGGVALLYASKELDKLQTANFDQKIGVQIIQNALKTPVLTIASNAGVEGAVVVGKLLEQENHDLGYDAAKGEYVDMVKAGIIDPLKVIRTALVDAASVSSLMTTTEAVVSELPNDDKDTPAMAGGMGGMGY

SEQ ID NO: 4562 - protein, 474 aa, Clostridium acetobutylicum ATCC 824
MNNFGEDFIFGGATAAYQAEGATKEDGKGPCIWDEYLKKEGRFTGDTASDFYHKYKEDLKFSRKFGVNGIRISIAWSRVIPDGKGEVNPKGLKFYSDLIDECIKNNVEPFVTLHHFDTPLTLFKDGDWLNRNNIDYFVRFAKVCFEALGDRVKKWITFNEAWAVAQNGYIIGNFPPSIKYDIPKAAQSMHNMMVAHAKVVELYKSMNLDGEIGIVHTLEGKYPITDSKEDKEAAYLDYMISNKFMLDACFKGEYPKETEKTINEIMSKNGGELKIYDGDLEVLKKASSKIDFLGMNYYSSHFLKAYEGESRIHHNGTGEKGTSIFALKGIGERVNNPEVPTTDWDWPIYPKGLHDMLVRIKNEYPNYKKIYVTENGMGYKDDFKDGKIDDTPRIDYINKHLEAILKAKNEGVVVKGYFVWSLMDVLSWSNGYNKRYGLFYVDFKTQNRYAKKSAYWFKRISYEKKLIDFSDIEY

SEQ ID NO: 4563 - protein, 362 aa, Cytophaga hutchinsonii
MKTSNLFEPLKIGSISLKNSIVMAPMTRCRAIGNIPNDLMATYYGQRATAGLIITEGASPSPNGLGYARIPGIFNKEQVEGWKKITTAVHDKGGKIVIQLMHTGRISHPANMPEGASILSASSVKPGGQMWTDSLQMQDYPIPKTMTVEEILQTKEEFVTAAKNAIEAGFDGVELHGANGYLLEQFISPHTNMRGDEYGGGIDRRCKFVLDVVEAVAAAIGKDKTGIRLSPYGVASDMPPYPDIEVTYEYLALALNDLGIDYIHVVDHSAIGAPAVPLSIKEKIRAGFSNTIILCGGFDQAAAERAIDTGLTNAVAFGRPFINNPDLVERLKNNQPLSDKLNTDAFYSADEKGYTDYPVFGG

SEQ ID NO: 4564 - protein, 595 aa, Dunaliella tertiolecta
MASVDCTLVSARGIKDVEIVGKQSPYAVLTVGPKTFKSGTANGGGSDPVWNQTFSFTNVTPDSSVKLEIFNSNVVLRDVAIGGCKAPMDKALSAGKDELTLPIITKKGKPHGEVKLILTLKPDATKQMVTSHKTRKAAGAWILPTYGNTDCWKDYEPGTLLGKGTFGTTYLATEKKTGQKCAVKVISKRKLTTPDEVDDVKKEVQIMHHLAGHPNVVGLKGVYEDKSNVCLAMEVATGGELFDSIVKRGHYSERDAAELIRTIVSVVAHCHNMGVIHRDLKPENFLLSDKSPRAQLKATDFGLSSFFQEGQVFTDIVGSAYYVAPEVLRRSYGKEADIWSCGIILYILLCGFPPFHGDSEKKIFEAIISKSVDFNTQPWPRISAPAKDCVKRMLQRDPKKRATANEIMQHDWMRENGVASDEPLEMEVVSRIKNFSGMNKLKKEALKVIAVNLPIDEISGMREMFMDIDKDKSGNITIDEFAAALHKKGQIVTEKEIEKIMKEADVDGDGTIDYEEFLAATINLGKLQREENLKTAFEHFDLDGNGEISHNELVQCLSKLGINDAHVKDIIKEVDADGNGQIDYNEFCIMMRNLD

SEQ ID NO: 4565 - protein, 275 aa, Bacillus cereus ATCC 14579
MHIPTTTLHNGVKMPMIGLGVYKAKEGDEVKQAVKTALEVGYRSIDTATVYENESGVGEAIRESGIPREDIFITTKVWNDDQGYEETLEAFEKSLKKLQMDYVDLYLIHWPVRGKYVDTYRALEKLYEEGKVRAIGVSNFHKHHLELLLPNCKVKPMVNQVELHPMLTQFELRNYCQDEQIQMEAWSPLMRGGEVFQHPIIQAIANKYEKTPAQVILRWDIQSGIVTIPKSVTPSRIKENFTIFDFALTEEEIRQINTLNRDLHVGTNPDKYDTL

SEQ ID NO: 4566 - protein, 629 aa, Methylobacillus flagellatus KT
MTLQLHIDDKPDAKPHAPEGESTHFRSLPAGAHIVQPGKVRFRIWAPNAEKVWVVLSGLQSDDEPPALQEHEMAADAKPGWFSREIAADAGSRYRYRILNKQGHELTVPDPWSRAQADSVHGDSIVVDPQAYTWRHSGWAGRPWHESVVYEAHVGCLGGFEGLRAQLPQLAAMGFTAIELMPIASFPGERNWGYDGVLQFAPQFSYGSPDQLKTLVDEAHGLGLSIYLDVVYNHFGPEGNYLAHYAPQFFCHEHQTPWGDAIDFAQQEVIEFYGENALYWLEEFQFDGLRFDACHAIWDPAFLVSIAGRIRTEFHGKRHIHLIAENDHNSVTLLQNGYDAQWNDDGHHALHVLLTGETGGYYSDYADNTIEQLARCLGEGFIYQGEISAHRHNSPRGEPSSEMPPSSFVLFLQNHDQIGNRAFGERLITLVPEPALKVATALLLLSPQVPMLFMGEEFGATEPFLYFTSHSDPGLTHAVREGRRAEFAVFPQFQDTSLVERLPDPNAESSFEQSIPRDRQTKAQAAWRAWVTHLLHLRHEHLLPHLGHCRALRYAAFGTHAVHAQWQLENGDMLTIAANLGAVNAARHLDQLVSGPAQILLDHGNAHAALQAGEMPACSIFVCLEHPQA

SEQ ID NO: 4567 - protein, 252 aa, Zea mays
  misc_feature (219)..(219): Xaa can be any naturally occurring amino acid
PSTSRLPALPQKKTARLLLLLRRAGITCGILAVLGCSDWSQAKRARILACSRRLKHRGPDWSGLYQHEGNFLAQQRLAVTKRHLVETEAAEKFGTELHSFVVGLEGSPDLKAAREVADYLGTIHHEFHFTVQDGIDAIEEVIYHDETYDVTTIRASTPMFLMARKIKSLGVKMVLSGEGSDELLGGYLYFHFAPNKEEFHRETCRKVKALHQYDCLRAXKATSAWGLEVRVPFLDKEFINVAMGMDPEWKMY

SEQ ID NO: 4568 - protein, 543 aa, Glycine max
  misc_feature (295)..(295): Xaa can be any naturally occurring amino acid
  misc_feature (448)..(448): Xaa can be any naturally occurring amino acid
MASISHFRTSANSFLSQYEPLSLLLAPLLSLLFAHALRSFFHLLSQNGLKATLLGFLINSLKLVPGVKGYIDAEKQKVVDKLQSDGKSKREGWKTELPSTGLGTSVLEKMREEKINDAVWQGKCSGTVYIGGSESDGHFSLINEACSMFAHTNPLHLDVFKSVARFEAEVVAMTAALLGSKEKSSGRQICGNMTSGGTESILLAVKSSRDYMKSKKGITRPEMIIPESGHSAYDKAAQYFNIKLWRVPVNKNFQADVKAIRRHINKNTILIVGSAPGFPHGVIDPIEIIWQFLPXELGHLASSFGICFHVDLCLGGFVLPFARELGYHIPPFDFSVKGVSSISVDVHKYGLAPKGTSVVLYRNHEIRKHQFVAVTEWSGGLYVSPTIAGSRPGSLIAGAWAAMMSLGKEGYLKNTKAIMEGSRRIQKGIEEIAELFIVGKPDMTIGAXGSAVLDIFEVNDVMSSKGWHLNALQRPNSIHICVTLQHVPIVEDFLNDLKESVKTVKANPGPISGGLAPIYGAAGKMPDRGMVQELLVDYMDGTC

SEQ ID NO: 4569 - protein, 517 aa, Magnaporthe grisea 70-15
MVHLTSIPSHEEADDKIVSGVKKVHLQLANDEDKFTTSVYGSRFAIDDLPKHEMAENEMPKEVAYRMIKDELSLDGNPMLNLASFVTTYMEEEAEKLMADSFSKNFIDYEEYPQSADIQNRCVAMIGRLFNAPVGASEGVGAVGTSCVGSSEAIMLAVLAMKKRWKNKRLAEGKSVDKPNLIMSSAVQVCWEKATRYFEVEEKLVYCSPDRYVIDPKETVDLVDENTIGICVILGTTYTGEYEDVRAVNDLLNERGLETPIHVDAASGGFVAPFVVPDLEWDFRCDRVVSINVSGHKYGLVYPGVGWVVWRSAEFLPQELVFNINYLGADQASFTLNFSKGASQVIGQYYQLIRLGKHGYRAIMSNLTRTADYLSDSLEALGFGIMSKKSGEGLPLVAFRLTPDEDRIYDEFAIAHQLRVRGWVVPAYTMAPHTENLKMLRVVVREDFTRNRCDALIADVKLSLELLNQMDKKELERHQDVIHKHGTHSGKASHNHPRFRKEKHSLQGKHGKTHAVC

SEQ ID NO: 4570 - protein, 484 aa, Momordica charantia
MVLQSSNNAKKLLSKLATGNGHGEDSPYFDGWKAYDSDPFHPTLNPRGVIEMGQAENQLSFGFVEKWMRNNPQASICTAEGIDEFKDVDIFQDYHGLPEFRNAVANFMGKVRGDRVKFDPDRVVMSGGATGAHETVAFCLADPGEAFLVPVPYYPGFDRDLRWRTGVEIVPVICESSNNFRLTREALETAYEEAQKSDTKIKGLLITNPSNPLGTVYDRETLETAVAFINDKNIHLVCDEIYAATVFAEPGFVSISEVIENDPSCDRNLIHVVYSLSKDMGFPGFRVGIIYSYNDAVVSCARKMSSFGLVSSQTQHMIASMLSDDEFVESFLVGSAEKLAARHRSFTKGLAQVGIGYLQGSGGLFLWMDLRHLLKEKTLEAEMALWRVIINEVKLNVSPGSSFHCSEPGWFRVCFANMDDKTMDISITRIRTFVLQNKEATKIKKHKFCWRQSSLELRLSSRRLEDIMSPHSPLPQSPMLRATT

SEQ ID NO: 4571 - protein, 389 aa, Oryza sativa
MEGNARGGGHSEALKNYNLGRTLGIGSFGKVKIAEHKLTGHRVAIKILNRRQMRNMEMEEKAKREIKILRLFIHPHIIRLYEVIYTPTDIYVVMEYCKFGELFDYIVEKGRLQEDEARRIFQQIISGVEYCHRNMVVHRDLKPENLLLDSKYNVKLADFGLSNVMHDGHFLKTSCGSPNYAAPEVISGKLYAGPEVDVWSCGVILYALLCGTLPFDDENIPNLFKKIKGGIYTLPSHLSALARDLIPRMLVVDPMKRITIREIREHQWFQIRLPRYLAVPPPDTAQQAKMIDEDTLQDVVNLGYEKDHVCESLRNRLQNEATVAYYLLLDNRFRATSGYLGADYQESLERNLNRFASSESASSNTRHYLPGRGPVTLCISSRYFSSLLL

SEQ ID NO: 4572 - protein, 723 aa, Magnetococcus sp. MC-1
MNLDPQQIQELQSGFSADPFAVLGRHDQPDGQVAVTVLSPRTERLFLTNIGQEMTRIPDSDLFHWCGDGRALPYHYRLRRVDAHGSQTEFHDPYSMPPMIGDLDRHLFNEGTHHHAGQFLGAHRMEVEGIRGVCFAVWAPNAQRVSVVGDFNQWDGRIHPMRLHQDSGIWEIFIPALKRGEHYKYEIRTTNGALLLKSDPYGHAHQLRPENASIITEPSNYPWHDEVWMRARSRFNWQKKPISIYEVHLGSWLDAATDPFPNYRELGKRLARYCSEMGFTHVELMPINEHPFDGSWGYQSTGYFAVTSRFGDGDDFRAMVDQLHGANIGVILDWVPAHFPKDAHGLGQFDGTALYEHQDPRLGEHQDWDTLIFNFGRLEVKSFLISSALHMLTRYHLDGLRVDAVASMLYLDYSREDWLPNKYGGRENLEAITFLRELNQAVHHDCPGVLMIAEESTAWPQVTRPPELGGLGFNMKWNMGWMNDTLSYFSKDPIHRKYHHDNLTFSLYYAFSENFTLPFSHDEVVHGKASMLGKMPGDEWQRFANLRLLYTYMFTHPGKKLLFMGCEFGQSQEWNFSQALPWELLEHTFHKGLQQLVKDLNLLYCKETALHERDFTPDGFQWIDCHDSDQSIISFQRKSSEGEVVVLLNFTPIPRDNYRIGVPRPGLYKEIFNADSGHYGGSNYGNGMSQLLTEPYPWMNQLQSLVLNVPPMAGIILRCEQEG

SEQ ID NO: 4573 - protein, 159 aa, Glycine max
VMNCVSFQNDIIEWSRDHRCHHKWTDTDADPHNINRGFFFAHMGWLLVKKHPLVKEKGASLDMSDLTSDPLLMFQRKYYLPLVGIFCSLLPTAIPVYLWSESVWVSFCTSALFRYCLNLHATWFINSAAHTFGYKPYDVTVIATESLLTTLTAWGGGGH

SEQ ID NO: 4574 - protein, 187 aa, Oryza sativa (japonica cultivar-group)
MADGPGSPGGGGGSHESGSPRGGGGGGGGGGGGGGVREQDRFLPIANISRIMKKAIPANGKIAKDAKETVQECVSEFISFITSEASDKCQREKRKTINGDDLLWAMATLGFEDYIEPLKVYLQKYREVRTDGDSKLTAKAGDGSVKKDVLGSHGGSSSSAQGMGQQAAYNQGMGYMQPQYHNGDVSN

SEQ ID NO: 4575 - protein, 207 aa, Zea mays
MEVEACYNYGFLPADRGRHQPPPPPHATLPHAAEDAGELWEYFPCPFCYIEVEVPFICNHLQEEHCFDTRNAVCPICANNLGKDMAAHFRLQHTHLLKRRKPYRPSSCPAAATSPATYQVNSYYEEAEPQQHYSRPYKDPAPDPLLSQFICSVDAVPGDDNAQKDDKRLKLNKGATASDDDASSKLGLEERLQRIDFLTEILMSTIL

SEQ ID NO: 4576 - protein, 545 aa, Helicobacter hepaticus ATCC 51449
MASKEINFSDSARNKLYEGIKQLSDAVKVTMGPKGRNVLIQKSYGAPTITKDGVSVAKEIELADPIANMGAQLVKEVASKTADAAGDGTTTATVLAYSIYKEGLRNITAGANPIEVKRGMDKASAAIIEELKKSSKKIGGKSDIAQVATISANSDENIGALIAEAMEKVGKDGVITVEEAKGINDELSVVEGMQFDRGYLSAYFVTNTDKMTAQLENAYVLLTDKKISNMKEILPLLEATMQSGKPLLIIAEDIEGEALTTLVVNKLRGVLNVSAVKAPGFGDRRKAMLQDIAILTGGQVISEELGKTLEAATLADLGSAARIVIDKDNTTIVDGKGKTKDVKDRIAQIKTEIENTTSDYDREKLQERLAKLSGGVAVIKVGAASEVEMKEKKDRVDDALSATKAAVDEGIVIGGGSALIRASQKVKLKLEGDEAIGYDIIKRAIKAPLAQIATNAGYDAGVVVNEVEKNSKDGFGFNATTGEYVDMFKEGIIDPLKVTRVALQNAVSVSSLLLTTEATINEIKEDKPAPAMPDMGGMGGMGGMM

SEQ ID NO: 4577 - protein, 315 aa, Arabidopsis thaliana
  misc_feature (50)..(50): Xaa can be any naturally occurring amino acid
MEKTLVGGCGGENEEVILGKELDFLGREQVSNIRRDSFVEPLGSILLQLXEAFWVFPWLVFINGICITLSYHRNLSHRSFDLPKWLEYLFAYGGVLAFQGDPIEWVSNHRYHHKHCETQRDPHSPTQGFWFSHMAWIFDTSSILENNTLFPIRGRDLTLTKPLGACSQCGGEENVDDLVRQPFYRFLQRFFLLHMLAYSFLFYFCGGMPLLVWGIGITIAVRLHLTFLVNSVCHIWGTRAWNTSDFSKNNWWVAILTLGEGWHNNHHAFEFSARHGLEWWQLDITWCLIRFLEAIGLATNVKLPTETQMKGKALV

SEQ ID NO: 4578 - protein, 555 aa, secondary endosymbiont of Bemisia tabaci
MAAKDLKFGNDARKKMLKGVNILANAVKATLGPKGRNVVLDKPYGAPSITKDGVSVAREIELEDKFENMGAQMVKEVASKANDAAGDGTTTATVLAQSIVTEGLKAVAAGMNPMDLKRGIDKAVEAAVEELKIISKPCKDSKEIAQVGTISANADAKVGKLISDAMKRVTNEGVITVEEASGLEDDLIVVEGMQFDRGYLSPYFINKQESSSIEFDNPYILLVDKKISNIRDMLSILEVVAKEGKPLLIIAEDVEGEALATLVVNTMRGIVKVSAVKAPGFGDRRKEMLQDIAVLTHGHVISEETGDSLEKATKENLGNAKRVVITKDATTIIDGAGEKSKIEARIQNIKKQIENATSDYDKEKLQERVAKLSGGVAVIKVGAPTEIAMKEKKARVEDALQATRAAVEEGVVPGGGVALIRVASKIANSSLKGDNGDQNVGIRVALRAMESPLRQIVVNAGEEASVIANKIKENKGNDNYGYNAQTEAYGDMIEMGILDPTKVTRSALQYAASIAGLMITTECMVTDLPKEEKASDMGAGGMGGIGGMGGMNGMM

SEQ ID NO: 4579 - protein, 555 aa, secondary endosymbiont of Bemisia tabaci
MAAKDLKFGNDARKKMLKGVNILANAVKVTLGPKGRNVVLDKSYGAPSITKDGVSVAREIELEDKFENMGAQMVKEVASKANDAAGDGTTTATVLAQSIVTEGLKAVAAGMNPMDLKRGIDKAVEAAVEELKIISKPCKDSKEIAQVGTISANADAKVGKLISDAMKRVTNEGVITVEEASGLEDDLIVVEGMQFDRGYLSPYFINKQESSSIGFDNPYILLVDKKISNIGDMLSILEVVAKEGKPLLIIAEDVEGEALATLVVNTMRGIVKVSAVKAPGFGDRRKEMLQDIAVLTHGHVISEETGDSLEKATKENLGNAKRVVITKDATTIIDGAGEKSKIEARIQNIKKQIENATSDYDKEKLQERVAKLSGGVAVIKVGAPTEIAMKEKKARVEDALQATRAAVEEGVVPGGGVALIRVASKIANSSLKGDNEDQNVGIRVALRAMESPLRQIGVNAGEEASVIANKIKENKGNDNYGYNAQTEAYGDMIEMGILDPTKVTRSALQYAASIAGLMITTECMVTDLPKEEKASDMGAGGMGGIGGMGGMNGMM

SEQ ID NO: 4580 - protein, 322 aa, Saccharophagus degradans 2-40
MQNLQGMLRDQRVAQDLQEVIFSIELACKDIAKKVQLGALAGVLGATESENVQGETQKKLDVISNDILKASLAANSNVLALASEEEDNVVAANAGGRYVVAFDPLDGSSNIDINGQIGTIFTIFEALDGVAANSGKHFLQQGNKQVCAGYVLYGASTLMVITVDGPTSCLTLDPATQTFSLTNTALQVPDQTQEFAVNLANERFWLPKFKSYVADLKLGEEGVRGKRFNMRWNASMVGDVHRVLMRGGIFMYPSDTRNPKQPAKLRLLYEANPMALLIERAGGKAFNETQRILDVTPCALHERIAVILGSEQEVATCLEYLN

SEQ ID NO: 4581 - protein, 555 aa, secondary endosymbiont of Bemisia tabaci
MAAKDLKFGNDARKKMLKGVNILANAVKVTLGPKGRNVVLDKSYGAPSITKDGVSVAREIELEDKFENMGAQMVKEVASKANDAAGDGTTTATVLAQSIVTEGLKAVAAGMNPMDLKRGIDKAVEAAVEELKIISKPCKDSKEIAQVGTISANADAKVGKLISDAMKRVTNEGVITVEEASGLEDDLIVVEGMQFDRGYLSPYFINKQESSSIEFDNPYILLVDKKISNIRDMLSILEVVAKEGKPLLIIAEDVEGEALATLVVNTMRGIVKVSAVKAPGFGDRRKEMLQDIAVLTHGHVISEETGDSLEKATKENLGNAKRVVITKDATTIIDGAGEKSKIEARIQNIKKQIENATSDYDKEKLQERVAKLSGGVAVIKVGAPTEIAMKEKKACVEDALQATRAAVEEGVVPGGGVALIRVASKIANSSLKGDNEDQNVGIRVALRAMESPLRQIVVNAGEEASVIANKIKENKGNDNYGYNAQTEAYGDTIEMGILDPTKVTRSALQYAASIAGLMITTECMVTDLPKEEKASDMGAGGMGGIGGMGGMNGMM

SEQ ID NO: 4582 - protein, 917 aa, Pseudomonas chlororaphis
MLKKLGIKGRVLLLTLLPTSLMALVLGGYFTWMQQSDLQTQLLQRGEMIAEQLAPLVAPALAHKNIALLERIATQSLEQQDVRAVTFLAPDRTPLAHAGPSMLNQAPTGNGSQMLQRTGSDATRYLLPVFGRHRNLAGDLIPDESDRLLGWVELELSHNSMLLRGYRSLFASLLLIIAGLICTGLLALRMGRTINNPLSQIKHAVTQLKDGNLETRLPLLGSQELDELASGINRMAGTLQNAQEELQHSIDQATEDVRQNLETIEIQNIELDLARKEALEASRIKSEFLANMSHEIRTPLNGILGFTHLLQKSELTPRQLDYLGTIEKSADSLLGIINEILDFSKIEAGKLVLDSIPFNLRDLLQDTLTILAPAAHAKQLELVSLVYRDTPLSLVGDPLRLKQILTNLVSNAIKFTREGTIVARAMLEEEHEDSVQLRISIQDTGIGLSNQDVRALFQAFSQADNSLSRQPGGTGLGLVISKRLIEQMGGEIGVDSTPGEGSEFWISLRLPKTRDDAEDLPAPPLLGRRIAVLENHELARQALQHQLEDCGLEVTPFNTLEALTNGVTGVHQTEQAIDLAVLGITSNDMPPERLNQHIWDLEHLGCKVLVLCPTTEQTLFHLSVPNPHSQLQAKPACTRKLRRALADLVNPKVVRNEPSEPIASRPPRVLCVDDNPANLLLVQTLLEDMGAKVLAVDSGYAAVKAVQNESFDLVMMDVQMPGMDGRQSTEAIRQWESERNCTPLPVIALTAHAMANEKRALLQSGMDDYLTKPISERQLAQVVLKWTGLALRNQGPERTGEPSGNGLELQVLDHDEGLRLAAGKADLAADMLAMLLASLEADREAIRAARAANDHNALIERVHRLHGATRYCGVPQLRAACQRSETLLKQEDVKAFAALDELERAINRLATEARINA

SEQ ID NO: 4583 - protein, 881 aa, Ustilago maydis 521
MEGSSSSDSPSASHDGTSTLDSELGRSVLICLLRLDLRIHDNPLFYYAHQTHKPIVTTAEKTVDLSKLEDEALLGSTADYLLPVFVFDEREVELSGLPGYQRKGPEARTKEYGFWKTGGFRTRFVSESVYDVRSRLRSVGSDLFIRFGIPEDVISNLVKAFQAEGTHVEGVWLQKEMTYPEINVENAIVEKLRGSGVPVQFVNGKTLIHPADLPFESSETPDVFTPFRKKVEALGASMVRPVKHPPAKFKSFPPGVPSTPDYALDVSYEVDVDGLAPRALETKDKQEGQVSFHDILRFLLTPLNDSQLPPTLEASALLQQRHPASAFPLRGGESSALERLDWYFVRGKSADSSRWGKSDPPPVARYKQTRNNLIGHAYSTKMSPFLAYGSVSPRQIWEALDDHERKFGEDQNTYWVRFELLWRDYFFFVAEKFGHLLYDLGGFERATDPRQAAKKMEDGWWRKWDPLKDGPDHEMTRLLEGRTGIPFIDANILELRESGFMSNRGRQNVASFLSKDLGYDWRIGAEFFQSHLIDYDPTSNYGNWQYVAGVGNDPRASRQFNTVKQAKDYDSHGDYVKLWIPALRNLHADYVHTPWLLTADERRRYGLKTTKMDVTIDGYPAQPLFEHEGWQRHYERKQGVGSKMHGNPQEKVKDGKVPRRHRPSCRVQAATYGALSDGSSFDQLSATTGTLHGLDGSGTPRNMVPPLRGASGSIGPSHHARPNSSFPNLGALSIGSASERSGSPFGTSPAGHLSAINKFARTAPSGAPVNLAAPVGRAPGNAFDFGPGRTGSASSLELLNNRARRAGTTDGNGGNGGDAYSGAPNSADVVSHIGPANNSNGLGYGNGNGNGNGNGNSNSNAHASQTVSKADLETSWRRGFK

SEQ ID NO: 4584 - protein, 637 aa, Magnetospirillum magnetotacticum MS-1
MCGLAGLFLPRHAALAEADIAAMLRVMRHRGPDGTGIHLSDDRRFQAGFTRLAIIDLATGDQPLVRNGGETVLLGNGEVYNYRELRAELAAKGHTFLTQGDMEAALESFMAKGRDFVHDLNGMYALAILERDDHRLTLVLDRLGIKPLYWARLGNGGILFASEIKALFASGLLRPLVDEVSVAAYLAHGYVPAPATLYKGVSKLPPGSIMSVDASGEVQIERYWRAAAATDLPGDEAGIRAHLVSILDDAVGLQLRSDVPVGAMLSGGLDSGLLVALAARRLDRPLKTYTVRFLGARVDETPLAAQVAERYGTDHTVFELETGSAAQLLPRLVWHADEPLADASLLPNHLINEVIGKETRVVLNGTGGDELFGGYGRYFQLPVEARWLRLPRPLRKAAEAMIGLGNPFLAWQLARAEKFGRDRGGYLHDHCALFPPPMAKLLGCTLPWPIPAQAAFADEYAGPLDSAALYAELNTYLPEDLLTLLDRTTMAHSVEGRVPLLDHRMVEAALAVPPHIRNPGGRQKALERAIAAEYLPDSLLSAPKQGFASPVPAWFESGGLAPLARRLLTSRRALERGWWSREGVERLLAQPGRHAFRLYSLLVLELTVRIHVEGAFAEAPAFGLAEMAEGEDAPCAA

SEQ ID NO: 4585 - protein, 156 aa, Zea mays
MDAVMFGLETPLMAALQHLLDVPDGDNKTGGGATRTYVRDARAMAATPADVKELPGAYAFVVDMPGLGTGDIRVQVEDERVLVVSGERRREEREDDAKYLRMERRMGKFMRKFVLPDNADVDKVAAVCRDGVLTVTVEKLPPPEPKKPKTIEVKVA

SEQ ID NO: 4586 - protein, 262 aa, Arabidopsis thaliana
MGRGRVELKRIENKINRQVTFAKRRNGLLKKAYELSVLCDAEVALIIFSNRGKLYEFCSSSNMLKTLDRYQKCSYGSIEVNNKPAKELENSYREYLKLKGRYENLQRQQRNLLGEDLGPLNSKELEQLERQLDGSLKQVRSIKTQYMLDQLSDLQNKEQMLLETNRALAMKLDDMIGVRSHHMGGGGGWEGGEQNVTYAHHQAQSQGLYQPLECNPTLQMGCCFGDDDDDDRYDNPVCSEQITATTQAQAQQGNGYIPGWML

SEQ ID NO: 4587 - protein, 234 aa, Antirrhinum majus
MGRGKIVIQRIDKSTSRQVTFSKRRSGLLKKAKELAILCDAEVGVVIFSSTGKLYEFSSTSMKSIIERHTKTKEDHHQLLNHGSEVKFWQREAATLRQQLQDLQENHRKLMGEELQGLNVEDLHRLENQLEMSLRGVRMKKVQMLTDEVHELRRKGHLIHQENNELYEKVKLLQQENKELCKKAYGTRDVSAANGTALVPFGFAIGREQFEPIQLHLSQPEPENIETSRASGSK

SEQ ID NO: 4588 - protein, 484 aa, Momordica charantia
MVLQSSNNAKKLLSKLATGNGHGEDSPYFDGWKAYDSDPFHPTLNPRGVIQMGLAENQLSFGFVEKWMRNNPQASICTAEGIDEFKDVAIFQDYHGLPEFRNAVANFMGKVRGDRVKFDPDRVVMSGGATGAHETVAFCLADPGEAFLVPVPYYPGFDRDLRWRTGVEIVPVICESSNNFRLTREALETAYEEAQKSDTKIKGLLITNPSNPLGTVYDRETLETAVAFINDKNIHLVCDEIYAATVFAEPGFVSISEVIENDPSCDRNLIHVVYSLSKDMGFPGFRVGIIYSYNDAVVSCARKMSSFGLVSSQTQHMIASMLSDDEFVESFLVGSAEKLAARHRSFTKGLAQVGIGYLQGSGGLFLWMDLRHLLKEKTLEAEMALWRVIINEVKLNVSPGSSFHCSEPGWFRVCFANMDDKTMDISITRIRTFVLQNKEATKIKKHKFCWRQSSLELRLSSRRLEDIMSPHSPLPQSPMLRATT

SEQ ID NO: 4589 - protein, 1209 aa, Synechocystis sp. PCC 6803
MINSGTLITKIEELQSTLAKMDIALGTVDEAIVWTDGTGQIQWCNTAFDHLMGKLHILILGKNLVELLPLHRNSQPLEVSHHPFTIIVATQQKFTDHYEFNQNGKWLHLEIMTSPLMNAQGAVLVIRDISDRHLQEQTLQQLNENLEKRVLERTQAVSLINNKLEQELRERKKTEIALKATTSRLEALIQNLQAGVLVENENGKIVLVNQVFCDLFGIDVPPEKLIGFDCRQSAQFAKILFEDPEAFIIGIDNILQNRQIVTNEELRLKDGRTFARDYVPIEVGNHHDGRLWLYRNITPQKQAEVSLRKQYQRTLLLKEITEEIRQSLDPVKIFQVAVSRLGQTLQVSRCIVHLYSDMPQPHLTCVAEYLIPGMTSMLDLNLLIADNPHLLRALNQDDAVQVDNLKMVPTAVPLQDFYNQLQVYSLLIIRTSYQDKTNGLLILHQCDRSRSWNTEEVELVKAVADQVGIALAQAKLLEQEREIRQQLIEQNKALMTATKAAEDANRAKSDFLATMSHEIRTPMNAVIGMTGLLLDTHLNTQQQQFTETIRSSGEALLSLINDILDFSKIESGQFKLEIHPFEIQQCVEECLDLVAPQAFAKKLDLVYQIEPQVPMAILGDLTRVRQVLVNILANAVKFTTSGSIQVRVSATVANQQQNKYTIQFSIKDTGIGISPDQQSALFKSFSQVNTSIARKYGGTGLGLAICKRLTEMMGGQIWVESYGEIAGNPPVDWAKTSKNNPLESTGATFYFTITAQSTTIVRRPNDLSCQLSLAGKRLLIVDDNQLSCEGLKQLVTAWGLQAQATTSGWEAFSWLRQGECFDLAIIDLQMEEVDGLQLAEALRTLPTGESLPLVILTPSPTSLAELSARTDISIAACLSSPIKKSLVYEVLCEVFKADETDNSLFNGDWRSGITEAVKRTCSPQEREARIKTLSPLRILLVEDNNINQRVALLMLEKLGYRPDIAGNGLEALQVLHQASYDVILMDVEMPEMDGLSATKAIRQDFPADEQPWIIAVTAYAMQGDRETCLAAGMNDYITKPIRENDLLDALQRIDFSVLSLTKNKPAPLSEPVVNVGLVNPVPEVLKADQLEENLVLDLSILTGIREMAGPDGATFLQVIIGDYLHTTPSLLEKLKTAIAAQEIDTVRATAHSLGSSSANLGAVEFAKQCKQLENLARSGMLSGVDGQYIQLEKEYEKVSQALALQLNPN

SEQ ID NO: 4590 - protein, 275 aa, Sinorhizobium meliloti
MHAVSSNGANIPALGFGTFRMSGAEVLRILPQALKLGFRHVDTAQIYGNEAEVGEAIQKSGIPRADVFLTTKVWVDNYRHDAFIASVDESLRKLRTDHVDLLLLHWPGSDVPMAERIGALNEVRNAGKVRHIGISNFNTTQMEEAARLSDAPIATNQVEYHPYLDQTKVLQTARRLGMSLTSYYAMANGKVPADPLLTEIGGRHGKTAAQVALRWLVQQQDVIVLSKTATEARLKENFAIFDFALTREEMAAVRELARPNGRIVNPQGLAPEWDA

SEQ ID NO: 4591 - protein, 256 aa, Methylococcus capsulatus str. Bath
MLEILQIPVLEDNYVYLLHEPGSGATAAVDPAVAGPVLEALDARGWRLGHVLNTHHHGDHVGGNLELKAATGCTVVGAAGDRHRIPGIDVALKDGEEFRLGSASARMLDVPGHTSGHVAFWFEDDAALFCGDTLFALGCGRLFEGSAEQMWRSLERLRALPAETKVFCAHEYTQANARFAVTIEPGNAALRERVERVEALRREGAATVPSILSEELATNPFLRPESPEIRARLGLPGVPEVEVFAEIRRRKDVFRG

SEQ ID NO: 4592 - protein, 134 aa, Brassica napus
PRVRGNTQCCQVLIDKGASLAAINSNGWTPLMVARSWHRNCLEEVLNPTTEQPLSQLPKVPSPFLCLPLMSIVKIAQECGWRGDDCLTPCRDPCAVCLERKCTVAADGCGHEFCTNCALYLSTTNITSSKTSQA

SEQ ID NO: 4593 - protein, 560 aa, Bacteroides fragilis NCTC 9343
MKKFLNRRNGVLLAAVLVAVAFFSFKSGDDRNFQIAKNLDTFNSIVKELDMFYVDTLDPNKTVREGIDYMLSSLDPYTEYYPEDDQAELQQMLNASFGGIGSLITYNQKLKRSMIAEPFEGTPAAKVGLKAGDILMEIDGKDLAGKNNQEVSQMLRGAVGTSFKLKVERPDEKGGTRPLEFDIVRQTIQTPMIPYDTIFNNVGYINLSTFSGTPSKDFKKTFLKLKKEGITSLVIDLRGNGGGRLEEAVEIANFFLPRGKVIVTTKGKTKQASNTYKTLREPLDLDIPITVLVNGATASASEILSGAFQDFDRAVIVGSRTFGKGLVQTTRPLPYGGVMKLTTSKYYIPSGRCVQAIDYKHRNEDGSVGTIPDSLTTVFHTAAGREVRDGGGVMPDIEVKQEKLPNILFYLVRDNLIFDYATQYCLKHPSIPSPQEFKVTDADYNDFKAMVKKADFKYDQQSEKIMKTLKEAAKFEGYLDEASEEIKALEKKLTHNLDRDLDYFSKDIRSMIADEIIKRYYYTRGGIIQQLKDDDGLQAALKILADPVKYKETLSAPVKK

SEQ ID NO: 4594 - protein, 435 aa, Aspergillus nidulans FGSC A4
MSDLATAPSPSYPGAPGLTYFTPATNPGAAINPAAKETPTLFRPLTIRSVTLKNRVIVAPMCMYSAESDPSSPSVGALTDFHMAHLGHFALKGAGLVFTEALAVQPNGRISPNDAGIWQEGTESEQFKGLKRVADFVHSQGAKFGVQLAHSGRKGSTVAPPLAASRGVRALKADEGVFGWPKDVVGPSGGEENKWEPGNISYWAPRELTVAEIQEIVKAFAKSAEIAVKAGVDVIEIHAAHGYLVNEFLSPVTNRRTDQYGGSFENRTRILREIALAIREVIPEGTPLFLRISATEWIEDQPAAKDFGSWDLKASIELLKDLPEFGVDFLDVSSGGNHKDQKFHFFTDYQTEMAAKLRKELRASGARTLVGAVGFITQPDAAAQIVQGADEEGVEAKADAVLIGRQFLREPEWVLNAAKKLGVQVNPPIQFGRAM

SEQ ID NO: 4595 - protein, 156 aa, Nostoc punctiforme PCC 73102
MALVRWEPFREVESLQRQLNRLFDEIAPTGRREEEGIAFIPSAEIQETPDAVHLKVEIPGVDPKDLDVQVSPEAVSISGERKSEIKTEERGITRTEFRYGRFQRVIPLPSRVQHDKVEAEYKDGILKLRLPKAEEDRNKVVKVNLGDGHRGNGQGQ

SEQ ID NO: 4596 - protein, 1531 aa, Debaryomyces hansenii CBS767
MGRYRDRNRETDENDDTNRQATMTTTLVQQHSRQSLGKFVNPSPTKYESTENMDKVVQSVTNATKRLSQISTNTNSSAKKRKTQNRIGPWKLGRTLGRGSTGRVRLAKNVNSGKLAAVKIVPKSNFKKLENPKYKRNSVDSSGSVKDRLPYGIEREIIIMKLISHPNIMGLYDVWENKNDLYLILEYIEGGELFDYLIKKGKLQEFEAISYFKQIINGIHYLHQFNICHRDLKPENLLLDFNKNIKIADFGMAALEVREKLLETSCGSPHYASPEIVAGKNYHGAPSDIWSCGIILFALLTGHLPFDDENIRKLLLKVQNGKFLMPNNLSSESKDLISKMLKVNPSERITIDAILQHPLLTKYPEPSVRKDKVTEYSDLNIRPIDSINNIDKEILKNLSVLFHNRDEQTIISKLLSPEDCSEKTFYYLLVKYRNEHLTASNNTINNYEDDPDLTGSESKQTITRSTSIVKTTTTDPLTGEKHTTIRKIPNSTSNFSNRSRSPKKKPEVLGNITNTAPTFKASTSFNKKKTLMNNNVISRNNSSKSLRKRPPQQQPPKLSRKISGMPDLNDLRLEKTQLNSLYKQQKLNGSFGNKSLFNFESVCQEIFGNAEQHEGDRKIEPKENLRKDKQMDGRTGKLSNIEKCERELAAKVHEKNDARALKLQHQQKEEDAKLQHKKQLESKKRDQSKLLQEKQRQALEKLGSQIQDNNDNNRRGIAHRTQQRHVTEPAPTSSLDPKLGGGAKSLLRAKSLASPSSYVSLRQNTHTSDNTSKVLQTLGIEVAPLKTSTKFNSNLKTSSSKNLSDYLDNETLYSRSDKSIEHQKENISMNKFNEKEKVNQSIAKPNYSRTSTSKLQPLAISRTTTLNSIGYRSLLDGIDENKVQKDLPKRPNGEKDYDTTLSTIETRKNGLIPNPRFSRFSFNGLLNSRFDNPDVTIQNNLVSSGTVVRKSVNQKEPISSRIIEEDPQTSHLKLETGSLKKSSTNLLGLGIVQNHQGKTSRKVSQNSEYCDSNFISVNLSDTADDSQDNTTLEENAISLSHANSVLKDDHANTTVSNTTISKQQEVLNTNVDQRNKRKSSYLGNLEGSKETLVENDKEDKSFQDSIKSMYKDYAKLYNDKKPKSETNTQELGETDDNIPSEKQTRERQSILRDDRINSIDSDNDLSFAADGSSNIDILDSSSIADTNMIENRSEIQLNDNKYSPTITDNQKDFGDEYEDEIDDQFSQHGDQQEYNHEYDHENNHEYNQEDGQEQHEHDHNQQNDQQLQDSDRLQTGTDLRKSTASTQIFSTMNLPKIRDKNSVVEENKEIKHSEVKSEESNQRHNSIFNKLKPKREAPKPPGFKWDDEKSQGHNRFSRISVSSKFDKQQKLNDNYNDSSKSNWFMKFINSLTANSKTPKGEKRKSLIRKFNSDKLDDNETKNFCVLDSTLQSSELTRVIKDTLELKKIEGSVSKVDIDEDFGMISGVIPARYSGGRRLRFKIEIINLKNSSSLHLSKLKGTDKGFKNLTNTVKFIVSKEEQNINRMSSVEA

SEQ ID NO: 4597 - protein, 128 aa, Coccidioides posadasii
MGADDKANHSTYRYNEVPVYTTSQGCPVMDPESSQRIGENGPLLLQDFHLIDLLAHFDRERIPERVVHAKGAGAHGEFEVTDDISDITTIDMLKGVGKKTKLVTRFSTVGGEKGSADSARDPRGFAVK

SEQ ID NO: 4598 - protein, 210 aa, Arabidopsis thaliana
  misc_feature (29)..(29): Xaa can be any naturally occurring amino acid
  misc_feature (42)..(42): Xaa can be any naturally occurring amino acid
  misc_feature (46)..(46): Xaa can be any naturally occurring amino acid
  misc_feature (59)..(59): Xaa can be any naturally occurring amino acid
  misc_feature (85)..(85): Xaa can be any naturally occurring amino acid
  misc_feature (93)..(93): Xaa can be any naturally occurring amino acid
  misc_feature (98)..(98): Xaa can be any naturally occurring amino acid
  misc_feature (126)..(126): Xaa can be any naturally occurring amino acid
  misc_feature (130)..(130): Xaa can be any naturally occurring amino acid
  misc_feature (137)..(139): Xaa can be any naturally occurring amino acid
  misc_feature (153)..(153): Xaa can be any naturally occurring amino acid
GGFGGTAANDESVCTMFGSRYVRTTLPKXEIGENSIPKDAAXQIIXDELMLDGNPWLRXASFVTTWVEPECDKLIMGSICRNYVXMDEYPVTXGLQNXCVDIIARLCNAPLGESETAVGGGTVGCXGAVXVAGLAFXXXWGALRPAGGGPFGXPRLVAGAGGGSRGGVGAFLFVWGGGGWGGGVRGGCGRGGGGGGGGAGGGGGVVGGRG

SEQ ID NO: 4599 - protein, 499 aa, Francisella tularensis subsp. tularensis SCHU S4
MQIVWFKRDLRVTDNLALSLASEKGDILPLYIIEPELWQQPDMSHRQYLFLSECLEELNTELTKLGQSLAIMLGDAVEIFEQLIQKYNIKNVWSHQETWNDWTYQRDIKLEKFFKQNNIVWHQPYQNGVVRCLADRDNWALLWHQHMSEKIIRAPTKLKFICENQIKIPTAESLGLEYDDCYKRQKGGRIRALRILDSFLYQRGCGYTKEMSSPVTAFKSCSRLSPYIAFGVISLKEIYQKANQRKNEIKESSVKNKTKWLSAMRSFLSRLRWHCHFMQKLEDQPSIEYENLHSAYDQLRTEPLNQQCFEAWKTGNTGYPMIDACMRALIATGWLNFRMRAMLMSFASYHLWLDWRVTSLYLARLFTDYEPGIHYSQVQMQSGTTGINSIRIYNPIKQSIDQDPNGEFIRRWLPELENVSNENIHTPWLEKHNSLDYPDPTIDEKQARKFAADNIYKIRKSSKNSQETKNIVKKHASRKTSRKIKSKQHKVESIQGELF

SEQ ID NO: 4600 - protein, 468 aa, Streptococcus pneumoniae R6
MTKTLPKDFIFGGATAAYQAEGATHTDGKGPVAWDKYLEDNYWYTAEPASDFYNRYPVDLKLAEEYGVNGIRISIAWSRIFPTGYGQVNAKGVEFYHNLFAECHKRHVEPFVTLHHFDTPEALHSNGDFLNRENIEHFVDYAAFCFEEFPEVNYWTTFNEIGPIGDGQYLVGKFPPGIQYDLAKVFQSHHNMMVSHARAVKLYKDKGYKGEIGVVHALPTKYPLDHENPADVRAAELEDIIHNKFILDATYLGRYSAETMEGVNHILSVNGGSLDLREEDFTALEAAKDLNDFLGINYYMSDWMEAFDGETEIIHNGKGKKGSSKYQIKGVGRRVAPDYVPRTDWDWIIYPQGLYDQIMRVKKDYPNYKKIYITENGLGYKDEFVDNTVYDDGRIDYVKQHLEILSDAIADGANVKGYFIWSLMDVFSWSNGYEKRYGLFYVDFETQERYPKKSAHWYKKVAETQIID

SEQ ID NO: 4601 - protein, 544 aa, Sinapis alba
MKLLHGLALVFLLAAASCKADEEITCEENEPFTCSNTDILSSKNFGKDFIFGVASSAYQIEGGRGRGVNVWDGFSHRYPEKSGSDLKNGDTSCESYTRWKKDVEIMGELNATGYRFSFAWSRIVPKGKVSRGVDQAGLDYYHNLIDALLEKNITPFVTLFHWDLPQTLQDEYEGFLDRQIIQDFKDYADLCFKEFGGKVKNWITINQLYTVPTRGYALGTDAPGRCSPKVDTKQRCYGGNSSTEPYIVAHNQLLAHAAIVDLYRTNYAFQNGKIGPVMITRWFLPYDESDPACIEAAERMNQFFHGWYMEPLTKGRYPDIMRQIVGSRLPNFTEAEAELVAGSYDFLGLNYYVTQYAKPKPNPYPSETHTALMDAGVDLTFNNSRGEYPGPVFAEDANSYYYPKGIYYVMDYFKTKYNNPLIYITENGISTPGSESRCEAIADYKRINYLCSHLCFLRKVIREKGVNIRGYFAWALGDNYEFCKGFTVRFGLSYVNWDDLDDRNLKESGKWYQRFINGTAKNPVKQDFLRSSLSSQSQKKRLAC

SEQ ID NO: 4602 - protein, 499 aa, Schizophyllum commune
MGAQQSRRSGHGSRPCSTMKHDSSRSSSEASDSKGSRSLKTVSVASASAFAAIAAVTPSSSSSAEDISRLSERTRVEKREVQKPPPPRPKSYLEMPQTTVPCQYRTGKTLGSGTYAIVKEAIHIHTGKYYACKVINKKLMQGREHMVRNEIAVLKRISSGHKNIVTLHDYFETTHNLYLCFDLCTGGELFDRICAKGNYYEADAANLVRTILQAVKYIHDCGIVHRDLKPENLLFRTQAEDADIMIADFGLSRVMEEEKLNMLTEICGTPGYMAPEIFKKTGHSKPVDIWAMGVITYFLLAGYTPFDRDSQQLEMEAIIAGDYKFEPEEYWENVSSTAKDFVTQCLTIDPTNRPTAAEALQHKWLSDPTAHFVTDKEGPVDLLPHVKKAFNAKQLWKKAAFSIKALNRMTMLASSGLDKDAAELSENLKKYKEESAREIMEESTITHSHNMETESTTDLTLKEKEVRDAVKASDDISAHDHEDISSKLASVSLDEGQKK

SEQ ID NO: 4603 - protein, 858 aa, Arabidopsis thaliana
MVYTISGVRFPHLPSIKKKNSSLHSFNEDLRRSNAVSFSLRKDSRSSGKVFARKPSYDSDSSSLATTASEKLRGHQSDSSSSASDQVQSRDTVSDDTQVLGNVDVQKTEEAQETETLDQTSALSTSGSISYKEDFAKMSHSVDQEVGQRKIPPPGDGKRIYDIDPMLNSHRNHLDYRYGQYRKLREEIDKNEGGLEAFSRGYEIFGFTRSATGITYREWAPGAKAASLIGDFNNWNAKSDVMARNDFGVWEIFLPNNADGSPAIPHGSRVKIRMDTPSGIKDSIPAWIKYSVQPPGEIPYNGVYYDPPEEDKYAFKHPRPKKPTSLRIYESHVGMSSTEPKINTYANFRDDVLPRIKKLGYNAVQIMAIQEHAYYASFGYHVTNFFAPSSRFGTPDDLKSLIDKAHELGLVVLMDIVHSHASKNTLDGLDMFDGTDGQYFHSGSRGYHWMWDSRLFNYGSWEVLRYLLSNARWWLEEYKFDGFRFDGVTSMMYTHHGLQVEFTGNYNEYFGYSTDVDAVVYLMLVNDLIHGLYPEAIVVGEDVSGMPAFCVPVEDGGVGFDYRLHMAVADKWIELLKKRDEDWQVGDITFTLTNRRWGEKCVVYAESHDQALVGDKTIAFWLMDKDMYDFMAVDRQATPRVDRGIALHKMIRLITMGLGGEGYLNFMGNEFGHPEWIDFPRTDQHLPDGRVIAGNNGSYDKCRRRFDLGDAEYLRYHGLQEFDRAMQNLEETYGFMTSEHQYISRKDEGDRVIVFERGNLLFVFNFHWTNSYSDYRIGCSVPGKYKIVLDSDNSLFGGFNRLDDSAEFFTSDGRHDDRPCSFMVYAPCRTAVVYAAVDDDDDDERSSLVPIGLLPEDV

SEQ ID NO: 4604 - protein, 753 aa, Escherichia coli
MSQHNEKNPHQHQSPLHDSSEAKPGMDSLAPEDGSHRPAAEPTPPGAQPTAPGSLKAPDTRNEKLNSLEDVRKGSENYALTTNQGVRIADDQNSLRAGSRGPTLLEDFILREKITHFDHERIPERIVHARGSAAHGYFQPYKSLSDITKADFLSDPNKITPVFVRFSTVQGGAGSADTVRNIRGFATKFYTEEGIFDLVGNNTPIFFIQDAHKFPDFVHAVKPEPHWAIPQGQSAHDTFWDYVSLQPETLHNVMWAMSDRGIPRSYRTMEGFGIHTFRLINAEGKATFVRFHWKPLAGKASLVWDEAQKLTGRDPDFHRRELWEAIEAGDFPEYELGFQLIPEEDEFKFDFDLLDPTKLIPEELVPVQRVGKMVLNRNPDNFFAENEQAAFHPGHIVPGLDFTNDPLLQGRLFSYTDTQISRLGGPNFHEIPINRPTCPYHNFQRDGMHRMGIDTNPANYEPNSINDNWPRETPPGPKRGGFESYQERVEGNKVRERSPSFGEYYSHPRLFWLSQTPFEQRHIVDGFSFELSKVVRPYIRERVVDQLAHIDLTLAQAVAKNLGIELTDDQLNITPPPDVNGLKKDPSLSLYAIPDGDVKGRVVAILLNDEVRSADLLAILKALKAKGVHAKLLYSRMGEVTADDGTVLPIAATFAGAPSLTVDAVIVPCGNIADIADNGDANYYLMEAYKHLKPIALAGDARKFKATIKIADQGEEGIVEADSADGSFMDELLTLMAAHRVWSRIPKIDKIPA

SEQ ID NO: 4605 - protein, 921 aa, Pseudomonas aeruginosa UCBPP-PA14
MSPAVADDAGVSSVPLQTTATTPSANQNWRLLRDESAQLRIADVLQRKEQFRPLAKRSFIFPASPQAVWLQVQLPAQKVPSWLWIFAPRVQYLDYYLVQDGQLVRDQHTGESRPFQERPLPSRSYLFSLPVDGKPMTLYVRMTSNHPLMAWFDQIDEAGLVGLEKPAYAFGMLLGGMLLLLMYNLIRFAYSRSASSLWLAAVHAALAVCAAANLGLVAFWLPGLKFNQSLTADLGALGAAVSLLWFACSFFRGTAESRLNRLLQGEALLILAVGAIIAFTQQLWFSWLIYLLVILSSLSVPLVAAWHWYRGYQPARLIVAGMIVFNAGFMVFLPVLFGTKQLDPGWLVLGVFSFATLAGLVLSVSLTERQRLIQQLNLQQRTSEAAHTAELQTKAEFLAKISHEIRTPMNGVLGMTELLLGTPLSAKQRDYVQTIHSAGNELLTLINEILDISKLESGQIELDEVQFDLNALIEDCLDIFRVKAEQQRIELISFTQPQVPRVIGGDPTRLRQVVLSLLDNAFKQTEEGEILLVVALDDQGETPRLRIAVQDSGHPFDAKEREALLTAELHSGDFLSASKLGSHLGLIIARQLVRLMGGEFGIQSGSSQGTTLSLTLPLDPQQLENPTADLDGPLQGARLLVVDDNETCRKVLVQQCSGWGLNVSAVSSGKEALAQLRTKAHLREYFDVVLLDQDMPGMTGMQLAAKIKEDPNLNHDILLIMLTGISNAPSKIIARNAGIKRILAKPVAGYTLKATLADELAQRGVSGVTNYLQPAKEAQAPSLPSDFRILVAEDNSISTKVIRGMLNKLNLQPDTASNGQEALSAMKATQYDLVLMDCEMPVLDGFSATEQLRAWEAHEQRPHTPVVALTAHILSEHKERARLVGMDGHMAKPVELSQLRELIAYWVGERDRRRQGDALPS

SEQ ID NO: 4606 - protein, 686 aa, Pseudomonas fluorescens Pf-5
MAFEAMFQPIQIGKLTIRNRVLSTAHAEVYATDGGMTTERYVKYYEEKAKGGIGLAICGGSSVVAIDSPQEWWSSVNLSTDRIIPHFQNLADAMHKHGAKIMIQITHMGRRSRWDGFNWPTLMSPSGVREPVHRATCKTIEPEEIWRVIGNYAQAARRAKAGGLDGVELSAVHQHMIDQFWSPRVNKRTDEWGGTFEKRMRFGLEVLKAVRAEVGDDFCVGMRLCGDEFHPDGLSHEDMKQIAKYYDDTGMLDFIGVVGSGCDTHNTLANVIPNMSFPPEPFLHLAAGIKEVVKVPVLHAQNIKDPNQATRILEGGYVDMVGMTRAHMADPHLIAKIKMGQIDQIKQCVGANYCIDRQYQGLDVLCIQNAATSREYMGVPHIIEKTTGIKRKVVVVGAGPAGMEAARVAAERGHEVTLFEKKEAIGGQITTASKAPQRDQIAGITRWYQLELARLKVDLRLGTAADTATILDLRPDVVVLAVGGHPFIEQNEHWGAAEGLVVSSWDILDGKVAPGKNVLVYDTICEFTGMSVTDFIADKGSQVEIVTDDIKPGIAVGGTSFPTYYRSLYPKEVIMTGDLTLEKVYREGDKLVAVLENEYTGAREERVVDQVVVENGVRPDEELYYGLKEGSRNKGQMDVEALFAIKPQPCLSETGEGYLLFRIGDCVSQRNTHAAIYDALRLCKDF

SEQ ID NO: 4607 - protein, 585 aa, Triticum aestivum
MCGILAVLGCADDTQGKRVRVLELSRRLKHRGPDWSGMHQVGDCYLSHQRLAIIDPASGDQPLYNEDKSIVVTVNGEIYNHEQLRAQLSSHTFRTGSDCEVIAHLYEEHGENFIDMLDGVFSFVLLDTRDNSFIAARDAIGVTPLYIGWGIDGSVWISSEMKGLNDDCEHFEIFPPGHLYSSKQGGFKRWYNPPWFSEVIPSVPYDPLALRKAFEKAVVKRLMTDVPFGVLLSGGLDSSLVAAVTVRHLAGTKAAKRWGTKLHSFCVGLEGSPDLKAAKEVANYLGTMHHEFTFTVQDGIDAIEDVIYHTETYDVTTIRASTPMFLMSRKIKSLGVKMVISGEGSDEIFGGYLYFHKAPNKEELHRETCQKIKALHQYDCLRANKATSAWGLEARVPFLDKEFINEAMSIDPEWKMIRPDLGRIEKWVLRKAFDDEEQPFLPKHILYRQKEQFSDGVGYSWIDGLKAHAESNVTDKMMSNAKFIYPHNTPTTKEAYCYRMIFERFFPQNSAILTVPGGPSVACSTAKAVEWDAQWSGNLDPSGRAALGVHLSAYEQEHLPATIMAGTSKKPRMIEVAAPGVAIES

SEQ ID NO: 4608 - protein, 209 aa, Arabidopsis thaliana
MNQKPPPYGYGGAGGGGVGPSSTSNTTIIGTLSARAKQTTQSMITTLRPWREILDLSALSLPRGYDEAMAHLKHNISYFRGNYALAVLAIVFLGLIYHPMSMIAFIVVFIGWILLYFSRDANDSIVISGKEVDDKIVLVLLSLVTVLALVYTDVGENVLVSLIIGLLIVGAHGAFRNTDDLFLDEESARRGGLVSAGSGNRPPSSYTPI

SEQ ID NO: 4609 - protein, 492 aa, Helianthus annuus
MDPYKYRSSSAYNAPFWTTNSGAPVYNNNNSLTVGSRGPILLEDYHLVEKLANFDRERIPERVVHARGASAKGFFEVTHDITALTCADFLRAPGVQTPVIVRFSTVIHERGSPETLRDPRGFAVKFYTREGNFDLVGNNFPVFFIRDGMKFPDMVHSLKPNPKSHIQEDWRIMDFFSHHPESLHMFTFLLDDIGVPQDYRHMDGSGVNTYTLINKAGKAYYVKFHWKPTCGVKSLLEEEAIKIGGANHSHATQDLYDSIAAGNYPEWKLFIQTIDPDHEDRLDFDPLDVTKTWPEDIFPLQPVGRLVLNKNIDNFFAENEQLAFCPAIIVPGIYYSDDKLLQTRIFSYSDTQRHRLGPNYLQLPANAPKCAHHNNHYDGFMNFMHRDEEIDYFPSRYDPARHAEQYPIPPVRLSGKRDKCVIEKENNFKQPGERYRSFSPDRQERFINRVVGGLSDPRVTHEVRSIWVSYWSQADKSLGQKIASRLNVKPNY

SEQ ID NO: 4610 - protein, 448 aa, Streptomyces coelicolor A3(2)
MATDDAMPAKPMPRFPDGFLWGVSTSAHQIEGAAGLRGPSVWDAFTAEPGRVRDGSTAAVACDHYHRYREDVALLAGLGVDAYRFSVSWPRVDSPGGLDFYDRLVDELCAAGVRPVPTLFHWDLPAGLDWLERDTAARFAEYVSLVAERLGDRVGKWITLNEPAEHTLLGHALGVHAPGRELLFDALPVAHHQLLAHGLAVRALRAAGATDVGIANSHGPTWPASDDPADREAADFYDLLLNRMFADPLLTGRYPEGVGALMPGSAERVEADLEVIAEPLDWYGVNYYAPTRVGAPQGAEIEFGGVTLPAELPFSVRRIEGRPVTDFGWPVVPEGLTELLTGFRDRYGDRLPPVVITENGCSYEGLDDHDRIAYLDGHVRALHRAIEAGVDVRGYFVWSLLDNFEWAEGYARRFGLVHVDFTTLARTPKASYGWFRDLLDGQRRVPVG

SEQ ID NO: 4611 - protein, 217 aa, Populus tomentosa
MEEGRFQNGGGLGAKVMTDEQMEMLRKQISVYATICEQLVEMHKVVSAQQDFAGMGLGNPYCDPLLSSAVHKIGSRQRWTPKPAQLQILEQIFEQCNATPGRQKIKDITRELAQHGQISETNVYNWFQNRRARSKRKQSAVVPNNGESEMETDIESLKEKKTRAEDSQPDENTTPMADHMYFNSPDIGFDQLMGKIESPGPGSCIPYWQMEQYDLFG

SEQ ID NO: 4612 - protein, 446 aa, Methylococcus capsulatus str. Bath
MRNLSRRIQSHQIRLRPPPFGAKRPVRRSESTSPPPRRRLIVGKRNRSAQVQYSMSHGLTHLSFWPLLFATLALTHVTIVSVTIFLHRHQAHRALSLHPLASHFFRFWLWLTTATVTKEWVSIHRKHHARCETPDDPHSPQCLGIFTVLLRGWMLYRKEARNTATLAQFGNGTPDDWLERKLYSRFPDLGITLMLALNLLLFGIGGLGVWAVQMLWIPFWAAGVVNGLGHHLGYRNFETPDASTNLWPIGFIIGGEELHNNHHAYPASAKFSSRRWEIDIGWLYIRLMTLLKLAKIRNMPPKTIIHTAEPSVDMDTVKAVLRNRAHVLSLYGRRVIVPVLRSEQAKSPKAGRRLLRQTRPLLLREYIKADPAAWHNFSRMLEDSQTLATIFQFKQQLKAVWTDSFTSHEERLERLRAWCLQAKQSDLPWLQHFADTLSGYRLQPAH

SEQ ID NO: 4613 - protein, 259 aa, Magnetospirillum magnetotacticum MS-1
MANTPPEIRTFLCRSDNIGVLIRDPASGACAAIDVPEAEAVLAALDAEGWRLTEILVTHRHADHIEGIPEVVERTGARVTAPDKARAAVPGAARYVSEGDTVTVGGLTATVWETPGHCADHVTYHFADAGVVFAGDTLFTLGCGRVMEAEPETLWRSLTRFLDLPDTTEVYSGHDYVLSNGRFALAADPDNAALKQRVAEAERLAETGGFLIPSTIGAEKATNPFLRAGEPALARSAGSEPGADPAAVFTALRSWKNRF

SEQ ID NO: 4614 - protein, 55 aa, Coffea arabica
KRVERSSGQFMRRFRLPENAKMDQIKAAMENGVLTITIPKEEAKKTDVRAIQISG

SEQ ID NO: 4615 - protein, 279 aa, Bacillus anthracis str. 'Ames Ancestor'
MKNLQSKAVLNNGVEMPWFGLGVFKVEEGPELVEAVKSAIKAGYRSIDTAAIYGNEKAVGEGIRAGIEATGISREDLFITSKVWNADQGYEETIAAYEESLKKLELDYLDLYLVHWPVEGKYKDTWRALETLYKEKRVRAIGVSNFQVHHLQDVMKDAEIKPMINQVEYHPRLTQKEVQAFCKEQGIQMEAWSPLMQGQLLDNETLQEIAEKHGKTTAQVILRWDLQNGVITIPKSTKEHRIIANADVFNFELTKEDMEKIDALNQNHRVGPDPDNFDF

SEQ ID NO: 4616 - protein, 820 aa, Oryza sativa (japonica cultivar-group)
MLCLTSSSSSAPPPLLPSLADRPSPGIAGGGGNVRLSVVSSPRRSWPGKVKTNFSVPATARKNKTMVTVVEEVDHLPIYDLDPKLEEFKDHFNYRIKRYLDQKCLIEKHEGGLEEFSKGYLKFGINTVDGATIYREWAPAAQEAQLIGEFNNWNGAKHKMEKDKFGIWSIKISHVNGKPAIPHNSKVKFRFRHGGGAWVDRIPAWIRYATFDASKFGAPYDGVHWDPPACERYVFKHPRPPKPDAPRIYEAHVGMSGEEPEVSTYREFADNVLPRIRANNYNTVQLMAIMEHSYYASFGYHVTNFFAVSSRSGTPEDLKYLVDKAHSLGLRVLMDVVHSHASNNVTDGLNGYDVGQNTHESYFHTGDRGYHKLWDSRLFNYANWEVLRFLLSNLRYWMDEFMFDGFRFDGVTSMLYHHHGINKGFTGNYKEYFSLDTDVDAIVYMMLANHLMHKLLPEATIVAEDVSGMPVLCRPVDEGGVGFDFRLAMAIPDRWIDYLKNKEDRKWSMSEIVQTLTNRRYTEKCIAYAESHDQSIVGDKTIAFLLMDKEMYTGMSDLQPASPTINRGIALQKMIHFITMALGGDGYLNFMGNEFGHPEWIDFPREGNNWSYDKCRRQWSLVDTDHLRYKYMNAFDQAMNALEEEFSFLSSSKQIVSDMNEKDKVIVFERGDLVFVFNFHPNKTYKGYKVGCDLPGKYRVALDSDALVFGGHGRVGHDVDHFTSPEGMPGVPETNFNNRPNSFKVLSPPRTCVAYYRVDEDREELRRGGAVASGKIVTEYIDVEATSGETISGGWKGSEKDDCGKKGMKFVFRSSDEDCK

SEQ ID NO: 4617 - protein, 439 aa, Aster tripolium
MKILLGVGINGGLFGSCVSSRSKVDSSTSGISSHFEIKSTNNVSKDQPTTSNSEHNLPTLTPEDELKVASRLRKFGFNDLKMATRNFRPESLLGEGGFGCVFKGWIEENGTAPVKPGTGLTVAVKTLNHDGLQGHKEWLAEVNFLGDLGNPNLVKLIGYCIEDDQRLLVYEFLPRGSLENHLFRRSLPLPWSIRMKIALGAAKGLAFLHEEAKRPVIYRDFKTSNILLDAEYNAKLSDFGLAKDGPEGDKTHISTRVMGTYGYAAPEYVMTGHLSSKSDVYSFGVVLLEMLTGRRSMDKKRPNGEHNLVEWARPHLGERRRFYRLIDPRLEGHFSIKGAQKAAQLASRCLSRDPKARPLMSEVVDCLKPLPALKDMAGPSYYLQTVQPERAGSSPDPNRTRVGSFSRNGSQHPRTLSIPNASPRHNQFLQDSPNPNGKQ

SEQ ID NO: 4618 - protein, 221 aa, Glycine max
MGSEGPPAAVTVHVTGFKKFHGVSENPTETIVNNLTEYLKKKGLSKGLVIGSCSILETAGQGALIPLYKTLQSAITSKESESSSSNKIIWLHFGVNSGATRFAIERQAVNEATFRCPDEMEWKPQKVPIVPSDVAITRIRKTTLPVEEITKSLANKGYDVMTSDDAGRFVCNYVYYHSLRFAEQNGTKSLFLHVPLFSTINEETQMQFAASLLEVLASTCQ

SEQ ID NO: 4619 - protein, 79 aa, Zea mays
RHRSDLDLCYSMSQRFLDEHHHQQLGKAEEAPPLAPASPAQPAATTNWKISSPGDSPDEVKARLKYWAQAVACTVRLCS

SEQ ID NO: 4620 - protein, 464 aa, Haloarcula marismortui ATCC 43049
MLVSLTKCMHVFWHQRDLRIPDNRGLTAAAADDEVLPVYVLDTDLLANIGKRQKAFLLAGVRALKQAYRDHGGELLVKKGTAVDVLSNVVDEYDADRVYYNEHYRPARRNRQRRVDEALPTKSLTDLVLVDPAGLDSQYENHSRFYDDWQAHHKLPPVGSPDSGSLVDVSDPTTAPTIETEMDLPTPGYEGARQRYDDFLTGGIETYNDTRDDMQAAVERPTSAVSRMSPYLAAGMIGIREMWRDASDRHTEATGDAQRNIQKYRYELSWREQSYHLLYYNPTLLSENYKTFPNRIEWENDEDNFEAWKHGETGYPFIDAGMRQLEQEGYIHNRPRQNVASFLTKHLLVDWREGARHFRKRLVDHDPANNAASWQWTASTGTDSVDVRIFDPVAQMSKYDSGADYVTEYVPELRGVPSTKIVDWPTLSDGEREELAPDYYHPIVDRNAAYERAQRVFETALGKR

SEQ ID NO: 4621 - protein, 360 aa, Debaryomyces hansenii CBS767
MNNEQPPPQQAHTRQISFNVSDHYQILEVVGEGAYGIVCSAIHKPTNQKVAIKKIEPFERSMLCLRTLRELKLLKHFNHENIISILAIQRPINFNLFNEIYLIQELMETDLHRVIKTQKLSDDHIQYFIYQTLRALKTMHLANVLHRDLKPSNLLLNSNCDLKICDFGLARSIASSEDNFGFMTEYVATRWYRAPEIMLTFQEYTTAIDVWSVGCILAEMLVGRPLFPGRDYHNQLWLIIEVLGTPNMEDYYNIKLKRAREYIRSLPFVKKVPFANLFNSEAINPLAIDLLENLLVFNPAKRITVDNALNHPYLNIYHDPNDEPISEKIPEDFFDFDKRKDELSIEDLKKLLYDEIMKPL

SEQ ID NO: 4622 - protein, 615 aa, Magnetospirillum magnetotacticum MS-1
MCGIAGFVGDGDRDILAAMAGAIAHRGPDGEGLWIDPERAVHLAHRRLAVIDLEGGAQPMWSGDGRIGVVFNGEIYNHRALRRDLESLGHVFASDHSDTEVLIHGWRQWGRDLPGRLNGMFAFAIHDRERGSLFLARDRFGEKPLYVVERPGLFAFASEISALLRHPGVPAEADALAIRKFFAYCLFPAPHTPFKAIAKLPAGHWLELSLSGLTTERGCYWRFAIEPEETGRSETELAEELRALLDASVRDRLESDVPLGIFLSGGIDSSAMLALAARHRPAASLDGFSIGFTEASFDESAFARRMAAEVGCRHHVETCDLDAARRDLPDLLARLDEPSGDPSILPTSLLCRFARRSVTVALSGDGGDELFGGYDPLTALAASRRYRALVPGAVHPAIEALAGLLPPSDANMSLDFKIQRWLRGVGREPSMWLPGWMGALSPSEIDQVFGSRLAPEELYSEAIERWEACASPDPIDRALDYFTAFYLQDGILTKSDRASMQVALEVRAPFLDNDVADFARRLPSRFKVAGGQRKVLLKKAVRGLVPDALIDRPKKGFGIPLARWLRDMDPPTAGTPLLDDAWLRQRWERHRTKRQDCRHGLWCWLALERRFSTVN

SEQ ID NO: 4623 - protein, 706 aa, Lycopersicon esculentum
YFSIPIELVYFVQKSAVFPYRWVLVQFGAFIVLCGATHLINLWTSTPHTRTVAMVMTTAKFSTAAVSCATAVMLVHIIPDLLSVKTRELFLKNKAAELDREMGLIRTQEETGRYVRMLTHEIRSTLDRHTILKTTLVELGRALQLEECALWMPTRTGVELQLSYTLHHQNPVGFTVPIQLPVINQVFSANCAVKISPNSAVARLRPTRKYIPGEVVAVRVPLLHLSNFQTNDWPELSPKSYALMVLMLPSNSARQWHVHELELVDVVADQVAVALSHAAILEESMRARDLLIEQNVALDLARREAETAVRARNDFLGVMNHEMRTPMHAVVALSSLLQESELIPEQRLMVETILKSSNLLATLINDVLDLSRLEDGSLQLDVGTFNLHALFREVLNLIKPVAAVKKLFVTLSLSSDFPEVAIGDEKRLMQILLNVVGNAVKFSEEGSVSVSAVNAKSESLIDPRAPEFFPVQSENHFYLRVQVKDTGSGINPQDFPKLFCKFAQNQEPATKNSAGTGLGLAICKRFVNLMEGHIWIESEGVGKGSTAIFIVKLGIPGRLNESKLPFTAGLPANHMQMTFQGLKVLVMDDNGFSRMVTKSLLVHLGCDVTTIGSGDECLRILTREHKVLIMDASITGMNCYDVAVSVHEKFGKRLERPLIVALTGNTDQVTKENCLRVGMDGVILKPVSIDKMRSVLSGLLEHGTVL

SEQ ID NO: 4624 - protein, 484 aa, Hordeum vulgare subsp. vulgare
GKTLGIGSFGKVKIAEHIITGHKVAIKILNRRKIKSMEMEEKVKREIKILRLFMHPHIIRLYEVIDTPADIYVVMEYVKSGELFDYIVEKGRLQEEEARRFFQQIISGVEYCHRNMVVHRDLKPENLLLDSKCNVKIADFGLSNVMRDGHFLKTSCGRPNYAAPEVISGKLYAGPEVDVWSCGVILYALLCGTLPFDDENIPNLFKKIKGGIYTLPSHLSPLARDLIPRMLVVDPMKRITIREIREHSWFKARLPRYLAVPPPDTAQQVKKLDDETLNDVIKMGFDKNQLTESLQKRLQNEATVAYYLLLDNKLRTTSGYLGAEYQESMDSSFSQISPETPSSASEARQYGSPGFGLRQHFAAERKWALGLQSRAHPREIITEVLKALQELNVCWKKIGHYNMKCRWSPGFFENMMHNNNGFGVESAIIEADGLGDKSTHIVKFEIQLYKTRGDKYLLDLQRVSGPQLLFLDLCSAFLTQLRVL

SEQ ID NO: 4625 - protein, 883 aa, Oryza sativa
MSSAANVMLAIHEKRTTPTDLYRPLRLYIASAYSEREAAAADDDLAAVRDLRADVEQPSLPDPSSLERRRDALLAYARALSLVEPRFPISSDRANVHSLAFTWHDAFKTGKKASVASIHLEKAAVLFNLAAVYSQIALAADRATDVGIRTACGSFQSAAGAFAWMRESGVAAKAVAAGATTVDVTPECAAMLEKLMLAQAQECFFEKVIAGGKPPALCSKVARQVGIFYEEAYAALSAAPLSQHFDKTWVSHVQLKAAQFYADACYRCSLDLHEKEEIAQEIARLKIGISALADAKKVARGAGCRNRHEGNKLESNMKTNLERAMKENDRVYLMRVPDASSLGALPAASLVKPTSLAEVLDASKERLFSSLVPDGSMKALSKYTEMVDNIIRTQAEKLQQASEITRVRLKEMDLPDSILSLEGNITLPLDLKEDVEAVQISGGPAGLEAELQQLRDLSRVNQELLVQTEEMLQKEANEDAQFRTQFGSRWTRPQSSTLTKNIQDRLNLFASNLKTAGDSDSQIERGLKESYPLISILDRRPIESALPSISRPIMSLDGNEDAIVGALKQSLRQLESLGAQRAGLEDMLKEMKRKDDILPKLMAGVGSHDDLFKKEISKYDPVCAEIADNIVAQEQLLLQIQAQNEQFAAVFNLEDYKVARERCYKQIAAAVAKYRDIKKNINEGLNFYVTLQEAIGKIKQQCSDFIMTRNIQCREMIEDVQKKLAGFSFSSSSSQASMQRNTSVPPDQNSPSPPPPSSHAPHAQGPYGVPPGGDSRPGYSQPEQRPAYSQPYPPYGAPPQQPPYGAPSQQPPYGAPHPGHYQQPPHQQPPNHDYGQQAYPGGWRGQYYNPHQPQPQPQPPYPQPPYNAQGSYPPHQSSYYRPQ

SEQ ID NO: 4626 - protein, 490 aa, Petunia x hybrida
MGFESEKNNSVLSKLATNEEHGENSPYFDGWKAYDNDPFHPLKNPNGVIQMGLAENQLCFDLIEDWIKRNPKASICTTEGIKSFRGIANFQDYHGLPEFRRAIAKFMEKTRGGRVSFDPDRVVMAGGATGANETIIFCLADAGDAFLVPSPYYPAFNRDLRWRTGVQLIPIPCESSNSFKITTKAMKEAYENAIKANIRVKGLILTNPSNPLGTTLDRDTLKSLLNFTNERNIHLVCDEIYAATVFNTPQFVSIAEILNDEKSNFNKDLVHIVYSLSKDMGLPGFRIGIVYSYNDAVVNCARKMSSFGLVSTQTQHLLAKMLSDEEFVANFLCESSMRLGKRHKHFTNGLEQVGIKCLKSNSGLFCWMDLRHLLENSTLDSEMSLWRVIINDVRLNVSPGSSFDCQEPGWFRVCFANMDDETVEVALARIRRFVGVGVKENGEETKPVKNKEQWKKSNLRVSFSKRMYDESVLSPLSSPIPHSPLVRART

SEQ ID NO: 4627 - protein, 363 aa, Psychrobacter arcticus 273-4
MTSTLFNTVKLGKITLDNRVGVAPMTRTSATPEGLATDQMVDYYAKFARGGFGLIITEGTYSDNTYSQGYFDQPGIINNEQVTAWKKVTEAVHQEGGKVIVQLMHAGALSQGNQFTKETLGPSAVQPKGEQMAFYGGDGAFQVPKEATKDDITEVIKGFVEASKNAKEAGFDGIEIHGANGYILDQFLTDYTNKRTDEYGGSTENRVRLLEKVSRAVREAVGQDYTVGIRISQGKVNDYDHKWANKEKDAEIIFGQLAQAGLDYIHVTDFEAWQPAFGDEGPTFAALAKKYGKLPVIANGSLHDPEKAKEIVEKGGADIITLARGALSNGDWANKVKNGEKPEEFVPEKVLSPDAKIKDFETK

SEQ ID NO: 4628 - protein, 442 aa, Zea mays
MPNGGGKRWLLLLPLSRWVLLLGSLQLPAVGGSGHVVTRMRGFDGPLPFYLETGYVEVDEQQGVQLFYYFVRSERDPYEDPLLLWLSGGPGCSGISGLAYEIGPLKFDARGQGEFPTLLYRPETWTKVSNIIFVDSPVGTGFSYAKSEEGLETGDTKQVKQLVIFLRKWLQDHPRFVMNPLYIAGDSYSGLIIPTLALEIDRSIELGEKIFSGLKGYIAGNPLTGGQFDTDSQIPYFHAMGLVSDELYKCTRDINKQYILDPACPDDDLLSPKTVAETDGTSRLMLESADFLLGSKCAEALYILSYAWGNDDTVQESLGIRKGTIGAWKRYSHALPYNYDIQSVVDYHSRLATKGYRALIYSGDHDAVVPHVGTQAWIRYLNLTIVDDWRPWYVGGQVAGFTRSYASGLTFATVKGAGHVAPLYKTLECQKMFITWISGNPL

SEQ ID NO: 4629 - protein, 228 aa, Brassica napus
MALEALSSPRLASPVPTLFQDSAVGFHGSKGKRSKRSRSEFDRSLTEDEYIALCLMLLARDGNRTRHLPSSSSSPPLLPTLTSTHLHKCSVCDKAFSSYQALGGHKASHRKNSSQTQSSGGDEKSTSSAITIASHGGGGGGSVKSHVCSICNKSFATGQALGGHKRCHYEGKNGSSSEGVGSTSHVSSVSHHHHRGFDLNIPPIPEFSTVNGEEEVMSPMPTKKLRLE

SEQ ID NO: 4630 - protein, 395 aa, Arabidopsis thaliana
MASENLNDKISVFKKLKAKSDNKICFDCNAKNPTWASVTYGIFLCIDCSAVHRSLGVHISFVRSTNLDSWSSEQLKMMIYGGNNRAQVFFKQYGWSDGGKTEAKYTSRAADLYKQILAKEVAKSKAEEELDLPPSPPDSTQVPNGLSSIKTSEALKESNTLKQQEKPDVVPVSPRISRSVKKPLGAKKTGKTGGLGARKLTTKSSGTLYDQKPEESVIIQATSPVSAKSARSSFSSRFDYADNVQNREDYMSPQVVSHVAPPKSSGFFEEELEMNGGRFQKKPITSSSKLQIQETDEARKKFTNAKSISSAQYFGNDNNSADLEAKSSLKKFSGSSAISSADLFGDGDGDFPLDLTAGDLLNRLSLQAQQDISSLKNMAEETKKKLGSVASSLWV

SEQ ID NO: 4631 - protein, 305 aa, Arabidopsis thaliana
  misc_feature (182)..(182): Xaa can be any naturally occurring amino acid
MSLSASEKEENNKKMAADKAEMGRKKRAMWERKWKRLDIVKAFASLFVHFLCLLAPFNFTWPALRVALIVYTVGGLGITVSYHRNLAHRSFKVPKWLEYFFAYCGLLAIQGDPIDWVSTHRYHHQFTDSDRDPHSPNEGFWFSHLLWLFDTGYLVEKCGRRTNVEDLKRQWYYKFLQRTVLXHILTFGFLLYYFGGLSFLTWGMGIGVAMEHHVTCLINSLCHVWGSRTWKTNDTSRNVWWLSVFSFGESWHNNHHAFESSARQGLEWWQIDISWYIVRFLEIIGLATDVKLPSESQRRRMAMVR

SEQ ID NO: 4632 - protein, 373 aa, Oceanobacillus iheyensis HTE831
MNANNHDMFSPLTFKNGLELKNRLVMAPMTHYSSNPDGTVSDEEISYYARRSKGVGMVITATTYVTPNGKGFPNQFSAVEDGMIPSLSKLAKGIQNEGAKAILQIFHGGKMCPPSLIPDGDVVSASNIPANSEAAEPRPLKESEIEEIIEAFGETTRRAIEAGYDGVEIHGANGYLLQQFFSPFSNRRDDRFGGSLEKRMAFPLAVIEKVKSVVAEHADASFIVGYRFSPEEPETPGITMDETLQFVDVLADKQLDYLHVSLMDFFSKARRGVEDLNKTRISYLLETIDNRVPLIGVGSIYTAEDARKAFNTGIPLLAIGREIIIDPDWVEKVAEGRDDEIITEINKDKQEELVVPDPLWNVITHAPGWFPGV

SEQ ID NO: 4633 - protein, 464 aa, Edwardsiella tarda
  misc_feature (186)..(186): Xaa can be any naturally occurring amino acid
MKKGTDTRGGYLDSRFGSEAIRTAAEAHHFPQGEMREDIAFQVINDELFLDGNARQNLATFCQTWDDDYVHRLMDISINKNWIDKEEYPQSAAIDLRCVNMVADLWHAPRPADGQAVGTNTIGSSEACMLGGMAMKWRWRAKRLAQGKSVDKPNMVCGPVQVCWHKFARYWDVELREIPMAPGKLXMDPERMIAACDENTIGVVPTFGVTYTGNYEMPDVLHKALDDLQARTGLDIDMHVDAASGGFLAPFCAPDIVWDFRLPRVKSISASGHKFGLAPLGCGWVVWRDAASLPDDLIFKVDYLGGQVGTFAINFSRPAGRVIAQYYEFLRLGREGYTKVHTASYQVAQFLAAEIAKLGPYEFICSGDPQQGIPAVCFRIPAGKALGYSLYDLSERLRLRGWQVPAFALNGEMSDVVVMRIMCRRGFEMDFAQLLMEDFRAALAYLKAHPAVANVAHQNSFKHS

SEQ ID NO: 4634 - protein, 370 aa, Sinorhizobium meliloti 1021
MNAPAIIPSPVFTGTSLKGLDFANRLSVAPMTRISASCAGVPGERMVRYYQRFARGGFSLVMSEGIYTDKAYAQTYSGQPGLTDREQADAWRRAVDAVHAAGGSIFAQLMHGGALSQGNPYRSDTIGPSAIRPKGSQMTGYRGDGPYAMPREISEAEIAAAIEGFAGAARLAIEVAGFDGIEIHGANGYLLDQFFTDYTNHRQDRWGGDIVARFGLSLEVLKAVRAAIGPSVPLGLRLSQGKVNDFRHKWAEREQGAARVFEALAESPADFAHVTEFEAWRPAFEGGEISLVSLARRHAPRLFLIANGSLHELARAEQVMESGADMIALGRGALVNPDWPHLTAARSALRPFELSMLAPISDIKDSELAL

SEQ ID NO: 4635 - protein, 430 aa, Arabidopsis thaliana
MSLTLEFLLLLIVLILSHHAHSGSIVKFLPGFEGPLPFELETGYIGIGEEEEVQLFYYFIKSEKNPEEDPLLLWLSGGPGCSSLTGLLFENGPVALKFEVYNGSVPSLVSTTYSWTKMANIIFLDQPVGSGFSYSRTPLVDKISDTGEVKRIYEFLQKWLSKHQQFFSNPFYVGGDSYSGMIVPPLVQEIGKGNYQINLQGYILGNPITDTESEQNYQIPYAHGMALISDELYKSMERICKGNYVKVDSLNTKCYKLIKDYQKCIHKLNKYHILLPDCDITSPDCFLYRYTLITFWANNKSVREALQVNKGSIGKWVQCNYKNISYNYDIKSSVAYHMKNSIDGYRSLIYNGDHDMMVPFLATQAWIRSLNYSITDDWKPWMINDQIAGYTRSYSNKMTFATIKGSGHTAEYKPKETSIMFKRWISAQPL

SEQ ID NO: 4636 - protein, 552 aa, Edwardsiella tarda
MAGMVIYPIVNIDFLQFLEKTQLNKPSQHATTTEESAMNIVNGINGLIAKKNVLFFLTSLAISPSVLADTLTRDNGAPVGDNQNSQTAGPNGPVMLQDVQLLQKLQRFDRERVPERVVHARGTGAHGVFTPTADISDLTVAKVFTPGSTTPVFVRFSSVVHGTHSPETLRDPRGFATKFYTAEGNWDLVGNNFPTFFIRDAIKFPDMVHAFKPDPRTNLDNDARRFDFFSHLPESTRTLTLLYSNEGTPLSYRNMDGNSVHAYKLINDKGESPLCEVHWKTRQGIKNLDPQQVEQIQGKDYSHMTQDLVTAINRGDYPKWDLYIQVLRPADLKNFDFDPLDATKAWPDVPERKIGEMVLNKNPDNVFQETEQVAMAPSNLIPGIEPSEDKLLQGRLFAYADTQFYRIGANGLSLPINKPHSVVNNGNQDGQLNSGHTLDKGVNYQPSRIYPREELVSSRYSQTPLSGTTQQSKIQREQNFKQAGELYRSYSKKEQNDLINSLGTSLASADTVSKNIMLSYFYKADKDYGTRLTSVANGDLPTVKNLADKLQD

SEQ ID NO: 4637 - protein, 640 aa, Desulfovibrio vulgaris subsp. vulgaris str. Hildenborough
MTIPCSRPLFIEPFDLYLFGMGRHRHLYRILGAHPAVQDGEAGYRFAVWAPNARSVHLSGDCNGWRHEGCPLFPVGVSGVWAAFVPGVRRGSLYKFVVRGADGRQEQKADPFALWAEMRPGVASVAWDIDNHAWGDGAWMAERARQGLPLERPVSIYEVHLGSWRRRHGDGHPFLTYDELGDQLIPYATGLGFTHLELLPVAEHPLDQSWGYQTGHYYAPTSRFGSPEGFKRFVDRCHQAGLGVILDWVPAHFPRDAWSLGRFDGTALYEHLDPRLGEHPDWGTYIFNYGRNEVRNFLTANALYWLREFHIDGLRMDAVASMLYLDYSREAGQWLPNRHGGRENLDAVDFLREVNTVIHAEFPGAMTLAEESTAWPGVSRPVYTGGLGFSFKWNMGWMHDTLGYLAEDPIHRAYHHGSLTFSMLYAFSENFVLPLSHDEVVHGKGALLSKMPGDMWQQQANLRLLYAYQWAHPGKKLLFMGGEFGQWNEWDESRELDWCLYRFPAHEGIARLVGDLNRLLRSEPAMHRRDHDWSGFRWVDFADYGSSVISFLRLAAGERPLLWIFNFTPVVRRFYRVPCPRGGTWRELCNTDSAYYGGSDVGNAGAVMAREDHWGGGHFIELTLPPLAAMCFAPVTGQGT

SEQ ID NO: 4638 - protein, 163 aa, Zea mays
MDAVMFGLETPLMAALQHLLDVPDGDAGAGDNKTGGGGGATRTYVRDARAMAATPADVKELPGSYAFVVDMPGLGTGDIRVQVEDERVLVVSGERRREEREDDAKYLRMERRMGKFMRKFVLPDNADVDKVAAVCRDGVLTVTVEKLPPPEPKKPKTIEVKVA

SEQ ID NO: 4639 - protein, 499 aa, Burkholderia fungorum LB400
MTRVRRLNDTFDTGLVWLRRDLRNTDNAALYYALKHCERVWCVFVFDTTILQPLVDAWHARHPDTQPQDRRIEFILAALGELDEALRADGGGLIVLYGNPAELVPKLADELGVDAVFANHDYEPVAIERDGTVRERLAEAGRQWLTFKDQVIFERDEVLTGQSKPFTVFTPYRNAWLRQLSAFDLKPYPVETYAKRLAALPSKFDRQLPTLEQLGFAPSNLGELNLPAGMSGAQRLLDDFMTRIDSYADRRDFPAAKGPSYLSIHLRFGTVSIRTLARLAHEMSLQPDGQGSATWLSELIWRDFYFMILAHHPRLARGASFREEYDRLRWEQGLQADEAFAAWCNGRTGYPLVDAAMLQLNRTGYMHNRLRMVTASFLVKDLGVDWRLGERYFAEQLNDFDFSANNGGWQWAASTGCDAQPYFRIFNPVTQSEKFDAEGRFIKRYLPQLAKLPSKWIHAPWLAGAERLADCGVVLGKDYPAPIVDHAEARARTLARFGK

SEQ ID NO: 4640 - protein, 279 aa, Thermosynechococcus elongatus BP-1
MFMTQATVAKPPIAWPTATFIIFVHLGALLAFLPSMFSWQAVLLALVLHWLTAGIGITLGWHRLVSHRSFQVPKWLEYFLVFCGTLSMQGGPIWWVGLHRHHHLYSDQPNDHHDSRKGFWWSHIEWMFHEVPAEAEIPRFTKDIADDPVYRFLDRYFLPIQVVLAIVLYLWGGWPFVVWGIFVRLVTVYHTTWLVNSATHTFGYRTFETTDHSTNCWWVALLTFGEGWHNNHHAYQYSARHGLQWWELDLTWLTIRFLQLLGLAKKVRLVEAPAASCQD

SEQ ID NO: 4641 - protein, 542 aa, Listeria innocua Clip11262
MAKDIKFSEDARRAMLRGVDQLANAVKVTLGPKGRNVVLEKKFGSPLITNDGVTIAKEIELEDPFENMGAKLVSEVASKTNDVAGDGTTTATVLAQAMIQEGLKNVTAGANPVGVRRGIEKAVATAIEELKAISKPIESKESIAQVAAISSGDEEVGKLIAEAMERVGNDGVITIEESKGFATELDVVEGMQFDRGYTSPYMVTDSDKMEAVLEKPYILITDKKINNIQEILSVLEQVVQQGRPMLIIAEDVEGEAQATLVLNKLRGTFNVVAVKAPGFGDRRKAMLEDIAVLTGGQVITEDLGLELKTATVDQLGTANKVVVTKDDTTIVEGAGDSTQISARVNQIRAQMEETTSEFDREKLQERLAKLAGGVAVVKVGAATETELKERKLRIEDALNSTRAAVEEGIVAGGGTALVSIYNKVAALEAEGDVETGINIVLRSLEEPVRQIAHNAGLEGSVIVERLKHEAVGVGFNAANGEWVNMIDAGIVDPTKVTRSALQNASSVAALLLTTEAVVADQPDENGPAAGPDMGMGGMGGMM

SEQ ID NO: 4642 - protein, 903 aa, Oryza sativa
MDSCALFLSTPRPPPPLVPAHRRRPLASRSGLRRREGCPCSCASSSSSSGRAGSQDRPPRPWQQKQRTQRPGRGEAIDPVGFLAKHGISDRAFAQFLRDRYKALKDRRWELHSRLIDLKEASSGFELMGMHRHRQHRVDFMEWAPGARYCSVVGDFNQWSTTENCAREGHLGHDDFGYWTIILEDKLREGQEPDEYYFQEYNYADDYDKGDNGVDVEELIHRMNEEYWEPGEIKSQKSRLEVVAKLYEQMFGPNGPQTEEELGDIPDAETRYNEWKALQKDDSASSLPCYDIIDNGREFDIFNVATDRVSFEKFQGKSPPLAYWVEMRKGRKAWLEKYVPAISHKDKYRVYFNTPDGGLERIPAWATYVLPDAEGKQSYAVHWDPPPEEIYKWRFERPKVKGSLRIYECHVGISGSEQKISSFQEFTSNVLPHIKDAGYNAIQLIGIVEHKDYSSVGYKVTNYFSVSSRFGSPDDFKKLVDEAHGLGLVVLLDIVHSYASADELVGLSLFDGSNDCYFHSGKRGHHKYWGTRMFKYDDIDVLHFLLSNLNWWVTEYRVDGFQFHSLPSMLYTHNGFSTFTGATEEYYNQYVDEDALIYLIIANEMLHELHPDIITIAEDATFYPGLCEPTTQGGLGFDYWVNLSIPEMWLWHLENVPEQEWSMNKIMRVLVNNNSNMLSYVENHNQSISGRKSFAEIILYEGKCSNSSVDNDLIFRASSLLNIIKLITFTTSGGAYLNFIGNEFAHPKRIEFPMSSNDYSFCLANRQWELLDKGVHKHIFNFDKDIMSLDGKERLISGGSPIVHHCDDTSMIIYFTRGPFLFVFNFNPDASYQLYSVGVDEAGEYQLILNTDETKYGGRGELTSNQYMKRTSDNRVGGCRNSLELTLPSRSAQVFKLVRILRI

SEQ ID NO: 4643 - protein, 368 aa, Pseudomonas fluorescens Pf-5
MSLLLEPYTLRQLTLLNRIAVSPMCQYSSVDGLANDWHLVHLGSRAVGGAGLIFTEATAVTAEGRITAQDLGLWNDAQIEPLQRITRFITAQGAVAGIQLAHAGRKASTHRPWLGKSGSVKPEDGGWVPVGPSRIAFDPQHTPPTQLDEGQIGEVIQAFVAAAKRALEAGFKVVEVHAAHGYLLHQFLSPLSNQRQDQYGGSFENRIRLVLQVTEAVRAVWPEELPLFVRVSATDWVEDGWNPDETVELARRLKDLGVDLIDVSSGGTAANAEIPTGPGYQTRFAERVRKESGIATGTVGMITEPAQAEHILRTCQADIIFLARELLRDPYWPLHADDDLGGRKAIWPAQYQRATHRDQPIHESDLRD

SEQ ID NO: 4644 - protein, 153 aa, Zea mays
  misc_feature (33)..(33): Xaa can be any naturally occurring amino acid
  misc_feature (108)..(108): Xaa can be any naturally occurring amino acid
  misc_feature (131)..(131): Xaa can be any naturally occurring amino acid
  misc_feature (140)..(140): Xaa can be any naturally occurring amino acid
MGASVTVENLNPKGLKCEYAVRGESGIHAHRLXQQLQTQPGALPFEEILYCDIGNPQSLGQQPVTFFRGGLALCEYPCLLGKEETKSLCSAEAISRAKQILATIAGRXTGAYRHRQGIKGLRDAIAAGICXREGFPANAXDIFITDGARAGGH

SEQ ID NO: 4645 - protein, 293 aa, Nostoc punctiforme PCC 73102
MLSQLGATSHLSPHLTFGTISTRTVYQSTKALAEQLKTQPKAEFSLKAFRDRLRWHDSFTQRLYFHPEIAYTNRYREFDKLYTPETLSGAKQELYQAWQQGMTGFPLVDASMRQLQTMGWMNFRMRAMCATFLTINCGVSWHHGAKHYMNYLVDGDLAIDNWQWQMQAGVTNPLSDTFRIYNPSKNIAEKDPLGEFIYHWIPELRGYSLLEIEQEKYIETSNYPKVILDWSKTRKVNGKIVSDLRKQTKQRLLSQGGDEYDSAIAAKETVDKYWQHKDKEYKEYQQKLTELQE

SEQ ID NO: 4646 - protein, 328 aa, Debaryomyces hansenii CBS767
MADHQEADIDSIVDRLLEVRGSRPGKQVTLLEHEIRYLCTKAREIFIQQPILLELEAPIKICGDIHGQYYDLLRLFEYGGFPPEANYLFLGDYVDRGKQSLETICLLLAYKIKYPENFFILRGNHECASINRIYGFYDECKRRYNIKLWKTFTDCFNCLPIAAIIDEKIFTMHGGLSPDLNSMEQIRRVMRPTDIPDVGLLCDLLWSDPDKDITGWSENDRGVSFTFGPDVVSRFLQKHDMDLICRAHQVVEDGYEFFSKRQLVTLFSAPNYCGEFDNAGAMMSVDESLLCSFQILKPADKKPRYPQSNNISNNRPVTPPRKPRRGSK

SEQ ID NO: 4647 - protein, 467 aa, Vigna radiata
MRLLSTIATCNSHGQDSSYFLGWQEYEKNPYDELHNPKGIIQMGLAENQLSFDLLESWLAKNPDVAGFKRDGKSIFRELALFQDYHGLPSFKKALVDFMSEIRGNKVTFDPNHIVLTAGSTSANETLMFCLAEQGDAFLLPTPYYPGFDRDLKWRTGAEIVPIQCTSSNNFQITEPALKQAYEEARKRNLRVKGVLVTNPSNPLGTTMSRSELNLLVDFIKEKKDTHLISDEIYSGTVFSSPGFVSVMEILKERNDTEEIWNRVHVVYSLSKDLGLPGFRVGAIYSENDTVVAAATKMSSFGLVSSQTQYLLSAMLGDKKFARNYIVENQKRLKRRQRMMVSGLQKAGISCLESNAGLFCWVDMRHLLHSNTFEAEMELWKKIVYQVGLNISPGSSCHCTEPGWFRVCFANMSEETLTLAMKRLKNFVVESTCTQRSALFNGTSKRKSLTKWVFRLSSRDHREQEER

SEQ ID NO: 4648 - protein, 330 aa, Arabidopsis thaliana
MQAISKVSSAASFFRCSRLVSQPCVRPCVRQLHVRKGLVSGVMKLFSSPLRTLRDAGKSVRISRFCSVSNVSSSLQIELVPCLTDNYAYILHDEDTGTVGVVDPSEAVPVMDALQKNSRNLTYILNTHHHYDHTGGNLELKDRYGAKVIGSAADRDRIPGIDVALKDADKWMFAGHEVHIMETPGHTRGHISFYFPGARAIFTGDTLFSLSCGKLFEGTPEQMLASLQRIIALPDDTSVYCGHEYTLSNSKFALSIEPTNEVLQSYAAYVAELRDKKLPTIPTTMKMEKACNPFLRTENTDIRRALGIPETADEAEALGIIRRAKDNFKA

SEQ ID NO: 4649 - protein, 443 aa, Arabidopsis thaliana
MRNLSFIVLFLLTLFFIHHLVDASLLVKSLPGFEGPLPFELETGYVSIGESGDVELFYYFVKSERNPENDPLMIWLTGGPGCSSICGLLFANGPLAFKGDEYNGTVPPLELTSFSWTKVANILYLEAPAGSGYSYAKTRRAFESSDTKQMHQIDQFLRSWFVKHPEFISNPFYVGGDSYSGKIVPGAVQQISLVTHSYIIEQGYVLGNPVTDKNIETNYRVPFAHGMGLISDELFESLERSCGGKFFNVDPSNARCSNNLQAYDHCMSEIYSEHILLRNCKVDYVLADTPNIRTDRRRTYRYFLSAFWANDENVRRALGVKKVPTGKWNRCNSQNIPYTFEIFNAVPYHVNNSLKGFRSLIYSGDHDSMVPFSSTQAWIRALNYSIVDDWRPWMMSSNQVAGYTRTYANKMTFATIKGGGHTAEYTPDQCSLMFRRWIDGEPL

SEQ ID NO: 4650 - protein, 495 aa, Oryza sativa
MEGNARGGGHSEALKNYNLGRTLGIGSFGKVKIAEHKLTGHRVAIKILNRRQMRNMEMEEKAKREIKILRLFIHPHIIRLYEVIYTPTDIYVVMEYCKFGELFDYIVEKGRLQEDEARRIFQQKPENLLLDSKYNVKLADFGLSNVMHDGHFLKTSCGSPNYAAPEVISGKLYAGPEVDVWSCGVILYALLCGTLPFDDENIPNLFKKIKGGIYTLPSHLSALARDLIPRMLVVDPMKRITIREIREHQWFQIRLPRYLAVPPPDTAQQAKMIDEDTLQDVVNLGYEKDHVCESLRNRLQNETIFQATVAYYLLLDNRFRATSGYLGADYQESLERNLNRFASSESASSNTRHYLPGSSDPHASGLRPHYPVERKWALGLQSRAQPREIMIEVLKALEDLNVCWKKNGQYNMKCRWSVGYPQATDMLDVNHSFVDDSIIMDNGDVNGRLPAVIKFEIQLYKSRDEKYLLDMQRVTGPQLLFLDFCAAFLTKLRVL

SEQ ID NO: 4651 - protein, 486 aa, Desulfotalea psychrophila LSv54
MPINSVLPGGTLSVKTQDDGALITSASNLAKFPDGFCWGLATASYQIEGSPKVDGKGMSIWDTYAHIPGKMKNNDTGDVAIDHYQRYKEDVQIMKEMGATGYRFSIAWSRIFPSGTGLANPKGLDFYNRLVDELLNAGIQPFATLYHWDLPQALQDKGGWQSRETAECFAQYAGYMAEKLSDRVKNFFTLNEFQNIVDMGHRGVDMVVQGKPVHIELAPGLKLDNQALNQVAHHTVLAHGLSVQAIRAMGKKGTKVGPAEVMFCGVPIMDSPEHVKAAELATRRLNARFLDVMLTGKYSDAYLQEAGKDAPKFTEEDLQAIGSPVDFVGINVYIPKMYVMASEDESGYKEVPMSVSHPKMSSPWHTFAPEVLYWAPRLTHSIWKPKAIYITENGCAASDEISADGNIYDTDRVMYLRNAMGQLQRASAEGVPIKGNFVWSAFDNLEWSGGFGTRFGLVHVNFKTQKRTPKLSAKWFKEAAGHNAVL

SEQ ID NO: 4652 - protein, 918 aa, Escherichia coli K12
MTNYSLRARMMILILAPTVLIGLLLSIFFVVHRYNDLQRQLEDAGASIIEPLAVSTEYGMSLQNRESIGQLISVLHRRHSDIVRAISVYDENNRLFVTSNFHLDPSSMQLGSNVPFPRQLTVTRDGDIMILRTPIISESYSPDESPSSDAKNSQNMLGYIALELDLKSVRLQQYKEIFISSVMMLFCIGIALIFGWRLMRDVTGPIRNMVNTVDRIRRGQLDSRVEGFMLGELDMLKNGINSMAMSLAAYHEEMQHNIDQATSDLRETLEQMEIQNVELDLAKKRAQEAARIKSEFLANMSHELRTPLNGVIGFTRLTLKTELTPTQRDHLNTIERSANNLLAIINDVLDFSKLEAGKLILESIPFPLRSTLDEVVTLLAHSSHDKGLELTLNIKSDVPDNVIGDPLRLQQIITNLVGNAIKFTENGNIDILVEKRALSNTKVQIEVQIRDTGIGIPERDQSRLFQAFRQADASISRRHGGTGLGLVITQKLVNEMGGDISFHSQPNRGSTFWFHINLDLNPNIIIEGPSTQCLAGKRLAYVEPNSAAAQCTLDILSETPLEVVYSPTFSALPPAHYDMMLLGIAVTFREPLTMQHERLAKAVSMTDFLMLALPCHAQVNAEKLKQDGIGACLLKPLTPTRLLPALTEFCHHKQNTLLPVTDESKLAMTVMAVDDNPANLKLIGALLEDMVQHVELCDSGHQAVERAKQMPFDLILMDIQMPDMDGIRACELIHQLPHQQQTPVIAVTAHAMAGQKEKLLGAGMSDYLAKPIEEERLHNLLLRYKPGSGISSRVVTPEVNEIVVNPNATLDWQLALRQAAGKTDLARDMLQMLLDFLPEVRNKVEEQLVGENPEGLVDLIHKLHGSCGYSGVPRMKNLCQLIEQQLRSGTKEEDLEPELLELLDEMDNVAREASKILG

SEQ ID NO: 4653 - protein, 665 aa, Geobacter metallireducens GS-15
MCGITGFMDFSLQCGPDAMRANARRMADALMHRGPDDSGAWCDQGAGVGLAHRRLSILDLTPAGHQPMESRSGRFTIVFNGEIYNHQALRKELAAFEPWRGHSDTETLLAGFEAWGIEATLKRTVGMFALAVWDNAERTLTLARDRMGEKPLYYGWNQGVFLFASELKALRAYPGFDAEINRDAIALLMRHSCIPTPHSIYRGIYKLWPGTILTLRNTGRGIAPWDAADPPFKLFQGEGVSLRPYWSLLEAAEQGHARPFEGTESEAIGELERVLTEAVLAQQISDVPLGAFLSGGVDSTAIVALMQAHSSRPVKTFTIGFHEDDCNEAKYAGEIASRLGTDHTELYVSPGDSLAVIPRLPQLYDEPFSDPSHIPTFLVSLLAREHVTVSLSGDGGDELFGGYVRHTLLHRIWNNIGWCPLPMRKALSDKIRFLSPGQLQAVLRNLPFIDRVHAPVYKAYRLAELIRADSPASMYEICISHWQQDDPVVVGGQSPFHASSGRMPRQLDSFSLPEKIMLMDSVTYLPDDILVKIDRAAMGVSLETRVPFLDHRVVEFAWRLPLGLKIRGGQSKWILRQVLNRHIPKELVERPKHGFGIPLGTWLRGPLREWAEELLNESRLLREGFLDPRPVRQKWLEHVSGRRDWEFHLWDVLMFQSWLEQERRP

SEQ ID NO: 4654 - protein, 545 aa, Bacteroides vulgatus
MAKDIKFNIDARDELKKGVDELANAVKVTLGPKGRNVIIEKKFGAPHITKDGVTVAKEVELADAFQNTGAQLVKSVASKTGDDAGDGTTTATVLAQSIVGVGLKNVTAGANPMDLKRGIDKAVAKVVESIKSQAEMVGDNYDKIEQVAAVSANNDPTIGKLIADAMRKVSKDGVITIEEAKGTDTTIGVVEGMQFDRGYLSAYFVTDTEKMECVMEHPYILIYDKKISNLKDFLPILEPAVQSGRPLLVIAEDVDSEALTTLVVNRLRSQLKICAVKAPGFGDRRKAMLEDIAVLTGGIVISEEKGLKLEQATLEMLGTCDKVTVSKDNTTIVNGAGAKENIQERINQIKAEIKNTTSDYDKEKLQERLAKLSGGVAVLYVGAASEVEMKEKKDRVDDALCATRAAIEEGIVPGGGVAYIRASEALEGLKGDNEDETTGIEIIKRAIEEPLRQIVANAGKEGAVVVQKVREGKGDFGYNARTDVYENLHAAGVVDPAKVTRVALENAASIAGMFLTTECVIVEKKEDKPEMPMGAPGMGGMGGMM

SEQ ID NO: 4655 - protein, 679 aa, Magnaporthe grisea 70-15
MGSARVIYWFRTDLRLHDSPALQAALDLDPAVLWPIFTWDPHYVYRSRGGLNRWQYLLDCQNDLSASITNLNPRSKLFVLREAPQSLFPKLFKAWKVTHLVFEKDTDAYARQRDEVVKKAAQAAGVKVITRYGRTLWDSDAIVKANGGEPTMSMARLRTVGAKVGSIPRPIPAPKALPDPGEMPLDFNLDLPDVGQDYNAKWRSEGKEKAYGAIAGPNGDFAIETLEELGYPPATTPYKGGESLALRELDAIIENQVYTATFRKPQTSPAAFEPQSTTLLSPAMHFGSLSVRLFYHRVQDTVDAYNQAKKKGASLPPESLTGQLLFRDMYFAAQAAIGPCFSQTAGNAHCRFIPWHLPSHVEDNAVSGQVLRKFEYEVDSEQAESWFRRWEAGQTGFPWIDALMRQLRVEGWIHHLGRHSVACFLTRGGCYVSWERGLDVFEELLLDHEPACNAGNWQWLSCTAFFSQYFRCYSPISFGKKWDPDGTFIRKWVPELASLDKKYIYEPWKAPEAELRRAGVVMVSGHDFGVKTEQGKHKAGAVRVKKEGGVGGGGASGTYFTPMFDFDERRRVCMRLMKQAYDAGLKGDDLRVLNGSWRDLFAEEDKPDIDMLDGDAKHHESDEGEFADDAEPKIKREDSGDGSGPGRATRASKREKKPAKGQSTLDGHFLTKRQKTDQK

SEQ ID NO: 4656 - protein, 408 aa, Chlamydomonas reinhardtii
MQVTMKSSAVSGQRVGGARVATRSVRRAQLQVVASSRKQMGRWRSIDAGVDASDDQQDITRGREMVDDLFQGGFGAGGTHNAVLSSQEYLSQSRASFNNIEDGFYISPAFLDKMTIHIAKNFMDLPKIKVPLILGIWGGKGQGKTFQCALAYKKLGIAPIVMSAGELESGNAGEPAKLIRTRYREASDIIKKGRMCSLFINDLDAGAGRMGDTTQYTVNNQMVNATLMNIADNPTNVQLPGVYKNEEIPRVPIVCTGNDFSTLYAPLIRDGRMEKYYWNPTREDRIGVCMGIFQEDNVQRREVENLVDTFPGQSIDFFGALRARVYDDMVRQWITDTGVDKIGQQLVNARQKVAMPKVSMDLNVLIKYGKSLVDEQENVKRVQLADAYLSGAELAGHGGSSLPEAYSR

SEQ ID NO: 4657 - protein, 581 aa, Cryptococcus neoformans var. neoformans JEC21
MNPLRSRAALPRPARLIQNAAVQKRGFASKDVVFGNDARQGMLKGVDVLAKAVAATLGPKGRTVIIGQSFGGPKITKDGVSVAKAITLKDPVENLGARLVQDVASKTNDTAGDGTTTATVLARAIYSEGVKNVAAGCNPMDLRRGAQKAVDKVLEVLAANKKVITTSEEIAQVATISANGDTHVGAIIAQAMEQVGKEGVITVKEGRTIDDEIEITEGMRFDRGFISPYLITDTKNQRVELEKPFILLSEKKISALQDILPSLEIAAQTRRPLLIIAEDIDGEALAAVILNKLRGQLSVAAVKAPGFGDNRKSILGDIAILTGGTVFTDELDVKLEKATPDMFGTTGSVTITKEDTIILNGEGDKSLIQSRCEQIRALINDSSTSDYDRTKLQERLAKLGGGVAVIKVGGSSEVEVGEKKDRYDDALNATRAAVEEGIVPGGGTALLKASTALEDIAVDNFDQKLGISMIRQAIRRPVRTIVENAGEEGSVVVGRLLSEEFAAPEKFNWGYDAQTSQYRDMIAAGILDPLKVVRTALVDASGVASLLTTSEACVVDAEEKTPPSGMGMGGMGGMGGMPGMM

SEQ ID NO: 4658 - protein, 736 aa, Burkholderia fungorum LB400
MSEHDPAAGLQPLDIDALVEARHPDPFSQLGLHHTDAGPVVRALLPNAAHVSVISRADGALLGELEQLRPGLFAGRITSAAPYRLRIDWHGVVQEIEDTYSFGPVLGDEPLGRLAGGDPYAVLECLGARPMEVDGVPGVRFAVWAPNARRVSVVGDFNAWDGRRHPMRLRHQAGVWELFVPRVGPGTRYKYELLSRDGHPLPLKADPCAMQTEKPPGTASIVAHVDEVEQFPWSDHEWIQSRAGKQTARSPISIYEVHAESWLRVAEEGQRGLDWEELAERMIPYVKSMGFTHVEFMPIAEHPFGGSWGYQPLGQFAPSARFGKPEQFARFVDKAHEAGLGVILDWVPAHFPNDAHGLIDFDGTPLYEHADPREGYHQDWNTMIYNLGRNEVSAFLIASGLAWLKRYHVDGLRVDAVASMLYRDYSRAADQWVPNIYGGRENLESIAFLKRLNHEVGYVPGVPGAITIAEESTAWPGVTARVEDGGLGFQFKWNMGWMHDTLHYMEEDPVYRQYHHHNMTFGMVYAYSERFVLPLSHDEVVHGKGSLLGKMPGDRWQKFANLRAYFGFMWTHPGKKLLFMGGEFGQLAEFNHDASPHWHLLDDSNHHGVQMLVRDLNRLYSDEPALYLLDCEPGGFEWLIGDDSGNSVFAYRRTDGAGRELVVVCNMTPVPRLGYRIGMPRGGRWVEVLNTDAGVYGGSNMGNGGLIHTDSQSSHGWPHSAALTLPPLATIVLRAD

SEQ ID NO: 4659 - protein, 368 aa, Pseudomonas syringae pv. tomato str. DC3000
MSLLLEPYTLRQLTLRNRIAVSPMCQYSSVDGLANDWHLVHLGSRAVGGAGLVMSEAMAVTPDGRITPEDLGLWNDEQIEPLQRITRFINAQGAVAGIQLAHAGRKASTWRPWLGKHGSVPLNEGGWTPVGPSAIAFDPQHTAPVQLSETQIKELIEAFVESARRALTAGFKVVEIHAAHGYLLHQFLSPLSNQRTDQYGGSFENRIRLTLQVTEAVHAVWPEELPLFVRVSATDWVEDGWNADETVELARRLKALGTDLIDVSSGGTSANAEIPVGPGYQTRFAERVRKESDIATGTVGMITDPAQAEHILRTGQADIILLARELLRDPYWPLRADEDLGGRLATWPAQYQRATHRDQPIHESDLRD

SEQ ID NO: 4660 - protein, 412 aa, Burkholderia sp. 383
MKPIQKSNKLLNVCYDIRGPVLEHAKRLEEEGHRIIKLNIGNLAPFGFDAPDEIIQDMIRNLPTSSGYSDSKGVFSARKAVMHYTQEKGVVGVGLDDIYIGNGASELIVMATQALLNDGDEVLLPAPDYPLWTAAVSLSGGTPVHYICDEQNAWMPDPDDIRRKITPNTKAIVVINPNNPTGALYSDELLLELLAIAREHGLIVFADEVYDKIVYDGLEHTALGSLSEDVITVTFNSLSKSYRSCGYRAGWMAVSGLGGDNRRRAKDYLEGLGILSSMRLCANVPGQFAIQTALGGYQSINELIVPSGRLYKQRELAYDMLTSIPGVTCVKPQAALYMFPRLDPKLYPIQNDQQFILDLLLEERVLLVQGTGFNWTTPDHFRVVFLPNLDDLTDSINRIARFLDGYRKRHSA

SEQ ID NO: 4661 - protein, 206 aa, Nicotiana tabacum
EAGRMGGTTQYTVNNQMVNATLMNIADNPTNVQLPGMYNKQENARVPIIVTGNDFSTLYAPLIRDGRMEKFYWAPTREDRIGVCTGIFRTDNVPAEDVVKIVDNFPGQSIDFFGALRARVYDDEVRKWVSGTGIEKIGDKLLNSFDGPPTFEQPKMTIEKLLEYGNMLVQEQENVKRVQLADKYLKEAALGDANADAINNGSFFAS

SEQ ID NO: 4662 - protein, 864 aa, Vibrio fischeri ES114
MTLLDHFSIKSRVLVITFVPLILISLFFSKETYDHIKSNNNLHRISANLKLNQLLFSYINTVHMVRMSFLSETNTSSESLDSDILINRMLLKTINIESAKLHKEISKLDSITKRENNTLDTIIQKNESQINSLNNVYRLLINNISTSKFEYINQKLNLLNQLELIHYWALNEDWYTQLYSHLPSQKFEKQIDRFYYQQYLYIADLIQTEEPNSDFQALKTAFDAKQSSQTDTNNYLFQIEKNRNTVLSELEQKVKNRIKNHQLTITGYSILLISLFILITGIGLSLLSRIRSYLKMVSLSMSNIEKNHDYSIKLSENGKDELTVFSSEMNTLIAKRHQNEKKLINEKEEAENANKAKTTFLANMSHEIRTPLNGIIGMSGVLAETKLTPIQLDYLNTIETSSQTLLVLINDILDLSKIEAGNFAIYSQPSNVREVIFDTLSIDIAKATEKNLDLHIHISPDVPNFLTLDEHRVKQILMNLTSNAMKFTHKGFISISVNFSHRVENEGYLTIAVKDSGIGINTNAKENILNPFIQGDSSITRRFGGTGLGLTITNQLIELMGGTLDIESEQEKGSRFSFRIKTNIVNKKLPIPEKLEKLTIILVDDNSGLSRSLTEELHRYHINNIIVKKETDKITIFDSSKAIILYCVTSCLEENCREKLINIHNKNLNTPLILVQKHKSRITTLDSIIDGLVTFPILGHRFIKTLENSLSIHQENQISINDVMNSTPLHSKSQNGKTSLNKEHILIVEDNLVNQKVASLFLGNSGYTFDIANNGQEAVEKFTDSEAYNIILMDCMMPVKDGFTATKEIRKVEKNQKRKKIPIIALTASILDQDISKCYESGMDDFIAKPFKKEILLEKIMTIK

SEQ ID NO: 4663 - protein, 482 aa, Listeria monocytogenes str. 4b H7858
MSNTKFPDGFMWGGATAANQFEGGYNLGGKGLACADLFTGGTHTEPRRITAQLEESTFYPSHEAVDFYHHYKEDIKLMAEAGFKVFRMSINWTRIFPTGKEAEPNEEGLQFYEDVFKELKKYQIEPLVTIAHFDIPLALTNEVNGWASRDLIDYYLHYCEVIFKRYKHLVKHWLTFNEINTATMEIGNYLSLGIRHAEGDFLHQKDDPTVRYQALHHQFVASAKAVKLGHSINPEFMIGCMIAYMPRYPRTCEPTDVLLAKQTEAMHSHFCGDVHVKGYYPFYAKTFFKDNGIELEFDPEDEQVLREGTVDFYTFSYYLTLCASNDPAYKNSGKSVIGGAENPYLKTNDWGMQTDPVGLRIALNDLYTRYNIPLMVVENGLGAFDKLEDDGTINDPYRIDYFKEHILQMHKAIQDGVDLIGFTIWGCIDLVSASTGEMAKRYGIIYVDKYDDGTGDYSRKKKASYYWYKDVISSNGEIGLRE

SEQ ID NO: 4664 - protein, 571 aa, Striga hermonthica
MCGILAVLGVSENSQAKRSRIIELSRRLRHRGPDWSGLHNHQNCYLAHQRLAIIDPTSGDQPLYNEEKTVFVTVNGEIYNHKELREKLKSHVFRTGSDCEVIAHLYEEYGEEFVNMLDGMFSFVLLDTRDNSFIAARDAIGITPLYIGWGLDGSTWFASEMKALSDDCERFMTFLPGHIYSSKSGGLRRWYNPPWYAEQIPSAPYEPLVLRAAFEKAVIKRLMADVPFGVLLSGGLDSSLVASVASRYLADSPAAQWGTQLHTFCIGLKGSPDLRAAREVADYLGTRHHEFHFTVQEGIDALEEVIYHIETYDVTTIRASTPMFLMSRKIKSLGVKMVLSGEGSDEIFGGYLYFHKAPNKEEFHEETCRKIKALHLYDCLRANKATSAWGLEARVPFLDKEFIDVAMGIDPEWKMIRPDLGRIEKWILRNAFDDEEKPYLPKHILYRQKEQFSDGVGYSWIDGLKDHANQQVTDAMLANANFVYPENTPTTKEAYYYRTVFERFFPKNAARSTVPGGPSVACSTAKAVEWDASWSKNLDPSGRAALGVHVAAYDEAKMAGEGPTANGSPKE

SEQ ID NO: 4665 - protein, 164 aa, Legionella pneumophila str. Lens
MGSLRKHQPGKTTDLLMSPFLRLQQEVNHAMSDFYNLFAPQRSANLEQFEHISLTPSLDIVEDKDNFKIEVEMPGMGEEDIKVSFCENRLTIEGEKTTSKKDENKNYISREISYGRYERTISLPLSADVDKATASFKKGMLWITIPKKTEARENVKTIKIEKAK

SEQ ID NO: 4666 - protein, 589 aa, Candida albicans SC5314
MLELNSITIPRNFTEFQLTALKIYYQLKILFLATYCAQGSFGLNGSVCLARDIFVGYVVYTQLLKLYRVLRGYGIVDSIRRLYLYVSSTVSSQIFSLPFIKSKIDKELQATIGKVEEEIMKNDPQLLQFPELPEQGIDADNVSLELDKLQNLKHSDWINGRVSGAVYHGGENLLSLQVEAYKKYSVANQLHPDVFPGVRKMEAEVVHMVLDIFNAPSDGCGSTTSGGTESLLLAGLSAREYGKKYRGITEPEVIAPVTIHAGIEKACFYFGMKLHKVDLDPVTFQVDVKKVERLINSNTVLICGSAPNYPHGIIDDIESLSKLAVKYNIPLHVDACLGSFIVSFLEKSKVHGDRKLPIFDFRLPGVTSISCDTHKYGFAPKGSSIIMYRSPKLRECQYYIASDWTGGMYGSPTLAGSRPGALVVGCWATLINIGKQGYTKFCYDIVSASMKVKRAIETDPILSKHLQIIGDPIGSVISFQLAPQQSGNLSIYEISDLLTKKGWHFATLQNPSALHFAFTRLTVPVVDELIADLVEATKEAVAIAEEHKKNGVTKAPGDTAALYGIAGSVHTAGLADRLIVAFLDTLYKI

SEQ ID NO: 4667 - protein, 690 aa, Yersinia pestis CO92
MNKFVRLAAIAGLLLAGASYATDTTYRIDQLPQLRQEPEHATVSERVTSRFTRSHYRQFALDDQFSAKIFDRYLNMLDYSHNVLLASDVAQFADKKYSLDKELKSGQLDTPFALFNLAQKRRFERYQYALSVLDRPMVFTGNDTIDIDRAKAPWPSSEAELNALWDAKVKYDQLNLKLAGKTDKEIKETLTKRYQSAIKRLTQSNSEDVFQLIMNAFAREIDPHTNYLSPRNTEQFNTEMSLSLEGIGAVLQMDDDYTLINSMVPGGPAAKSKTIAVGDRVIGVGQAGKPMVDVIGWRLDDVVALIKGPKGSKVRLEILPAGKGTKPRTVTLTRERIRLEDRAVKMSVKTIGKERVGVLDIPGFYVGLTEDVKVQLQKLEKQNVSSIIIDLRSNGGGALTEAVSLSGLFIPSGPVVQVRDNNGKVREDSDTDGVVYYKGPLVVLVDRYSASASEIFAAAMQDYGRALIVGEPTFGKGTVQQYRSLNRIYDQMLRPEWPALGSLQYTIQKFYRVDGGSTQRKGVTPDIVMPTGVDPAETGENFEDNALPWDRINAASYTKTGDLKPWEPELLKNHAERIAANPEFQYIQKDIERYKALKDKRNIVSLNYAQREKENRDDDMTRLTRLNERFIREGKKPLKSLDDLPKDYQEPDPYLDETVNIALDLAHKEKAQPQIASRPVAAATAGATVK

SEQ ID NO: 4668 - protein, 331 aa, Methylobacillus flagellatus KT
MLKLSEFLVQQERQHAVADNVLTLIQDIAATCQAVAREIRYGALRGNMGSAGRENVQGEEQKALDVISNDIFTAMASKQPHVAAVASEEMAQAQVFAGKQGKYLLVFDPLDGSSNVNLNLSVGSIFSILPAPEGSVDEASFLQAGSRQLAAGYALYGTSTMLVLTMGHGVHGFTLDPDQGEFYLTHPGLTIAASTEEFAINMSNQRFWQPPVQRYIAECIAGSSGPRGKDFNMRWVATMVAEVHRLLVRGGVFLYPLDSRAVGRGGRLRLLYEANPMSLLVEQAGGLATTGHRRILDVEPAGLHQRVAVMMGAREEVERLQDYHSFTDPTA

SEQ ID NO: 4669 - protein, 369 aa, Gibberella zeae PH-1
MTRITTPINIGRCALKHRVLMAPLTRLRADNHVPLDVMVDYYSQRASVPGTLLITEATFISEKSRGRDEHAPGIYTREQVDAWKRVTDEVHKKGSFIYMQLWHVGRAAKQDVLDKAGLEMVSSSDVPIGDEYPKPRPLTEDEIWESIKSFATASRNAIEAGFDGVEIHAANGYLIDQFTQDVCNKRTDKWGGSVENRSRFCVEVAKAVSKEIGPDRTGIRLSPFSTFQGMRMEDPEPQFTHLISELKPLGLAYLHLIEPRIAGNVDKVVDDDKESLDFALDAWAKSGPVVLAGGYTAEKANEALETRFKDEAVAFAFGRHFISNPDLAFRLANDVPLTHYNRDTFYKVKSPDGYTDYPYSEAWIEQQRV

SEQ ID NO: 4670 - protein, 110 aa, Zea mays
MVMVAARLRSSYEPLAAAYYFCPQPQLPISTDDPAVSKSRLMRQPRRSSSFVKAEACSAERSDGRVTRTTSLTEDDLEELKGCLDLGFGFAYSEIPELCGTLPALELCYS

SEQ ID NO: 4671 - protein, 469 aa, Methanothermobacter thermautotrophicus str. Delta H
MTAMCAIAGFRGDDAPVKVQEMLDVLRHRGPDATGIYHDSRIVIRTATGEDVKEAPQSAEIAVGHNLLSIVGGPQPVSGDGVLVFNGEIYNQEELNWTGSDSELILDLIEGHGGDLEDALRFTVNKIDGDYAFAYTDGENLASRQDPVGVKPLYHSGEAFASEKKALWRIGLRNVETLPPGHAMINGVKVKLRGLPRAEPSDAEPEELRENLKSALRESVERRVRGLDEAALVFSGGVDSTLLAVLLDEHIDVRLYTVGLPGSSDPQFASRAAADLGMELEVLEVTEDTIREALPHVLGAIEEYNLMKIGVAMPLYLASEAASADGYRVMFSGQGADELFAGYHRYRRLLAEGRLEDALRHDLENIHHVNLERDDAVTMANSVELRVPFLDLQLIGVALTIPADLKIRGPEDELRKRILREAALEMGVPEYIAMRPKKAAQYGSGIDKVLRRKVLPGFDHETFLRRLMF

SEQ ID NO: 4672 - protein, 500 aa, Oryza sativa (japonica cultivar-group)
MVLTHVEAVEEGSEAAAAVFASRYVQDPVPRYELGERSISKDAAYQIVHDELLLDSSPRLNLASFVTTWMEPECDRLILEAINKNYADMDEYPVTTELQNRCVNIIARLFNAPVGDGEKAVGVGTVGSSEAIMLAGLAFKRRWQNRRKAAGKPHDKPNIVTGANVQVCWEKFARYFEVELKEVKLTEGCYVMDPVKAVDMVDENTICVAAILGSTLTGEFEDVRRLNDLLAAKNKRTGWDTPIHVDAASGGFIAPFIYPELEWDFRLPLVKSINVSGHKYGLVYAGVGWVIWRNKEDLPEELIFHINYLGADQPTFTLNFSKGSSQIIAQYYQFLRLGFEGYKSVMKNCMESARTLREGLEKTGRFTIISKEEGVPLVAFTFKDGAGAQAFRLSSGLRRYGWIVPAYTMPAALEHMTVLRVVVREDFGRPLAERFLSHVRMALDEMDLAARAPVPRVQLTIELGPARTAGEEASIRVVKSEAVPVRKSVPLVAGKTKGVC

SEQ ID NO: 4673 - protein, 447 aa, Eremothecium gossypii
MASQEEFYRTQIFGTVFEITNRYADLNPVGMGAFGLVCSAVDTYTQQPVAIKKIMKPFSTAVLAKRTYRELKLLKHLRHENLICLEDIFLSPLEDIYFVTELQGTDLHRLLQTRPLEKQFLQYFLYQILRGLKYVHSAGVIHRDLKPSNILINENCDLKICDFGLARIQDPQMTGYVSTRYYRAPEIMLTWQKYNVEVDIWSAGCIFAEMIEGKPLFPGKDHVHQFSIITDLLGSPPKDVIDTICSENTLKFVTSLPHRDPVPFTERFKNLKPDAVDLLEKMLVFDPKKRITAGDALTHPYLAPYHDPTDEPVADAKFDWNFNDADLPVDTWRVMMYSEILDFHQVPDSQINPNDTFDDQVAAATAAAEAARQQQQQKQQQQKQQQQRHQGVEHGAQHVQLQHGAKQLSADPLVGDSNGGIPLNVSAANETLNNFANQAAQYATDFE

SEQ ID NO: 4674 - protein, 366 aa, Silicibacter sp. TM1040
MTTLFDPIKVGALSLPSRIAMAPMTRSRTDQPGNLPNDMMAAYYAQRASAGLIITEATQISRQGQGYSFTPGIHSDDQVAGWRVVTQAVHEAGGRIVNQLWHVGRMGHGMFHADGLPVAPSAIAPDASVWVVDPKTNRAGMVECPVPRALKTTEIAEVVADYAAAARNAKVAGFDGVEIHAANGYLIDAFLRSSSNKRQDRYGGSVQNRIRFAIEVVEAVAAEIGADRVGLRISPFITQRGMDDPSAPETILEMAKALARIGIAYIHIAEADWDDAPETPRAFRAALREVFSGSILVAGGYDKERAKVILDAGLADVVAFGRAFVANPDLPHRFAQDLPLSAFDSETLFGGDHQGYTTYGPYAPGA

SEQ ID NO: 4675 - protein, 556 aa, Prosthecochloris aestuarii DSM 271
MKRWYRQLLLSSVVVLTTASFFFHPLFARQSGMFSIVRSIDLLGDVFREVSLSYVDSIDVGKFMFAGIDGMLETLDPYTVFLDKEESVELGEITSGQYGGIGVTIAGIDNGVYVVSVLDGFSASRAGIKVGDQLISVDGISIRQDSLETVKNLLKGTPGTSLNLVLRRYGAQANRKLTLTRQEIRVNSIRYAGLIGDIGYFEMSSFGNRSAEELSAAISELNAEAEGSGQRMKAVILDLRNNPGGLLDVAVDVTGLFVRQGSEVVSIRGRLPESENRYVTKRDPVAGDLPLSVLINSKSASASEIVAGAIQELDRGVVIGARSFGKGLVQSIIPLPYDCKLKMTSARYYTPSGRLIQKYHAREDGWRSVIHGPGRQDSSRVFYTLNRRKVYGGGGILPDIPVSEPEFDDYEAKLQKKGMFFRYASAYRSLHPKAPGLPMKREGLLKGFNAFLEEERFSFESEPEVLLDQMKLSTAELGRSSRLDSLFNEVEREVSMLTERYRVDDRERIALAVEREILRHYDEDAARRLSLEQDPVVKKALDVLNSPKQYRSVLKP

SEQ ID NO: 4676 - protein, 107 aa, Hordeum vulgare subsp. vulgare
MAEAAQGGGLRGRGVLLGGVQDAPAGRENDLETIELARFAVAEHNAKANALLEFERLVKVRQQVVAGCMHYFTIEVKEGGAKKLYEAKVWEKAWENFKQLQEFKPAA

SEQ ID NO: 4677 - protein, 624 aa, Burkholderia fungorum LB400
MPFGAQLIGATGAKPRTRFRFWAPSCKHVQVEIENGPAQGAHDMTPAGNGWFEASVDSGAGTLYRFRLDGEHAVPDPTSRFQPQDVHGPSEVIDPRAYRWQQTNWHGRPWEETVLYELHVGALGGYAGVQKRLPELAALGVTAIELMPLNDFPGKHNWGYDGVLPYAPDSAYGRPEDLKALIDAAHGLGLMVFLDVVYNHFGPDGNYLHEYARSFFREGTHTPWGPAIDFERSEVSDFFTDNAVYWINEYRIDGLRFDAVHAIDNHAWLRELSDHIRARVQHGRHVHLVLENEHNSANLLETHFDAQWNDDAHNTLHVLLTGETEGYYHAYEDQPIRRLARVLSEGFAYQGDPSPIHDGKPRGEASAHLPPTSFVMFLQNHDQVGNRAFGERLRKLTSDEALRAATGLLLLSPQIPLLFMGEEYGSTQPFLFFTDYTGDLADAVREGRRREFARFSSFSDEKRRAQIPDPNDVKTFAASSPPAPDETSQHTDAEAKDRLDWMHFYKSALAVRARLITPRLKHSKACGATVLSAANGGDANALIARWKLGDGETLSIALNLSKENVALADLPAGKVIFETPPRVREQVDVKVLPAHAFVAWLTGDVSGYAIRHDARIAGQQERHA

SEQ ID NO: 4678 - protein, 245 aa, Glycine max
MRALTSSSSTFIPKRYSFFFFLSILFALRSSSGGCSEYHHHHAPMATIGGLRDSQGSQNSVQTEALARFAVDEHNKKQNSLLEFSRVVRTQEQVVAGTLHHLTLEAIEAGEKKLYEAKVWVKPWLNFKELQEFKPAGDVPSFTSADLGVKKDGHQPGWQSVPTHDPQVQDAANHAIKTIQQRSNSLVPYELHEVADAKAEVIDDFAKFNLLLKVKRGQKEEKFKVEVHKNNQGGFHLNQMEQDHS

SEQ ID NO: 4679 - protein, 864 aa, Vibrio fischeri ES114
MNNNMSLKKKSILALACYVCFLITVIGSITYCVVEPPIRENLENNLNLRTQLLAREIEDPLNHSLSILHALVGVAASGYSIDVLEDMTYSVFKESDDIIISGGIWPEPNTLEPSKQLASIFYSRDERGKITSVNDYNIPSNTPYQQESWYTSVSHENSSHNISWSEVYIDPFTKQKMITASQPYFENNQFVGVATIDISLKGLIGVIESQAEKHQLGISVYDGNTTIAEYKFAVDESMYVVELFMDDLRWELKVVNSVLTVADETFAQVVNIELGIVPILLACVILAYYFINRSLINPIVLISQQVNERESSEKIDINYGYKDEIADLIYSFNQETEYLEIEKSKAEALAKAKSSFLANMSHEIRTPLNGIIGMSDILTETDLTPVQSEYVETIDTSSQTLLLLINDILDLSKIESGNLVIVPQESNVEEVAYDTLTVILSKATEKGLALQVDIANDLPELVMLDEHRLRQVLMNLMSNAVKFTQDGAVILSINYQQKENGRGLLFFSVKDTGIGISKDKCEQIFEPFTQEDSSITRQFGGTGLGLAICRQLVEMLGGELKVDSEKGFGSKFHFILDVEVIEPTHKGLEEYAQSSCVIVSNHMLYATQLEMECKKLGINSRIVQKFVPQDDLISQSDVVIYCQKSSSEALNHVRLMNEYKHRPAIIICKKHQDEKVDFERTIEGVITYPLLGKRFYKVMKQAFIASQSHQGIVSEVKTSGDSEYGEMIDLPHKRKDNLDIIKTVLVVEDNAINQKVASLLLKKAGFCVEIANNGQEALDMVMSKTSPYSLVLMDCMMPIMDGFAATEAIRKWEENQEQKRLPIIALTASVFIEDIDKCYQSGMDDYVAKPFRKELILEKLEAYT

SEQ ID NO: 4680 - protein, 507 aa, Porphyromonas gingivalis W83
MKEALRKLETAVYAISSLYVDSVDNNKLTEYAIRGVLSELDPHSVYSDAEETKSELEPLNAGFDGIGVQFNMLTDTVYVVQVIAGGPSEKAGLLAGDRIVSVDDTVIAGIKMKTNDVMKRLRGPRGSKVKLGVWRGNDRLNITVKRGLVPVHSREACYMVDERTGYIRLSRFSRTTYDEFAEGIALLRGRGMQQLVLDLRFNGGGILDQAVEMAGTFLPEGSTVLTVRNNRMPRISERMEATSNNLLPKDLPLVVLVNEFSASASEILAGAIQDWDRGVVIGRRTFGKGLVQRPLPFQDGSMIRLTIARYYTPSGRSIQKPYAKGNFKAYEQELIGRFKHGESIHSDSIRFPDSLRYKTLVTGRTVYGGGGIMPDLFIPTDTALFNKLHRELLNKGIFNRAVLKYVDAHRQKLRQRFPDRQSYATFSIPEELTESLKAFAEAEKITWSTELFAQAEELIKCQLHAYIARDILGENDFFYFFNRMDKEYIKALDLLNDPDEYKRLLGK

SEQ ID NO: 4681 - protein, 439 aa, Nicotiana tabacum
MATSVSTIGAANKAPLSLNNSVAGTSVPSTAFFGKTLKKVYGKGVSSPKVTNRSLRIAAEEKDADPKKQTYSDRWKGLVQDFSDDQQDIARGKGMVDSLFQAPTGTGTHHAVLQSYEYVSQGLRQYNMDNTLDGFYIAPSFMDKLVVHITKNFLKLPNIKVPLILGVWGGKGQGKSFQCELVFRKMGINPIMMSAGELESGNAGEPAKLIRQRYREAAEIIRKGNICCLFINDLDAGAGRMGGTTQYTVNNQMVNATLMNIADNPTNVQLPGMYNKQENARVPIIVTGNDFSTLYAPLIRDGRMEKFYWAPTREDRIGVCKGIFRTDNVPEEAVIKIVDTFPGQSIDFFGALRARVYDDEVRKWVSGTGIEAIGDKLLNSFDGPPTFEQPKMTVEKLLEYGNMLVQEQENVKRVQLAETYLKEAALGDANADAINTGNF

SEQ ID NO: 4682 - protein, 347 aa, Musa acuminata
HVHELEPVEVVADQVAVALSHAAILEESMRARDLLMEQNVALDYARQEAELAIRARNDFLAVMNHEMRTPLHAIITLSSLLLETELNPEQRSMVETVLKSSSLLATLINDILDLSKLEDGSLELEIGIFNLHSVFREVVNFIKPIAAVKKLSVSLTLSPDLPLCAIGDEKRLMQILLNIVGNAVKFTKEGHISLTASVARADYLRDFRASEFYPVSSDGHFYLRVQVKDTGCGISSQDLPHLFTKFAHGRNVASRGFSGSGLGLAICKRYVSLVQGHIWLESEGIGKGCMATFVVKLGICENPDGSQQKIVLLPWTKHGQEDTSSSRGMPKDPKAFIPLKPRYQRSV

SEQ ID NO: 4683 - protein, 232 aa, Nicotiana tabacum
KLISQRYREAAEIIRKGNMCCLFINDLDAGAGRMGGTTQYTVNNQMVNATLMNIADNPTNVQLPGMYNKQENARVPIIVTGNDFSTLYAPLIRDGRMEKFYWAPTREDRIGVCKGIFRTDNVPEEAVVKIVDTFPGQSIDFFGALRARVYDDEVRKWVSGTGIEAIGDKLLNSFDGPPTFEQPKMTVEKLLEYGNMLVQEQENVKRVQLAETYLKEAALGDANADAINTGNF

SEQ ID NO: 4684 - protein, 273 aa, Brassica napus
MVLSQTTTESNEPVSSTFGSRYALTALPKYEIGESSIPKDAAYQIIKDELMLDGNPRLNLASFVTTWMEPECDKLIMDSINKNYVDMDEYPVTTELQNRCVNMIARLFNAPLGDTETAMGVGTVGSSEAIMLAGLAFKRNWQNKRKAEGKTYDKPNIVTGANVQVCWEKFARYFEVELKEIKLSEGYYVMDPEKAVEMVDENTICVAAILGSTLTGEFEDVKRLNHLLVKKNDATGWNTPIHVDAASGGFIAPFIYPELEWDFRLSLVKSINV

SEQ ID NO: 4685 - protein, 251 aa, Bdellovibrio bacteriovorus HD100
MAKKEHVELVPIFDDNYVFILTDDATQKAVAVDPGDAGPVIDFLRANKLDLAAILLTHHHSDHIGGVGELKAAFDCPVYAPQKNQKQIPVADQWLKEGDSVTCGPWDFTVMELPGHTLGHIAYWNQKHKWLFSGDVIFGLGCGRLFEGTFEQGYESLQRIKKLPPQTLIYCTHEYTKSNLEFCRILTNQDNTPITGDSEALELYANELSNRRELNLPSVPLKLSIEESVNPFLLARDVEQFRYLRELRNRQ

SEQ ID NO: 4686 - protein, 493 aa, Zea mays
  misc_feature (372)..(372): Xaa can be any naturally occurring amino acid
MDPYKHRPSSGSNSSFWTTNSGAPVWNNNSALTVGQRGPILLEDYHLIEKLAQFDRERIPERVVHARGASAKGFFEVTHDVSHLTCADFLRAPGVQTPVIVRFSTVVHERGSPETLRDPRGFAVKFYTREGNFDLVGNNMPVFFIRDGMKFPDMVHAFKPNPKTNLQENWRIVDFFSHHPESLHMFTFLFDDVGIPLNYRHMEGFGVNTYTLINRDGKPHLVKFHWKPTCGVKCLLDNEAVTVGGTCHSHATKDLYDSIAAGNYPEWKLYIQTIDLDHEDKFDFDPLDVTKTWPEDIIPLQPVGRMVLNKNVDNFFAENEQIAFCPAIIVPGIHYSDDKLLQTRIFSYADTQRHRLGPNYLMLPVNAPKCAXHHNNHHDGFMNFMHRDEEVNYFPSRFDPARHAEKVPIPPRVLTGCREKCIIQKENNFKQAGERYRSFDPARQDRFIQRWVDALTDPRVTHEHRTIWISYWSQCDAALGQKLASRLNLKPSM

SEQ ID NO: 4687 - protein, 481 aa, Arabidopsis thaliana
MSLKALDYESLNENVKNCQYAVRGELYLRASELQKECKKIIFTNVGNPHALGQKPLTFPRQVVSLCQAPFLLDDPNVGMIFPADAIARAKHYLSLTSGGLGAYSDSRGLPGVRKEVADFIERRDGYPSDPELIFLTDGASKGVMQILNCVIRGQKDGILVPVPQYPLYSATISLLGGTLVPYYLEESENWGLDVNNLRQSVAQARSQGITVRAMVIINPGNPTGQCLSEANIREILRFCCDERLVLLGDEVYQQNIYQDERPFISSKKVLMDMGAPISKEVQLISFHTVSKGYWGECGQRGGYFEMTNIPPRTVEEIYKVASIALSPNVSAQIFMGLMVSPPKPGDISYDQFVRESKGILESLRRRARMMTDGFNSCKNVVCNFTEGAMYSFPQIKLPSKAIQAAKQAGKVPDVFYCLKLLEATGISTVPGSGFGQKEGVFHLRTTILPAEEEMPEIMDSFKKFNDEFMSQYADNFGYSRM

SEQ ID NO: 4688 - protein, 435 aa, Bdellovibrio bacteriovorus HD100
MSKVTLFWFRRDLRLDDNAGLYHALKERSAVLPLFIFDSEILENLDDPADARVTFIYEQIQDMKQQLNAKKSDLIVRHGKPLEVLKTLSDEMAVEAIYANHDYEPAARKRDEKVAAWAAKAGIEFLTFKDQCLFEKDEILTDARKPYTVYTPYRNKVLANLSEFYLKSYPNDLYESSYAKVKKAEPLLTLKSLGFERSNIEFPPMDLSTKMLKTYHATRDFPADEKGTSHLGLHLRFGTLSVRELAREAKKYSPVWLSELIWRDFFMQILWHFPQVENQSFRPEYDKIAWRKSKADFQKWCEGRTGYPLVDAGMRELNATGYMHNRVRMVVASFLCKHLLIHWYEGERYFAKKLLDYDLSANNGNWQWAAGSGCDAAPYFRIFNPQTQFEKFDPDGKYVQKWVPEYGTDEYPQPMVDHNEARGRCLQAFTKVLKK

SEQ ID NO: 4689 - protein, 165 aa, Pyrococcus abyssi GE5
MVRRRRWDIWDPFDIIREIQEEIDAMFDEFFSRPRLWTYRRWREPEVYEESREVWREPFVDIFDRGDEFVVIAELPGVRKEDIKVRVTEDSVYIEATVRREKELEEEGAVRIERYYSGYRRVIRLPEEVIPEKAKAKYNNGVLEIRIPKKQPTKKEGEGFEVKIE

SEQ ID NO: 4690 - protein, 161 aa, Triticum aestivum
MSLIPRGNAFDPFSLDLWDPFDGFPFGSGGSSSGGSLFPSFPRISSETAAFAGARIDWKETPEAHVFKADVPGLKKEEVKVEVEDGNVLQISGERNKEQEEKTDTWHRVERSSGKFLRKFRLPEDAKADQIKAAMENGVLTVTVPKAEAKKPEVKSIQISG

SEQ ID NO: 4691 - protein, 488 aa, Listeria monocytogenes str. 4b H7858
MTDRKNLTTNQGVPVGDNQNSMTAGRKGPTLIEDYVLIEKLAHFDRERVPERVVHARGAGAHGKFVTKKSMKKYTMAKFLQEEGTETEVFARFSTVIHGQHSPETLRDPRGFSVKFYTEEGNYDFVGNNLPVFFIRDAIKFPDVIHSLKPDPRTNIQDGNRYWDFFSLTPEATTMIMYLFSDEGTPASYREIRGSSVHAFKWINEEGKTVYVKLRWIPKAGIVNLSTEQASQIQAKEFNHASRDLYEAIENGDYPEWDLYVQVLDPKDLDNFDFNPLDATKDWFEDVFPYEHVGTMTLDRNPDNIFAETESVGFNPGVLVRGMLPSEDRLLQGRLFSYSDTQRHRVGPNYLQLPINSPKAPVANNQRDGHMPFKQQTSSINYEPNSYDTEPKENPAFIEPEQEIRGDISGRLIAEKPNNFGHAKEVWDRYSDAERAALVKNIVDDWSQVRDDIKIRNLRNFYQVDPEFASRVAAGTGVNLEAHVADLK

SEQ ID NO: 4692 - protein, 407 aa, Candida albicans SC5314
MTIESTNSFVVPSDTELIDVTPLGSTKLFQPIKVGNNVLPQRIAYVPTTRFRASKDHIPSDLQLNYYNARSQYPGTLIITEATFASERGGIDLHVPGIYNDVQAKSWKKINEAIHGNGSFSSVQLWYLGRVANAKDLKDAGLPLIAPSAVYWDENSEKLAKEAGNELRALTEEEIDHIVEVEYPNAAKHALEAGFDYVEIHGAHGYLLDQFLNLASNKRTDKYGCGSIENRARLLLRVVDKLIEVVGANRLALRLSPWASFQGMEIEGEEIHSYILQQLQQRADNGQQLAYISLVEPRVTGIYDVSLKDQQGRSNEFAYKIWKGNFVRAGNYTYDAPEFKTLINDLKNDRTIIGFSRFFTSNPDLVEKLKLGKPLNYYNREEFYKYYNYGYNSYDESEKQVIGKPLA

SEQ ID NO: 4693 - protein, 681 aa, Arabidopsis thaliana
MSGSVSGCGSGGCSIVWFRRDLRVEDNPALAAAVRAGPVNALFVWAPEEEGHYHPGRVSRWWLKNSLAQLDSSLRSLGTCLITKRSTDSVASLLDVVKSTGASQIFFNHLYDPLSLVRDHRAKDVLTAQGIAVRSFNADLLYEPWEVTDELGRPFSMFAAFWERCLSMPYDPESPLLPPKKIISGDVSKCVADPLVFEDDSEKGSNALLARAWSPGWSNGDKALTTFINGPLLEYSKNRRKADSATTSFLSPHLHFGEVSVRKVFHLVRIKQVAWANEGNEAGEESVNLFLKSIGLREYSRYISFNHPYSHERPLLGHLKFFPWAVDENYFKAWRQGRTGYPLVDAGMRELWATGWLHDRIRVVVSSFFVKVLQLPWRWGMKYFWDTLLDADLESDALGWQYITGTLPDSREFDRIDNPQFEGYKFDPNGEYVRRWLPELSRLPTDWIHHPWNAPESVLQAAGIELGSNYPLPIVGLDEAKARLHEALSQMWQLEAASRAAIENGSEEGLGDSAEVEEAPIEFPRDITMEETEPTRLNPNRRYEDQMVPSITSSLIRPEEDEESSLNLRNSVGDSRAEVPRNMVNTNQAQQRRAEPASNQVTAMIPEFNIRIVAESTEDSTAESSSSGRRERSGGIVPEWSPGYSEQFPSEENGIGGGSTTSSYLQNHHEILNWRRLSQTG

SEQ ID NO: 4694 - protein, 273 aa, Solanum tuberosum
MPIEALKSPTAALPPLEEIDDSHNLDSWAKGKRSKRPRIDNPPTRDQYLALCLLMLANDDGTGFGKGKGKGTGSIDVVIEQQQEKKLKPVFIKEKTEQLFKCSECPKVFTSYQALGGHKASHRKINVTATGDDDNNPSTSTSTSGGVNISALNPSGRSHVCSICQKAFPTGQALGGHKRRHYEGKLGGNNRYISGGGCGEGVHSGSVVTTSDGGSGNGGAASTPIARDFDLNMPALPGWQLDLTIDCGGRSQFPIEQEVESPMPAKKPRLFFD

SEQ ID NO: 4695 - protein, 365 aa, Methanosarcina mazei Go1
MIFDPTTVCNMELQNRFVRSATHEFMAEKDGTPTSRLGDLYEELARSEVGLIVTGYSCIHPCGWSDANQQGIYDDRFIEPYRRITERVHKYRSRIVLQIVHGGRQADVSQKNPVPIAPSAVKDGHSATVPKEMTEEEILIVIEAFTQAAVRAKKAGFDGVQLHCAHGFLLSNFISPYTNRRTDRWGGSVENRARIVTEIVRRIKEETGSNFPIFVKMNATDGFQPGTAKAELGLTISQAMETAKLLEKAGVCAIEVSGGISEAGGVTIKTAINSPSKEAYFKEYSKNIKSAVSIPVILVGGIRSLSVMEGLLENGFADLISMSRAFISEPDLILKLKSGEAEKARCVSCNLCFDPEGIRCNFEFD

SEQ ID NO: 4696 - protein, 242 aa, Panax ginseng
MSFYDDQSGNLSPQRKLGRGKIEIKRIENTTNRQVTFCKRRNGLLKKAYELSVLCDAEVALIVFSTRGRLYEYANNSVKGTIERYKKACTDSPNTSSVSEANAQFYQQEASKLRQEISSIQKNNRNMMGESLGSLTVRDLKGLETKLEKGISRIRSKKNELLFAEIEYMQKKEIDLHNNNQYLRAKIAENERAQQHMNLMPGSSDYELAPPQSFDGRNYIQLNGLQPNNHYSRQDQTALQLV

SEQ ID NO: 4697 - protein, 480 aa, Musa acuminata
RSTLDRHTILKTTLVELGRTLDLAECALWMPSRSGLNLQLSHTLHHQMPLGSVVSINLPVVNQVFSSNRAVRIPHTCPLARIRPQTGRYVPPEVVAVRVPLLHLSNFQINDWPELSAKSYAIMVLMLPSDSARKWHIHELELVEVVADQVAVALSHAAILEESMRARDLLMEQNVALDSARREAEMAIRARNDFLAVMNHEMRTPMHAVIALSSLLLETELTPEKRLMIETVLKSSNLLAALINDVLDLSKLEDGSFELEIANFNLHAVFREVINLIKPIAAIKKLSVSVTLAPDLPLCAIGDEKRLMQTILNVAGNAVKFTKEGHISITASVARSDSSRDPRAPEFSPVTSDRHFDLRVQIKDTGCGISPQDLPHIFTKFAHSRNSANKASNGSGLGLAICRRFVSLMEGQIWLESEGIGKGCTATFIVKLGICDPSGNLQQILQTTPSHGDANLPGPRAKFDDENGKFTPMMRYQRSV

SEQ ID NO: 4698 - protein, 175 aa, Zea mays
MSLIRRTNVLDPFSLDLWDPFDGFPFGSGGSGSLVPRTSSDTAAFASARIDWKETPEAHVFKADVPGLKKEEVKVEVEDGNILQISGERSKEQEEKTDTWHRVERSSGKFLRRFRLPENAKAEQVKASMENGVLTVTVPKEEAKKPEVKSIQISGAMRWTAVCRAVVWSFARSSR

SEQ ID NO: 4699 - protein, 365 aa, Aspergillus fumigatus
MAEFVRAQIFGTTFEITSRYNLQPVGMGAFGLVCSARDQLTGQPVAVKKIMKPFSTPVLSKRTYRELKLLKHLRHENIISLSDIFISPLEDIYFVTELLGTDLHRLLTSRPLEKQFIQYFLYQILRGLKYVHSAGVVHRDLKPSNILINENCDLKICDFGLARIQDPQMTGYVSTRYYRAPEIMLTWQKYDVEVDIWSAGCIFAEMLEGKPLFPGKDHVNQFSIITELLGTPPDDVIQTICSENTLRFVKSLPKRERQPLANKFKNADPEAVDLLERMLVFDPKKRIRAGEALAHEYLSPYHDPTDEPEAEEKFDWSFNDADLPVDTWKIMMYSEILDFHNIDQGNDAGQVLMEGGVAQAQQNYA

SEQ ID NO: 4700 - protein, 590 aa, Ajellomyces capsulatus
MQRALSSTSRASVLSSAPTRAPVSRFRSAGLSLQQQRFAHKELKFGVEGRAALLKGIDTLAKAVCTTLGPKGRNVLIESSYGSPKITKDGVTVAKAVTLQDKFENLGARLLQDVASKTNEVAGDGTTTATVLARAIFSETVKNVAAGCNPMDLRRGIQAAVEAVVEYLQANKRDITTTEEIAQVATISANGDTHVGKLISNAMEKVGKEGVITVKDGKTIEDELEVTEGMRFDRGYVSPYFITDTKAQKVEFEKPLIVLSEKKISAVQDIIPALEASTTLRRPLVIIAEDIEGEALAVCILNKLRGQLQVAAVKVPGFGDNRKSILGDIGILTNATVFTDELDMKLEKATADMLGSTGSITITKEDTIILNGDGSKDSIAQRCEQIRGVIADPTTSDYEKEKLQERLAKLSGGVAVIKVGGASEVEVGEKKDRVVDALNATRAAVEEGILPGGGTALLKAAANGLASVKPTSSDQLRRISSLVSAITRPARTIVENAGLEGSVIVGKLTDEHASDFNRGFDSAKGEYVDMIASGIVDPLKVVRTALVDASGVASLLGTTEVAIVEAPEEKGPAGPPGGMGGMGGMGGGMF

SEQ ID NO: 4701 - protein, 338 aa, Yarrowia lipolytica
MEANPEVQTDIITLTRFILQEQNKVGASSAIPTGDFTLLLNSLQFAFKFIAHNIRRSTLVNLIGLSGTANSTGDDQKKLDVIGDEIFINAMKASGKVKLVVSEEQEDLIVFEGDGRYAVVCDPIDGSSNLDAGVSVGTIFGVYKLPEGSSGSIKDVLRPGKEMVAAGYTMYGASANLVLSTGNGCNGFTLDDPLGEFILTHPDLKLPDLRSIYSVNEGNSSLWSDNVKNYFKALKFPEDGSKPYSARYIGSMVADVHRTILYGGMFAYPADSKSKKGKLRLLYEGFPMAYIIEQAGGLAINDNGERILDLVPTEIHERSGVWLGSKGEIEKAKKYPLK

SEQ ID NO: 4702 - protein, 548 aa, Vibrio parahaemolyticus
MAAKDVKFGNDARVKMLEGVNVLADAVKVTLGPKGRNVVLDKSFGAPTITKDGVSVAREIELEDKFQNMGAQMVKEVASKANDAAGDGTTTATVLAQAIVNEGLKAVAAGMNPMDLKRGIDKAVAAAVEQLKELSVECNDTKAIAQVGTISANSDASVGNIIAEAMERVGRDGVITVEEGQALQDELDVVEGMQFDRGYLSPYFINNQEAGSVELENPFILLVDKKISNIRELLPTLEAVAKASRPLLIIAEDVEGEALATLVVNNMRGIVKVAAVKAPGFGDRRKAMLQDIAILTGGTVISEEIGLELEKVTLEDLGQAKRVSITKENSTIIDGAGEEAMIQGRVAQIRQQIEDATSDYDKEKLQERVAKLAGGVAVIKVGAATEVEMKEKKDRVEDALHATRAAVEEGVVAGGGVALIRAASKIVDLEGDNEEQNVGIRVALRAMEAPIRQITKNAGDEDSVVANNVKAGEGSYGYNAATGEYGDMLEMGILDPTKVTRSALQFAASVAGLMITTEAMVTDLPQKESAGMPDMGGMGGMGGMGGMM

SEQ ID NO: 4703 - protein, 250 aa, Arabidopsis thaliana
MGRGRVELKRIENKINRQVTFAKRRNGLLKKAYELSVLCDAEVSLIVFSNRGKLYEFCSTSNMLKTLERYQKCSYGSIEVNNKPAKELENSYREYLKLKGRYENLQRQQRNLLGEDLGPLNSKELEQLERQLDGSLKQVRCIKTQYMLDQLSDLQGKEHILLDANRALSMKLEDMIGVRHHHVGGGWEGGDQQNIAYGHPQAHSQGLYQSLECDPTLQIGYSHPVCSEQMAVTVQGQSQQGNGYIPGWML

SEQ ID NO: 4704 - protein, 280 aa, Streptococcus pneumoniae TIGR4
MNTYQLNNGVEIPVLGFGTFKAKDGEEAYRAVLEALKAGYRHIDTAAIYQNEESVGQAIKDSGVPREEMFVTTKLWNSQQTYEQTRQALEKSIEKLGLDYLDLYLIHWPNPKPLRENDAWKTRNAEVWRAMEDLYQEGKIRAIGVSNFLPHHLDALLETATIVPAVNQVRLAPGVYQDQVVAYCREKGILLEAWGPFGQGELFDSKQVQEIAANHGKSVAQIALAWSLAEGFLPLPKSVTTSRIQANLDCFGIELSHEERETLKTIAVQSGAPRVDDVDF

SEQ ID NO: 4705 - protein, 175 aa, Glycine max
  misc_feature (104)..(104): Xaa can be any naturally occurring amino acid
  misc_feature (147)..(147): Xaa can be any naturally occurring amino acid
ELSFPRQVVALCQAPFLLDDPNVGLLFPADAIARAKHYLSLTSGGLGAYSDSRGLPGVRKEVAEFILKRDGYPTDPELIYLTDGASKGVMQILNTIIRGQDDGXPQYPLYSATIALLGGTLVPYYLEETANWGLDVNELRQSVEQAXKGITVKAMVIINPGNPTGQCLSEANLRE

SEQ ID NO: 4706 - protein, 369 aa, Triticum aestivum
MSNAASATPLLAPYKMGKFDLSHRVVLAPLTRQRSFGNVPQPHAILYYQQRATKGGLLIAEATGVSDTAQGYKDTPGIWTKKQVEAWKPIVDGVHVKGGIFFCQIWHVGRVSNHNFQPNGQAPISSTDKPIKPATRADGIGLAKISTPRRLQTDEIQLVIEDFRVAARNAIEAGFDGVEIHGAHGYLIDQFLKDQVNDRTDKYGSLENRCRFALEVVQAVADEIGADKVGIRLSPFASYSDASDSNPEALGLYMAQALNKLGILYCHMVEPRMVNIGEKLETPHSLHAMRDAFKGTFIVAGGYGRDDGDKAIADGYADLVAFGRLFLSNPDLPRRFEIDGPLNKYNRDTFYLSDPVIGYTDYPFLPSDV

SEQ ID NO: 4707 - protein, 451 aa, Candida albicans SC5314
MSDTIATKEEASKIFDRLKKDPANQVCFDCSNKNPTWTSIPFGIFLCLQCSAVHRNLGVHISFVKSSNLDSWQRIQLRNFKFGGNQQAKDFFLKNGGSQFVNNKNGVDATAKYTSPCANKYKEKLKQKAAQDAAKHPDIVTLDDVTDVMSLSDSPSESTDDFFSNWNKPVNNSNTASPLSSRAATPNASTDDLTKKKPVVRTTTTSARLKSNNTAVKKSILSGKGNGPRTSRLAAKRINKTEDDIDFDEIEKKAKQEAEEAKKLGYKPTETVEPTVKKQPTSTSLSLKKENEEVKLTPAPIQETTQQFQKLGFGMTQGDNIVGSSTKKYKEVKYTGEVSNKYGTQKGISSDEFFGRGPRFDEQAKTEARTKLQAFNGAQSISSSSYFGEEEGGARGGRSNSGAGGLGDLEASAREFASKFSGNANQDLEVLKDALEDGATKLGSYLRDFLR

SEQ ID NO: 4708 - protein, 716 aa, Arabidopsis thaliana
MEYTEAVRTEDQTMNVVKERGVKPRIVPPPGDGKKIYEIDPMLRTYNNHLDYRYGQYKRLREEIDKYEGGLEAFSRGYEKLGFSRSDAGITYREWAPGAKAASLIGDFNNWNSNADIMTRNEFGVWEIFLPNNTDGSPAIPHGSRVKIRMDTPSGIKDSIPAWIKFSVQAPGEIPFNGIYYDPPEEEKYVFKHPQPKRPKSLRIYEAHVGMSSTEPMVNTYANFRDDVLPRIKKLGYNAVQIMAIQEHSYYASFGYHVTNFFAPSSRCGTPEELKSLIDRAHELGLVVLMDIVHSHASKNTLDGLNMFDGTDAHYFHSGPRGYHWMWDSRLFNYGSWEVLRYLLSNARWWLEEYKFDGFRFDGVTSMMYTHHGLSVGFTGNYTEYFGLETDVDAVNYLMLVNDMIHGLYPEAITVGEDVSGMPTFCIPVQDGGVGFDYRLHMAIADKWIEMLKKRDEDWQMGDIIYTLTNRRWSEKCISYAESHDQALVGDKTIAFWLMDKDMYDFMAVDRPSTPLIDRGIALHKMIRLITMGLGGEGYLNFMGNEFGHPEWIDFPRGEQRLSDGSVIPGNNFSYDKCRRRFDLGDADYLRYRGLQEFDQAMQHLEENYGFMTSEHQFISRKDEADRVIVFERGDLVFVFNFHWTSSYFDYRIGCSKPGKYKIVLDSDDPLFGGFNRLDRKAEYFTYDGLYDERPCSFMVYAPCRTAVVYALANHD

SEQ ID NO: 4709 - protein, 394 aa, Ammophila arenaria
EPASTEDPAVSIAGAVQSQKLAVRAISRLQALPGGDVNLLCDTVVEHVRELTGYDRVMVYKFHDDEHGEVLAESRRADLEPYLGLHYPATDIPQASRFLFRQNRVRMIADCHAAPVRVIQDPAMPQPLCLVGSTLRSPHGCHAQYMANMGSIASLVMAVIISSGGEDEHSMGRGAVPSAMKLWGLVVCHHTSPRCIPFPLRYACEFLMQAFGLQLNMELQLAHQLSEKHILRTQTLLCDMLLRDSPTGIVTQSPSIMDLVKCDGAALYYHGKYYPLGITPTEAQIKDIIEWLTVCHGETTGLSTDSLADAGYPGATALGDAVCGVAVAYITPSDYLFWFRSHTAKEIKWGGAKHHPEDKDDGQRMHPRSSFKAFLEVVKSRSLPWENAEMDAIH

SEQ ID NO: 4710 - protein, 394 aa, Anisopogon avenaceus
EPARTEDPALSIAGAVQSQKLAVRAISRLQALPGGDVKLLCDTVVEHVRELTGYDRVMVYKFHDDEHGEVLAESRRADLEPYLGLHYPATDIPRASRFLFRQNRVRMIADCHAAPVRVIQDPAMPQPLCLVGSTLRSPHGCHAQYMTNMGSIASLVMAVIISSGGDQDHNIARGAIPSAMKLWGLVVCHHTAPRCIPFPLRYACEFLMQAFGLQLNMELQLAQHLSQNLILTTQTLLCDMLLRDSPTGIVPQSRSIMDLVKCDGAALYYHGKYYPLGVTPTEAQILDIIEWLTVCHGDSTGLSTDSLADAGYPGAASLGDAVCGMAVAYITPSDHLFWFQSHTAKEIKWGGAKHHPEDKDDGQRMHPRSSFKAFLEVVKSRSLPWENAEMDAIH

SEQ ID NO: 4711 - protein, 1335 aa, Ralstonia metallidurans CH34
MKETLRHAASQCRRWTLSVLILGLSLMQPAMALPAKLTVGMLDNGWPPFTMLNAGRAEGIGMDFLHEALRGHQITYSVKGYPDMTALLAALCKGDVDVVLNVAITPARRRCLSFSEPYFDGDAVVVGRPSAALEEDLLASMQTGRFAIEPGYYMEGILRQRYPKARMVPIKDTTDGLRAIVNGRADYYATVQPVAEYAMVSPEFAGLKVLSRYREPTGAIHFAFRSNATELRDATDAGLAAIDPARRAALLAHWITSQVASPDKPQKFFLTDEERAFLKSLPTLTVGVDAGLAPYTYLDESGRASGIAIDYLSYLGETLGVRFRRQPTTDIQQTVEALHQGKIDLMAVAVPEDPTLRGLPVSRPYSTFPVVVAGRNSALPLAHLRDLTGKRVVVTDSGGVGDFTRHEVPGVKLVIAPNVHAGLDMVAQGKADAYVDDIVSTDIELRRNFAGKLRVIGSGEHMLNSGFAVNPALAGRLLPLINRALSVLPEDRRLDIQNRYAGTSYVLETSWLNALWRASPILIGMMVILLILLRSQRLYRKEASIRREAERELSTQLRFQSTLMDAIPLPIVVSNKDGRYLRLNAFSEWITGRSWADIVGHTTTEVHFWGEANSARVEEASQRAIDTGRLVQLQLQLQDKEGVERHFLLYIKPFVGENNVEGLINTGVDVTEIRQAELEAREAQGRLADVTRYLPIMVFQARQSGHLGRGPIWVSGNTTDLFGVDAETLAVNPPTIEACVHPDDRMSLRRAIARARRELQVLNHEVRLRKLEGFRWTRLQAVPRIEIDGSVLWNGYWRDTQAEHERAAALASAKESAEAASRAKDSFLAMMSHEIRTPMNGVLGLAELLSHTSLTPEQSATVGMMGDSASALLQILDDILDYSKIEAGRIDIESRPLDIRELCDCTIGVLATRAHEKGLHLRLHVGADVAAVVLGDSVRLRQVLFNLLSNAIKFTESGMVSVSAEVVQETETAQTLRWRVTDTGIGIEPQNQSRLFDPFVQADTSTTRRFGGTGLGLAICRRLVQLMGGRITLKSEPGIGTQVEVELSLPVKERRYSKPPLAGIQFGVRLRDCAVGQALTDFLSAAGATNSASQDERDKPQMLFLNDGEYAPPSPVGQASPIVVHVTEKPKLAGYRLTESDVRLSSNPVSWRAINAVTVAAMQGRAHTVATHAQAKPKPAAHAVTREQALASGRLILVAEDHETNRILLQHQLKLLGYACDAVVDGQQALEAAEKTAYAMLITDCHMPNVNGYELARQLRAREAEAKTEAGTDAHRLPIVAITASTEAEEVQRCREAGIDECMFKPTQLNALRACLQRWNPDNQDADGRKGSGKA

SEQ ID NO: 4712 - protein, 394 aa, Anomochloa marantoidea
EPARTEDPALSIAGAVQSQKLAVRAISRLQALPGGDVKLLCDTVVEHVRELTGYDRVMVYKFHDDEHGEVVAESRRADLEPYLGLHYPATDIPQASRFLFRQNRVRMIADCHAAPVRVIQNPSLTQPLCLVGSTLRAPHECHAQYMANMGSIASLAMAVIISSSGDDENNVGRCGISSTMKLWGLVVCHHTSPRCIPFPLRYACEFLMQAFGLQLNMELQLAHQLSEKHILRTQTLLCDMLLRDSPTGIATQSPSIMDLVKCDGAALYYHGKYYPLGVTPTESQIKDIIEWLGMCHGDSTGLSTDSLADAGYPGAASLGDAVSGMAVAYITPNDYLFWFRSHTAKEIKWGGAKHHPDDKDDGQRMHPRSSFKAFLEVVKSRSLPWENAEMDAIH

SEQ ID NO: 4713 - protein, 304 aa, Aristida purpurea var. longiseta
QYMANMGSIASLVMAVIISSGGDDEQLGRGGISSAMKLWGLVVCHHTSPRFIPFPLRYACEFLMQAFGLQLNMELQLAHQLSEKHILRTQTLLCDMLLRDSPTGIVAQSPSIMDLVKCDGAALYYHGKYYPLGVTPTESQIKDIIEWLMLCHGDSTGLSTDSLADAGYHGAAALGDAVCGMAVAYITPSDYLFWFRSHTAKEIKWGGAKHHPEDKDDGQRMHPRSSFKAFLEVVKSRSLPWENAEMDAIHSLQLILRDSFRDAAEGTSNSKAMVNGQVQLGELELRGINELSSVAREMVRLIET

SEQ ID NO: 4714 - protein, 393 aa, Arundinella hirta
EPARTEDPALSIAGAVQSQKLAVRAISRLQALPGGDVKLLCDTVVEHVRELTGYDRVMVYRFHEDEHGEVVAENRRDNLEPYLGLHYPATDIPQASRFLFRQNRVRMIADCHATPVRVIQDPGLSQQLCLVGSTLRAPHGCHAQYMANMGSIASLVMAVIISSGGDDEQTGRGGISSAMKLWGLVVCHHTSPRCIPFPLRYACEFLMQAFGLQLNMELQLAHQLSEKHILRTQTLLCDMLLRDSPTGIVTQSPSIMDLVKCDGAALYYHGKYYPLGVTPTESQIKDIIEWLTVCHGDSTGLSTDSLADAGYLGAVALGDAVCGMTVAYITPSDYLFWFRSHTAKEIKWGGAKHHPEDKDDGQRMHPRSSFKAFLEVVKSRSLPWENAEMDAIH

SEQ ID NO: 4715 - protein, 430 aa, Caulobacter crescentus CB15
MGRRDGRRAGPYERPINHVGDARGSIANFGARVDRPRLVVATSWLPARSATPRDAPFASGDSVVSTSSLFAPTTVAGLALRNRVVMSPMTRRFSPGGVPNQAVADYYRRRAEAGVGVIITEGVAVDHPAAVDHADIPNFHGPALDQWKTIAASVTSAGAAFIPQLWHIGGHRSLTADPPNASAPSLSPSGVYEPGKPFGTPATEVEIEAVIQAYAKGARDAAAIGASGVEIHGAHGYLIDQFFWAATNQRQDRYGGDMIERLRFATEVIKACREAVGPSFPIFFRYSQFKQVDYKARLCQSPDELAAFLQPLVDAGVDVFDCSQRRFWEPEFEGSPLNLAGWTKTLTGKPTMTVGSVGLDGDVVASLREGVDVIAASSLDKLDVMLDRGDFDLVGVGRALLADPHWVEKVRDGQTDGLAGFTRAALETLV

SEQ ID NO: 4716 - protein, 235 aa, Fragaria x ananassa
MKLRSQSNSSPSFVFFFVLFFSFIALSEMATLGGIRDSPAGSENSLETEALGRFAVDDHNQKQNGMLEFVRVVKAKEQVVAGTLHHLVVEAIDGGKKKLYEAKVWVKPWLNFKQVQEFKHAGEPETVSGTPSFTSSDLGVKQGGHAPGWQDVHPQDPQVQDAANHAVKSLQQKSNSLFPYELQEVVHAKSEVMEEHAKFNMLLKLKRGDKEEKYKVEVHKNNEGAYNLNQMEVEH

SEQ ID NO: 4717 - protein, 918 aa, Salmonella enterica subsp. enterica serovar Paratyphi A str.
MTNYSLRARMMILILAPTVLIGLLLSIFFVVHRYNDLQRQLEDAGASIIEPLAVSSEYGMNLQNRESIGQLISVLHRRHSDIVRAISVYDDHNRLFVTSNFHLDPSQMQLPAGAPFPRRLSVDRHGDIMILRTPIISESYSPDESAIADAKNTKNMLGYVALELDLKSVRLQQYKEIFISSVMMLFCIGIALIFGWRLMRDVTGPIRNMVNTVDRIRRGQLDSRVEGFMLGELDMLKNGINSMAMSLAAYHEEMQHNIDQATSDLRETLEQMEIQNVELDLAKKRAQEAARIKSEFLANMSHELRTPLNGVIGFTRLTLKTELNPTQRDHLNTIERSANNLLAIINDVLDFSKLEAGKLILESIPFPLRNTLDEVVTLLAHSSHDKGLELTLNIKNDVPDNVIGDPLRLQQVITNLVGNAIKFTESGNIDILVEKRALSNTKVQIEVQIRDTGIGIPERDQSRLFQAFRQADASISRRHGGTGLGLVITQKLVNEMGGDISFHSQPNRGSTFWFHINLDLNPNVIIDGPSTACLAGKRLAYIEPNATAAQCTLDLLSDTPVEVIYSPTFSALPLAHYDIMILSVPVTFREPLTMQHERLAKAASMTDFLLLALPCHAQINAEKLKQGGAAACLLKPLTSTRLLPALTEYCQLNHHPEPLLMDTSKITMTVMAVDDNPANLKLIGALLEDKVQHVELCDSGHQAVDRAKQMQFDLILMDIQMPDMDGIRACELIHQLPHQQQTPVIAVTAHAMAGQKEKLLSAGMNDYLAKPIEEEKLHNLLLRYKPGANVAARLMAPEPAEFIFNPNATLDWQLALRQAAGKPDLARDMLQMLIDFLPEVRNKIEEQLVGENPNGLVDLVHKLHGSCGYSGVPRMKNLCQLIEQQLRSGVHEEELEPEFLELLDEMDNVAREAKKILG

SEQ ID NO: 4718 - protein, 194 aa, Glycine max
  misc_feature (27)..(27): Xaa can be any naturally occurring amino acid
  misc_feature (55)..(55): Xaa can be any naturally occurring amino acid
  misc_feature (117)..(117): Xaa can be any naturally occurring amino acid
  misc_feature (129)..(129): Xaa can be any naturally occurring amino acid
  misc_feature (166)..(166): Xaa can be any naturally occurring amino acid
DTSFILARDAIGDTYLFIAWRLNGSHXTPSYLNGDYDDCEHYESFPPGHLYSIKXRALLTIAQSLHGFCDAILLSHLMITLALRHAFEMAVVKRMMTDVPSAGSLSQGSYSTLSAVXLYLYLSGSRCSXQRASKLHSLCVCLEGAPDLMASLEVTYYIGTVHHEYXYSVQEGIYTIDDEIYHIYSSWVDTIRAS

SEQ ID NO: 4719 - protein, 634 aa, Glycine max
MGSNRTIVWFRRDLRIEDNPALAAAAKEGSVLPVYIWCPKEEGQFYPGRVSRWWLKQSLAHLDQSLKSLGSRLVLIKTHSTVMALVECVKAIQATKVVFNHLYDPVSLVRDHNIKEKLVEQGISVQSYNGDLLYEPWEVNSESGRAFTTFNAFWKKCLHMQMDIVSVVPPWQLIPAEGKIEECSLEELGLENESEKPSNALLGRAWSPGWRNADKALREFVELHLLHYSKKRLKVGGESTSLLSPYLHFGELSARKVFQVTRMKQILWTNEGNSAGEESVNLFLRAIGLREYSRYLCFNFPFTHEKALLGHLKFFPWNPDADIFKNWRQGRTGFPLVDAGMRELWATGWIHNRIRVIVSSFAVKMLLLPWKWGMKYFWDTLLDADLESDILGWQYISGGLPDGHELERLDNPEIQGAKFDPEGEYVRQWLPELARMPTEWIHHPWDAPLTVLRAAGVELGQNYPKPIIDIDLARERLTEAIFKMWESEAAAKAAGSEPRDEVVVDNSNSLENLDTRKVVVLGKAPCATISANDQKVPALQDSKNEPPTRKRPKHMIEEGQNQDHSQNHNKDTGMSSIDQDICSTADSSSCKKQCASTSSYSFSVPQQCSSSSNLKWPWQDQIDMEQSSSKDGAM

SEQ ID NO: 4720 - protein, 154 aa, Prunus persica
MALSLFGGRRSNVFDPFSLDIWDPLEGLGTLANIPPSARETTAIANTRIDWKETPEAHIFIADLPGLKKEEVKVEVDDGKVLHISGERSREQEEKNDKWHRIERSTGKFSRRFRLPDNAKIDQVKASMENGVLTVTVPKEEEKRPQVKAIDISG

SEQ ID NO: 4721 - protein, 326 aa, Bradyrhizobium sp. BTAi1
MKTRTLVAALAGISLAWPVAAFAQDAPVEQQLVDAMNKVFGVHAGFRANHAKGVVVEGKFKPSAEAASLSRASLFSGGEIPVTVRFSDSTGVPNLPDGSDDANPHGMAVKFHLADGSDMDLVINSLKFFPVSTGAELRDLFLAIADSGPGAAKPTRLEQFIGSHPSVPAALGTIATPDSFANEAYFGVNAFMLVNKAGARQAVRWQMLPEKVVHLDKADAAKRAPDFLMTELPARLKQGPVAFRFMAQLAAAGDDTKDPAKPWPADRKLAALGTLTIDKAVDDSDAAQKKLLFLPGQLTDGIEASDDPMIDIRNGAYAISFSRRNP

SEQ ID NO: 4722 - protein, 191 aa, Glycine max
MVLSKTASETDVSVHSTFASRYVRTSLPRFKMAEESIPKEAAYQIIHDELMLDGNPRLNLASFVTTWMEPECDKLIMAAINKNYVDMDEYPVTTELQNRCVNMIAHLFNAPLEESETAVGVGTVGSSEAIMLAGLAFKRRWQNRRKLEGKPYDNPNIVTGANVQVCWEKFARYFEVELKEVKLRDGYYVMD

SEQ ID NO: 4723 - protein, 184 aa, Arabidopsis thaliana
MRTFSPKLLLLLLLVLRHHAESGSIVKFLPGFEGPLPFELETGYIGIAKYWANDERVREALQIRKGSIGKWIRCNSNIHYDDDIISSIPYHMNNSINGYRSLIYSGDHDMEVPFLATEAWIRSLNYPIIDDWRPWIINNQIAGYTMTYANKMTYATIKASGHTAEYKPAESFIMFQRWISGQPL

SEQ ID NO: 4724 - protein, 493 aa, Chlamydomonas reinhardtii
MDPAKIRPSSAYNTPYWTTNSGAPVWNNNNSMTVGTRGPILLEDYHLVEKLAQFDRERIPERVVHARGAAAKGFFEVTHDISALTAADFLRAPGVQTPVIVRFSTVVHERGSPETLRDPRGFAVKFYTREGNFDMVGNNMPVFFIRDGMKFPDMVHAFKPNPKSHIQEAWRIMDFLSHHPESCHMLTFLLDDAGIPLNYRHMPGFGVHTMKLINKAGRETYVKFHWVPKCGEKYLLDDEAVMVGGANHSHATKDLFDAIAAGDYPEWALMVQTMDPADEDKFDFDPLDVTKTWPESLFPMQPVGRMVLNRNVDNFFNENEQVAFCPAIIVPGIGYSDDKLLQTRIFSYADTQRHRLGPNYLLLPVNAPRAPHHNNHHEGFMNFMHRDEEINYFPSRFDPVRNAERVAAVSSAPLSGRREKMVIAKENNFMQAGAAGRAFDAARQERFVVRVADMLADPRCTQEIRRIWVGYWSQADPQLGARIAAKLQGRGCL

SEQ ID NO: 4725 - protein, 492 aa, Triticum aestivum
MDPYKHRPTSGANSAYWTTNSGAPVWNNNNALTVGHRGPILLEDYHLIEKLAQFDRERIPERVVHARGASAKGFFEVTHDVSQLTCADFLRAPGVQTPVIVRFSTVVHERGSPETLRDPRGFAVKFYTREGNFDLVGNNMPVFFIRDGMKFPDMVHAFKPSSKTNMQENWRVVDFFSHHPESLHMFTFLFDDVGIPLNYRHMDGFGVNTYTLISRDGKAHLVKFHWKPTCGVKCLLDDEAVTVGGTCHTHATKDLTDSIAAGNYPEWKLFIQTIDADHEDRFDFDPLDVTKTWPEDIIPLQPVGRMVLNKNIDNFFAENEQLAFCPAVTVPGIHYSDDKLLQTRIFSYADTQRHRLGPNYLMLPVNAPKCAHHNNHHDGLMNFIHRDEEVNYFPSRVDPTRHAEKDPMPPRVLSGCREKCIIDKENNFKQAGERYRSFDPARQDRFLQRWVDALTDARVTHEIQSIWVSYWSQCDASLGQKLASRLKIKPNM

SEQ ID NO: 4726 - protein, 392 aa, Rhynchophora phillipsonii
DLEPVNPADVPVTAAGALKSYKLAAKAISRLQSLPSGNISLLCDVLVKEVRDLTGYDRVMVYKFHEDEHGEVVSECRRSDLESYLGLHYPATDIPQASRFLFMKNKVRMICDCVAPPVKVIQDERLPQPLSLCASTLRSPHGCHAQYMTNMGIVASLVMSVTVNEEDDMVDSDQPQMARKLWGLVVCHHTSTRFVPFPLRYACEFLIQVFGVQINKEVELAAQVREKHILQIQTMLCDMLLRDAPVAIITQSPNVMDLVKCDGAALYFKNKTWLLGVSPTEEQIRDIAEWLLEYHSGNTGLSTDSLMEAGYPGAAALGDAVCGMAAVSITSRDFLLWFRSHTAKEIKWGGAKHDPDDKDDGRKMHPRSSFKAFLEVVKWRSMPWEDMEMDAI

SEQ ID NO: 4727 - protein, 190 aa, Platycerium angolense
DEHGEVLAEIRRSDLEPYLGLHYPATDIPQASRFLFMKNRVRMICDCRALPVRAIQDKELRQPLSLAGSTLRAAHGCHSQYMANNGIVASLVMAVVVNDNDEDMSNRPQHPKMRRLWGLAVCHHTTPRCSPFALRSACESLMQVFGLQLNMELELAAQMREKHILRTQTLLCVMLLRDAPIGIVSESPNI

SEQ ID NO: 4728 - protein, 392 aa, Rhynchophora phillipsonii
DLEPVNPADVPVTAAGALKSYKLAAKAISRLQSLPSGNISLLCDVLVKEVRDLTGYDRVMVCKFHEDEHGEVVSECRRSDLESYLGLHYPATDIPQASRFLFMKNKVRMICDCVAPPVKVVQDERLPQPLSLCASTLRSPHGCHAQYMTNMGIVASLVMSVTVNEEDDMVDSDQPQMARKLWGLVVCHHTSTRFVPFPLRYACEFLIQVFGVQINKEVELAAQVREKHILQIQTMLCDMLLRDAPVAIITQSPNVMDLVKCDGAALYFKNKTWLLGVSPTEEQIRDIAEWLLEYHSGNTGLSTDSLMDAGYPGASALGDAVCGMAAVSITSRDFLLWFRSHTAKEIKWGGAKHDPDDKDDGRKMHPRSSFKAFLEVVKWRSMPWEDVEMDAI

SEQ ID NO: 4729 - protein, 225 aa, Populus tomentosa
MAREKIKIKKIDNVTARQVTFSKRRRGLFKKAEELSVLCDAEVAVIIFSATGKLFEYSSSSMKGVLARYNLHSNNLDKINQPSLELQLENSNHMRLSKEVSEKSHQLRRMRGEDLQGLNIEELQQLEKALEVGLSRVLETKGERIMNEISTLERKGVQLLEENKQLKQKIATITRGKRPALVDLDTAVQEEGMSSESTTNVCSCSSGPPVEDDSSDTSLKLGLAI

SEQ ID NO: 4730 - protein, 392 aa, Microsteira sp. Davis et al. 38-01
DLEPVNPADVPVTAAGALKSYKLAAKAISRLQSLPSGNISLLCDVLVKEVRDLTGYDRVMVYKFHEDEHGEVVSECRRSDLESYLGLHYPATDIPQASRFLFMKNKVRMICDCVAPPVKVIQDERLPQPLSLCASTLRSPHGCHAQYMTNMGIIASLVMSVTVNEEDDMVDGDQLQMARKLWGLVVCHHTSTRFVPFPLRYACEFLIQVFGVQINKEVELAAQVREKHILQIQTMLCDMLLRDAPVAIITQSPNAMDLVKCDGAALYFKNKTWLLGVTPTEEQIRDIAEWLLEYHSGNTGLSTDSLMEAGYPGASALGDTVCGMAAVSITSRDFLLWFRAHTAKEIKWGGAKHDPDDKDDGRKMHPRSSFKAFLEVVKWRSMPWEDVEMDAI

SEQ ID NO: 4731 - protein, 502 aa, Arabidopsis thaliana
MVLSHAVSESDVSVHSTFASRYVRTSLPRFKMPENSIPKEAAYQIINDELMLDGNPRLNLASFVTTWMEPECDKLIMSSINKNYVDMDEYPVTTELQNRCVNMIAHLFNAPLEEAETAVGVGTVGSSEAIMLAGLAFKRKWQNKRKAEGKPVDKPNIVTGANVQVCWEKFARYFEVELKEVKLSEGYYVMDPQQAVDMVDENTICVADILGSTLNGEFEDVKLLNDLLVEKNKETGWDTPIHVDAASGGFIAPFLYPELEWDFRLPLVKSINVSGHKYGLVYAGIGWVIWRNKEDLPEELIFHINYLGADQPTFTLNFSKGSSQVIAQYYQLIRLGHEGYRNVMENCRENMIVLREGLEKTERFNIVSKDEGVPLVAFSLKDSSCHTEFEISDMLRRYGWIVPAYTMPPNAQHITVLRVVIREDFSRTLAERLVIDIEKVMRELDELPSRVIHKISLGQEKSESNSDNLMVTVKKSDIDKQRDIITGWKKFVADRKKTSGIC

SEQ ID NO: 4732 - protein, 465 aa, Bacillus licheniformis ATCC 14580
MKQQLKLFLAVLITAVAASALTLYLVGKGSGGSVYSASDSEKFEKLMAAYDKIKSDYYQNADDEKLTDGAIKGMLGALDDPYSTYMDKKEAKSFEESITSSFEGIGAQVEEKNGQILIVAPIKGSPAEKAGLKPHDEIQKVDGKSVKGKTVNEATAMIRGKKGTNVKLVLNREGVGQIDVTIKRDTIPIETVYSKMIDGNIGEIQITSFSENTAKELTKAIDDLSEKGAERFVLDLRGNPGGLMDQAIMMSNMFVDKGKTIMQVESKNGKKEVYKAEKERKVNKPTVVLVNGGTASAAEIMAAALHQSSGIPIVGENTFGKGTVQNAESFSDGSTVKLTIAKWLTPNGDWIHEKGIKPQYKAELPSYAKLPYLDSKKEYKAGSTGDEVKAAQQMLQALGYKLNATGAFDAQTEAAVKAFQKDQKLKTTGILTGETTISLTSKLQDKLSDNDTQLDKAIEILKKEK

SEQ ID NO: 4733 - protein, 392 aa, Mascagnia sepium
DLEPVNPADVPVTAAGALKSYKLAAKAISRLQSLPSGNISLLCDVLVKEVRDLTGYDRVMVYKFHEDEHGEVVSECRGSDLESYLGLHYPATDIPQASRFLFMKNKVRMICDCLAPPVKVIQDERLPQPLSLCGSTLRSPHGCHAQYMTNMGTIASLVMSVTVNEDDDMVDGDQPQMTRKLWGLVVCHHTSPRFVPFPLRYACEFLIQVFGVQINKEVELAAQVGEKHILQIQTMLCDMLLRDAPVAIITQSPNVMDLVKCDGAALYFKNKTWLLGVTPTEEQIRDIAEWLLEYHSGNTGLSTDSLMEAGYPGASALGDAVCGMAAVSITSGDFLFWFRSHTAKEIKWGGAKHDPDDKDDGRKMHPRSSFKAFLEVVKWRSMSWEDIEMDAI

SEQ ID NO: 4734 - protein, 185 aa, Burkholderia fungorum LB400
MNIELSKWNPFKFLRKAQNGREKPSSNPPTTKNWLTEWPDASRLFSSDPWRVMRELLHDPFAGGALERWFGDFSSSWFQPRIDVVDDGDVLRITAELPGMDRGDLQTSIEEGVLVLRGEKKQDTRSEENGCYRLERSYGAFTRTIPLPDGVDVDKVDAKFDKGVLTVRLPKTDSARPTIRKVEIK

SEQ ID NO: 4735 - protein, 286 aa, Zea mays
MHIREEEATPSTVTGIMSTLTSAGQQKLKEPISPGGGSASVAGSAAERNNGGRGKGKTEIKRIENTTNRQVTFCKRRNGLLKKAYELSVLCDAEVALIVFSSRGRLYEYANNSVKGTIERYKKATSDNSSAAGTIAEVTIQHYKQESARLRQQIVNLQNSNRALIGDSITTMSHKELKHLETRLDKALGKIRAKKNDVLCSEVEYMQRREMELQNDNLYLRSRVDENERAQQTANMMGAPSTSEYQQHGFTPYDPIRSFLQFNIVQQPQFYSQQEDRKDFNDQGGR

SEQ ID NO: 4736 - protein, 111 aa, Hypocrea jecorina
MADAPYDPYVPKAGADQSGGQSRTQALQGEIDATVQVMRKNIENVAQRGDRLDVLQDKTDNLAESAQGFRRGANRVRKQMWWKDMKMRVCIVVGIILLLVVIIVPSVVATR

SEQ ID NO: 4737 - protein, 644 aa, Escherichia coli
MNMFFRLTALAGLLAIAGQTFAVEDITRADQIPVLKEETQHATVSERVTSRFTRSHYRQFDLDQAFSAKIFDRYLNLLDYSHNVLLASDVEQFAKKKTELGDELRSGKLDVFYDLYNLAQKRRFERYQYALSVLEKPMDFTGNDTYNLDRSKAPWPKNEAELNALWDSKVKFDELSLKLTGKTDKEIRETLTRRYKFAIRRLAQTNSEDVFSLAMTAFAREIDPHTNYLSPRNTEQFNTEMSLSLEGIGAVLQMDDDYTVINSMVAGGPAAKSKAISVGDKIVGVGQTGKPMVDVIGWRLDDVVALIKGPKGSKVRLEILPAGKGTKTRTVTLTRERIRLEDRAVKMSVKTVGKEKVGVLDIPGFYVGLTDDVKVQLQKLEKQNVSSVIIDLRSNGGGALTEAVSLSGLFIPAGPIVQVRDNNGKVREDSDTDGQVFYKGPLVVLVDRFSASASEIFAAAMQDYGRALVVGEPTFGKGTVQQYRSLNRIYDQMLRPEWPALGSVQYTIQKFYRVNGGSTQRKGVTPDIIMPTGNEETETGEKFEDNALPWDSIDAATYVKSGDLTAFEPELLKEHNARIAKDPEFQNIMKDIARFNAMKDKRNIVSLNYAVREKENNEDDATRLARLNERFKREGKPELKKLDD

SEQ ID NO: 4738 - protein, 838 aa, Nostoc punctiforme PCC 73102
MATVTVQFTYFTGFRRAIFNNPRLIGSWDENGRYSQQWRSQQMQPIIAEDGCPGFQTTVELDDSQIGWLFRWGVMLDSPAGNNLWGIPTEINDRNSSDRYRSFTLQSPNNNQPQQERYYLVYSRRLGAQLYHFPGQSQPGLRFAVWAPNARNVEVVFGNRSSGYIADDVFREDPDFGMDPNLGPFPMSRTEEGIWQTDVTVSSELADFSRFDHIPYMFRIVNEGGRVVYRTDLYSRCQIGKGNINPDGKPFSNRYSDTQDRPFSGNYQDLDGTKSCSVVINPDTVTRHFQEPVWPELEFIPEEEFWSNEFSLERPVPQRVEDLVIYELHVGALGYGQNRPGNFEDAIALLPYLVQLGVNAVELLPMSEFRDEVNWGYETSHYFALEYSAGGRDQLKHFIRECHCYGIAVILDVVYNHFNPDGERAEWAYDSDLPEHNIYYWYEGNSGDYFYPDGRRFPEGGYLDNVSTGFAPRFYEEMVRKMFISSAVTLMEEFHVDGFRVDQTTSIHSYNALHLDGRPMGNANIFGAKFLREWTRTMKLIQPNAILIAEDHSDWEPVTESPDVGGLGFDAAWYANFYHHLIGDARQGTEYAKLIPTAGYGTNEPLAMDYFAGALGWSGHHKVVYHESHDEAGNAYFEEGGHRVESRRTIAEAVNSAPLIGETRRYAEARCRFAVGVSILSAGTPMFLMGEEIGAQKPYRYSDFIDNREDLIGDRQTNGQRLFRFYQDLIQLRHNYSGLRSHLIDILYVHNANRVIAFKRWDVSGEFLIVASLNNHPFRSGYTINNSRIGDGQWREIFNSDASLYGGDSIGNYGINISATNGYINPIVPANGFVVFQG

SEQ ID NO: 4739 - protein, 394 aa, Brachypodium pinnatum
EPARTEDPALSIAGAVQSQKLAVRAISRLQALPGGDVKLLCDTVVEHVRELTGYDRVMVYKFHDDEHGEVLAESRRTDLEPYLGLHYPATDIPQASRFLFRQNRVRMIADCHAAPVRVIQDPAMPQPLCLVGSTLRSPHGCHAQYMANMGSIASLVMAVIISSGGEDEHNMGRGAIPSAMKLWGLVVCHHTSPRCIPFPLRYACEFLMQAFGLQLNMELQLAYQLSEKHILRTQTLLCDMLLRDSPTGIVTQSPSIMDLVKCDGAALYYHGKYYPLGVTPTEVQIKDIIEWLTVSHGDSTGLSTDSLADAGYSGATALGDAVCGMAVAYITPSDYLFWFRSHTAKEIKWGGAKHHPEDKDDGQRMHPRSSFKAFLEVVKSRSLPWENAEMDAIH

SEQ ID NO: 4740 - protein, 394 aa, Buergersiochloa bambusoides
EPARTEDPALSIAGAVQSQKLAVRAISRLQALPGGDVKLLCDTVVEHVRELTGYDRVMVYRFHDDEHGEVVAESRRADLEPYLGLHYPATDIPQASRFLFRQNRVRMIADCHAAPVRVIQDSALPQPLCLVGSTLRGPHGCHAQYMANMGSIASLVMAVIISSGGDDEHNSAQGGIPSAMKLWGLVVCHHTSPRCIPFPLRYACEFLMQAFGLQLNMELQLAHQLSEKHILRTQTLLCDMLLRDSPTGIVTQSPSIMDLVKCDGAALYYHGKYYLLDVTPTEAQIKDIIEWLTLCHGDSTGLSTDSLADAGYPGAAALGDAVCGMAVAYITPSDYLFWFRSHTAKEIKWGGAKHHPEDKDDGQRMHPRSSFKAFLEVVKSRSLPWENAEMDAIH

SEQ ID NO: 4741 - protein, 393 aa, Capillipedium parviflorum
EPARTEDPALSIAGAVQSQKLAVRAISRLQALPGGDVKLLCDTVVEHVRELTGYDRVMVYRFHEGEHGEVVAESRRDNLEPYLGLHYPATDIPQASRFLFRQNRVRMIADCHATPVRVIQDPGLSQPLCLVGSTLRAPHGCHAQYMANMGSIASLVMAVIISSGGDDEQTGRGGISSAMKLWGLVVCHHTSPRCIPFPLRYACEFLMQAFGLQLNMELQLAHQLSEKHILRTQTLLCDMLLRDSPTGIVTQSPSIMDLVKCDGAALYYHGKYYPLGVTPTESQIKDIIEWLTVCHGDSTGLSTDSLADAGYLGAAALGDAVCGMAVAYITPSDYLFWFRSHTAKEIKWGGAKHHPEDKDDGQRMHPRSSFKAFLEVVKSRSLPWENAEMDAIH

SEQ ID NO: 4742 - protein, 386 aa, Chasmanthium latifolium
PALSIAGAVQSQKLAVRAISRLQALPGGDVKLLCDTVVEHVRELTGYDRVMVYRFHEEEHGEVVAESRRDGLEPYLGLHYPATDIPQASRFLFRQNRVRMIADCHATAVRVIQDPGLSQPLCLVGSTLRAPHGCHAQYMANMGSIASLVMAVIISSGGDDEQTSRGGMSSAMKLWGLVVCHHTSPRFIPFPLRYACEFLMQAFGLQLNMELQLAHQLSEKHILRTQTLLCDMLLRDSPTGIVTQSPSIMDLVKCEGAALYYHGKYYPLGVTPTESQIKDIIEWLMLCHRDSTGLSTDSLADAGYVSAAALGDAVCGMAVAYITPSDYLFWFRSHTAKEIKWGGAKHHPEDKDDGQRMHPRSSFKASLEVVKSRSLPWENAEMDAIH

SEQ ID NO: 4743 - protein, 393 aa, Chusquea oxylepis
EPARTEDPALPIAGAVQSQKLAVRAISRLQALPGGDVKLLCDTVVEHVRELTGYDRVMVYRFHDDEHGEVVAESRRADLEPYLGLHYPATDIPQAPRFLFKQNRVRMIADCHAASVRVIQGPALPQPLCLVGSTLRAPHGCHAQYMANMGSIASLVMAVIISSGGDDEHNMTRGGIPSAMKLWGLVVRHHTSARCIPFPLRYACEFLMQAFGLQLNMELQLAHQLSEKHILRTQTLLCDMLLRDSPAGIITQSPSIMDLVKCDGAALYYHGKYYPLGVTPTEAQIKDIIEWLTLCHGDSTGLSTDSLADAGYPGAALGDAVCGMAVAYITPSDYLFWFRSHTAKEIKWGGAKHHPEDKDDGQRMHPRSSFKAFLEVAKSRSLPWENAEMDAIH

SEQ ID NO: 4744 - protein, 365 aa, Prunus persica
QMGLAENQLSFDLIEDWIRKNPKASICTPEGVEELKNVAIFQDYHGFPEFRKAVAMFMSKARGGRVTFDPNRVVMNGGATGANELVMFCLADPGDAFLVPSPYYQHFTRDLGWRTGVQIVPVDCDSSNNFQITKEALAAAYEKAQKNNISVKGLIITNPSNPLGTTLGRDTLESLVEFISQKNIHLVCDEIYAATVFSSPTFTCISEVIQNTDCNPNLIHIVYSLSKDMGLPGLRVGIVYSYNDDVVNIGRKMSSFGLVSSQTQHVLASMLLDEEFVARFLETSSKRLAKRHGVFTKGLEEVGINCLRSNAGLFCWMDLRRLLKDLTFDGEMVLWRVIVNEVRLPVSPGSSFKCVEPGWFRVCFA

SEQ ID NO: 4745 - protein, 393 aa, Danthoniopsis dinteri
EPASTEDPALSIAGAVQSQKLAVRAISRLQALPGGDVKLLCDTVVEHVRELTGYDRVMVYRFHEDEHGEVVAESRRDDLEPYIGLHYPATDIPQASRFLFRQNRVRMIADCHATPVKVIQDTGLSQPLCLVGSTLRAPHGCHAQYMANMGSIASLVMAVIISSGGDDEQTARGGISSAMKLLGLVVCHHTSPRFIPFPLRYACEFLMQAFGLQLNMELQLAHQLSEKHILRTQTLLCDMLLRDSPTGIVTQSPSIMDLVKCDGAALYYHGKYYPLGVTPTESQIKDIIEWLTLCHGDSTGLSTDSLADAGYLGAAALGDAVCGMAVAYITPSDYLFWFRSHTAKEIKWGGAKHHPEDKDDGQRMHPRSSFKAFLEVVKSRSLPWENAEMDAIH

SEQ ID NO: 4746 - protein, 394 aa, Diarrhena obovata
EPARTEDPALSIAGAVQSQKLAVRAISRLQALPGGDVKLLCDTVVEHVRELTGYDRVMVYKFHDDEHGEVLAESRRADLEPYLGLHYPATDIPQASRFLFWQNRVRVIADCHAAPVRVIQDPAMPQPLCLVGSTLRSPHGCHAQYMANMGSIASLVMAVIISSGGEDEHNMARGAIPSAMKLWGLVVCHHTSPRCIPFPLRYACEFLMQAFGLQLNMELQLAHQLSEKHILRTQTLLCDMLLRDSPAGIVMQSPSIMDLVKCDGAALYYHGKYYPLGVTPTEAQIKDIIEWLTVCHGDSTGLSTDSLADAGYSGATALGDEVCGMAVAYITPSDYLFWFRSHTAKEIKWGGAKHHPEDKDDGQRMHPRSSFKAFLEVVKSRSLPWENAEMDAIH

SEQ ID NO: 4747 - protein, 534 aa, Oryza sativa
MGNSCQNGTYGNNYQNSNRFQNDRFASRYVDGNDTEDCYSGSSRASLAGALRQGLNLKSPVLGYKTPNVRELYTLGRELGQGQFGKTYLCTEISTGCQYACKTILKSNLRCVSDIEDVRREIQIMHHLSGQKNIVTIKDTYEDEQAVHIVMELCAGGELFSKIQKRGHYSERKAAELIKIIVGIIETCHSHGVMHRDLKPENFLLLDADDEFSVKAIDFGLSVFFRPGQVFREVVGSPYYIAPEVLEKRYGPEADIWTAGVILYVLLTGVPPFWADTQSGIYEKVLDGRIDFKSNRWPRISDSAKDLIKKMLCPYPLERLKAHEVLKHPWICDNGVATNRALDPSVLPRLKQFSAMNRLKKLSLQIIAERLSEEEIVGLREMFKAMDTKNRSVVTFGELKGLKRYSSVFKDTEINDLMEAADDTTSTINWEEFIAAAVSLNKIEREKHLMAAFTYFDKDGSGFITVDKLQKACMERNMEDTFLEEMILEVDQNNDGQIDYAEFVTMMQSNNFGLGWQTVESSLNVALREAPQVY

SEQ ID NO: 4748 - protein, 394 aa, Ehrharta erecta
EPARTEDPALSIAGAVQSQKLAVRAISRLQALPGGDVKLLCDTVVEHVRELTGYDRVMVYRFHEDEHGEVVAESRRNDLEPYLGLHYPATDIPQASRFLFRQNRVRMIADCHAAPVRVIQDPGLPQQLCLVGSTLRSPHGCHAQYMANMGSIASLVMAVIISSAGDDENNMARGGIPSAMKLWGLVVCHHTSPRCIPFPLRYACEFLMQAFGLQLNMELQLAHQLSEKHILRTQTLLCDMLLRDSPTGIVTQSPSIMDLVKCDGAALYYHGKYYPLGVTPTESQIKDIIEWLTVCHGDSTGLSTDSLADAGYPGSAALGDAVSGMAVAYITPSDYLFWFRSHTAKEIKWGGAKHHPEDKDDGQRMHPRSSFKAFLEVVKSRSLPWENAEMDAIH

SEQ ID NO: 4749 - protein, 394 aa, Elymus sp. Kellogg s.n.
EPARTEDPALSIAGAVQSQKLAVRAISRLQALPGGDVKLLCDTVVEHVRELTGYDRVMVYKFHDDEHGEVLSESRRGDLEPYLGLHYPATDIPQASRFLFLQNRVRMIADCHAAAVRVIQDPAMPQPLCLVGSTLRSPHGCHAQYMANMGSIASLVMAVIISSGGEDEHNMTRGVIPSAMKLWGLVVCHHTSPRCIPFPLRYACEFLMQAFGLQLNMELQLAHQLSEKHILRTQTLLCDMLLRDSPTGIVTQTPSIMDLVKCDGAALFYHGKYYPLGVTPTESQIKDIIEWLTVCHGDSTGLSTDSLADAGYPGATALGDAVCGMAVAYITPSDYLFWFRSHTAKEIKWGGAKHHPEDKDDGQRMHPRSSFKAFLEVVKSRSLPWENAEMDAIT

SEQ ID NO: 4750 - protein, 410 aa, Bacteroides fragilis NCTC 9343
MNTHSASKLFTPVTIGPLTLRNRTIRSAAFEGMCPGNAPSPMLLDYHRSVAAGGVGMTTIAYASVTRSGLSFPRQLWLRPEIIPGLREVTAAIHAEGAAASIQIGHCGNMSHKSICGVTPISASSGFNIYSPTWVRGMKREELPEMAKAYGRAVCLAREAGFDAVEVHTGHGYLISQFLSPYTNHRKDEYGGSLENRMRFMTMVMNEVMKAAGKDLAVFVKMNMRDGFRGGMEIEETLEVARRLESLGAHALVLSGGFVSKAPMYVMRGAMPIKTLTHYMDCWWLKFGVKLAGRMMIPTVPFKEAYFLEDALKFRSEIKIPLIYVGGLVSREKIDEVLNEGFEAVQMARALLNEPGFVNRMRREEKARCNCGHSNYCIGRMYTIEMACHQHLTEELPLCLKKEIEQLENK

SEQ ID NO: 4751 - protein, 520 aa, Kluyveromyces lactis
MNEYDAVDRHTFKVFNQDFTVDKRFQLIKEIGHGSYGIVCSARFTEAADETTVAIKKVTNVFSKTLLCKRSLRELKLLRHFRGHKNITCLYDMDIVFQPDGMFNGLYLYEELMECDMHQIVKSGQPLTDAHYQSFIYQILCGLKYIHSADVLHRDLKPGNLLVNADCQLKICDFGLARGYSENPVENNQFLTEYVATRWYRAPEIMLSYQGYTKAIDVWSCGCILAELLGGKPIFKGKDYVDQLNRILQVLGTPPEETLKRIGSKNVQDYIHQLGYIPKIPFSTLYPNANPDALNLLEGMLSFDPQLRITVDDALQHPYLSIWHDPADEPICTEKFDFSFESVNEIEQLKQMVIDEVTDFRQYVRLPLLHEQQQQQGKTDGGFDDQIREDQRTFQAQLEEQVNNGRTASNVPSFDEPFSSQMMGSASQQDPLVGIHSDNLPSHELDFPPRPSENVLDSPMGLSHQQTHNGSPECQDINDLLGLERELEFGLDRQFNETVWYIASSTLFVEHKLLLRFCYT

SEQ ID NO: 4752 - protein, 144 aa, Rubrobacter xylanophilus DSM 9941
MLSPFRGFRDLQSEMDRLFGEAFGRPPRADAEGGWTPAVDVLTRGDDLIIRAELPGVRREDVEVTVSNGVLTLAGERREEEERERAGYLIRERRQGSFRRSMTLPEGVNEDEIKATFRDGVLEVSVPGASAAVEAPPRRIEIEG

SEQ ID NO: 4753 - protein, 361 aa, Triticum aestivum
  misc_feature (226)..(226): Xaa can be any naturally occurring amino acid
  misc_feature (229)..(230): Xaa can be any naturally occurring amino acid
AYLGDTLEQVCTKKQAGTGPEFPGYRRPTRPGFSTFTGAIEEYCNQYVDKDALIYLILANEMLHELHPDIITIAEDATYYPGLCEPTTQGGLGFDYWANLSIPEMWLWHLENVPEREWSMNKIMKVLISSNHHMLSYVENHNQSISGRKSFAEIILNTGMYSSGSVDDDLIFKASSLLKIIKLITFTTSGGAYLNFMGNEFAHPKRIEFPMSSNGYSFHLACRQWXTIXXKGVHKHIFNFDKDIMSLDENERVTSRGSLNVHHCDDTNMVISFTRGPFLFVFNFNPEVPYQLYRVGVDEAGEYQLILNTDETKYGGRGELKSSQYMKKTSDRRADGCRNSLELALASRSAQVYKLVRILRI

SEQ ID NO: 4754 - protein, 410 aa, Silicibacter sp. TM1040
MATQEPQIGPATRAEALLRMEAFTPRMGLNYATFRNHDYGPQRQSAVSMLSPYLRRRLLTEPEVIAAALAAHGPQEADKFVQEVLWRGYFKGWMERRPEVWANYITGRDADFVALEEDPGLAIRVNAAETGETGLAYFDTWAKELVRTGYLHNHARMWFASLWIFTLKLPWRLGADFFLRHLLDGDPASNTCSWRWVAGLHTRGKPYVAQASNIARFSGGRFAPQESELATEVTGLMDEEPEGLPHVNPLRSVLSPEEAKPTAVLLTEEDCMPASADLASLDIRGAARLYCSHLRSPRRVAAAVSTFEEDALADTVARIGLDAQPWAASEPEALADWVQSIGAQQIFMPYATVGPLGDWIARALPLLRARGVAVAEWQRDWDGLVWPHATAGFFKVKKRLPDILTKAGLT

SEQ ID NO: 4755 - protein, 468 aa, Streptococcus mutans
MSKTLPKDFIFGGATAAYQAEGATHADGKGPVAWDKYLEDNYWYTAEPASDFYHQYPVDLKLAEEFGVNGIRISIAWSRIFPKGYGAVNPKGLAFYHNLFAECHKRHVEPFVTLHHFDTPEALHSNGDFLNRENIEHFVNYAEFCFKEFSEVNYWTTFNEIGPIGDGQYLVGKFPPGIQYDLAKVFQSHHNMMVAHSKAVKLFKDGGYSGEIGVVHALPTKYPYDPNNPADIRAAELEDIIHNKFILDATYLGKYSEKTMEGVNHILAVNGGQLDLREEDFAALEAAKDLNDFLGINYYISDWMRAFDGETEITHNAKGEKGSSKYQIKGVGRREAPVNVPKTDWDWIIYPQGLYDQIMRVKQDYPNYKKIYITENGLGYKDEFVNHTVYDDARIDYVKKHLEVLSDAIADGANVKGYFIWSLMDVFSWSNGYEKRYGLFYVDFDTQERYPKKSAYWYKKLAETQIID

SEQ ID NO: 4756 - protein, 190 aa, Psilotum nudum
DEHGEVVAEIRRSDLDPYLGLHYPATDIPQASRFLFLKNRVRMICDCSAPVIRIIQDKELKQPLSLAGSTLRAPHGCHAYYMRNMGSIGSLVMAVIVNDNDAEPSGRGNQPKNRRLWGMVVCHHTTPRAVPFSLRSACEFLMQVFGLQLNMEIELAAQMREKHILRTQTLLCDMLLRDAPIGIVTQSPNI

SEQ ID NO: 4757 - protein, 479 aa, Botryotinia fuckeliana
MAQTNGVLQEPAITTMNGAPVLKPASTQRIGNQLRATLLLQDINLLELIQHITHERIPERVVHARGTSAHGYFEVTDDISDVTSAAFLNRVGKQTDIFCRFSTVAGRAESAETVRDTRGFAFKMFTEEGNLDWLFLSTPVFPIRDGAKFPSFTHATKKNPRSGLPDHKAFWDYFTHNQEGIHFLMFLFSDRATPVDFQHADIFSINTYKFTKSDGSFTYVKIHLKTNQGVKNFTQDEANQKAGVDPDFQTRSLYEDIENQKYPTWDVFAQIIDPVKAENYHINIFDATKTFPFSEFPLRKFGKITLNRNVDNFFAEQEQSAFSPTNLVPGWALTPDPIIQTRALAYADTQRYRLGANFVQLPVNAPYKKPFTPLIRDGAATVNGNLGGTPNYFPSSFYNVGAATQYAQPDEEQFQGTVVNFESEVVDADYVQPRIFWEKTLAEEPGQQDNLISNVAGHLSAVTGDKGLGSSTSGLCNVR

SEQ ID NO: 4758 - protein, 188 aa, Podocarpus neriifolius
DEHGEVVAEIRRADLEPYLGLHYPSTDIPQASRFLFMQNRVRMICDCSATPVKVIQSEELRQPLCLVGSTLRAPHGCHAQYMANMGSIASLVMAVVINGNDEEGEEQVPKSMKLWGLVVCHHTSSRAVSFPLRYACEFLMQAFGLQLNMELQLAAQLTEKHILRTQTLLCDMLLRDAPIGIVTQSPSI

SEQ ID NO: 4759 - protein, 729 aa, Saccharophagus degradans 2-40
MLSITPEIIKEIVQGEYHDVFAVLGPHAQKNGYVIRAFFPAAKTLQVKSKLDGSVLAEAVMRNEEGFFEANCNCSEKPSYYFTVGYGDKEFDVEDMYRFGSTIPEGDLYLFGEGTYEQAYRLFGAHPTEVDGVPGCRFTVWAPNAKTVAVVGDFNFWQGRAHVMRKHIPSGIWELFIPYLGEGALYKYEIRNHSGDCLPHKADPYGFAAQKPPEQASVVSVLDRYEWNDAEWFAKANNWTQRDRPISIYEVHLGSWKRVVEEDNRYLSYKELAADLIPYVKSMGFTHIQLMPISEFPFDGSWGYQPVGLYAPTSRFGSPEDFKYFVDCCHQNDLAVLIDWVPGHFPTDSHGLGLFDGTPLYEHADSRQGFHPDWNTYIYNYGRHEVKSFLMANALFWLEQYHIDGLRVDAVASMLYLDYSRKDGEWLPNSYGGRENLEAIDFLRLVNERVYKRFPHAMMVAEESTAWPGVSSPTSCGGLGFGYKWNMGWMNDSLQYISKEPIHRQYHHHDMTFSLHYAFSENFVLPLSHDEVVHGKRSLLGRMPGDAWQQFANLRAYYAFMWTHPGKKLLFMGGEFAQGMEWNHDTSLSWHQLEIDYHSGIQTLVKSLNRLYTDVPALYKEDCMSSGFEWVEADDRHNSIFAFLRKAKDEKPVLVVANFTPVAREGYRVGVNQPGYYRELLNTDSELFGGSNLGNEGGVHSEEIAWHQRPQSVSINIPALAAVVFQLDS

SEQ ID NO: 4760 - protein, 394 aa, Eremitis sp. Clark and Zhang 1343
EPARTEDPALSIAGSVQSQKLAVRAISRLQALPGGDVKLLCDTVVENIRELTGYDRVMGYRFHDDEHGEVVAESRRADLEPYLGLHYPATDIPQASRFLFRQNRVRMIADCHTAPVRVIQDPVLPQPLCLVGSTLRAPHGCHAQYMANMGSIASLVMAVIISSGGDDSHNSSRGGIPSAMKLWGLVVCHHTSPRCIPFPLRYACEFLMQAFGLQLNMELQLAHQLSEKHILRTQTLLCDMLLRDSPTGIVTQSPSIMDLVKCDGAALYYHGKYYPLGVTPTEAQIKDIIEWLTLCHGDSTGLSTDSLADAGYPGAAALGDAVCGMAVAYITPSDYLFWFRSHTAKEIKWGGAKHHPEDKDDGQRMHPRSSFKAFLEVVKSRSLPWESAEMDAIH

SEQ ID NO: 4761 - protein, 177 aa, Triticum aestivum
RRRPPPYANFSKGSSQIIAQYYQLIRLGFEGYKDIMQNCRDNATVLREGVEKMGYFHLVSKDSGVPLVAFSLKDSSKYTVFEVVESLRRFGWIVPAYTMPADAEHIAVMRVVIREDFSRGLAERLITDLKKVMVEMDAHAKKHGHHEHVKKTAHQIEKEVTTYWRTFVARKKHSLVC

SEQ ID NO: 4762 - protein, 394 aa, Glyceria grandis
EPARTEDPALSIAGAVQSQKLAVRAISRLQALPGGDVKLLCETVVEHVRELTGYDRVMVYKFHDDEHGEVLAESRRPDLEPYLGLHYPATDIPQASRFLFRQNRVRMIADCHAAPVRVIQDPAMPQPLCLVGSTLRSPHGCHAQYMANMGSIASLVMAVIISSGGDDEHHMARGNIPSAMKLWGLVVCHHTSPRCIPFPLRYACEFLMQAFGLQLNMELQLAHQLSEKHILRTQTLLCDMLLRDSPTGIVTQSPSIMDLVKCDGAALYYHGKYYPLGVTPTEAQIKDIIEWLTACHGDSTGLSTDSLADAGYSGATVLGDAVCGMAVACITPSDYLFWFRSHTAKEIKWGGAKHHPEDKDDGQRMHPRSSFKAFLEVVKSRSLPWENAEMDAIH

SEQ ID NO: 4763 - protein, 393 aa, Hakonechloa macra
EPARTEDPALSIAGAVQSQKLAVRAISRLQALPGGDVKLLCDTVVEHVRELTGYDRVMVYRFHEDEHGEVVAESRRADLETYLGLHYPATDIPQASRFLFRQNRVRMIADCHATPVRVIQDPGLPQPLCLVGSTLRAPHGCHAQYMANMGSIASLVMAVIISSGGDDEQTARGGISSTMKLWGLVVCHHTSPRFIPFPLRYACEFLMQAFGLQLNMELQLAHQLSEKHILRTQTLLCDMLLRESPTGIVTQSPSIMDLVKCDGAALYYHGKYYPLCVTPTESQIKDIIEWLTVCHGDSTGLSTDSLADAGYLGAAALGDAVCGMAVAYITPSDYLFWFRSHTAKEIKWGGAKHHPEDKDDGQRMHPRSSFKAFLEVVKSRSLPWENAEMDAIH

SEQ ID NO: 4764 - protein, 392 aa, Lithachne pauciflora
EPARTEDPALSIAGAVHSQKLAVRAISRLQALPGGDVKLLCDTVVEHVRELTGYDRVMVYRFHEDEHGEVVAESRRADLEPYLGLHYPATDIPQASRFLFRQNRVRMIADCHAAPVRVIQDPALQQPLCLVGSTLRAPHGCHAQYMANMGSIASLVMAVIISSGGDDEHNITRGGIPSAMKLWGLVVCHHTSPRCIPFPLRYACEFLMQAFGLQLSMELQLAHQLSEKHILRTQTLLCDMLLRDSPTGIVTQSPSIMDLVKCDGAALYYHGKYYPLGVTPTEAQIKDIIEWLTLCHGDSTGLSTDNFADAGYPGAAALGDAVCGMAVAYITPSDYLFWFRSHTAKEIKWGGAKHHPEDKDDGQRMHPRSSFKAFLEVVKSRSLPWENAEMDA

SEQ ID NO: 4765 - protein, 392 aa, Lolium perenne
TGYDRVMVYKFHDDEHGEVLAESRRADLEPYLGLHYPATDIPQASRFLFRQNRVRMIADCHAAPVRVIQDPAMPQPLCLVGSTLRSPHGCHAQYMANMGSIASLVMAVIISSGGEDEHNMGRGAVPSAMKLWGLVVCHHTSPRCIPFPLRYACEFLMQAFGLQLNMELQLAHQMSEKHILRTQTLLCDMLLRDSPTGIVTQSPSTMDLVKCDGAALYYHGKYYPLGITPTEAQIKDIIKWLTVCHGDSTGLSTDSLADAGYPGATELGDAVCGMAVAYITPSDYLFWFRSHTAKEIKWGGAKHHPEDKDDGQRMHPRSSFKAFLEVVKSRSLPWENAEMDAIHSLQLILRDSFRDAGEGTSNSKAIVNGHVQLGELELRGIDELSSVAREMV

SEQ ID NO: 4766 - protein, 394 aa, Lygeum spartum
EPARTEDPALSIAGAVQSQKLAVRAISRLQALPGGDVKLLCDTVVEHVRELTGYDRVMVYKFHDDEHGEVLAESRRTDLEPYLGLHYPATDIPQASRFLFRQNRVRMIADCHAAPVKVFQDPAMPQPLCLVGSTLRSPHGCHAQYMANMGSIASLVMAVIISSGGDDEHNMSRGVIPSAMKLWGLVVCHHTSPRCIPFPLRYACEFFMQAFGLQLNMELQLAHQLSEKHILRTQTILCDMLLRDSPTGIVTQSPSIMDLVKCDGAALYYHGKYYPLGVTPTESQIKDIIDWLTVCHGDSTGLSTDSLADAGYPGAAALGDAVCGMAVAYITPSDYLFWFRSHTAKEIKWGGAKHHPEDKDDGQRMHPRSSFKAFLEVVRSRSLPWENAEMDAIH

SEQ ID NO: 4767 - protein, 532 aa, Daucus carota
MGGCFSKKEYQADGNGYRSAPTAYHTVTDQSYEKSSQRSQPQAQPQPQVQQTGPSLKPRQVHRPESNTILGKPFEDIRGKYTLGKELGRGQFGCVYQCTENSSGQLYACKSILKRKLVSKNDKEDIKREIQILQHLSGQPNIVEFKGVFEDRQSVHLVMELCAGGELFDRIIAQGHYSERAAATICRQIVNVVHVCHFMGVMHRDLKPENFLLSSKDKDAMLKATDFGLSVFIEEGKVYRNIVGSAYYVAPEVLRRSYGKEIDIWSAGVILYILLSGVPPFWAENEKGIFDAILEGVIDFESEPWPSVSNSAKDLVRKMLTQDPRRRITSAQVLDHPWMREGGEASDKPIDSAVLSRMKQFRAMNKLKQLALKVIAESLSEEEIKGLKSMFANMDTDKSGTITYEELKSGLARLGSKLSEVEVQQLMDAADVDGNGTIDYLEFITATMHRHKLESYEHQAFQYFDKDNSGFITKDELESAMKEYGMGDEATIKDIISEVDSDNDGRINYDEFCAMMRRARNRRKLFSVSLTS

SEQ ID NO: 4768 - protein, 480 aa, Streptococcus pyogenes SSI-1
MLAFPKEFWWGGATSGPQSEGRFAKQHRNLFDYWYEEEPDLFYDYVGPDTASDAYHQIESDLALLASLGHNSYRTSIQWTRLIDDFEQATINPDGLAYYNRVINACLANGIRPVINLHHFDLPIALYQAYGGWESKHVVDIFVAFSKVCFEQFGDRVKDWFVHNEPMVVVEGSYLMQFHYPAIVDGKKAVQVAYNLALATAKVIQAYRRGPAELSNGRIGTILNLTPAYPASQSEADMAAAHFTELWNNDLFMEAAVHGKFPEELVAVLKKDGVLWQSTPEELALIAENRVDYLGLNFYHPKRVKAPDVIPVISPSWSPEWYYDPYLMPGRRMNVDKGWEIYPEAVYDIAIKMRDHYDNIPWFLSENGVGISGEERYRDETGQIQDDYRIQFLKEHLTYLHKGIEAGSNCFGYHVWTPIDGWSWLNAYKNRYGLVENNIHTQVRRPKASAYWFKKVATHNRLISLEVMEEFGGSASHLSD

SEQ ID NO: 4769 - protein, 394 aa, Melica cupanii
EPARTEDPALSIAGAVQSQKLAVRAISRLQALPGGDVKLLCDTVVEHVRELTGYDRVMVYKFHDDEHGEVLAESRRADLEPYLGLHYPATDIPQASRFLFRQNRVRMIADCGAAPVTVIQDPAMPQPLCLVGSTLRSPHGCHAQYMANMGSIASLVMAVIISSGGDDDHNMVRGSIPSAMKLWGLVVCHHTSPRCIPFPLRYACEFLMQAFGLELNMELQLAHQMSEKHILRTQTLLCDMLLRDSPTGIVTQSPSIMDLVKCDGAALFYHGKYYPLGVTPTEAQIKDIIEWLTVCHGDSTGLSTDSLADAGYSGATALGDAVCGMAVAYITPSDYLFWFRSHTAKEIKWGGAKHHPEDKDDGQRMHPRPSFKAFLEVVKSRSIPWENAEMDAIH

SEQ ID NO: 4770 - protein, 393 aa, Miscanthus sinensis
EPARTEDPALSMAGAVQSQKLAVRAISCLQALPGGDVKLLCDTVVEHVRELTGYDRVMVYRFHEDEHGEVVAESRRDNLEPYLGLHYPATDIPQASRFLFRQNRVRMIADCHATPVRVIQDPGLSQPLCLVGSTLRASHGCHAQYMANMGSIASLVMAVIISSGGDDEQTGRGGISSAMKLWGLVVCHHTSPRCIPLPLRYACEFLMQAFGLQLNMELQLAHQVSEKHILRTQTLLCDMLLRDSPTGIVTQSPSIMDLVKCDGAALYYHGKYYPLGVTPTESQIKDIIEWLTVCHGDSTGLSTDSLADAGYLGAAALWDAVCGMAVAYITPSDYLFWFRSHTAKEIKWGGAKHHPKDKDDGQRMHPRSSFKAFLEVVKSRSLPWENAEMDAIH

SEQ ID NO: 4771 - protein, 388 aa, Molinia caerulea
EDPALSIAGAVQSQKLAVRAISRLQALPGGDVKLLCDTVVENVRELTGYDRVMVYRFHEDEHGEVVAESRRADLEPYLGLHYPATDIPQASRFLFRQNRVRMIADCHATPVRVIQDPGLSQPLCLVGSTLRAPHGCHAQYMANMGSIASLVMAVIIIIGGDDEQTARGSISSAMKLWGLVVCHHTSPRFIHFPLRYACEFLMQAFGLQLNMELQLAHQLSEKHILRTQTLLCDMLLRDSPSGIVMQSPSIMDLVKCDGAALYYHGKYYPLGVTPTESQIMDIIEWLTMCHGGSTGLSTDSLADAGYLGAAALGDAVCGMAVAYITSSDYLFWFRSHTAKEIKWGGAKHHPEDKDDGQRMHPRSSFKAFLEVIKSRSLPWENAEMDAIH

SEQ ID NO: 4772 - protein, 387 aa, Nardus stricta
PALSIAGAVQSQKLAVRAISRLQALPGGDVKLLCDTVVEHVRELTGYDRVIVYKFHDDEHGEVLAESRRTDLEPYLGLHYPATDIPQASRFLFRQNFVRMIADCHAAPVRVIQDPAMPQPLCLVGSTLRSPHGCHAQYMANMGSIASLVMAVIISSGGDDEHNMARGVVPSAMKLWGLVVCHHTSPRCIPFPLRYACEFLMQAFGLQPNMELQLAHQMSEKHILRTQTLLCDMLLRDSPTGIVTQSPSIMDLVKCDGAALYYHGKYYPLGVTPTESQIKDIIEWLTVCHGDSTGLSTDSLADAGYPGAAALGDAVCGMAVAYITQSDYLFRFRSHTAKEIKWGGAKHHPEDKDDGQRMHPRSSFKAFLAVVKSRSLPWENAEMDAIH

SEQ ID NO: 4773 - protein, 428 aa, Phaseolus vulgaris
PERVVHARGASAKGFFEVTHDISHLTCADFLRAPGVQTPLIVRFSTVIHERGSPETLRDPRGFAVKFYTREGNFDLVGNNFPVFFVRDGLKFPDMVHALKPNPKSHIQENWRILDFFSHHPESLHMFSFLFDDVGIPQDYRHMDGFGVNTYTLISKAGKPHYVKFHWKATCGEKCLLDEEAVRVGGFNHSHATQDLHDSIAAGNYPEWKLYIQTLDPEQEDKFDFDPLDVTRICPEDVLPLQPVGRMVLNKNIDNFFAENEQLAFCPAIIVPGVYYSDDKLLQTRIFSYADSQRHRLGPNYLQIPANAPKCAHHNNHHEGFMNFMHRDEEVNYFPSRYDPVRHAERIPVPPRILDGKREKCMIEKENNFKQPGERYRSWASDRQERFLRRWVDALSEPRVTHEIRSIWISYWSQADRSLGQKIASHLN

SEQ ID NO: 4774 - protein, 488 aa, Oceanobacillus iheyensis HTE831
MKLSKKQIVLILVGALLLGFAGAYGGFQLAQDNNQQSSQSSVENSSTNEDDSNGQSELTGDLSKVSQAYDIIKENYLEDVEDKQLVEGAIEGMLATLEDQHTSYLDVEMMQQFNEQIESSFEGIGAEVSMVNGNVTIVSPMKGSPAEESGLRPNDQVLKVDGESLEGLNLNEAVAQIRGEKGSEVVLEIQRSGVTEPFEVTIVRDTIPVETVYSETKEVDGKLTGIIEITNFSEKTGDEFDQQLTELENQGIEGLVIDVRGNPGGLLNVAEDILKHLVPKDLPILQIEDGEGQVEEVYSDLEEKKEYPISVMIDEGSASASEILAVAMKDLGYDIVGETSYGKGTVQQAVPMGDGSSIKLTTLKWLSPKGEWINEEGVEPTIEEKQPEYYYSIPIQVEEPFSLDETSEEIANMQVMLTGLGYDTGRTDGYFDEQTAEAVKDFQADNDLEATGEVDSETGGLIETQLVEKIRNGEDDQQLDTSLEELYQ

SEQ ID NO: 4775 - protein, 252 aa, Brassica juncea
MAYQTELGGESSSQRKAGRGKIEIKRIENTTNRQVTFCKRRNGLLKKAYELSVLCYAEVALIVFSSRGRLYEYSNNSVKGTIERYKKAISDNSNTGSVAEINAQYYQQESAKLRQQIISIQNSNRQLMGETIGSMSPKELRNLEGRLDRSVNRIRSKKNELLFAEIDYMQKREVDLHNDNQLLRAKIAENERNNPSMSLMPGGSNYEQIMPPPQTQPQPFDSRNYFQVAALQPNNHHYSSAGREDQTALQLV

SEQ ID NO: 4776 - protein, 365 aa, Ipomoea batatas
MVGGGDFLAVQTHGGQYVQYDIFGNLFEVTSKYAPPITPIGRGAYGIVCSALNAETNEMVAIKKIADAFDNYMDAKRTLREIKLLRHLEHENVIAIKDVIPPPLRREFNDVYIATELMDTDLHQIIRSNQGLSEEHCQYFLYQILRGLKYIHSANVIHRDLKPSNLLLNSNCDLKICDFGLARTNLDNEFMTEYVVTRWYRAPELLLNSSDYTAAIDVWSVGCIFMELMNRKPLFQGKDHVHQMRLITELLGTPTDSDLGSIQNENARRYIRQLPLRPRQQLANGFPHVHPLAIDLMDKMLTFNPSKRITVEEALAHPYLAQLHDKSDEPICPVPFTDFEKQAYGEEQIKDMIYQEALAMNPGYA

SEQ ID NO: 4777 - protein, 135 aa, Zea mays
MRKHRIVSLVAALLVLLALAAVSSTRNAQEESAADNAGMLAGGIKDVPANENDLQLQELARFAVNEHNQKANALLGFEKLVKAKTQVVAGTMYYLTIEVKDGEVKKLYEAKVWEKPWENFKELQEFKPVEEGASA

SEQ ID NO: 4778 - protein, 668 aa, Moorella thermoacetica ATCC 39073
MVVAYTRLFEPIKIGKVEIKNKIAMAPMGVLGLATQDGCFSKRVVDYYVERAKGGTGLIITSVTKVDNEIERFKAGAVPVATANPLHFIATAGELTERVHAYGTKIFLQLGMGFGRVAAPILLESHPVAPSALPNFWDPSITCRELTTAEVETLVQRASEAAEIAVEAGFDGVEIHAMHEGYLLDQFTIALFNRRGDKYGGALEDRLTFPIEIVRAIKDRVGKDFPVVLRFSIKNYIKDWRQGGLPGENFQEKGRDVEEALAAAKILEGAGYDGFDADAGSYDAWYWAHPPVYQKHGCYLPLTQRLKEVVKVPVIVAGRLEIPELAEEALVKGQADMIAIGRGLLTDPYWVNKVMTGRSKNIRPCIGCHDGCLGRGFLGRPLSCTVNPACGREEEYAIDRAPEAKQVMVIGGGVAGMEAARVAALRGHRVSLYEKSDRLGGHVVEAAVPDFKADDGRLLEWYKTELGELQVEIHLNQEVTPEFVEEKNPDVVVVATGSTPAIPDIPGVNKDKVTTVSDLLLGKKQAGDRVVIIGGGLAGCETALWLAQQGKDVTIIEILDDLMRAGIPVPYMNRMMLLDLLKMNGVKWLTETSVLEVTDDGVTLIGKTYQRSPLPADTVILAVGFAADQRLYNALRDKIPNLYLIGDSREPRNILAAIWEGYEVGRGI

SEQ ID NO: 4779 - protein, 134 aa, Burkholderia fungorum LB400
MEDFVHDPFAARGALERWFGDFSSSRFQPRIDVVDEGKILRVTIELPGMEREDLSVSVEDGALVLRGEKKQDVHSEEDGCYRLERAYGVFTRTIPMPDNADPDHALAKFDKGVLTLTVPKREQLRSASRTIDIG

SEQ ID NO: 4780 - protein, 571 aa, Sorghum bicolor
MAPLLLHASAISHSAHPGLRSHIGPNNEHISRHLSSSSQNTKRRCNISLRSRAQRISSQLGGQKLEHWEIPKRDWFPPSFTFGAATSAFQIEGGWNEDGKGPSTWDHFCHTYPDFIADKSNGDVAADSYHLYEEDVKLLKEMGMDAYRFSISWPRILPNGTLSDINEKGIAYYNNLINLLIDNGIEPYVTIFHWDTPQALVDDYGGFLDKRIIKDYTDFAGLCFERFGDRVNNWLTFNEPHTFTCLSYGTGILAPGRCSPGMKCPDPTGDSIREPYLVGHNFLLAHAETVDLYNKFHRGEKGRIGLALNVMGTVPYGSTFLDEQAHERCMDYNLGWYLEPVVRGDYPHSMRSSVRDRLPHFTEKEQQKLVGSYDMIGINYYSSRFAKHVDITENFSPELNTHDCCATEEITGPNGNTIGPATGNAWVYMYPKGLKDILMIMKKRYGNPPVYITENGMGDIDNGDLSMEAALDDHIRLDYLQRHISVLKDSIDSGANVRGHFTWSLLDNFEWSSGYTERFGIVYVDRENGCKRTLKRSARWLKEFNGAAKRPGNLIKPNFSEINKIKVVTPA

SEQ ID NO: 4781 - protein, 389 aa, Azoarcus sp. EbN1
MLAGLIDLPWWGYILVALGLTHVTIASVTIFLHRHQAHRALELHPIASHFFRAWLWLTTGMVTKEWAAVHRKHHAKCETADDPHSPQVLGIRKVLFEGAELYRAEAGNKETLARYGHGTPDDWLERHIYRHSIVGISIMLITDLVLFGPLGLTIWAVQMMWIPIWAAGVVNGLGHYIGYRNFDCSDAATNLVPWGILIGGEELHNNHHSFATSAKLSAKWYEFDIGWMYIRMLALLGLAKVRKVIPSPKFGEAKNVPDLDTLQAIITHRYDVMTRYVASLKRLCGDEIERLAATHGRSFNPRALRRWVLSGEDRNLAPDDRRTLELVIVDSAALSTIASMRRDLVAIWGRSTASREQLLKQLHDWIARAEQSGIAQLQEFSFRLRQYTA

SEQ ID NO: 4782 - protein, 197 aa, Solibacter usitatus Ellin6076
MATKQDTADDRQNAQRQENTQIARKSPGWMFRNEPGILGSRGSFFTNPYQLMRRMTEEMDRTFGFGGSGEVGPWSPATEVVERDGKYIVRSELAGLKPEEVKVEVTDGELIIQGERKSEHEETQGRYRRSEHRYGQFYRSIALPEGVDPAQVHARFENGMLEVTIPAPPQQQSQRRQIPIEGTSGGRNPNPSPEPHG

SEQ ID NO: 4783 - protein, 510 aa, Glycine max
MDGRASSSVGGEASPAPAPVPITNANAPPPFLSKTYEMVEDPSTDSIVSWSPTNNSFVVWNPPEFARDLLPKHFKHNNFSSFVRQLNTYGFRKVDPDRWEFANEGFLRGQKHLLKTITRRKPAHGHNQQAQQAHGQSSSVGACVEVGKFGLEEEVEILKRDKNVLMQELVRLRQQQQATDNQLQSMVQRLQGMEQRQQQMMSFLAKAVQSPGFLAQFVQQQNESSRRITEANKKRRLKQEGIGEMEHTAASDGQIVKYQPLINEAAKAMLRQMMKLDTSRLESFSNNADNYLIGDHSSSSGATDRGNSLSRTSGVTLQVVPLTTIQSSHIPSATGIGDDPSTGKSEILSTPQVVACDEVTKAQYSNVNVSVGESNAPAIPATQTDEIMRDLSTIPDIVAGNILDIPQENYMAPETGGEGYMDPTSFGVNVSLPIDFDSISPEADIDDLLNNPHFWDDILRTPVSEEIDTNDAEVFKENEVQPMENGLDESQNMDQLTEQMGLLSSDAKRI

SEQ ID NO: 4784 - protein, 232 aa, Zea mays
MYRAKRAALSPKVKRRVGKYELGRTIGEGTFAKVRFAKNTENGEPVAIKILDKEKVKRHRLVEQIKREICIMKLVRHPNVVRLFEVMGSKARIFIVLEYVTGGELFEIIATNGRLKEDEARKYFQQLINAVDYCHSRGVYHRDLKLENLLLDAAGNLKVSDFGLSALTEQVKADGLLHTTCGTPNYVAPEVIEDGGYDGATADIWSCGVILFVLLAGYLPFEDDNIIALYKK

SEQ ID NO: 4785 - protein, 190 aa, Salvinia natans
DEHGEVVAEIRRSDLEPYLGLHYPATDIPQASRFLFMKNRVRMICDCRALNVRIIQDRELKQPISLAGSTLRAPHGCHSQYMGNMGSIASLVMAVIVNDNDEEGSSHAHQPKLRKLWGLVVCHHTSPRAVPFPLRSACEFLMQVFGLQLNMEVELAAQMREKHILHTQSLLCDMLLRDAPIGIVSESPNI

SEQ ID NO: 4786 - protein, 635 aa, Oryza sativa
MDGSCDCIEPLWQADDLLVKYQYISDFFIALAYFSIPLELIYFVKKSAFFPYRWVLIQFGAFIVLCGATHLINLWTFAIYTKTIAVVLTVAKAATAVVSCITALMLVHIIPDLLNVKLRERFLKDKADELDREMGIIRTQEETGRHVHMLTHEIRSTLDRHTILRTTLVELGRTLVLAECALWMPTRSGSALQLSHTIYNSAAIGSVVPINLPIVSKVFNSNRVVKIPHTSPLASITADKSRYVPPEVVAIRVPLLHLTNFQINDWPELSAKSFAVMVLMLPPDSAREWRPHERELVEVVADQVAVALSHAAILEESMRARDLLMEQNIALDAARREAEMAICARNDFLAVMNHEMRTPMRAIVSLSSLLLETNLSAEQRLMVETILKSSDLLATLTNDVLDVSKLENGSLELEIAPFNLHSTFTDVVNLIKPVAACKRLSVMVTLAPELPLHAIGDQKRLMQIILNVAGNSIKFTKEGHVSITASMARPDALRGPHEPDYHPVVSDGFFYLAVQVKDTGCGISPQDMPHTFRKFAHPENAGKWNSGSGLGLALSRRFVSLMEGNIWLESEGVGKGCTAMFFVKLGMPEKPNANLRRMAPHPLQPNQGAGGPDALSISIMDSNPRVPRVRYQSSV

SEQ ID NO: 4787 - protein, 494 aa, Secale cereale
MDPCKFRPSSSFDTKTTTTNAGQPVWNDNEALTVGPRGPILLEDYHLLEKIAHFARERIPERVVHARGASAKGFFECTHDVTGLTCADFLRAPGARTPVIVRFSTVIHERGSPETIRDPRGFAVKFYTREGNWDLLGNNFPVFFIRDGIKFPDVIHAFKPNPKSHVQEYWRVFDFLSHHPESLHTFFFLFDDVGIPTDYRHMDGFGVNTYTFVTRAGKSHYIKVHWRPTCGVSCLMDDEATLVGGKNHSHATQDLFDSIDAGNFPEWKLFVQVIDPEEEDRFDFDPLDDTKTWPEDLVPLQPVGRLVLDRNVDNFFNENEQLAFGPGLVVPGIYYSDDKMLQCRVFAYADTQRYRLGPNYLMLPVNAPKCGFKNNHYDGAMNFMHRDEEVDYYPSRHAPLRQAEPASFPVPTRPVVGKREKTRIKKENDFVQPGERYRSWAPDRQDRFVRRFADALAHPKVSHELRVIWIDFLSKCDKSCGMKVANRLNVKPSM

SEQ ID NO: 4788 - protein, 253 aa, Zea mays
MDASLAGVVLRRGHMISIGHRKIRSIHYLHRPHPPVRGYSSHHYKERIVTHREFVMDQDDYLSLCLAAALVAASQQAAGDAPPLRARAAASELRPLHFRCPICGKAFASYQALGGHKASHRKPAAAAAAYDGKAPSSPSSSGQHQKGAVAAGIGGASAGGRHVCTVCHRYFATGQALGGHKRFHYLHGPSVPASSLPPSTAGAAAGVGWLDLNLTPLAPDVSFAGVRRRRGEDDEVQSPLPLPAKKHRASTSA

SEQ ID NO: 4789 - protein, 191 aa, Salvinia natans
DEHGEVVAEIRRSDLEPYLGLHYPATDIPQASRFLFMKNRVRMICDCRAPSVRIIQDKELPQPLSLVGSTLRAPHGCHAQYMANMGTIASLVMAVVVNDNDEETRCKTPHYSKARRLWGLVVCHHTTPRVVPFALRSACEFLVQVFGLQLNMELELAAQMREKHILRTQTLLCDMLLRDAPIGIVSESPNI

SEQ ID NO: 4790 - protein, 394 aa, Nassella viridula
EPARTEIPALSIAGAVQSQKLAVRAISRLQALPGGDVKLLCDTVVEHVRELTGYDRVMVYKFHDDEHGEVLAESRRADLEPYLGLHYPATDIPQASRFLFRQNRVRMIADCHAAPVRVIQDPAMQQPLCLVGSTLRSPHGCHAQYMANMGSIASLVMAVIISSGGDDEHNMGRGTIPSAMKLWGLVVCHHTSPRCIPFPLRYACEFLMQAFGLQLNMELQLAHQLSEKHILRTQTLLCDMLLRDSPTGIVMQSPSIMDLVKCDGAALYYHGKYYPLGVTPIEAQIKDIIEWLTVCHGDSTGLSTDSLADAGYSGATALGDAVCGMAVAYITPSDYLFWFRSHTAKEIKWGGAKHHPEDKDDGQRMHPRSSFKAFLEVVKSRSLPWENAEMDAIH

SEQ ID NO: 4791 - protein, 644 aa, Streptomyces sp. 139
MCGIAGTYRWPDGKAVTDRLTETLAHRGPDGSGGYSHALGDGEVHLGHRRLAILDLSENGAQPMVSGGLALTYNGELYNAPELRAELEGAGVRFRGTSDTEVLLEAWRRWGTDCLPRLRGMFAFAVFDERTGDLVLVRDQLGIKPLFLLRRGKGLVFASELKALAAVTGGSLEVDPAALVASLLYYWVPDSRCAFRGAEKLPPGTWLRCRADGSVSAAGSGTCARSPPRAGAGTVRYLPDLAAVVEESTRRHLLSDVPVATFLSGGLDSSYLTALAARDRPGIPAYTIGFRAEDARFEAMPDDLRYARRVAERFGVDLREIEIAPDVLDLLPRMTYHLDEPVGDPAAINTFLICSAAREAGVKVMLSGMGADELFAGYRKHLANLIAVRYRHVPGPVRRGVASAVDRLPVATSRRGLRSVRFAKRFLSFAGLPEETAFRRSYTLYDRQELAGLLDPDLAPAVDDVLAEHADVYQDNELDDFVNRMCLADARMFLPGLNLAYTDRSSMAASTEVRVPYVDVEVVRAAFAVPGARKIAGRQGKAVLKEAATTVLPREIVYRPKGLFSAPLRAWMSRDLAPLVREVVNDGLLVRSGFLRREALARMVAEDAAGQRDFSKHLWHVLTLEYWYRDATSRAGRNSPTSTA

SEQ ID NO: 4792 - protein, 942 aa, Yersinia pseudotuberculosis IP 32953
MTKYSLRARMMILILAPTLLLGLLLSTSFMVNRYNELQNQIVSAGTNIIEPLAVASEYGMSFRNRDTVRQLINLLHRRHSNIVRSISVFDVDNKLFVTSNYNYNSSQLRLPPGEPVPDSLMLSYRGDSLILRMPIVSESNLSSEQASGQGESDQILGYIAIDLDLQSVRLKQYKEIFISTLLLLFCMCVAILFAYRLMRDVTGPIRNMVNTVDRIRRGQLDSRVEGHMLGELNILKNGINSMAMSLAAYHEEMQQNIDQATSDLRETLEQMEIQNVELGLAKKRAQEASRIKSEFLANMSHELRTPLNGVIGFTRQTLKTSLTPTQTDYLQTIQRSANNLLCIINDVLDFSKLEADKLILEHIPFSLRGTLDEVIILLAHTAHEKGLELTLHINNDVPDQVLGDAMRLQQIVTNLLGNAIKFTEEGNIDILVVVKAIASQQVTLMVEIHDTGIGISESQQAQLFQAFRQADASTSRRHGGTGLGLVITERLVKEMGGNISFQSQMSCGSIFRFHLTLELNESIPYRQPDMAHLEGKQLAYIERNSTAARATINILNTTPLQVTHRQSLAQLPEQHYDFLLVGVPIPFRNNMAIHQDKLLTALKIADHVILALPSQSQVEAEQLKQIGAKGCLLKPISSIRLIPLLLAEDTHSKVPSEEQPRKQPKLPFRVMAVDDNPANLKLIGTLLEEQIEETVLCDSGAMAITYAREHTLDIILMDIQMPEIDGIRASEIIHQIPHHQETPIIAVTAHAVKGQQEQLLRLGMADYLAKPIDEARLLQVLSRYQSDNPPLSTASTASTASTASTASTASTASTASTAESLPLPVPKGAGVIDWAQAVRQAANKEDLARDLLTMLLEFMPQITARVQAILAGADDGDILNLVHKFHGSCACSGVPRLRQLCMTIELQLRQQVNLQDLEPEWLELLDEIENVSEAAKTYLRTE

SEQ ID NO: 4793 - protein, 394 aa, Olyra latifolia
EPARTEDPALSIAGAVQSQKLAVRAISRLQALPGGDVKLLCDTVVEHVRELTGYDRVMVYRFHEDEHGEVVAESRRADLEPYLGLHYPATDIPQASRFLFRQNRVRMIADCHAAPVKVIQDSALQQPLCLVGSMLRAPHGCHAQYMANMGSIASLVMAVIISSGGDDEHNITRGGIPSAMKLWGLVVCHHTSPRCIPFPLRYACEFLMQAFGLRLNMELQLAHQLSEKHILRTQTLLCDMLLRDSPTGIVTQSPSIMDLVKCDGDALYYHGKYYPLGVTPTEVQIKDIIEWLTVCHGDSTGLSTDSLADAGYPGAAALGDAVCGMAVAYITPSDYMFWFRSHTAKEIKWGGAKHHPEDKDDGQRMHPRSSFKAFLEVVKSRSLPWENAEMDAIH

SEQ ID NO: 4794 - protein, 393 aa, Panicum capillare
EPARTEAPALSIAGAVQSQKLAVRAISRLQALPGGDVKLLCDTVVEHVRELTGYDRVMVYRFHEDEHGEVVAECRRDNLEPYLGLHYPATDIPQASRFLFRQNRVRMIADCHATPVRVIQDPGLSQPLCLVGSTLRAPHGCHAQYMANMGSIASLVMAVIISSGGDDEQTARGGISSAMKLWGLVVCHHTSPRFIPFSLRYACEFLMQAFGLQLNMELQLAHQLSEKHILRTQSLLCDMLVRDSPTGIVTQSRSIMDLVKCDGAALYYHGKYYPLGVTPTESQIKDIIEWLTVCHGDSTGLSTDSLADAGYHGAAALGDAVCGMAVAYITPSDYLFWFRSHTAKEIKWGGAKHHPEDKDDGQRMHPRSSFKAFLEVVKSRSLPWENAEMDAIH

SEQ ID NO: 4795 - protein, 355 aa, Halobacterium sp. NRC-1
MTRGEARRPPQEFDRVLSSMCTTPHPAAREAAQAFLATNPGDPETYPAVAERERDAVALLGEIVGLSSPHGYIAAGGTEANLQAVRAARNRADADAVNVVAPASAHFSFQKAADVLGVELRLAPTDGDHRADVAAVADLVDGDTAVVVGVAGTTEYGRVDPIPALADIAAGVDANLHVDAAWGGFVLPFTDHDWSFADAPVNTMAIDPHKMGQAPVPAGGFLARDPETLDALAIETPYLESDTQPTLGGTRSGAGVAGALASLRALWPDGYREQYERTQGNAEYLAAELAARGYDVVDPELPLVAADMPDAEFQALREEGWRISRTASDALRVVCMPHVTREMLAAFLDDVDALA

SEQ ID NO: 4796 - protein, 394 aa, Pariana radiciflora
EPARTEDPAISIAGSVQSQKLAVRAISRLQALPGGDVKLLCDTVVEDIRELTGYDRVMVYRFHEDEHGEVVAESRRADLEPYLGLHYPATDIPQASRFLFRQNRVRMIADCHTAPVRVIQDPALPQPLCLVGSTLRAPHGCHAQYMANMGSIASLVMAVIISSGGDDSHNSSRGGIPSAMKLWGLVVCHHTSPRCIPFPLRYACEFLMQAFGLQLNMELQLAHQLSEKHILRTQTLLCDMLLRDSPTGIVTQSPSIMDLVKCDGAALYYHGKYYPLGVTPTEAQIKDIIEWLTLCHGDSTGLSTDSLADAGYPGAAALGDAVCGMAVAYITPSDYLFWFRSHTGKEIKWGGAKHHPEDKDDGQRMHPRSSFKAFLEVVKSRSLPWENAEMDAIH

SEQ ID NO: 4797 - protein, 372 aa, Methanopyrus kandleri AV19
MILQRDSDYSDGTVLGSMCTEPHPVAAEAFVAGLHVNLGDPYLFPNAYRAERECIGWLAETLLDHPAPEEAEGSIVSGGTEANILAAYAAREVTGGREIIVPATRHFSFEKAARMLRMKLVEAPLRSDYTVDVDAVQDLISRDTALIVGIVGTTETGSVDDIEALSDVAEDHGVPLHVDAAFGGFTAPFLREEYPLPRFGFDLEAVVSVTVDPHKMGLVPPPAGGIVFRDDEFPKAIEVYAPYLSGGGASQYTITGTRPGAPVLALYANILELGEEGYRRIAFRCYEETLKVAEKARELGLELAVDPPHLNLVNIRLPDRGTAERLLRESEREGWKISVSTKPLGVRIVMMPHLDAETVSRFLELVARVLGG

SEQ ID NO: 4798 - protein, 353 aa, Pennisetum alopecuroides
TGYDRVMVYRFHEDQHGEVVAECRRDNLEPYLGLHYPATDIPQASRFLFRQNRVRMIADCHATPVRVIQYPGLSQPLCLVGSTLRAPHECHAQYMANMGSIASLVMAVIISSGGDDEQTTRGGISSAMKLWGLVVCHHTSPRFIPFPLRYACEFLMQAFGLQLNMELQLAHQLSEKHILRTQTLLCDMLLRDSPTGIVTQSPSIMDLVKCDGAALYYHGKYYPLGVTPTESQIKDIIEWLTVCHGDSTGLSTDSLADAGYHGAAALGDAVCGMAVAYITPSDCLFWFRSHTAKEIKWGGAKHHPEDKDDGQRMHPRSSFKAFLEVVKSRSLPWENAEMDAIHSLQLILRDSFR

SEQ ID NO: 4799 - protein, 467 aa, Lycopersicon esculentum
MKLLSKKAMCNSHGQDSSYFLGWEEYQKNPYDEIRNPKGIIQMGLAENQLSFDLLESWLTLNPDASAFKRNGHSIFRELSLFQDYHGLPAFKDALVQFMSEIRGNKVSFDSNKLVLTAGATSANETLMFCLADPGHAFLLPTPYYPGFDRDLKWRTGAEIVPIQCTSSNGFRITESALEEAYTEAERRNLRVKGVLVTNPSNPLGTTLTKKELQLLLTFVSTKQIHLISDEIYSGTVFNSPKFVSVMEVLIENNYMYTDVWDRVHIVYSLSKDLGLPGFRVGAIYSNDDRVVSAATKMSSFGLISSQTQYLLSALLSDKKFTKNYVSENQKRLKKRHEMLVGGLKQIGIRCLESNAGLFCWVDMRHLLSSNTFDGEMELWKKIVYEVGLNISAGSSCHCTEPGWFRACFANMSEDTLNIAIQRLKAFVDSRVNNKDDIQNQQQCSNKKKSFSKWVFRLSFNERQRER

SEQ ID NO: 4800 - protein, 1177 aa, Methylococcus capsulatus
MSEDLTSPPAMRQRFLRSLGSICLIVILAEVIVMTLLGAFHRGGLELVRWQESALDGLLLGLFSAPLLWIMALRPLAQQIARESQRNKELLDALDAHALVSITDLQGRILYANDNFCAVSRYGREELVGQDHRIVNSGYHGKAYIRDMWRTISRGNIWQGEFCNRRKDGTRYWVDSTIVPLMDNAGKPRQYISIRRDITAQKEAEAQLARLKQAMDANSEMILLTDRAGRIIYANPALCRFSGMAEGELLGQSPSILDSPLADQETLAAMQEALQAGQPWSGRLLNRRRTGPAPHDAEDYWAEISTTPIHTDGNGLVGYVQIQHDVSARVERERALAMEQEDTAARLRITETLQQSAPLDERCRQVLRILFELGTFGLQRKGGIFLKAEHGNCLKLFVLEGKFCDEFVRREQTIPMGACLCGRSAVSGEILVSDDCFQDHRHEHRFEDMESHGHYIVPIASGGDLLGVLFLYTDPNPTRSEARMVMLRQVGEMLALAILEDRAKASLKAAHDAAVDAAQAKSAFLANMSHEIRTPMNGVLGMLELLKDTDMSREQWDLVETASNSAESLLEIINSILDFSKLEAGKVEIERTEFNLPDLVEEVCALLAGRAHDKGLELNCFLPADLPRMWIGDPTRIRQILTNLLGNSVKFTERGEVSVKVMQGEAGAKRTDLSFEIRDTGIGIAPDVQARLFQPFTQADGSTSRRFGGTGLGLSICRNLVELMGGTIGLESAPGRGSRFWFTLPLEPLPGASAPALPDFSHRRVLVVDDNATNRVILSHYLTHWGLEVDEAERGDTALNRLRTALHESRPYDIVLLDLHMPYMDGHELARAMNAEPGLKDTPRLLLSSGGLTGEAELRALGIARSLLKPVRQSLLFNAIAEVLAAKATVQRRPAAKTETVLPAYEGRRVLVVEDNRVNQKVIVAMLGKFGIVPDVADNGQAALELLARSSYDLVLMDCQMPVLGGYEATGELRAREMSAGGRRTPVVALTAHAATGEREKCLAAGMDDYLSKPISRDRLAEALERWLGHPAAPASAETGQGAVNDDGGDRPAGLSWNREETLARLDHDEALLAEMIALCIEELPRHLAALQEAGAANDIAALADAAHAIKGMAGHFCAGSVRDLAARLEDQARKAGSMPDAASIGALETAAARLLEDLHGGSPAGDPAKGTNDAAQ

SEQ ID NO: 4801 - protein, 800 aa, Saccharomyces cerevisiae
MASVPKRHTYGGNVVTDRDRHSLQRNNEILHPIHKNQRKHATFGPYIIGSTLGEGEFGKVKLGWTKASSSNEVPKQVAIKLIRRDTIKKDADKEIKIYREINALKHLTHPNIIYLEEVLQNSKYIGIVLEFVSGGEFYKYIQRKRRLKESSACRLFAQLISGVNYMHYKGLVHRDLKLENLLLDKHENLVITDFGFVNEFFEDNELMKTSCGSPCYAAPELVVSTKAYEARKADVWSCGVILYAMLAGYLPWDDDHENPTGDDIARLYKYITQTPLKFPEYITPIPRDLLRRILVPNPRRRINLQTIKRHVWLKPHEAFLSIQPNYWDEHLQKERPKPPNKGDVGRHSTYSSSASSYSKSRDRNSLIIESTLEQHRMSPQLATSRPASPTFSTGSKVVLNDTKNDMKESNINGERTSASCRYTRDSKGNGQTQIEQVSARHSSRGNKHTSVAGLVTIPGSPTTARTRNAPSSKLTEHVKDSSQTSFTQEEFHRIGNYHVPRSRPRPTSYYPGLSRNTADNSLADIPVNKLGSNGRLTDAKDPVPLNAIHDTNKATISNNSIMLLSEGPAAKTSPVDYHYAIGDLNHGDKPITEVIDKINKDLTHKAAENGFPRESIDPESTSTILVTKEPTNSTDEDHVESQLENVGHSSNKSDASSDKDSKKIYEKKRFSFMSLYSSLNGSRSTVESRTSKGNAPPVSSRNPSGQSNRSNIKITQQQPRNLSDRVPNPDKKINDNRIRDNAPSYAESENPGRSVRASVMVSTLREENRSELSNEGNNVEAQTSTARKVLNFFKRRSMRV

SEQ ID NO: 4802 - protein, 395 aa, Peridictyon sanctum
EPARTEDPALSIAGAVQSQKLAVRAISRLQALPGGDVKLLCDTVVEHVRELTGYDRVMVYKFHDDEHGEVLAESRRVDLEPYLGLHYPATDIPQASRFLFRQNRVRMIADCHAAPVRVIQDPAMPQPLCLVGSTLRSPHGCHAQYMANMGSIASLVMAVIISSGGEDEHNMTRGVIPSAMKLWGLVVCHHTSPRCIPFPLRYACEFLMQAFGLQLSMELQLAHQLSEKHILRTQTLLCDMLLRDSPTGIVTQSPSIMDLVKCDGAALFYHGKYYPLGVVTPTEAQIKDIIEWLTVCHGDSTGLSTDSLADAGYPGATALGDAVCGMAVAYITPSDYLFWFRSHTAKEIKWGGAKHHPEDKDDGQRMHPRSSFKAFLEVVKSRSLPWENAEMDAIE

SEQ ID NO: 4803 - protein, 394 aa, Phalaris arundinacea
EPASTEDPALSIAGAVHSQKLAVRAISRLQALPGGDVKLLCGTVVEHVRELTSYDRVMVYKFHDDEHGEVLAESRRADLEPYLGLHYPATDIPQASRFLFRQNRVRMIADCHAAPVRVIQDPAMPQPLCLVGSTLRSPHGCHAQYMANMGSIASLVMAVIISSGGEDEHSMGRGAVPSAMKLWGLVVCHHTSPRCIPFPLRYACEFLMQAFGLQLNMELQLAHQLSEKHILRTQTLLCDMLLRDSPTGIVTQSPSIMDLVKCDGAALYYHGKCYPLGITPTEAQIKDIIEWLTVCHGETTGLSTDSLADAGYPGATALGDAVCGMTVAYITPSDYLFWFRSHTAKEIKWGGAKHHPEDRDDGQRMHPRSSFKAFLEVVKSRSLPWENAEMDAIH

SEQ ID NO: 4804 - protein, 555 aa, Glycine max
MEGIISGVWNVLLQYFRSYKVAKTAVLNYITPFTDKFDLVDILLVWTVIVVIGTVIYRNVNYARKHGFRKTVTAWFFRRLKRISFITNKIDGEISKLASSLEADIQKHRDASKTTHIPTTGLSEEALVKKLAQWQKIDHKIYGEKKITGCIYYNEGEKLQTIVKDVAKEYFYINPLHFDLFPTANQMEGEVIYMVKNLYNGDDKSCGILSSGGTESIMIAMLAYREQGRINGIFEPEIVAPITAHVAFENAAFYYGMRMKWVPVDIKTGVVSPHDIKKAISKDTVCVIGSYPNYPYGTCDPIEQLAAIAKKKKVGFHTDCCLGGFVAPFAEKFGAMSEVFDFRVPGVTSISVDPHKYGLAPKGVSVVLFRDRKLRGGSFFSCTTWPGGIYSTPTHAGSRGHAPVAGAWVALQYTGYNGYMDKAGKIIEATRRVAKKISEIPELQVVGNPQLGSVAFVTKTNKLSIYDLVDKIGQRGWKLAALQLPPAVHLSITNYNIGQIEDFIASVKWGVTELLKAGPPKVQGELAQIYGSNAKLPESIMQDGAKVILEGLLKP

SEQ ID NO: 4805 - protein, 394 aa, Pharus lappulaceus
EPARTEDPALSIAGAVQSQKLAVRAISRLQALPGGDVKLLCDTAVEHVRELTGYDRVMVYRFHDDKHGEVVAESRRDDLEPYLGLHYPETDIPQASRFLFRQNRVRMIADCHAAPVRVIQDPALPQPLCLVGSTLRAPHGCHAQYMANMGSIASLVMAVIISSGGDDEHNVARGAISSAMKLWGLVVCHHTSPRCIPFPLRYACEFLMQAFGLQLNMELQLAHQLSEKHILRTQTLLCDMLLRDSPTGIVTQSPSIMDLVKCDGAALYYHGKYYPLGVTPTEAQIKDIIEWLTLCHGDSTGLSTDSLADAGYPGAAALGDAVCGMAVAYITPSDYLFWFRSHTAKEIKWGGAKHHPEDKDDGQRMHPRSSFKAFLEVVKSRSLPWENAEMDAIH

SEQ ID NO: 4806 - protein, 388 aa, Phragmites australis
EDPALSIAGAVQSQKLAVRAISRLQALPGGDVKLLCDTVVEHVRELTGYDRVMVYRFHEDEHGEVVAESRRADLETYLGLHYPATDIPQASRFLFRQNRVRMIADCHATPVRVIQDPGLPQPLCLVGSTLRAPHGCHAQYMANMGSIASLVMAVIISSGGDDEQTARGSISSTMKLWGLVVCHHTSPRFIPFPLRYACEFLMQAFGLQLNMELQLAHQLSEKHILRTQTLLCDMLLRDSPTGIVTQSPSIIDLLKCDGAALYYHGKYYPLGVTPTEFQIKDIIEWWTVCHGDSTGLSTDSVADAGYLGASALGDAVCGMAVAYITSSDYLFWFRSHTAKEIKWGGAKHHPEDKDDGQRMHPRSSFKAFLEVVKSRSLPWENAEMDAIH

SEQ ID NO: 4807 - protein, 179 aa, Mortierella sp. M10
HRLWSHRSYNAGPAMSFVLALLGAGAVEGSIKWWSRGHRAHHRWTDTEKDPYSAHRGLFFSHLGWMLIKRPGWKIGHADVDDLNKNKLVQWQHKNYLALIFLMGVVFPTAVAGLGWGDWRGGYFYAAILRLVFVHHATFCVNSLAHWLGEGPFDDRHSPRDHFITAFMTLGEVYHNFHH

SEQ ID NO: 4808 - protein, 394 aa, Pseudosasa japonica
EPARTEDPALSIAGAVQSQKLAVRAISRLQALPGGDVKLLCDTVVEHVRELTGYDRVMVYRFHDDEHGEVVAESRRADLEPYLGLHYPATDIPQASRFLFGQNRVRMIADCRAAPVGVIQDPVLPQPLCLVGSTLRAPHGCHAQYMANMGSIASLVMAVIISSGGDDENNITRGGIPSAMKLWGLVVCHHTSPRCIPFPLRYACEFLMQAFGLQLNMELQLAHQLSEKHILRTQTLLCDMLLRDSPTGMVTQSPSIMDLVKCDGAALYYHGKYFLLDVTPTEAQIKDIIEWLTMCHGDSTGLSTDSLADAGYPGAAALGDAVYGMAVAYITPTDYLFWFRSHTAKEIKWGGAKHHPDDKDDGQRMHPRSSFKAFLEVVKSRSLPWENAEMDAIH

SEQ ID NO: 4809 - protein, 547 aa, Xylella fastidiosa Dixon
MAAKEIIFSEKARSRMVYGVNLLANAVKATLGPKGRNVVLDKNFGSPIITKDGVSVAKEIELADKFENMGAQMLKEVASKTNDHAGDGTTTATVLAQALIREGCKAVAAGMNPMDLKRGIDKAVIAAVTELKKISKPTSDDKAIAQVATISANSDESIGNIIAEAMKKVGKEGVITIEEGTTLENELDVVEGMQFDRGYSSPYFINNQQSQIVELDNPYILLHDKKISNVRDLLTVLDAVAKESKQLLIVAEEVEGEALATLVVNNIRGIIKVCAVKAPGFGDRRKAMLEDMAVLTGGTVISEEVGLSLEKATTSHLGKAKKVRVSKENTTIIDGMGDNDAINGRVKQIKTQIEETTSDYDREKLQERVAKLAGGVAVIKVGAATEVEMKEKKARVDDALLATRAAVEEGVIPGGGVALIRVITAISNLKGANEDQTHGIQIALRAMEAPLREIVANAGEEPSVILNKVKEGKGNFGYNAATGEFGDMVNFGILDPTKVTRSALQNAASIAGLMITTEAMIAEAPKKDEPTPPAAGGGMGGMGGMDF

SEQ ID NO: 4810 - protein, 693 aa, Aspergillus nidulans FGSC A4
MCGISAVLSLSEGSICPQALASQMNESLQLIKHRGPDARGQWLSSDYRVGLGHARLSVIDLNPAGNQPFHDPEGTVHAVVNGEIYDHKKYRAKLAHQYEFRSNSDCEIVTALYRHYGISFLNKLRGEFALVLWDAKRKLFLAARDRYGIKSLYYTVVNNRLLVATEIKSFLPFGWQPEWSIENLLRKGWLWDTEMYFKGVHRLEPGQYMVSQNYKFPVVKTYWDMDYPDKRTPFPQTEEQIVLELRKRMLESVRLRLRADVGVGFYLSGGLDSSAIAGMAKYLIQQGEPLGNDSSGDISKMSCYTIRFGEGSGVDESGIKDTFVPEVSDRRLTKSELYPVTLTEEDIASRFEDTVWYTETPIPDVNGMGRVAVGELAHSHGKKVILTGEGSDEHFGGYPDMLSKMFVEPDLSWHPPPFKMPNSSKVFEAGREAVPAAVESLASTKRMLNNSSIFARVDSFYMFPLASATVESEEPDPETAFAESLGAQTLSNISENWHPLNSASYQWTKSILANYILRYIGDGADMVYQIETRPPFLDHHVTEYANRIPPSLKIRYDPVKNDLREKYILREAMRPFITDEVMNRTKRAYLGPSNYREDGPLHRVVKSLLTEDNVNKLGFVDWDRLQEHIVKGFRDGDPRYFRSSLFVAQLVVLSQRFGVKVATTTDALPVTSEILDRTQNNDNMTTVQDRSRL

SEQ ID NO: 4811 - protein, 446 aa, Glycine max
MVIINLGKKKSEREGMRLGKYELGRTLGEGNFGKVKFARNTDSGQAFAVKIIEKNKIVDLNITNQIKREIATLKLLRHPNVVRLYEVLASKTKIYMVLEYVNGGELFDIIASKGKLTEGECRKLFQQLIDGVSYCHTKGVFHRDLKLENVLVDNKGNIKVTDFGLSALPQHLREDGLLHTTCGSPYYVAPEVLANKGYDGATSDTWSCGVILYVSLTGYLPFDDRNLVVLYQKIFKGDAQIPKWLSPGAQNMIRRILDPNPETRITMAGIKEDPWFKKGYIPANPEDEDVHVDNEAFSSHEEPNEAEQRNSGSPTLINAFQLIGMSSCLDLSGFFEKEDVSERKIRFASILSVKDLIDRIEDTVTEMEFRVEKKNGKLKVMRENKVHKTLGCLSVVVEVFEISPSLYVVELRKSYGDGSVYKQLCKKLLNDLGVPPKQGLVRSAAN

SEQ ID NO: 4812 - protein, 235 aa, Haemophilus ducreyi 35000HP
MLKITAIPALQDNYIWAIQQGQEVMIVDPAQADPVFHFLAKNKLNLTTILITHYHQDHIGGIAGLQATYPDLTIYGSHEVAQYVNHIVQAGDHLHLLNSDVEVINSAGHTAQHISFLFAQQYLFCGDALFSAGCGRVFTGDYQAQFNTLQRFKTLPESTLVFPAHEYTLTNLKFAASVLPNNNDIREAQARAETLRAQQQPTLPSTIKQELRINPFLQADNLAEFITLRQQKDQY

SEQ ID NO: 4813 - protein, 511 aa, Kluyveromyces lactis NRRL Y-1140
MGHPTNTADVRKDRVVTNSQGAPINEPFATQRVGQHGPLLLQDFNLLDSLAHFNRERIPERNPHAHGSGAFGYLEITDDITDVCGSAMFDTVGKRTRCLVRFSTVGGEKGSADTARDPRGFAIKFYSEEGNVDWVNNNTPVFFIRDPSKFPHFIHTQKRNPETNMKDADMFWDFLTTEENQVAIHQVMILFSDRGTPASYRNMNSYSGHTYKWSNKQGEWRYVQVHLKTDQGIKNLNNEEATKLAGENPDYCQKDLFENIAKGNYPSWTLYIQTMTEEEAEKLPFSVFDLTKVWPHKQFPLRRVGKMVLNENPENYFAQVEQAAFSPSHTVPYQEASADPVLQARLFSYPDAHRYRLGPNYSQIPVNCPYASKVFNPAIRDGPMNVNGNLGKEPNYLSTSKKYQFIQQSKPIQQHQEVWSGPAMPVHWATSPGDIDFVQARDLYNKVLSKQPGQQKALAHNVAVHVASACPEIQDRVFAMFARVDRGLSENIKKEALSLSPRKAAALNAKL

SEQ ID NO: 4814 - protein, 929 aa, Pseudomonas syringae
YRRTDTCCRRKSVLTKLGIKGRVLLLTILPASLMAAMLGGYFTWMQLSELQSQLLQRGEMIAQDLAPLAANALGRKDKVLLSRIATQTLEQTDVRAVSFLDTDRTVLAHAGPTMISPSPIGSGSQLLSSTGTDATRYLLPVFGSQRHLTSPIIPAEADTLLGWVELEISHNGTLLRGYRSLFASLLLILTGLAFTATLAVRMSRTINGPMSQIKQAVSQLKDGNLETRLPPLGSRELDELASGINRMAATLQNAQEELQLSIDQATEDVRQNLETIEIQNIELDLARKEALEASRIKSEFLANMSHEIRTPLNGILGFTHLLQKSELTPRQFDYLGTIEKSADNLLSIINEILDFSKIEAGKLVLDNIPFNLRDLLQDTLTILAPAAHAKQLELVSLVYRDTPLALSGDPLRLRQILTNLVSNAIKFTREGTIVARAMLEDETEEHAQLRISVQDTGIGLSSQDVRALFQAFSQADNSLSRQPGGTGLGLVISKRLIEQMGGEIGVDSTPGEGSEFWISLKLPKAREDKEESLNIPLGGLRAAVLEHHDLARQALEHQLEDCGLQTIVFNNLENLLNGVTAAHETPAAIDLAVLGVTALEISPERLRQHIWDLENLNCKVMVLCPTTEHALFQLAVHDVYTQLQAKPACTRKLQKALSELIAPRAVRADIGPPLSSRAPRVLCVDDNPANLLLVQTLLEDMGAEVVAVEGGYAAVNAVQQEAFDLVLMDVQMPGMDGRQATEAIRAWEAERNQSSLPIVALTAHAMANEKRSLLQSGMDDYLTKPISERQLAQVVLKWTGLALRNPAPERQNEALEVHVGPLVLDHEEGLRLAAGKADLAADMLAMLLASLDADREAIRVARANQDVHALIERIHRLHGATRYCGVPQLRSACQRAETLLKQNAPHTEEALNDLDKAIIRLEAEARVMA

SEQ ID NO: 4815 - protein, 452 aa, Amylomyces rouxii
MSNIATLTSTARTKTESMKPPLPKTKMPPLFDQPVTSKNWTKFVNWPQAILLCVTPLIALYGIFTTELTKKTLIWSWIYYFITGLGITAGYHRMWSHRAYRGTDLLRWFMSFAGAGAVEGSIYWWSRGHRAHHRWTDTDKDPYSAHRGFFFSHFGWMLVQRPKNRIGYADVADLKADHVVAFQHKYYPYFALGMGFIFPTLVAGLGWGDFRGGYFYAGVLRLCFVHHATFCVNSLAHYLGESTFDDHNTPRDSWVTALVTMGEGYHNFHHQFPQDYRNAIKFGQYDPTKWKIIVLSWFGLAYELKQFPTNEVTKGRLFMEEKRIQAQKAKLSYGTPLKDLPIYTWEEYQSLVLNDNKKWVLIEGVLYDVEEFMKEHPGGMKYLSTAVGKDMTTAFNGGIYNHSNGTRNLLTSLRVGVLRNGMQVMTEADATASLYDDSLEFDSKAALFNKSK

SEQ ID NO: 4816 - protein, 492 aa, Chlamydomonas reinhardtii
MDPAKIRPSSAYNTPYWTTNSGAPVWNNNNSMTVGTRGPILLEDYHLVEKLAQFDRERIPERVVHARGAAAKGFFEVTHDISALTAADFLPAPGVQTPVIVRFSTVVHERGSPETLRDPRGFAVKFYTREGNFDMVGNNMPVFFIRDGMKFPDMVHAFKPNPKSHIQEAWRIMDFLSHHPESCHMLTFLLDDAGIPLNYRHMPGFGVHTMKLINKAGRETYVKFHWVPKCGEKYLLDDEAVMVGRSNHSHATKDLFDAIAAGDYPEWALMVQTMDPADEDKFDFDPLDVTKTWPESLFPMQPVGRMVLNRNVDNFFNENEQVAFCPAIIVPGIGYSDDKLLQTRIFSYADTQRHRLVPNYLLLPVNAPRAPHHNNHHEGFMNFMHRDEEINYFPSRFDPVRNAEGWLPCRVPLSGRREKMVIAKENNFMQAGARWRAFDAARQERFVVRVADMLADPRCTQEIRRIWVGYWSQADPQLGAGIAAKLQGRGCL

SEQ ID NO: 4817 - protein, 731 aa, Corynebacterium efficiens YS-314
MTPASANDLLIPEEDLNRLRHCHHHNPHGFYGWHATDDGSVIRTRQIGAEKVELVLGDTQIVMNPIGDDIFAIKLGNREAFDYRLRVTWPGQDPVVTADPYIFLPTLGEMDTYLISEGRHERLWDVLGANVKTYETTLGQVRGTAFAVWAPNAIGVAVIGGFNGWNASQHAMRSLGGSGIWELFIPNIGPGEVYKFAIQTREGHRRDKADPMARLAELPPATGSIVVESDYQWQDSEWMDKRAEIDTATTPMSVYEVHLGSWRWGRSYAELATELVDYVADLGYTHVEFMPVAEHPFGGSWGYQVSGYYAPTSRWGSPDELRKLIDAFHARGIGVIIDWVPAHFPKDDWALARFDGQALYEHPDWRRGEQKDWGTYVFNFGRSEVRNFLVANALYWLEEFHVDGLRVDAVASMLYLDYSREHGEWEPNVYGGRENLEAVQFLQEMNATVQRVHPGALTIAEESTSWPGVTAPTWDGGLGFSLKWNMGWMNDTLEYFSKDPIHRSFHHNELTFSLVYAFSERFVLPISHDEVVHGKGSLWNRMPGDTWNKAAGMRTLLAYMWAHPGKKLLFMGQEIGQRDEWSEAHELPWGVVEGWQGEYHEGISDLVRELNSTYKEVTALHQRDFSGEGFTWNKADDASNNILVFTRHGDDGSQALCVFNLSGTSQPEYQIGVSGGGSWRLVLNTDDEQYHGANNPLPETIEAEKIDRDGFPYTTTLHSPAMSAQFYVWEG

SEQ ID NO: 4818 - protein, 540 aa, Burkholderia fungorum LB400
MSAKDVKFHDSARSRIVKGVNVLADAVKVTLGPKGRNVLIERSFGAPTITKDGVSVAKEIELKDRFENMGAQVVKQVASKTADVAGDGTTTATVLAQSIVQEGMKHVAAGMNPMDLKRGIDKAVAAVLDELHRLSKPIKTSREIAQVGAISANADEAIGKIIADAMDKVGKEGVITVEDGKSLENELEVVEGMQFDRGYLSPYFINDPDKQVAHLDDPLILLHDKKISSIRDLLPVLEAAAKAGKPLLIIAEDVEGEALTTLVVNSMRGVLKVAAVKAPGFGDRRKALLEDIAILTGATVISEETGKQLEKATLEELGRAKRVEVQKENTIIIDGAGDQTRIDARVKAIRAQIEEATSDYDREKLQERVAKLAGGVAVIKVGAATEVEMKEKKDRVDDALHATRAAVEEGIVPGGGVALLRARSAISSLTGANADQDAGIRIVLRALEAPLRVIAANAGDEPSVVVAKVLSGKGNYGYNAATGEYGDLVETGVVDPTKVTRTALQNAASIAGLILTTDATVAEAPKEEKAVPAPAPELEY

SEQ ID NO: 4819 - protein, 360 aa, Pseudomonas syringae pv. glycinea
MPTLFDPLTLGDLQSPNRVLMAPLTRGRATREHVPTELMIEYYTQRASAGLIITEATGITQEGLGWPYAPGIWSDEQVEAWKPVTQAVHEAGGRIILQLWHMGRTVHSSFLGGAKPVSSSATRAPGQAHTYEGKQDYDEARPLSADEIPRLLNDYEHAAKNAMAAGFDGVQIHAANGYLIDQFLRDNSNVRGDAYGGSIENRIRLLVEVTRRVAETVGAEKTGVRLSPNGDSQGVNDSNPEPLFSAAAKALDEIGIAHLELREPGYEGTFGKADRPPVHPVIRQAFSRTLILNSDYTLETAQAALATGEADAITFGRPFLANPDLPHRFAERLPLNKDVMETWYSQGPEGYVDYPTADQK

SEQ ID NO: 4820 - protein, 471 aa, Lycopersicon esculentum
MKLLSDMASCNSHGQDSSYFLGWQEYEKNPYDEIQNPKGIIQMGLAENQLSFDLLESWLAQNPDAAGFKRNGESIFRELALFQDYHGLPDFKNALVQFMSEIRGNKVTFNPNKLVLTAGATSANETLMFCLANPGDAFLLPTPYYPGFDRDLKWRTGAEIVPIQCTSSNGFRITQSALEESYKLAKTRNLRVKGILVTNPSNPLGTTLTRNELELLVSFVAEKGIHLISDEIYSGTVFNSPKFVSVMEVLIENNYMYTEVWDRVHIVYSLSKDLGLPGFRIGAIYSNDAVIVSAATKMSSFGLISSQTQYLLSAMLTDKKFTKKYISENQKRLKKRHAMLVKGLESSGISCLESNAGLFCWVDMRHLLKTNTFEAEIELWKKIVYEVRLNISPGSSCHCTEPGWFRACFANMSEDTLNLAIQRIKSFVDSSDVIGINVDQSNQTNQNTSTSPKKKLFAKWGFRLSFNDRER

SEQ ID NO: 4821 - protein, 219 aa, Lilium longiflorum
VEQFSPVPYLATLLNCMLWVVYGLPLVHPHSTLVLTINGLGLIIELTYVLLFLLYSNGRARIRVLAMLLTEIVFVGLITVIVLSTAHTLVTRSLIIGVLCVFFGTMMYAAPLSVMKLVIQTKSVEYMPLFLSVASFLNGICWTTYALIRFDLFITIPNALGTMFAVAQLILHAMYYKSTKIQMEAQKRKLEMGFEEVMAPVENTEKIRGASQTGKYPPV

SEQ ID NO: 4822 - protein, 392 aa, Asarum canadense
DLEPVNPSDVPVTAAGALKSYKLAAKAISKLQSLPSGNISLLCDVVVREVSDLTGYDRVMAYKFHEDEHGEVIAECKISDLEPYHGLHFPATDIPQASRFLFMKNKVRMICDCSAPPVKVIQDKRLAQPISLGGSTLRAPHGCHAQYMANMGSIASLVLSVTISEDDDETCDKQKGRKLWGLVVCHHTSPRFIPFPLRYACEFLIQVFGIQLNKEVELAAQMRETHILRTQIMLCDMLLRDAPMTIVTQSPNVMDLVRCDGAALYYRKESWLLGVTPTKAQIQDLAEWLLKYHNGTTGLSTDSLVEAGYPRAHNLGDMVCGMAAVRITSQDFLFWFRSHTGKEVKWGGAKHDPADKDDDRGKMHPRSSFKAFMEVMKRRSLPWEDMEMDAIQ

SEQ ID NO: 4823 - protein, 252 aa, Vibrio vulnificus YJ016
MLEIKSIPAFNDNYIWLIQNSDQRCAVVDPGDAKPVLHYIEQHQLTLEAILITHHHNDHIGGVADLVRAFPNVNVVGPKAEPIPTLTHPVEDGDRLELFDETFLVLGLGGHTLGHIGYVGDGKLFCGDVLFSAGCGRIFEGTAQQMFDSLNKLLALPEETEVFCAHEYTASNVAFALAVEPDNELLHQYRDTVNRLRAQNLPTIPTTLRQEKWINPFLRYLQPSVIHSVSSRTKNSDPLSVFTALREWKNEF

SEQ ID NO: 4824 - protein, 255 aa, Bradyrhizobium japonicum USDA 110
MAAEIRTFSCLNDNFGYLIHDVETKATASIDAPEAGPILKALEREGWQLTDILITHHHGDHVGGVAELKHKYNCRVVAPHDKTTAIANVDLRVANADVVKVGNLLARVVETPGHTLDHISYVFDTEKTVFAADTLFSIGCGRVFEGTYPMMWDSLLKLRALPDDFKLYCGHEYTASNVKFALTVDPDNAALQARAAEVAKLRAENKPTIPSLLGDEKRANVFLRADDPSVAARLHMKGADAAAVFGELRERKNKS

SEQ ID NO: 4825 - protein, 481 aa, Halobacterium salinarum
MQLFWHRRDLRTTDNRGLAAAAPGVTAVDGGHDQGPVAAVFCFDDEVLAHAAPPRVAFMLDALAALRERYRDLGSDLIVRHGDPAAVLPAVANDLDATRVVWNHDYSGLATDRDAGVRDALDAAGVAHAQFHDAVHHRPGEIRTNAGDPYSVYTYFWRKWQDREKNPPAPEPEPADLAADTALADTSPLPSVQELGFAEPEAAVPDAGTAAARSLLDAFRESGDIYRYEDRRDYPHEEPTSRLSPHLKFGTIGIRTVYEAARAAKSDADTDDERENVAAFIGQLAWREFYAQVLYFNQNVVSENFKAYEHPIEWRDDPAALQAWKDGETGYPIVDAGMRQLRAEAYMHNRVRMIVAAFLTKDLLVDWRAGYDWFREKLADHDTANDNGGWQWAASTGTDAQPYFRVFNPMTQGERYDPDADYITEFVPELRDVPADAIHSWHELSLSERRRHAPEYPDPIVDHSQRREDAIAMFERARGDE

SEQ ID NO: 4826 - protein, 509 aa, Halomonas sp. SK1
MSDDTKKCPVTHMTTDFGAPVVTNRDSLTAGPRGPLLAQDVWLNEKLAGFVREVIPERRMHAKGSGAFGTFTVTHDITKYTRAKIFSEVGKKTEMFARFTTVAGERGAADAERDIRGFALKFYTEEGNWDMVGNNTPVFFIRDPRQFPDLNKAVKRDPRTNLRTATNNWDYWTLLPEALHQVTVVMSDRGIPASYRHMHGYSSHTYSLWNQAGERFWVKMHFRTQQGIKNLTDAEAGELVAQDRESHQRDLYEAIERGEYPKWTMFIQVMPEADAEKYALHPFDLTKVWYKGDYPLIEVGEFELNKNSENFFADVEQVAFSPSNLVPGIGVSPDRMLQRRLFNYADAQRYRLGVNYHQIPVNQARCPVHSNHRDGQGRVDGNYGALPHYEPNSFGQWQGQPQFSEPPLKLTGNAAHWSYDKDDHNYFEQPGKLFRLMNDGQKEALFGNTGRAMGDAPEFIKFRHIRNCHAADPAYGAGVAKALGINLEKALASKKDDPMYGNPLVALPA

SEQ ID NO: 4827 - protein, 565 aa, Sorghum bicolor
MALLLASAINHTAHPAGLRSHPNNESFSRHHLCSSPQNISKRRSNLSFRPRAQTISSESAGIHRLSPWEIPRRDWFPPSFLFGAATSAYQIEGAWNEDGKGPSTWDHFCHNFPEWIVDRSNGDVAADSYHMYAEDVRLLKEMGMDAYRFSISWPRILPKGTLAGGINEKGVEYYNKLIDLLLENGIEPYITIFHWDTPQALVDAYGGFLDEEDYKDYTDFAKVCFEKFGKTVKNWLTFNEPETFCSVSYGTGVLAPGRCSPGVSCAVPTGNSLSEPYIVAHNLLRAHAETVDIYNKYHKGADGRIGLALNVFGRVPYTNTFLDQQAQERSMDKCLGWFLEPVVRGDYPFSMRVSARDRVPYFKEKEQEKLVGSYDMIGINYYTSTFSKHIDLSPNNSPVLNTDDAYASQETKGPDGNAIGPPTGNAWINMYPKGLHDILMTMKNKYGNPPMYITENGMGDIDKGDLPKPVALEDHTRLDYIQRHLSVLKQSIDLGADVRGYFAWSLLDNFEWSSGYTERFGIVYVDRENGCERTMKRSARWLQEFNGAAKKVENNKILTPAGQLN

SEQ ID NO: 4828 - protein, 508 aa, Oryza sativa; identical to SEQ ID NO: 102

SEQ ID NO: 4829 - protein, 392 aa, Buxus sempervirens
DLEPVNPLDPPVTATGALKSYKLAAKAISRLQSLPNGNISLLCDVLVREVSELTGYDRVMVYKFHEDEHGEVVAETHRTNLEPYLGLHFPATDIPQASRFLFMKNKVRMICDCLAPPVRVVQDKRLERPLSLCSSTLRAPHGCHAQYMKNMGSIASLVMSVTINEDDDEMDSDQQKGRKLWGLVVCHHTSPRFVPFPLRYACEFLIQVFSIQLNKEVELAAQVREKHILRNQSMLCGMLLRESPVGIITQSPNVMDLVKCDGAALYYKDKFWLLGVTPTEAQISDIAGWLLEYHNGSTGLSADSLLEAGYPGASVLGDAVCGMAAIKLTSKDFLFWFRSRTGKEIKWGGAKHEPFDKDEGRKMHPRSSFKAFLEVVKWRSLPWEDIEMDAIQ

SEQ ID NO: 4830 - protein, 190 aa, Tmesipteris tannensis
DQHGEVVAEIRRSDLDPYLGLHYPATDIPQASRFLFMKNRVRMICDCCAPAVRIIQDKELKQPLSLAGSTLRAPHGCHAYYMRNMGSIGSLVMAVIVNDNDAEASSSGHQPKNRKLWGMVVCHHTTPRAVPFSLRSACEFLMQVFGLQLNMEIELGAQMREKHILCTQTPLCDMLLRDAPIGIVSQSPNI

SEQ ID NO: 4831 - protein, 394 aa, Carludovica palmata
ELEPVNPADVPVSAAGALKSYKLAAKAISRLQSMPSGNTSLLCDVLVKEVSELTGYDRVMAYKFHEDQSGEVISECRRPELEPYLGLHYPATDIPQASRFLFMKNKVRMICDCSAPPVKVIQDKRLAQPLSLCGSTLRAPHGCHAQYMANMGSIASLVMSVTINEDDDETGRDQQQKGRKLWGLVVCHHTSPRFVPFPLRYACEFLMQVFGIQLNKEVELAAQAKAKHILRTQTLLCDMLLRDAPIGIFTRSPNVMDLVKCDGAALFYRNQFWLLGTTPTEAQIRDIVAWLQEYHDGTTGLSTDSLAEAGYPGASELGDAVCGMAAINVTNKDFILWFRSHMAKEIKWGGAKRDSFNRNDEGRQMHPRSSFKAFLEVVKRRSLPWEDMEMDAIQ

SEQ ID NO: 4832 - protein, 929 aa, Pseudomonas syringae pv. tomato str. DC3000
MRWLRIAIASTVGLLTLLFMLSAQAEHGAGWSTLLDEKARLSLDEIRSARYQNQFSPIELERVAAAERDSAVWLHYRLHPNQHEQLVRIFAPDLASADMYVMDGDQQIDHLRTGNAVPTEDQRLPSNDFLLPIPQSAASLDIYLRLVSSQKMRPSITLEPAIQSAADETEPFLFGLLFGALAMLIVQNLTRYAHTRSRSNLWLAACESMLGLSALLLLNLLRPIDPWHIAQTPSAHVALLLAAVAGLIYTYCFFVHRNARTLDRLLLGNAVLMGIGALLVVFDATLPINALTFVLVSLTTLSILAVSMWHWQKGYRSARLFVLGMITFNIGYMVVLPGLLWLSLVPPQWLILALLCVFCISGLLMSLALSERYRSITEDRFSVSRDQAASTAEINAKAEFLAKISHEIRTPMNGVLGMTELLLGTPLSVKQRDYVQTIHSAGNELLTLINEILDITKLESGQIELDDVQFDISALVEDCLNIFRAKAEQQQVELISQIQPQVPRVISGDPTRLRQTLLSLLENALKKTDEGEILLGVALESSKSGQPRLRISVQDSGESLSDEERDELLHAELHSRNFLASSRLGGHLGLVIARQLIILMDGEFGIQNSGTPGNTLWLNLPLDAKLLEQPTIDLDSPLKDARVLVVDDNDTCRKVLVQQCSAWGLNVSAVASGKEALALLRTKAHLRDYFDVVLLDQNMPGMTGMQLAAKIKEDPSLNHDILLIMLTGISNAPTKIIARNCGIKRILAKPVAGYTLKTTLADELTQLNKGVVLAKPGPAMPPPVSVPGDFRILVAEDNSISTKVIRGMLGKLNLNPDTASNGEEALRAMKAQRYDLVLMDCEMPILDGFSATEQLRAWEVGNQRVRTPVVALTAHILTEHKDRARQAGMDGHMAKPIELSQLRELVEHWVAHRDKARGLTADGEHYRQN

SEQ ID NO: 4833 - protein, 191 aa, Vittaria lineata
DEHGEVVAEIRKSDLEPYLGLHYPATDIPQASRFLFMKNRVRMICDCRADAVKVTQDREVRQPLSLAASTLRAPHGCHSQYMANMGSAASLVMAVAVNSNEEDTSSSKPHQLKPRKLWGLVVCHHTSPRAVAFPLRSACEFLVQVFGLQLNMEVELAVQMREKHILRTQTLLCDMLLRDAPIGVVSESPNI

SEQ ID NO: 4834 - protein, 460 aa, Euptelea polyandra
SGKPFYAIIHRIDVGLVIDLEPVSPAEVPVAAAGILKSYKLSAKAISRLQSLPSGNISLLCDVLVQEVSDLTGYDRVMVYKFHEDEHGEVVAECLRSNLEPYLGFHYPATDIPQASRFLFMRNKVRMICDCSARPVKVIQDKSLAQPLSLCGSTLRAPHGCHAQYMANMGSIASLVMSVTIDENDDEIQTDQQKGRVLWGLVVCHHTSPRFVPYPLRHACEFLIQVFGIQLNKEVELATQLREKHILQTQTVLCDMLLRDAPVGIVTQSPNVMDLVRCDGAALYYKNQFWLLGLTPTEAQIRDIAGWILEHHDGSTGVSIDSLMEAGYPGSSVLGDVVSGMAAIKITSKDFLFWFRSHTAKEIKWGGAKHDHVDKDDGRKMHPRSSFKAFLEVVKRRCLPWEDVEMDAIHSLQLILRGSLKDETVNDSKTIVNALMVDARIQGVDELCNVTNEMVRLMEK

SEQ ID NO: 4835 - protein, 395 aa, Joinvillea ascendens
DLEPVNPADVPVTAAGALKSYKLAAKAISRLQSLPSGNLSLLCDVLVREVSELTGYDRVMAYKFHEDEHGEVIAECRRSDLEPYLGLHYPATDIPQASRFLFMKNKVRMICECSAPPVKVVQDDRLAQPLSLCGSTLRAPHGCHAQYMANMGSIASLVMSVTINEDDDDDTGSEQQQKGRKLWGLVVCHHTSPRFVPFPLRYACEFLLQVFGIQLNKEVELAAQAKERHILCTQTLLCDMLLRDAPVGIFNQSPNVMDLVKCDGAALYYQNHFWLLGSTPSEAQIKNIAEWLLEYHDGSTGLSTDSLTEAGYPGAAALGEVVCGMAAIKISSKDFIFWFRSHTAKEITWGGAKHEPVDRDDGGRKMHPRSSFKAFLEVVRWRSVPWEDIEMDAIQ

SEQ ID NO: 4836 - protein, 110 aa, Zea mays
MAEVHNERPVGMVGGVRDAPVGRENDLEAIELARFAVAEHNSKTNAMLEFERLVKVRHQVVAGTLHHFTVEVKEAGGGEKKLYEAKVWEKAWENFKQLQSFELVGDAAVA

SEQ ID NO: 4837 - protein, 392 aa, Knema latericia
DLEPVNPSDVPITAAGALKSYKLAAKAISRLQSLPSGNISLLCDVLIREVSELTGYDRVMAYKFHEDDHGEVIAECRRSDLEPYLGLHYPATDIPQASRFLFMKNKVRMICDCFAQPVKVIQDERLEQPLSLCGSTLRAPHGCHAQYMANMGSIASLAMSVTINEDGDDASGQQQQRGKKLWGLVVCHHTSSRFVPFPLRYACEFLIQVFGIQLNKEVELAAQRREKHILQTQTVLCDMLLRDTPVGIVTQSPNVMDLVKCNGAALYYRNQFWLLGTTPTETQIRDIAGWLLEYHDATTGLSTDSLTEAGYPGAPDLGDDVCGMAAIKITSKDFLFWFRSHTAKEIKWGGAKHDPVDKDDDGRKMHPRSSFKAFLEVVKQRSLPWEDVEMDA

SEQ ID NO: 4838 - protein, 481 aa, Pseudomonas fluorescens Pf-5
MQLIWLRSDLRLHDNTALSAAAQRGAAVAVYLLSPEQWLAHDDAPCKIDFWLRNLQSLSTALGRLNIPLLIRSAATWEQAPQVLLELCRQLQVQMLHFNQEYGIHESRRDAAVTRALQHAGISVQGHLDQLLFQPGSVLTKSGGYFQVFSQFRKVCYSRLHTALPALVKAPGAQLPLSINADPLPQRVEGFPSPTQALRELWPAGDDEAQRRLEKFSDEQIHYYQSERDFPAKPGTSQLSPYLAAGVISPRQCLHAALRGNQGEFESGSPGAVTWINELLWREFYKHILVGYPRVSRHRAFRPETEAVKWRHAPEELAAWQEARTGLPIIDAAMRQLLETGWMHNRLRMVVAMFLTKNLLIDWREGERFFMRHLIDGDLAANNGGWQWSSSTGTDSAPYFRIFNPISQSQKFDSEGRFIKHWLPQLAGLNKKDIHNPAAMGGLFGVPGYPAPIVDLSRSRERALAAFKALPARMDAGVSHE

SEQ ID NO: 4839 - protein, 156 aa, Desulfotalea psychrophila LSv54
MTIFPRSRRNIMSLVKWNPWREIEDVFDRNIKRVPSRLSDLGFATSEDWTPKVDISETDKEFIIKAELPEVKREDVKVTVDKGVLTICGERKQEREEEGKTFHRVERYYGSFTRSFTLPENVDESKVDASYKDGMLNLKIEKTEEAKPTSIEVEIK

SEQ ID NO: 4840 - protein, 458 aa, Streptomyces coelicolor A3(2)
MATSVVLFTRDLRLHDHPPLRAALDRSDAVVPLFVRDRAVDAAGFAAPNRLALLADCLRDLDSGLRDRGGRLVVRSGDLVEEVCAVAGEAEADEVHLAADVSAHAHRREELLRSALSARGCRLHVHDAVTTVLAPGSVTPASSDHFAVFTPYFRRWSERAVREPLAAPRRVRVPDGVGSEPLPARGDLTGLSPGLPTGGERDARKRLTAWLRGGIADYADHHDDLAGDATSRLSPDLHLGALSPVELVHRARRAGGPGAEAFVRQLAWRDFHHQVLAARPHASAADYRTRHDRWRTGAAAEADAAAWRDGRTGYPVVDAAMRQLRHEGWMHNRGRLLVASFLTKTLYVDWRVGAWHFLELLVDGDVANNQLNWQWAAGTGTDTRPHRVLNPTTQARRFDPGGTYVRRWVPELAGLAGRSVHEPWRLARAARAAYDAYPDPIVDLSEGLDRFRRARGRD

SEQ ID NO: 4841 - protein, 462 aa, Mesembryanthemum crystallinum
MGEQELLLQQQIKEDRNVSRETEMKHPALQGKYELGRVLGQGTFARVYHARNLVTGNSLAIKVVAKDKVIKVGMMEQMKREISVMKRVKHPNIVQLHEVMASKSKIYLAMDLVRGGELFSKVSKGGKLDEDVARSYFKQLISAVDFCHSRGVYHRDLKPENLLLDEHGNLKITDFGLSASFENEDHHQTLLRTSCGTPHYVAPEVISRKGQQGYHGAKSDIWSCGIILFVLLAGFLPFHDDNIIRMYRKVFKGDFTCPSWLSSQARDLITRLLDINPATRITVSEIMQSDWYCMDTSSMTAVTTDEFDLDHNNNNNNNSNYNNIHHHKKEPEMLNAFHIISLSQGFDLSPLFEEKHREERQDMRFATTKSASTVVSRLEEVAAKAGKFIVKKFCGDSVVRLQGQERGRKGKLAIAAEIMSVSPSLLVVEVKKDNGDTLEYNQFCTKQLRPALKDIVWTCPSS

SEQ ID NO: 4842 - protein, 344 aa, Magnaporthe grisea 70-15
MADSNNGPETEKVNTNIVTLTRFLTEEQAKHKEATGDFTLLCHALQFSFKAIAYYIRRATLVNLTGLAGSSNTTGDDQKKLDVIGNDLFIEAMRSSGKCALLVSEEEEEIIFFTNGNGSARYAVACDPIDGSSNLDAGVSVGTIFGIHKLAEGSTGSKEDILKPGSELLAAGFTMYGASAQLVLTMKNGGVNGFTLDNAFGEFILTHPDMRMPKSRAIYSVNEGNSLYWEDHVKEYFSSLKHPQEKSGKPYSARYIGSMVADAYRTLLYGGIFAYPADKKSPKGKLRILYECAPMAMVFENAGGQAIDSNMKRMLDVVPEHIHDRSGIFMGSWDEVEKVKAYHK

SEQ ID NO: 4843 - protein, 452 aa, Arabidopsis thaliana
MNRPKVQRRVGKYEVGKTLGQGTFAKVRCAVNTETGERVALKILDKEKVLKHKMAEQIRREICTMKLINHPNVVRLYEVLASKTKIYIVLEFGTGGELFDKIVHDGRLKEENARKYFQQLINAVDYCHSRGVYHRDLKPENLLLDAQGNLKVSDFGLSALSRQVRGDGLLHTACGTPNYAAPEVLNDQGYDGATADLWSCGVILFVLLAGYLPFEDSNLMTLYKKIIAGEYHCPPWLSPGAKNLIVRILDPNPMTRITIPEVLGDAWFKKNYKPAVFEEKEEANLDDVDAVFKDSEEHHVTEKKEEQPTSMNAFELISMSRALDLGNLFEEEESIPFNLQGFKRETRFAAKGAANDLVQKIEEASKPLGFDIQKKNYKRYLCTQMRLENVTAGRKGNLRVATEIFQVSPSLHMIEVRKTKGDTLEFHKFYKKLSTSLNDVVWKSGESSGLSK

SEQ ID NO: 4844 - protein, 490 aa, Nicotiana attenuata
MGFENEKNNSILSKLATNEEHGENSPYFDGWKAYDNDPFHPLKNPNGVIQMGLAENQLCFDLIEEWIKRNPNASICTTEGIKSFRAIANFQDYHGLPEFRRAIAKFMEKTRGERVTFDPERVVMAGGATGANETIIFCLADAGDAFLVPSPYYPAFNRDLRWRTGVQLIPIPCDSSNNFQITTKAVNEAYENAQKSNIKVKGLILTNPSNPLGTTLDRDTLKNFLTFTNQHNIHLVCDEIYAATVFNTPQFVSIAEILNDEMSHCNKDLVHIVYSLSKDMGLPGFRVGIVYSFNDAVVNCARKMSSFGLVSTQTQYLLAEMLSDEKFVSNFLAESSKRLAKRHKHFTNGLEEVGIKCLRSNAGLFCWMDLRPLLKQSNFDAEMSLWKVIINDVKLNVSPGSSFDCQEPGFFRVCFANMDDETVDIALARIRRFVGVKESGDETTAMEKKQQWKKNNLRLSFPKRMYDESVNNLSPLSSPIPHSPLVRARN

SEQ ID NO: 4845 - protein, 258 aa, Exiguobacterium sp. 255-15
MTKKSIQDYAFFGNIKKVKTCIARGDDLNTLDEEGSSALHWAVEEGYDEIVTLLLDHGADINQRDKDGLTPLHLALYEKQGEIAIQLIDRGAALDFDGDGFTALHFIAACSGNKRVLRRLLEDRTRVDWQTDSGEGHTPLHYAAQEGKTKKIRMLAEAGADVNRMGMNGFAPLHLAAGEGHVKAVEALLAAGADMEIENPLNENNTPLMLASQYGLTEITKLLLENGADRQHPDTEGRTALDFAVKHRYPEIVALLQT

SEQ ID NO: 4846 - protein, 483 aa, Nicotiana attenuata
MGFISNIENELLSKVATNNGHGENSAYFDGWKAYEIDPFHLTQNFDGVIQMGLAENQLCFDLIQEWVVNNPKASICTAEGSEDFKDIAIYQDYHGLPEFRSAVARFMEKVRGDRITFEAERIVMSGGATGAHELLAFCLADPAEAFLVPTPYYPGFDRDLRWRTGVQLFPVVCESSNNFKVTRTALETAYQKAQESNITVKGLLLNNPSNPLGTILDRETLKDTVRFINEKNIHLVCDEIYAATIFNKPDFISISEVILDEDVECDRDLIHIVYSLSKDLGFPGFRVGIIYSYNDVVTNCARKMSSFGLVSTQTQFLISNMLSDEKFVTKFIGESSERLAKRHDMFTKGLAQVGINTLKSNAGLFIWMDLRRLLKELTFESELELWRIIINEVKLNVSPGCSFHCSEPGWFRVCFANMDDETMRVALRRINNFVIQRKGIEGGVKKLQCRRSKLEISLSFRKLDDFINSPHSPMSSPLVQART

SEQ ID NO: 4847 - protein, 484 aa, Nicotiana attenuata
MVFISGNVQKQQLLSKIATNDGHGENSAYFDGWKAYENDPFHLTNNPNGVIQMGLAENQLCFDLIQEWVVNNPKASICTTEGAEDFRDIAIFQDYHGLPEFRQAVARFMEKVRGDKVTFDPNRIVMSGGATGAHETLAFCLANPGDAFLVPTPYYPGFDRDLRWRTGVQLFPVVCDSSNDFKVTKKALESAYEKAQESNINIKGLLINNPSNPLGTILDSDTLKDIVTFINSKNIHLICDEIYAATVFDQPKFISVSEIVEEHVGCNKDLIHIVYSLSKDLGFPGFRVGIVYSYNDTVVNIARKMSSFGLVSTQTQHLIASMLSDETFIEKFIAESSERLGKRHEMFTKGLAQVGISTLKSNAGLFFWMDLRRLLKELTFESELELWRIIINEVKLNVSPGCSFHCSEPGWFRVCFANMDDETMRIALRRIRNFVLQTKGLNSKSAVKKQCSRSKLQISLSFRRMDDFMNSPVHSPMNSPLVRT

SEQ ID NO: 4848 - protein, 394 aa, Liriodendron tulipifera
DLEPVNPADVPVTAAGALKSYKLAAKAISRLQSLPSGNISLLCDVLVREVSELTGYDRVMAYKFHEVEHGEVIAECRRSELEPYLGLHYPATDIPQASRFLFMKNKVRMICDCLALPVRVIQDKKLAQPLSLCGSTLRAPHGCHSQYMASMGSIASLVMSVTINEDDDDTSSEQQQKGRKLWGLVVCHHTSPRFVPFPLRYACEFLVQVFGIQLNKEVELAAQMRERHILRMQTVLCDMLLRDAPVGIITQSPNVMDLVKCDGAALYYRNQFWLLGTTPMEAQIRDIAGWLLEYHDSTTGLSTDSLTEAGYPGAADLGDDVCGMAAIKITSKDFLFWFRSHTAKEIKWGGAKHDPVDKDDDGRKMHPRASFKAFLEVVKRRSLPWEDVEMDAIQ

SEQ ID NO: 4849 - protein, 485 aa, Nicotiana attenuata
  misc_feature (118)..(118): Xaa can be any naturally occurring amino acid
MVFISSNNQKQQLLSKIATNDGHGENSAYFDGWKAYENDPFHLSNNPNGVIQMGLAENQLCFDLIQEWVVNNPKASICTTEGAEDFKDIAIFQDYHGLPEFRQAVARFMERVRGDKVXFDPNRIVMSGGATGAHEMLAFCLADPGDAFLVPTPYYPGFDRDLRWRTGVQLFPVVCDSSNDFKVTREALESAYEKAQESNIKIKGLLINNPSNPLGTLLDRDTLKDIVSFVNSKNIHLVCDEIYAATVFNKPNFISISEILEENLGLCNQDLIHIVYSLSKDLGFPGFRVGIVYSYNDTVVNIARKMSSFGLVSTQTQHLIASMLSDEIFVEKFIVESSERLGIRQGMFSKGLAQVGISTLKSNAGLFFWMDLRRLLKESTFEAELELWRIIINEVKLNVSPGCSFHCSEPGWFRVCFANMDDETMRIAIRRIRNFVLQTKGITNKVAAFKKQCSRSKLQISLSFRRLDDFNSPVHSPMNSPLVRT

SEQ ID NO: 4850 - protein, 396 aa, Meliosma squamulata
ELEPVNPDDVPVTAAGALKSYKLAAKAISRLQSLPSGNITLLCEVLVREVRDLTGYDRVMVYKFHEDEHGEVIAECRRSDLEPYLGLHYPATDIPQASRFLFMKNKIRMICDCSSQPVKIIQDKRLAQPLSLGGSTLRAPHGCHAQYMANMGSIASLVMSVTINDDDDDDDDTSESDKKKGRKLWGFVVCHHTSPRFVPFPLRYACEFLSQVFGIQLNKEVELAAQLKEKHILKTQTMLCDMLLRDAPMGIITQSPNVMDLVKCNGATLYYNNKFWLLGITPTEEQIRDIIGWLFENHDQSTGLSTDSLVEAGYPGALFLGNAVCGMAAIKITSKDFLFWFRSHTAKEIKWGGAKHDPIDKDDGRKMHPRSSFRAFLEVVKWRSIPWEDIEMDAIQ

SEQ ID NO: 4851 - protein, 317 aa, Pichia guilliermondii
MSIKLNSGYDMPSVGFGCWKVDNATCADTIYNAIKVGYRLFDGAEDYGNEKEVGDGINRALDEGLVARDELFVVSKLWNSFHDPKNVEKALDKTLSDLKVDYLDLFLIHFPIAFKFVPFEEKYPPGFYCGDGDKFHYEDVPLIDTWRALEKLVEKGKIRSIGISNFSGALIQDLLRSAKIKPAVLQIEHHPYLQQPRLVEYVQSQGIAITAYSSFGPQSFVELDHPRVKDVKPLFEHDVIKSVAGKVKKTPAQVLLRWATQRGLAVIPKSNNPDRLLSNLKVNDFDLSQEDFQEISKLDIELRFNNPWDWDKIPTFI

SEQ ID NO: 4852 - protein, 318 aa, Mortierella sp. M10
HRAHHRWTDTEKDPYSAHRGLFFSHIGWMLIKRPGWKIGHADVDDLNKNKLVQWQHKHYLPLVLFMGVIFPTIVAGLGWGDWRGGYFYAAILRLVFVHHATFCVNSLAHWLGEGPFDDRHSPRDHLITAFMTLGEVYHNFHHQFPQDYRNAISLLPVRPHQSGSSPSAPFFGLASHLKTFPENEVRKGQLQMIEKKVLEKKTKLQWGTPIADLPVLSFEDYQHACKNDGKKWILLEGVVYDVAEFMNEHPGGEKYIKMGVGKDMTAAFNGGMYDHSNAARNLLSLMRVAIVEFGGEVEAQKKNPSVPVYGDDHHSKSE

SEQ ID NO: 4853 - protein, 155 aa, Lilium longiflorum
MGSKLTREEYDTLLAAFHKLTVRLEVASVPKDATPADIKNLPDAYLYFIDMPGVRTGEIKVEVEDDSALVIIGERKREEEEKYQMMERWTGKRMRKFELPENADTKAVSAVWKNGVLAVTVRKLPAWEVAGISFNIERLPVPLPTKTKSIEVKIA

SEQ ID NO: 4854 - protein, 389 aa, Platanus occidentalis
DLEPVNPDDVPVTAAGALKSYKLAAKAISKLQSLPSRNISLLCDVMVREVSDLTGYDRIMVYKSHEDEHGEVVAECRRPDLEPYLGLHYPATDIPQLSRFIFLKNKVRMICDCSAPPVKVVQDKKLAQPLSLGGSTLRAPHGCHAQYMANMGSIASLVMSVTINEDDDEGDQQNGRKLWGLVVCHHTSPRFVPFPLRYACEFLIQVFGIQLNKEVELAAQSREKHILRIQTMLCDMLLRDAPVGIVTQSPNVMDLVKCDGAALYYRNKFWLLGITPTEAQIKDIAGWFLEYHDQSTGLSTDSLMEAGYPGALVLGDAVCGMAAIKITSKDFLFWFRSHTAKEIKWGGAKHDPVDKDDGRKMNPRSSFKAFLEVVKRRSLPWEDVEMDAI

SEQ ID NO: 4855 - protein, 203 aa, Lilium longiflorum
QSSQSMESAMITLDLPVIAAYRQLMEIPGETSNSLGDPSQSYALDAPTLTYALDAPTRSYVLDAPTLSYAHDAPTLTYALGAPASTYALDAGAMASTAADVKDLPAAYVFVVDMPGVGSGDLKVKVEGDNVLLISGERKREEEGVYLCIERRVGKLTKMFVLPENANTEAVSAVCKDGVLTVTVEKRPPQEPKKPKVIEVKVA

SEQ ID NO: 4856 - protein, 393 aa, Sabia swinhoei
DLEPVNPDDVPVTAAGALKSYKLAAKAISRLQSLPSGNISLLCDVLVREVSDLTGYDRVMVYKFHEDEHGEVIAECRRSDLEPYLGLHYPATDIPQASRFLFMKNKVRMICDCSARPVKVVQDKRLARPLSLCGSTLRAPHGCHAQYMANMGSIASLVMSVTINEDDDDEMESDQKKGRKLWGFVVCHHTSPRFVPFPLRYACEFLIQVFGIQVNKESELAAQLREKHILQTQTMLCDMLLRDAPVGIVSQSPNVMDLVKCSGAALYYKNKFWLLGVTPTEEQIRDIIGWFVENHGQSTGLSTDSLMEAGYPGASVLGDAVCGMAAIKITSKDFLFWFRSHTAKEIKWGGAKHDPVDKDDGRKMHPRSSFKAFLEVVKRRSLPWEDIEMDAIQ

SEQ ID NO: 4857 - protein, 394 aa, Tofieldia calyculata
DLEPVNPADVPVTAAGALKSYKLAAKAISKLQSLPSGDISLLCDVLVREVSDLTGYDRVMVYKFHEDEHGEVLAEFKRSDLEPYLGLHYPATDIPQASRFLFMKNKVRMICDCAAIPVKVIQDERLAQCLSLCGSTLRAPHGCHAQYMANMGSIASLVMSVTISEDDNETDSDQQEKGRKLWGLVVCHHTNPRFVPFPLRYACEFLIQVFGIQLNKEVELAAQTREKHILQTQAVLCDMLLRDFPIGIFTQSPNVMDLVKCDGAALYYRNQFWLLGITPTEKQIRDIAGWLLEYHGCSTGLSTDSLLEAGYPGASVLGDAVCGMTASRINSKEFVFWFRSHTAKEIKWGGAKHDPVDKGDDGRKMHPRSSFEAFLEVVKRRSLPWEDVEMDAIQ

SEQ ID NO: 4858 - protein, 371 aa, Bifidobacterium longum NCC2705
MSKADKKVSKDRPGLFAPMTLREVTVRNRIWLPPMCTYSSFARDGRPTPFHYQHYVSRAFGGFGMVIVESTAVAPEGRITPCDLGLWEDGQIDAWRWIVDGIREAGAVPAIQLNHAGRKASTGCFAVGYDGQSVPEEAGGWPTMAPSEIAFGGLRTPRALSVDEIHGLVGAFAAAAGRAVAAGFQAIQIHAAHGYLISQFLDPLSNERDDEYGGDLTGRSRFLVEVVDAVRGAVPEGVPVLVRISATDWAAGGWDLDQTIALSKVLKEHGVDVMDVSTGGIMSGVSIPVKPNYQVPFSEQVKAKADIPVTAVGLITKPKQAAKILAHGEADAVEIGRAALRDPYWPLRAANKLGIPSTEIPYAPQYVAGAY

SEQ ID NO: 4859 - protein, 737 aa, Psychrobacter arcticus 273-4
MMKKQPAQWLLSAASVGIAGLILTQSYGTAVADTNTEGFKQTPEQQVTTRQVAALLDRSHYLNQPLDTATGSEILSMYIDSLDPNHTLFLQSDVDEFKKKYADEFGVRLKRGDLSAGVEVFERYRKRSNEYFAMAKKMLKTDINLTSKDTIVLDREKLNHFKTKKEQRDYWTSQLKFQLMSITLGKEDEKAKEKVFLDNPDITRGQDLVRNDERTPSEILLNRLSRQQEQFTRLKDDEIMETILNTAMLTYDPHSNYYAPIQANELQIQSSLQLEGVGVSIRPDRKNPDYTRIVTLVDGGPAAKSGQIKPNDLIIGIAQDGKTMTDVVGWSTREIVSLIRGKRGTSVTIKVRQPNTPDASARNVTVVRDIIQQEESGVTQRVVEVQRPNIDKTPKRIGVLEIPSFYLNYRARRNGEDYRSVSIDTEKALKELNTKNIDGLVVDLRNNPGGSLDEVAKMLGFFIKSGPLVQIRDNRGNIQVYRDDDGGEQLYDGKVVVLTNLASASASEIFAAAIQDYGRGLVVGSTTTGKGSAQIQLDSLALGSATLTQRKFYRITGGSTQNKGVVPDVELVNIYDNATFGERAQKKALPWDTIKTAPYKPEGKFTSNTLATLNQQSKIRQQKNPQFVYLSTLNDIRNMEDEKKPVALDINKRRAKMQLIEKRSLEVENKRLIATGERPYANWNTYQAAMDAKFEERSQMKAGERPELPEDEAFINEAAYIMLSTEPKTLSSPEEKP

SEQ ID NO: 4860 - protein, 434 aa, Arabidopsis thaliana
  misc_feature (307)..(307): Xaa can be any naturally occurring amino acid
MSLKIKFLLLLVLYHHVDSASIVKFLPGFEGPLPFELETGYIGIGEDENVQFFYYFIKSENNPKEDPLLIWLNGGPGCSCLGGIIFENGPVGLKFEVFNGSAPSLFSTTYSWTKMANIIFLDQPVGSGFSYSKTPIDKTGDISEVKRTHEFLQKWLSRHPQYFSNPLYVVGDSYSGMIVPALVQEISQGNYICCEPPINLQGYMLGNPVTYMDFEQNFRIPYAYGMGLISDEIYEPMKRICNGNYYNVDPSNTQCLKLTEEYHKCTAKINIHHILTPDCDVTNVTSPDCYYYPYHLIECWANDESVXREALHIEKGSKGKWARCNRTIPYNHDIVSSIPYHMNNSISGYRSLIYSGDHDIAVPFLATQAWIRSLNYSPIHNWRPWMINNQIAGYTRAYSNKMTFATIKGGGHTAEYRPNETFIMFQRWISGQPL

SEQ ID NO: 4861 - protein, 215 aa, Aspergillus oryzae
MSSTSPSKEPEVEPEVQSGEEQEQMDKEQQDQAQNQGEFEVKEQDRWLPIANVARIMKLALPDNAKIAKEAKECMQECVSEFISFITSEASEKCQQEKRKTVNGEDILFAMTSLGFENYAEALKIYLSKYRETQSARGEHQNRPTSSGYASGGPVGGVSSAPGGRPATAGGFPDAADNTNSIMNPSLDPTEQDPSAYGYPPMVGQPHNGTAGDSY

SEQ ID NO: 4862 - protein, 372 aa, Candida albicans SC5314
MKKSTGPTQTRQVVFNISQNFKVLKILGEGAYGIVALAVHLPTETKVAIKKIEPFERPLFCLRTLREIKLLTKFKNHDNIVRLYDVQKPMNYDSFNEVYLIQEYMPSDLHNIIHTHLLSDQHVQYFIYQILKGLKMIHSARVIHRDLKPSNILVNEKCDLKICDFGLARLDTKHYNFDEAPRISMLTEYVATRWYRAPEIMLSASNYSTAIDLWSVGCILAELLTYRALFPGSDYINQLKLIFEVLGTPTDEDLQIIKSERAQKFIRSLPTKVKIDLSEFINNHPYRNIKHRGRDQVNPLAIDLLEKLLVFDPAKRITVQEALEHPYLNSYHEQLDEPVTSPIPIEEFDFDIDKKNLDTNDLKKQIFEIVMS

SEQ ID NO: 4863 - protein, 737 aa, Thiobacillus denitrificans ATCC 25259
MRRRCAPGSRDAASRQSPLAARPCLAPLSAYKDESKRTFRKATMSQKKKPAKAGPDENFERGAGGEIHQTANGAHPPLTTNDGVPISDDQNSLRSHPRGPTLLEDFVLRDKITHFDHERIPERVVHARGSAAHGYFELTESLEKYTTARILTEVGEKTPVFTRLSTVAGGAGSVDTPRDVRGFAVKFYTKEGNWDLVGNNIPVFFIQDAIKFPDLVHSFKMEPDRGFPQSSTAHDTFWDYVSLTPESMHMILWIMSDRTTPRSLRMIEAFGVHSFRLVNAKGASTFVKFHWRPKLGLQSTIWDETVKIAGADPDFHRRDLFEAISEGNFPEWEFAVQLFTEADAERFPFDHLDATKLIPEELVPLKVIGRMVLDRWPDNFFAETEQVAYCPTHVVPGIDFSNDPLLQGRLFSYVDTQLLRFNSPNFHQVPVNMPKCPFANLQRDGHMQMERPKGRVNYEPNTLGTDTPRETPQGFRSAAVTESGEKGRIRAERFADHYSQARQFYVSQTEYEQAHIASTLVFELAKVDHVHIREAMVGHLRHVDEDLAHRVAKGLGIDPLPPAPEAAAPVQDLPPSPALQIIGNMKDTLEGRMVGILVGDGSDGARVEALRRAATDAGAAVKIIAAHVGQVKLANGKMLKVDKQLAGTPSVLFDAVAVVVSEDAAKMLLKESAALDFVHDAFGHLKAIASDAGGQALLDAVHVVRDAGVVDAADVGAFIAAAKTRQWDREPSVRLLA

SEQ ID NO: 4864 - protein, 497 aa, Arabidopsis thaliana
  misc_feature (313)..(313): Xaa can be any naturally occurring amino acid
MGLPGKNKGAVLSKIATNNQHGENSEYFDGWKAYDKDPFHLSRNPHGIIQMGLAENQLCLDLIKDWVKENPEASICTLEGIHQFSDIANFQDYHGLKKFRQAIAHFMGKARGGRVTFDPERVVMSGGATGANETIMFCLADPGDVFLIPSPYYAAFDRDLRWRTGVEIIPVPCSSSDNFKLTVDAAEWAYKKAQESNKKVKGLILTNPSNPLGTMLDKDTLTNLVRFVTRKNIHLVVDEIYAATVFAGGDFVSVAEVVNDVDISEVNVDLIHIVYSLSKDMGLPGFRVGIVYSFNDSVVSCARKMSSFGLVSXSQTQLMLASMLSDDQFVDNFLMESSRRLGIRHKVFTTGIKKADIACLTSNAGLFAWMDLRHLLRDRNSFESEIELWHIIIDRVKLNVSPGSSFRCTEPGWFRICFANMDDDTLHVALGRIQDFVSKNKNKIVEKASENDQVIQNKSAKKLKWTQTNLRLSFRRLYEDGLSSPGIMSPHSPLLRA

SEQ ID NO: 4865 - protein, 854 aa, Arabidopsis thaliana
MSEPKVRRWVGKYEVGRLIGECNFGKLRSAVDTETGDPVALMILDKDKVLKHKMAEQRDSQIDPSSVQKYDVGLSRLLLQIKREISIMKLINHPNVVQLYEVLASKAKIYIVLEFISGGKLFDKIKNDGRMNEDEAQRYFQQLINAVDYCHSRGVYHRDLKPENLLLDAQENLKVAEFGLIALSQQAGGDGLRHTACGNPDYAAPEVLNDQGYDGAKADLWSCGVILFVLLAGYLPFEDSSLTTLYKKISSADFSCPPWLSSGVKNLIVRILDPNPMTRITIPEILEDVWFKKDYKPAVFEEKKEANLADVEAVFKDSEEGRVQLRSFPCVICSGGTTCGDVRSRTKLMNGLIERGRPQEAHSIFNTLIEEGHKPSLITYTTLVTALTRQKHFHSLLSLISKVEKNGLKPDTILFNAIINASSESGNLDQAMKIFEKMKESGCKPTASTFNTLIKGYGKIGKLEESSRLLDMMLRDEMLQPNDRTCNILVQAWCNQRKIEEAWNIVYKMQSYGVKPDVVTFNTLAKAYARIGSTCTAEDMIIPRMLHNKVKPNVRTCGTIVNGYCEEGKMEEALRFFYRMKELGVHPNLFVFNSLIKGFLNINDMDGVGEVVDLMEEFGVKPDVVTFSTLMNAWSSVGDMKRCEEIYTDMLEGGIDPDIHAFSILAKGYARAGEPEKAEQILNQMRKFGVRPNVVIYTQIISGWCSAGEMKKAMQVYKKMCGIVGLSPNLTTYETLIWGFGEAKQPWKAEELLKDMEGKNVVPTRKTMQLIADGWKSIGVSNSNDANTLGSSFSTSSKLNIPNNIASSRSPLFLKGMPEKPKLCIKSQFGLRQTLLVVLCRDQIGEAGRFCKFM

SEQ ID NO: 4866 - protein, 452 aa, Bradyrhizobium sp. BTAi1
MMRKTSVILLSAATGAALTLFVTQPRAVLMGSTARAATADTYRQLNLFGDVFERVRSDYVEKPDDSKLVESAISGMLSGLDPHSSYMDAKSFRDMQVQTRGEFGGLGIEVTMEDGLIKVVSPIDDTPASKAGIQANDIITNLDEEAVQGLTLNQAVEKMRGPVGTKIKLKVVRKGADNPLDITLTRDNIRVRSVRSRIESDDIAYIRITTFNEQTTEGLKKSIADLQTQIGDKLKGYVIDLRNNPGGLLEEAVTVSDAFLERGEIVSTRGRNAEETQRRSAHAGDLTKGKPVIVLINGGSASASEIVAGALQDHKRATLVGTRSFGKGSVQTIIPLGAGNGALRLTTARYYTPSGKSIQAKGIVPDIEVLQDVPDELKSRTDTKGEASLRGHLKNDGDEKTGSQSYVPPDAKDDKALKLAADLLHGIKNSANTPAPTTDKAAADKPATKAAN

SEQ ID NO: 4867 - protein, 508 aa, Haemophilus influenzae R2846
MSSQCPFSHLAATNLTMGNGAPVADNQNSLTAGPRGPLLSQDLWLNEKLADFVREVIPERRMHAKGSGAFGTFTVTHDITKYTRAKIFSEVGKKTEMFARFTTVAGERGAADAERDIRGFALKFYTEEGNWDLVGNNTPVFFLRDPRKFPDLNKAVKRDPRTNMRSATNNWDFWTLLPEALHQVTVVMSDRGIPASYRHMHGFGSHTYSFWNEAGERFWVKFHFRTQQGIKNLTNAEAAEIIANDRESHQRDLYEAIERGDFPKWTLFVQIMPEADAEKVPYHPFDLTKVWPKKDYPLIEVGEFELNRNPENFFADVEQSAFAPSNLVPGIGASPDRMLQARLFNYADAQRYRLGVNYRQIPVNRPRCPVHSNQRDGQGRVDGNYGSLPHYEPNSFSQWQQQPDFAEPPLRINGDAAHWDYRNDDNDYFSQPRALFNLMNAEQKQSLFNNTAAAMGDAPDFIKYRHIRNCHWCDAAYGEGVAKALGLTVEDALKARDTDPALGQGGLL

SEQ ID NO: 4868 - protein, 164 aa, Cleisostoma racemiferum
IENKINRQVTFAKRRNGLLKKAYELSVLCDAEVALIIFSNRGKLYEFCSSTSMLKTLEKYQKCNFGSPESTIISRETQSSQQEYLKLKSRVEALQRSQRNLLGEDLGPLGSKELEQLERQLDSSLKQIRSTRTQFMLDQLADLQRREHMLCEANKALKRRFEES

SEQ ID NO: 4869 - protein, 256 aa, Triticum aestivum
MGSMDGHPLQGNHGYAHVPAGSNNDEDDASPPPSAGGGSSGSGRRPRGRPPGSKNKPKPPVVVTRESPNAMRSHVLEIASGADIVEAIAAFSRRRQRGVSVLSGSGAVTNVTLRQPAGTGAAAVALRGRFEILSLSGAFLPAPAPPGATGLAVYLAGGQGQVVGGSVMGELLASGPVMVIAATFGNATYERLPLDQDAEEGAVLSGSEGAATQLEQQGSGGAAVPPPMYAVPQTPPGDMFGQWGQAAVARPPPTSF

SEQ ID NO: 4870 - protein, 444 aa, Bradyrhizobium sp. BTAi1
MRKNWLFLAGTLTGVGLTLLVSGPDGAQLIARAKAAAGMADTYSQLNLFGAVFERVRADYVEKPDDPALIEGAINGMVSSLDPHSRYMNDKSWRDMQETTSGEFGGLGIEVTMEDGLVKVVAPIDDTPASKAGILSGDLIAKIDGEAVQGLTLEQAVAKMKGGVNTKTKLTIMRKGKDAPLDVTLTREIIRVRPVRYHTEGGDIGYIRITSFNEQTTESLRKAITSISKDIPQDKLAGYVVDLRNNPGGLLDQAVSVSSTFLPRGEVVSTRGRNPEETQRFTARGGDLTKGKPLVVLINGGSASASEIVAGALHDHKRATLVGTRSFGKGSVQTIIPLGAGNGALALTTARYYTPSGRSIQAQGIAPDIEVKQDVPDDLKDRTDIKGEASMRGHLSAADGTEQTGSQSYVPPDEKDDKALHAAFNVLRGVTVNADVRAKAAVPN

SEQ ID NO: 4871 - protein, 572 aa, Arabidopsis thaliana
MYRVLSKLSSSIGSSTSRKLVSGRIISSRNYAAKDISFGIGARAAMLQGVSEVAEAVKVTMGPKGRNVIIESSYGGPKITKDGVTVAKSISFQAKAKNIGAELVKQVASATNKVAGDGTTCATVLTQAILIEGCKSVAAGVNVMDLRVGINMAIAAVVSDLKSRAVMISTPEEITQVATISANGEREIGELIARAMEKVGKEGVITVADGNTLDNELEVVEGMKLARGYISPYFITDEKTQKCELENPIILIHEKKISDINSLLKVLEAAVKSSRPLLIVAEDVESDALAMLILNKHHGGLKVCAIKAPGFGDNRKASLDDLAVLTGAEVISEERGLSLEKIRPELLGTAKKVTVTRDDTIILHGGGDKKLIEERCEELRSANEKSTSTFDQEKTQERLSKLSGGVAVFKVGGASESEVGERKDRVTDALNATRAAVEEGIIPGGGVALLYATKALDNLQTENEDQRRGVQIVQNALKAPAFTIAANAGYDGSLVVGKLLEQDDCNFGFDAAKGKYVDMVKAGIIDPVKVIRTALTDAASVSLLLTTTEASVLVKADENTPNHVPDMASMGM

SEQ ID NO: 4872 - protein, 456 aa, Arabidopsis thaliana
MENKPSVLTERYEVGRLLGQGTFAKVYSGRSNHTNESVAIKMIDKDKVMRVGLSQQIKREISVMRIAKHPNVVELYEVMATKSRIYFVIEYCKGGELFNKVAKGKLKEDVAWKYFYQLISAVDFCHSRGVYHRDIKPENLLLDDNDNLKVSDFGLSALADCKRQDGLLHTTCGTPAYVAPEVINRKGYEGTKADIWSCGVVLFVLLAGYLPFHDTNLMEMYRKIGKADFKCPSWFAPEVKRLLCKMLDPNHETRITIAKIKESSWFRKGLHLKQKKMEKMEKQQVREATNPMEAGGSGQNENGENHEPPRLATLNAFDIIALSTGFGLAGLFGDVYDKRESRFASQKPASEIISKLVEVAKCLKLKIRKQGAGLFKLERVKEGKNGILTMDAEIFQVTPTFHLVEVKKCNGDTMEYQKLVEEDLRPALADIVWVWQGEKEKEEQLLQDEQGEQEPS

SEQ ID NO: 4873 - protein, 565 aa, Saccharomyces cerevisiae
MKRTVISSSNAYASKRSRLDIEHDFEQYHSLNKKYYPRPITRTGANQFNNKSRAKPMEIVEKLQKKQKTSFENVSTAMHWFRNDLRLYDNVGLYKSVALFQQLRQKNAKAKLYAVYVINEDDWRAHMDSGWKLMFIMGALKNLQQSLAELHIPLLLWEFHTPKSSLSNTKEFVEFFKEKCMNVSSGTGTIITANIEYQTSELYRDIRLLENEDHRLQLKYYHDSCIVAPGLITTDRGTNYSVFTPWYKKWVLYVNNYKKSTSEICHLHIIEPLKYNETFELKPFQYSLPDEFLQYIPKSKWCLPDVSEEAALSRLKDFLGTKSSKYNNEKDMLYLGGTSGLSVYITTGRIRTRLIVNQAFQSCNEQIMSKALKDNSSTQNFIKEVAWRDFYRHCMCNWPYTSMGMPYRLDTLDIKWENNPVAFEKWCTGNTGIPIVDAIMRKLLYTGYINNRSRMITASFLSKNLLIDWRWGKRWFMKHLIDGDSSSNVGGWGFCSSTGIDAQPYFRVFNMDIQAKKYDPQMIFVKQWVPELISSENKRPENYPKPLVDLKHSRERALKVYKDAM

SEQ ID NO: 4874 - protein, 151 aa, Picea abies
MAMDPLLSTVQQLLGVPDDLERILHAPTRSYMRDTEATASTPVDVKEYPNSYVFIVDMPGLKSNDIKVQVEDENVLNISGERKRNEKEEGAVKYIRMERRVAKFMRKFTLPADCNLEAISAACQDGVLTVTVPKLPPPEPKKPKTIAVKIG

SEQ ID NO: 4875 - protein, 149 aa, Thiobacillus denitrificans ATCC 25259
MANISRYDPFSMSRIDPFTDLDDFFKGFFVRPALMEGGAQAPLQIKMDVKENDNAYTIHADIPGVKKEDIQVSVDGNQVSISAETRSEKEEKEGEKVLRSERHVGKIARSFTLPHEVDDAQCQAKYSDGVLELTLPKKAAASAKKLSIQ

SEQ ID NO: 4876 - protein, 436 aa, Bartonella henselae str. Houston-1
MIRKVILLVAGVFLGACSMIMVQSVAANNEGDVYKQLAIFGDVFERVRMQYVTVPDDKKLIENAINGMLTSLDPHSSYMNAQEAKEMRDSTKGEFGGLGIEVTMEKNLIKVVSPMDDTPASKAGILAGDLISKIDGVQTNGQTLNEAVNKMRGAPGTPITLTIIRSGIDKPLEIKVVRDIIKVKAVKYRVEGDIGYLRLIQFSEQTFGNLQAAIKDIQSKIPQDKLKGYVLDLRLNPGGLLDQAVSVSGAFLNKGEIVSTRGRRKNDVTRFDAKPGDIIKGKPLIVLINGGSASASEIVAGALQDHRRATILGTQSFGKGSVQTIIPLGENGALRLTTALYYTPAGTSIQGTGITPDIIVEQPLPEKYKGYDVKLGESELKGHIKGERENNKGSGSAAFVPRDPKEDAQLNEAYKLLRGEMANAAFPPDPNKDILK

SEQ ID NO: 4877 - protein, 613 aa, Alkaliphilus metalliredigenes QYMF
MCGIAGWIDYQRDLRDENPIIERMTASLGHRGPDTKSSYISKHGLLGHRRLIVVDPSGGAQPMTKRLGEKTYTMVYNGELYNTEDLRKELKDKGHTFNSYSDTEVLLVAYMEWGENCVQHLNGIYAFGIWNEVEKTVFLARDRLGVKPLFYNLKNGGLFFASEIKALLAHPEIDPVVTTEGLCEVFGLGPARSPGNGVFKDINEIKPGYCLTYTPQGVKIKSYWQLESKPHEDSLGDTIENVRGLLIDAIERQLVSDVPICTFLSGGLDSSAIASVTANAFKRDGRGQLHTYSIDYVDNDQYFKPSEFQPNADSEWIGRMVSHIDSKHHDIIIDTPQLTEALEAAVLSTDLPGMADVDSSLYLFCKNVKQNDTVALSGECADEIFGGYPWFRRREDIEANTFPWSKATTERRNILSGDLRKLPLEEYVATKYEETLREVPRMKGESLETHRMREIFYLNMKWFMITLLNRKDRMSMANGLEVRVPFADHRIVEYAWNIPWEMKYLGQREKGLLRSALKDILPEDVRTRKKSPYPKTHNPAYLKAVQQWMGEIMQDPSSPILQVINQEKVKEIVETGGKSFGKPWFGQLMTGPQLIAYLIQVNLWMKHYNVSIE

SEQ ID NO: 4878 - protein, 267 aa, Humulus lupulus
MADANMGAGGGQFPDFPSVLTHGGQYVQFDIFGNFFEITTKYRPPIMPIGRGAYGIVCSVLNTELNEMVAVKKIANAFDIYMDAKRTLREIKLLRHLDHENVIGLRDVIPPPLRREFSDVYIATELMDTDLHQIIRSNQGLSEDHCQYFMYQLLRGLKYIHSANVLHRDLKPSNLLLNANCDLKICDFGLARPNIENENMTEYVVTRWYRAPELLLNSSDYTAAIDVWSVGCIFMELMNRKPLFAGKDHVHQIRLLTELLGTPTESN

SEQ ID NO: 4879 - protein, 244 aa, Acinetobacter sp. ADP1
MMRYQIDYIDVKNSLKNYIWILKDSHTQEIIVVDPTESSLVQQYCEKHQVKIAQIWLTHWHKDHIGGVPDLIDGSHIPVYGPREELSKIPLITHPLQHENHFKFNHLNVEVLATPGHTLGHVVYFIEETGSLFCGDTLFAMGCGRVFEGSFEQMYHSLNRLAALPTTTKVYCTHEYTLANAEFAVTVEPDNLALKERLKEVQSLRSRHQITLPSTIALELATNPFLRTESVEEFAKIRTLKDQF

SEQ ID NO: 4880 - protein, 221 aa, Glycine max
  misc_feature (196)..(196): Xaa can be any naturally occurring amino acid
MGRGRVELKRIENKINRQVTFAKRRNGLLKKAYELSVLCDAEVALIIFSNRGKQYEFCSGSSMLKTLERYQKCNYGAPEDNVATKEALELSSQQEYLRLKARYEALQRSQRNLMGEDLGPLSSKELESLERQLDSSLKQIRSIRTQFMLDQLSDLQRKEHFLGESDRDLRQRLEEFQINPLQLNPSAEDMGYGRHXRYHPDPVSVVTEGPSMNNYMAGWLP

SEQ ID NO: 4881 - protein, 493 aa, Synechococcus sp. CC9605
MAALQIVWFKRDLRIVDHQPLAAAVERGLVLPLYVVEPELWRQPDASERQWMFCRESLLELRQALADRGQPLVVRAGDVVQVLERARRQFGIDGLWSHEETGNGWTYQRDKRVGAWARRHGIAWMELPQFGVTRRMHSRNGWAKRWEVQMTEPITPVPAALQALDGIDHGVIPERPCSELLLDACPQRQIGGRSTGLEELNDFLQHRAQRYQRSMSSPNTAFTGCSRLSTYLTWGCLSMREVLQTSRTHSGRGVSSFESRLHWHCHFIQKLEDQPAIEFSDFHPFMRGIRAADAERLTAWSEGRTGVPFVDACMRALRAHGWINFRMRAMLMSFASYNLWLPWRDSGLHLARQFVDYEPGIHWSQCQMQSGSTSINTIRIYNPIKQGMDHDPQGLFIRQWCPELKDVPTIHIHEPWMLGGGMPAPIVDVTASMQDAKDRIWDIRRSAGFDRHADAIQCKHGSRKAGLKPTTARRRRRQPQPPDNGSQQLSLGF

SEQ ID NO: 4882 - protein, 355 aa, Shewanella sp. ANA-3
MTIEHAANSVGNLFDTYKLNDTITLKNRILMAPLTRCMADADLVPTDDMVAYYARRAEAGLIISEATIIRPDGQGYPNTPGIFNQAQIAGWRKVTDGVHANGGKIFVQLWHTGRVAHPHFFGGGDVLAPSAEKVEGSVPRMRELIYVTPKAATLEDIQGLVRDYAKAAENAIEAGFDGVEIHGANGYLIDAFLHHDSNRRTDEYGGTPANMSRFALEVVDAIAARIGKDRTGLRISPGAYFNMAVDNRDRAVFDYLLPELEKRELAFVHIGIFDDSMEFDYLDGRVSSYVRANYGKTLVGVGGYSAQSASEAIAADKFDLIAIGRPFIANPDYVARVRQGHELVTYSDEMLASLV

SEQ ID NO: 4883 - protein, 485 aa, Nicotiana plumbaginifolia
PSSAFNSPFCTTNSGAPVFNNNSSLTVGARGPVLLEDYHLVEKLANFDRERVPERVVHARGASAKGFFEVTHDITHLTCADFLRAPGVQTPVIVRFSTVIHERGSPETLRDPRGFAVKFYTREGNFDLVGNNFPVFFIRDGMKFPDMVHALKPNPKSHIQENWRVLDFFSHVPESLHMFTFLFDDIGIPQDYRHMDGSGVHTFTLINKAGKSTYVKFHWKPTCGVKSLLEDEAARVGGANHSHATQDLYDSIAAGNYPEWKLFIQTMDPDHEDRFDFDPLDVTKTWPEDILPLQPVGRLVLNKNIDNFSNENEQLAFCPSIVVPGVYYSDDKMLQTRIFSYSDTQRYRLGPNYLQLPANAPKCAHHNNHYDGSMNFMHRDEEIDYFPSRYDPVRHAEKYPIPSTMCTGKREKCVIQKENNFKQPGERYRSFTPDRQERFIRRWVETLSDPRITYEIRSIWISYWSQADKSLGQKLASRLNVRPSI

SEQ ID NO: 4884 - protein, 492 aa, Nicotiana plumbaginifolia
MDPSKFRPSSAYDSPFLTTNAGGPVYNNVSSLTVGPRGPVLLEDYHLIEKLATFDRERIPERVVHARGASAKGFFEVTHDISHLTCADFLRAPGVQTPVIVRFSTVVHERGSPESLRDIRGFAVKFYTREGNFDLVGNNVPVFFNRDAKSFPDTIRALKPNPKSHIQEYWRILDFFSFLPESLHTFAWFFDDVCLPINYRHMEGYGVHAYQLINKAGKAHYVKFHWKPTCGVKCMTEEEAIRVGGTNHSHATKDLYDSIAVGNYPEWKLSIHIMDPEDVERFDFDPLDVTKIWPEDILPLMPVGRLVLNRNIDNFFAENEQLAFNPGHIVPGLYYSEDKLLQTRIFAYADTQRHRIGPNYMQLPVNAPKCAHHNNHRDGAMNFMHRDEEVDYLPSRFDPCRHAEQYPIPSRVLNGRREMCVIEKENNFKQAGERYRSWEPDRQDRYVSKWVEHLSDPRVTYEIRSIWISYLSQADKSCGQKVASRLTLKPTM

SEQ ID NO: 4885 - protein, 1364 aa, Xanthomonas campestris pv. campestris str. ATCC 33913
MPHGRWDLRRKYGRRASIGAVLLLSAGLIAAFLVGFAVHRHNELERERRFDMVVRVLARNISERMYTFEHGLRGARGAVIGAGSDVISRDRFTRYSRSRDYPREFPGVLGYGYIHRVAAADEAAFLDAARADGAPDIQRRLLAPWDGERFIVLYFEPESSGNRPLGLDVASEPRRRIAAIAAARSGQPTMTSPVSLSGYQTPSEGGFLVLLPVYREGMPLQTPQQRMDATTGWAYAPLSVKQMLESTLGDRDDVAISLSDREDTQHTFYRSGIAAPESMRRAAHTQLLPIYGRTWVLTARPTLHFIGSLNQNSPWLMGSLVLGTAILLAALLGLYFSNGLRREEVLRKQMELAALVSHSSEAIVAETPDGEITHWNPAAEAMFGYPADVAIGQDLTTLLSPQPYAMPQIDQDEAPPVAALSAAQTMRHRDGHQVFVLASKAPIIEHDNAVSGHSHFFRDISERVRSHQRIVDLNASLEHQVAERTSELVQFSVLQRAILAHAGYAIIATDSSGFVTMFNPAAEKLLGYSADDVIGRRKASQFIEADELQERALRLAEQTGTPVAGTLEAVAALTSLGRSDTSEWTYVSQDGRRLPVLLTLSTLRDDNDQVIGYLGVAVDLTEQKLHEKQLRLAMDAARSANQSKSDFLANMSHEIRTPMNAILGMLYLLQRSELPGAAQDMVTKIDRSARSLLEIINDILDFSKIEAGRIDLERAPFDLNQLFDNIADLMRSSLSAKPVEMIVEPLPRECRWLLGDALRINQVLVNLVGNAIKFTEQGEVVLSVRRFPSGDPNKIKLLFSVRDTGIGISKEKQSLIFSPFLQADTSTSRRYGGSGLGLTISRRLIELMGGALEVESVPGRGSEFYFVITLERTDPPKAQQEAALLPPESMPRVLIADDHDAALNNLVRIATELGWRVDAVASGQAAMQAIEDATEPYDIFLLDWRMPDIDGVAIARQVRARATPGRHPVIVMVTAYERRLLEQHPEQQDLDAVMTKPVTSAALHRLVEQLVDERPNARPATPTFVARRLEGAQLLLVDDSEINCEVAQRILEGEGAMVTVAHDGEQAVNTLKRAPDLFHLVLMDVQMPVVDGYEATRRLRQIPSLASLPVIALTAGAFRPQQEKALEAGMNGFIAKPFNVEELVTAIRHFLQPGSRRVSSLPHERAPAAGPEWAHTDPLLLDAARAQSLWREREPYERYLLKLLRDNPDPAETAAAHLRNNELPAIGALAHKLRGAAGSLALPALAGASGDLESRVEQGHDLTAALLALKDTMAQTTAAIHAFLQTSPSTQDTGQTGAALDDDSALILENALRSDDADKIDHALLICAPRLPPPLQEDLQRAVDDFDFRRAEATLRDWQANHPR

SEQ ID NO: 4886 - protein, 492 aa, Nicotiana plumbaginifolia
MDPYKYRPSSANNSPFWTTNSGAPVWNNNSSMTVGTRGPILLEDYHLVEKLANFDRERIPERVVHARGASAKGFFEVTHDITHLTCADFLRAPGVQTPVIVRFSTVIHERGSPETLRDPRGFAVKFYTREGNFDLVGNNFPVFFVRDGMKFPDMVHALKPNPKSHIQENWRILDFFSHHPESLHMFSFLFDDLGVPQDYRHMEGSGVNTYMLINKAGKAHYVKFHWKPTCGVKCLLEEEAIKVGGANHSHATKDLYDSIAAGNYPEWKLFIQIIDPDHEDRFDFDPLDVTKTWPEDILPLQPVGRLVLNKNIDNFFAENEQLAFWPAIVVPGVYCSDDKLLQTRIFSYSDAQRHRLGPNYLQLPVNAPKCAHHNNHHEGFMNFMHRDEEVNYFPSRFDPCRHAEQYPIPPCVLTGKRDKCIIEKENNFKQPGERYRSWAPDRQERFICRWVDALSDPRVTHEIRSIWFSYWSQADKTLGQKIASRLNVRPTM

SEQ ID NO: 4887 - protein, 259 aa, Pseudomonas syringae pv. syringae B728a
MIQIHALPAFNDNYIWLLQDLSSQQCAVVDPGDAKPVLGWLAQNPDYRLTDILITHHHNDHVGGVAELKQSTAARVLGPAAETIPARDIALVDNDRMTVLGLEFVVHAVPGHTLGHIAFYHEDATTPLLFSGDTLFAAGCGRLFEGTPQQMHDSLGRLAKLPDSTLIYCAHEYTLSNLRFAQAVEPANVDIAERLAEVTRWRSENRISLPSNMALEKRTNPFLRTGETSVKEKADERSDAQNTSQSAVFASLRAWKDKF

SEQ ID NO: 4888 - protein, 493 aa, Shewanella sp. ANA-3
MSDNQTPAAKHALMWFRQDLRLTDNQALTAACDWVRQAPGAKLRAIYIATPNQWLSHDMAPIQIDFIQRHVNLLAQGLASLGIEFELIQLDSFKEVPAFLASYCEKLGVERVFAGREPEINEQKRDQACLDTGIPLVLSDEHCLLPPGTVLNLSGDMYKVFTPFSRKWREIAAKRAIFPLAVPAPLGPMLPEPKPISFKERFQSTSKLTSSEQWAAGEGQAKRILTAFIKQKVQDYKQDRDFPALDGTSVISPYLALGVLSPRQCIAALLGRFPDVIVDDTSPGRTWLNELIWREFYRHLLVAFPDLSKGHNFNRQADHVQWRNNQAEFLAWCEGKTGYPIVDAAMRQLNQTGWMHNRLRMVVASFLTKHLLIDWRWGERYFRQHLIDGDLAANNGGWQWSAGCGCDAQPYFRIFNPISQSEKFDPDGSFIRKYLPELASWGIKRLHQPNMQKTPSLFEAPMLESDSAYPCAIVEHNAARARALAVLGVLKKA

SEQ ID NO: 4889 - protein, 909 aa, Pseudomonas tolaasii
MLRRMGIKGRVLLLTLLPTTLMALLLGGYFTWMQLSELQTQLLQRGEMIAEQLAPLVAPALSTRNTDLLERIATQSLEQPDVRAVSFLAPDRSPLAHARPTMLNQPPVGNSSHLVAASGNDATRYLLPVFGRHRNLAGELIPDEADRLLGWVEVELSHNGMLLRGYRSLFASLLLIAIGLICTAALAVRISRTINSPIGQIKQPVAQLKDGNLETCLAPLGSQELDQLASGINRMAETLQNAQEELQHSIDQATEDVRQNLETIEIQNIELDLARKEALEASRIKSEFLANMSHEIRTPLNGILGFTHLLQKSELSPRHVDYLGTIEKSADNLLGIINEILDFSKIEAGKLVLDSVPFNLRDLLQDTLTILAPAAHAKQLELVSLVYRDTPLAVVGDPLRLKQILTNLISNAIKFTREGTIVARAMVEDEEEDSVQLRISVQDTGIGLSNQDVRALFQAFTEADNSLSRQPGGTGLGLVISKRLIEQMGGEIGVDSTPGEGSEFWISLNLPKTRDDVDDLPSAPLLGRRVAVLENHDVARQALQHQLEDCGLEVTPFNTLESLTNGITSTHQTEQAIDLAVLGVTANDIPPERLNQHLWDLEHLGCKVLVLCPTTEQMLFNQSVPNPNSQLQAKTPCTRKLRRALADLISPPVAQRTREPLSSRAPRVLCVDDNPANLLLVQTLLEDMGAKVLAVESGYAAIDAVKQETFDLVLMDVQMPGMDRRQSTEAIRQWESERHGTPLPVVALTAHAMANEKRALLQSGMDDYLTKPISERQLAQVVLKWTGLALRNQGPERGNDNLGHGVQLLVLDHEEGLAAANKADLAADMLAMLLASLEADRLAITVAREAKDNNALIERIHRLHGATRYCGVAELRAACQRAETLLKQDDAQGHGALDELDMAIGAAGQ

SEQ ID NO: 4890 - protein, 405 aa, Actinobacillus pleuropneumoniae serovar 1 str. 4074
MERFPKSDKLANVRYDIRGAIHKEALRLEEEGNKILKLNIGNPAPFGFEAPDEIVVDVIRNLPKSQGYCDSKGLYSARKAIVQYYQSKGIRNVDVNDVYIGNGVSELITMSMQALLNDGDEMLIPMPDYPLWTAAATLAGGKAVHYLCDENNEWMPDIEDIKAKITPRTKGILVINPNNPTGAVYSRSMLLEIAEIARQHNLMIFADEIYEKIIYDGAVHHHIAALAPDLLCVTYNGLSKAYRVAGFRQGWMVLSGPKNQARGFIEGLDMLASMRLCATTPMQHAIQTALGGYQSINEFVLPGGRLLEQRNKMYELLVQIPGISCVKAKGALYMFPKIDTEMYGIKDDAKFIYDLLQAERVLLVQGSGFNWHKPDHFRVVTLPYAHQIEEALGRLANFLKTYKQS

SEQ ID NO: 4891 - protein, 166 aa, Zea mays
MADDGGSHEGSGGGGGVREQDRFLPIANISRIMKKAVPANGKIAKDAKETLQECVSEFISFVTSEASDKCQKEKRKTINGDDLLWAMATLGFEEYVEPLKIYLQKYKEMEGDSKLSTKAGEGSVKKDAISPHGGTSSSSNQLVQHGVYNQGMGYMQPQVIYRTVIC

SEQ ID NO: 4892 - protein, 151 aa, Picea glauca
MAMDPLLSTVQQLLGVPDDLERILHAPTRSYTRDTEATASTPVDVKEYPNSYVFIVDMPGLKSNDIKVQVEDENVLNISGERKRNEKEEGEVKYIRMERRVAKFMRKFSLPADCNLEAISAACQDGVLTVTVPKLPPPEPKKPKTIAVKIG

SEQ ID NO: 4893 - protein, 775 aa, Schizosaccharomyces pombe
MSTISEVGPWELGLSLGSGGPNSSRLAKHRETGQLAVVKPIVGWSELTSSQQARIEGELVLLRLIEHPNVLQLIDVISAQEQLFVVVEYMPGGELFDCMLRKGSFTEQDTAKFLWQILCGLEYCHKLHICHRDLKPENLYLDAHGSIKIGEFGMASIQQPGKLLQTSCGSPHYASPEIIMGRSYDGCASDIWSCGIIFFALLTGKLPFDDDNIRSLLLKVCQGQFEMPSNISPQAQHLLYRMLDVDSSTRITMEQIREHPFLSCFVHPNISIPIISAPIQPIDPLIVQHLSLVFRCSDDPMPLYEKLASQSPLVEKTLYTLLSRHLHPPSSAAVDRNRAVVDDLLGTAASNGQQMDEEEIEQAINIPTLAPYPISYAAESVPRPATSASPFLTPVTTSGTFNYSFNATNPQSILQRPATTSSAVPQLPKSVTPGLAYPHDSSMLSSNYRPPSALSPRNFNVSINDPEVQLSRRATSLDMSNDFRMNENDPSIVGNLAASNFPTGMGPPRKRVTSRMSEHTGNRVVSFPRGSAFNPRVTRFNVGNEQFSNNIDNNNYNQPYANATMNNSRRLRTPSGERSMRADLSQSPASYDSLNVPKHRRRQSLFSPSSTKKKLSGSPFQPKRSFLRRLFSSEPSCKCVYASLVASELEHEILEVLRRWQLLGIGIADIIYDSVSASISARIKRQNSLNLKPVRFRISVLAEFFGSQAVFVLESGSSTTFDHLATEFQLIFEDKGFLDNLELSYFQASASRPVSRMSVSSSPFAVFRQRQSVQS

SEQ ID NO: 4894 - protein, 161 aa, Pseudotsuga menziesii
MSIIPSFFGRRSSSAFDPFSLDVWDPFRAFTDLAAGGPSGQFVNEASAVANTQIDWKETPEAHIFKADLPGLKKEEVKIELEEGQRILQISGERSKEEEQKNDKWHRIERSHGKFLRRFRLPDNAKVEEIKAAMENGVLTVTVPKEPEPQPPQPKSIEISG

SEQ ID NO: 4895 - protein, 146 aa, Funaria hygrometrica
MALSLFGRGSGSFFDPFDLSLLESGPSRQFARDAHAVANTQIDWRETPEAHIFKADLPGLKKEEVKVQLVDGKTLEISGERRKEEVHKDDTWHRVERAHGSFLRRFRLPDNSNVEAVEAQVQDGVLTVTIPKIQKPKPQVRQIEIA

SEQ ID NO: 4896 - protein, 454 aa, Burkholderia pseudomallei K96243
MDFRSSTQPERHAMPDSNPTAAALLAQPLTLPNGTVLKNRLAKSALSEALCGHDGRVTPQLIALYRRWSGSGAGLLVTGNVMIDGKALGEPGNVVIEDDRDLPRLREWAAAAKAHGSEIWMQINHPGKQAMRGLNEETVAPSAIGFGPKLSPYFAVPRALTVDEIDALIRRYGTTAAVAQQAGFTGVQLHGAHGYLINQFLSPQHNQRTDEWGGSAENRRRFVLAVYAEVRRRVGPDFPIGIKLNSADFQRGGFTEEESLDVIRALAEAGIDLIEISGGTYETPVMQLGDRKASTIAREAYFLAFAEKVRADVKVPLMVTGGFRSLAGMEAPLRDGALDLIGLGRILAIEPDAPARLLRGEETRHRVKPLSTGVKYFDSLGSLEVTWYTRQLHRIGKGRNPIPDENALKSFLLDLSSKGCAIFKARRLRASSSEASAARGSATSVAGGPRHDAH

SEQ ID NO: 4897 - protein, 440 aa, Synechococcus elongatus PCC 6301
MSLFSRLRFSVYGSALLAASGAVCIGISAEHARALPWQDSPKVVLDQAWQLIDREYVDPTFNRQDWQAVRRELLSRNYGSNEEAYAALRSALRRLDDPYTRFLAPEQFKTLTEQTAGEASGIGIEIIPDSKDSRPRIQAILDNSPASKGDVQVGDRILAIDADSTRELTLDEVRNRLQGKVGSEIDLKLQRGDRIFSVKLTRVQIEIPSVTAELRQHSGRSVGYIQLREFTAHAAREMRTSIRSLDEQGATSYVLDLRGNPGGLLYSSIEIARMWLNNGTIVKTVDRNGKSETINANNSAITNKPLAVLVDQNSASSSEILVGALKDNNRAVVIGRQTFGKALVQSVHTLADGSGLAVTVAHYYTPNGTDLGNRGIQPDVEVRLNQRQQALQRSDPSFLGSNQDPTYGQAIATLEQRTAESTPSPASSPQLSQRPSEIRP

SEQ ID NO: 4898 - protein, 585 aa, Xanthomonas campestris pv. campestris str. 8004
MIERNVTTPAWGAWPAGDGQVRFALWAPDAHTVEVIFDSGERAALQRQDDGFFSGVVACALDARYRYRVDGQTPVPDPASRWQPDGVHGSSAVQRVDGYHWTHTQWQGRPWDEAVIYELHVGACGGYAGVQAQLPQLAAMGITAIELMPLSAFPGAHNWGYDGVLPYAPAEAYGTPDELKALIDAAHGHGLMVLLDVVYNHFGPDGNYLGSYASAFFNEDKPTPWGAAIDFRKPPVQRYFLDNALMWLHEYGFDGLRLDAVHAITPNAFLDTLRETIEASLPAGRHVHLVLENEANQASQLDRGYTAQWDDDFHNALHVLLTGEEEGYYAAFADQPTQHLARVLGEGFAYQGQPDPRGHVRGEPSGALPPHKFVIFAQNHDQIGNRACGERLSVLVSPQRLRAALALTALTPMIPLFFMGEPWGATQPFLFFTDFGPPLDDAVREGRRREFAHFAAFADPAKRETIPDPNSHATFAASRAPIEDAAHGDGAQWAAWFQALLGVRRQWLVPGLAQARALRTSVLADGAVTATWELPGGLWHIAFNVGAEAVPLPPLRGRVAHAENVTADAQTLPTDSFIAWYEEHA

SEQ ID NO: 4899 - protein, 283 aa, Physcomitrella patens
MGRGKIEIKKIENTTSRQVTFSKRRGGLLKKAHELAVLCDAEVALVIFSSTGKLFEYASSGSMRDIIERYKKSPNGAMKSGASTDFLGREVVKLQEQVERLKSSQRRMLGEDLSALKVPDLLQLEQQLDLGASRVRARKNQLILEEIEGLQKKEQELMVANEDLRKKIADAEAVARANLSEARPESPRHLARTLSRDVSASSHPAATVYPHPNLRDVQRSQTSLQLGMFSSESYPPSSSRWPSEQQFPSASEGCAGESSMKWDHPHYHIQNRLHANILPSVRI

SEQ ID NO: 4900 - protein, 545 aa, Frankia sp. EAN1pec
MPKIIAFDEEARRGLERGMNQLADAVKVTLGPKGRNVVLEKKWGVPTITNDGVSIAKEIELEDPYEKIGAELVKEVAKKTNDVAGDGTTTATILAQALVREGLRNVAAGANPIGLKKGIEAAVERVSEELSSVAKDVETKEQIASAASISAGDPAIGAMIAEAMDKVGKEGVITVEESNTFGLELELTEGMRFDKGYISPYFVTDTDRMEAVLDDPYILITNSKISAVKDLLPILEKVMQAGKQLVILSEDVEGEALATLVVNKIRGTFKSAAVKAPGFGDRRKAMLTDIAVLTGGQVISEDIGLKLEGTTVDLLGRARKVVITKDETTIVEGAGDADQIAGRVNQIRNEIEKSDSDYDREKLQERLAKLAGGVAVIKVGAATEVELKEKKHRIEDAVSNAKAAVEEGIVAGGGVALLQASTSAFEKLDLSGDEATGALIVERALAAPLRQIATNAGLEGGVVVEKVRGLPTGHGLNAATGEYVDMIAAGIIDPVKVTRSALQNAASITGLFLTIEVVVADKPEPAGAGGGADAAAMGGMGGMGF

SEQ ID NO: 4901 - protein, 651 aa, Chlamydophila caviae GPIC
MIKILRLCALVLTCLPSFSFASELLHEADIRKTVDRLIEYHVDVQDISPDILMRSLRGYSQSFDSHKAYLTEQEVGNFIQSTDIKKRLLKNYKTNNFAIYQNLNRVIKDSIIRAREWRTEWLSDPEALVKEAATHALIKKPKQWARSIQEVKERQRSLLLSYISVYLSDSSKNRYQGKEASLTQLCVRQLEAHENPYLGINDYGKPMSPQEESHHFHVRVVKAMAHSLDAHTTYFSKDEALAMRIQLEKGMCGIGVILKEDIDGVSVKEIIPGGPAHKTGDLHVDDIIYRVDGKNIENLPFRAVLDCLRGSQGSEVTLDVHSQDQNRTVKLRREKISLDDRRVDVSYESYGNGVIGKITLHSFYEGENQISSEQDLKRAIQSLQDKNLLGLVLDIRENTGGFLSQAIKVSGLFMTNGVVVVSRYADGSIKRYRTVSPKKFYDGPLTILVSKSSASAAEIVAQTLQDYGVAIIVGDEQTYGKGTIQHQTITADSDKEGFFKVTVGKYYSPSGKSTQLQGVRSDIHIASRYFAEPLGERYLEHPLPADSCDNVMDDNLKDLDAQMRPWFQKYYTPNLQKEETVWKEMLPQLTANSKQRLSENKNYKIFLDELKDPSEAIRPFGSNDLQMEESVNILKDMILLRERKAAISLGG

SEQ ID NO: 4902 - protein, 164 aa, Caulobacter crescentus CB15
MPHAGLCLYRREAPSRRSAMRYLHTMIRVRDLDASLRFYCKGLGLQEMYRTENEKGRFTLVFLAAPEDVELAKARKAPLVELTYNWDDEEYGGGRNFGHLAYRVDDIYETCQRLMDMGVTINRPPRDGHMAFVRSPDNISIELLQDGDLPPAEPWVSMPNVGAW

SEQ ID NO: 4903 - protein, 392 aa, Nocardioides sp. JS614
MTADVFAPTTLGPVRLRNRTVKAATFEGRAPHGQVTDELIDYHLAVTHGGVGLTTVAYLAVAPEGRTHREQIVVGEPTLAGLTRLADAIHESGAAIAGQVGHAGPVANGRSNGVKAISASRMPSPLSMQLIRSATEADLTRVTKAYVAASRLLVRAGFDVLELHMAHSYLISSFLAPGLNRRKDGWGGSLANRARLGRQVARAVRDEIGSDAAITAKVSVGDGFRGGVTTDEGIEYAQLLEADGTLDALQLSGGSSLMNPMYLFRGEAPVREFAATMPLVVRLGMKTPVGQSFLKAYPFEEAYFREKALRFREAVSMPLMLLGGINRLATMEQAMAEGFDFVAMGRALLREPDLVDRLQSGRATAGVCIHCNRCMPTIYSGTRCPVIAPEPA

SEQ ID NO: 4904 - protein, 544 aa, Rhodospirillum rubrum
MVLTLLAGLTGCAHPAPLASTALPQATAVSHSGKIPPTAVWTVPSAFDKGLRGETEDLFSYGYGAIADRYIDEVNLRELGVEGLSGLTSLDPAITVAPVGAMLDVYRNGTVVGRFPLAGARDSAGWGVLTANVVMLARDLSPSLNASDPEEIYQAIFTSALGGLDPFSRYASRDDAEVNRGQRNGFGGIGVMYDVGGRGATITQVMPGTPAADARLRLGDVIVAVNGQSTRGATRHDLREWLRGPTSSEVTLTLVSADTPTERTLTLTRALIIMPTVDLHLDEGVGFITVSSFNQGTTTRVAEAIGEARRQLGADLRGLVIDLRGNPGGLLDQAVTMSDLFLDTGPIVSTRGRNPDARQFYASSGGDIAQNLPIVALIDGDSASAAEIVAAALQDNGRAVVIGTSSFGKGTVQTLIQLPNGGELTLTWSRFHSPSGYVLHGLGVLPVACTSGIAEASREDGAPADKVLTTMRRDQSEIAAHVALWRQTDMRDASRRLALRDACPAEHHPRALIDETVARKLIADQGLYGRALRLTAPAQSASGL

SEQ ID NO: 4905 - protein, 309 aa, Zea mays
  misc_feature (198)..(198): Xaa can be any naturally occurring amino acid
MARHFVLNTGAKVPYVGLGTWQSDPGVVGNAVYAAVKAGYRHIDCARVYGNEKEIGLALKKLFEEGVVKREDMFITSKLWNDHHAPEDVPEALNHSLNDLQLEYLDLYLIHWPFRVKKGANTSPENFVTPDIPATWGAMEKLYDAGKARAIGVSNFSSKKLGDLLAVARVPPAVDQVECHPGWQQTKLHSFCQSTGVXTAYSPLGSPGTTWMNGNVLKEPIIISIAEKLGKTPAQVALRWNIQMGHSVLPKSTNEERIKQNLDVYDWSIPDDLLAKFSEIKQDRLLRGNFIVNPESAYKTHEELWDGEL

SEQ ID NO: 4906 - protein, 517 aa, Lilium longiflorum
MGNSLGCSASGERLVSAARDGDAVEARMLLEFSPCLAKYSTFGGLNSPLHFAAAKGHIEIVEMLLENGADVNSRNYCGQTALMQACRHGHWEVVQTLLLFRSNVTRADYMSGRTALHFAAMDGHTRCIRLLVADFVPSTPYGETTDSPVEGGERARNGGGSPVSPSESKNDQLSLARFINKAAEGGLTALHMAALSGHFDCVQLLLDLHADVSAETYNYSSSMNFIGSGSTPLHYAACGGSLKCCQMLLAKGASRLKMNGNGWLPIDVARIWGWNILEPILDPTSDPNLPTFPPSTYLSLPLKSIVNIARECGLQSSTTNEDNDLCAVCLERACNVAAEGCSHELCVQCALYLCSTSNKTSETAGPPGSIPCPLCRNGIVSFMKLPNTTAKELRPNLSLSFCNPCIFPPRTLNQPAADCKSEFRKNRVTSVSSEAICPLPCAPFPSVSIPSCSCDDDPCQCIESDGDRQEQQPHRRSQSTPTELDRLEEQSLASCSGMFWTRRNCQREHQCNAEINA

SEQ ID NO: 4907 - protein, 454 aa, Fremyella diplosiphon Fd33
MLAGKVMSEPRVTILHVDDNEANRYVVTRILQNAGFAVVEAATGAAGLKAVANHQPDLVILDVKLPDISGFEVCRQIKANPELAFIPVLQLSASFIQSQDKAEGLDSGADGYLVQPVEPIELLATVRSLLRIRRAEEAALSSAREWQTTFDSINDGVCLVDREGRIRRCNRAMIQLVCKHKSEILGRLYHELLNAEWGMGDGTCFRRAQETHQRQVLEFQSQGRWFAKTIDPVFDRLGTLTGAVFILSDITERKQAEVLLQEQNERLNRLMVSLQQQTEQAQQANRIKDEFLAVLSHELRSPLNPILGWTKILQTSQQDVAKTQYALATIERNAKLQAQLIEDLLNVSRILQGKLSLNKVPVSLSLIIKAALETVRLAAEAKSIQIQTVFEPNLGQVLGDSGRLQQVVCNLLSNAIKFTSQGGRVEVRLERMKNEVDTHPLEYTQITVSDTGMG

SEQ ID NO: 4908 - protein, 217 aa, Euryale ferox
MGRGKIEIKRIENASNRQVTFSKRKQGILKKAREISVLCDAQVSLVLFSSAGKLNEYCSPSTNLKEILTRYQKTSGKKLWDARHEYLNTELDRIRKENENMQIELRHLMGEDLSSLSVVELRNLEDSLQFGYDHVRMKQTECLNNDIEILRKNERMLEEENRQLKYILHQQEQMAMREMRDIEIGSNKKEKGYPSQSRVQPFGFCVQPIQPNLQQNK

SEQ ID NO: 4909 - protein, 376 aa, Arabidopsis thaliana
MAKEIESATDLGDTNIKGVLVHGGRYFQYNVYGNLFEVSNKYVPPIRPIGRGAYGFVCAAVDSETHEEIAIKKIGKAFDNKVDAKRTLREIKLLRHLEHENVVVIKDIIRPPKKEDFVDVYIVFELMDTDLHQIIRSNQSLNDDHCQYFLYQILRGLKYIHSANVLHRDLKPSNLLLNSNCDLKITDFGLARTTSETEYMTEYVVTRWYRAPELLLNSSEYTSAIDVWSVGCIFAEIMTREPLFPGKDYVHQLKLITELIGSPDGASLEFLRSANARKYVKELPKFPRQNFSARFPSMNSTAIDLLEKMLVFDPVKRITVEEALCYPYLSALHDLNDEPVCSNHFSFHFEDPSSTEEEIKELVWLESVKFNPLPSI

SEQ ID NO: 4910 - protein, 392 aa, Acridocarpus adenophorus
DLEPVNPADVPVTAAGALKSYKLAAKAISRLQSLPSGDISLLCDVLVKEVRDLTGYDRVMAYKFHEDEHGEVVSECRRSDLEAYLGLHYPATDIPQASRFLFMKNKVRMICDCLAPPVKVIQDERLPQPLSLCGSTLRSPHGCHAQYMENMGTIASLVMSVSINEDDDMMDGDQQQMPRKLWGLVVCHHTSPRFVPFPLRYACEFLIQVFGVQINKEVELAAQVREKHILRIQTLLCDMLFRDAPVAIITQSPNVMDLVKCDGAALYYKNKFWLLGITPTEAQIRHIVEWLLECHSGNTGLSTDSLMEAGYPGASVLGDAVCGMAAVGITSRDFLFWFRSHTAKEIKWGGAKHDPDDKDDGTKMHPRSSFKAFLEVVKWRSLPWEDVEMDAI

SEQ ID NO: 4911 - protein, 466 aa, Streptococcus suis 89/1591
MVTEQREYRFPEGFLWGSSTSGPQSEGSVAGDGKGWNNWDYWYSQEPKLFHQQIGPEQTSTFYEHFQSDLDLLVETGHSIFRTSIQWSRLIPEGIGEVNPQAVEFYRAVFAGIRERGIKLLVNLYHFDLPYVLQEKGGWENKEIVWAYEAYARQCFSLFGDLVDHWITFNEPIVPVECGYLGSYHYPCKVDAKAAVVVAYHTQLASSLAVRACHQLHPDHKISIVLNLTPAYPRSQSPEDLQAARIAELFQTRSFLDPSVLGQYPRELVDILEKHGLRPETTEEELTIIKENRVDFLGVNYYQPLRVQTPSEDGWNGEATFLSQYFQPYDKPDKKINPHRGWEIYEEGLYDIAKNIQENYGNIEWLVTENGMGVEGEDVFEENGMIQDDYRIHFMEDHLIQLHRGIDEGANCKGYMVWTFIDCWSWLNAYKNRYGLVSLDLQTQKRTVKKSGYWFKQVSAKNGFIR

SEQ ID NO: 4912 - protein, 147 aa, Funaria hygrometrica
MDFPLFQILSFPDELEKSLNPQSQKYVRDTKAMVSTAVDVKELPDAYIFVADMPGLKSADMKVQLENDNVLVIGGTRKREEPDPKVKYIRMERNSGSFMRKFTLPQNSNLDKIAASCVDGILTVTVPKIPPPEPAKPRTIEVTMGNQ

SEQ ID NO: 4913 - protein, 383 aa, Xanthomonas campestris pv. campestris str. ATCC 33913
MWGMLAVLLVFTQLTIFAVTLYLHRSQAHRGVDFHPVIAHFFRFWTWLTTSMITREWVAIHRKHHAKVETEEDPHSPQTKGIGQVFWRGVELYREARAQRADIEQYGKGAPNDWIERHLYTPHANAGPIALLVVNSVLFGLPGIALWAIQMAWIPFWAAGVVNGLGHWWGYRNFESADTSTNLTPWALWIGGEELHNNHHAFPSSARFSMRRWELDIGWIAIRCLQALGLAKVLRVAPSLDIRPNIAVPDADTLKALLSHRFQAMTDYQRNVLKPALREEAAATGAKLRQLLPRRLRKGLVDDGRWLKPDAREQLQHWVAQRPRMRTLVEYRARLTAVLEARSHDASERLKQLQQWCHEAEASGNAALQAYAARLKGYALSGT

SEQ ID NO: 4914 - protein, 500 aa, Triticum aestivum
  misc_feature (117)..(117): Xaa can be any naturally occurring amino acid
  misc_feature (126)..(126): Xaa can be any naturally occurring amino acid
  misc_feature (170)..(170): Xaa can be any naturally occurring amino acid
  misc_feature (251)..(251): Xaa can be any naturally occurring amino acid
  misc_feature (280)..(280): Xaa can be any naturally occurring amino acid
  misc_feature (403)..(403): Xaa can be any naturally occurring amino acid
  misc_feature (414)..(414): Xaa can be any naturally occurring amino acid
  misc_feature (429)..(429): Xaa can be any naturally occurring amino acid
MVLSHAASAGSSDDSVHSTFASRYVRASLPRFRMPENSIPKEAAYQIINDELMLDGNPRLNLASFVTTWMEPECNKLMMDSINKNYVDMDEYPVTTELQNRCVNMIAHLFNAPLGEXETAVGVGTXVGSSEAIMLAGLAFKRRWQNKMKAAGKPCDKPNIVTGANVQVCXWEKFARYFEVELKEVKLSEGYYVMDPEKAVEMVDENTICVAAILGSTLNGEFEDVKMLNDLLVKKNEETGWDTPIHVDAAXSGGFIAPFLYPELEWDFRLPLVKSINVSXGHKYGLVYAGIGWCIWRSKEDLPDELIFHINYLGADQPTFTLNFSKGSSQVIAQYYQLIRLGFEGYRNIMDNCQENAMVLKEGLERTGRFNIVSKDQGVPLVAFSLKDSSRHDEFEISEFLRXRFGWIVPPYTXPPTRKHVTVLRVRLXRRTFSRTLAERLVLDVEKVLHELDALPARVVANGGDAAAASASEREMEKQREVISLWKRAVLAKKKTNGVC

SEQ ID NO: 4915 - protein, 353 aa, Saccharomyces cerevisiae
MPKRIVYNISSDFQLKSLLGEGAYGVVCSATHKPTGEIVAIKKIEPFDKPLFALRTLREIKILKHFKHENIITIFNIQRPDSFENFNEVYIIQELMQTDLHRVISTQMLSDDHIQYFIYQTLRAVKVLHGSNVIHRDLKPSNLLINSNCDLKVCDFGLARIIDESAADNSEPTGQQSGMTEYVATRWYRAPEVMLTSAKYSRAMDVWSCGCILAELFLRRPIFPGRDYRHQLLLIFGIIGTPHSDNDLRCIESPRAREYIKSLPMYPAAPLEKMFPRVNPKGIDLLQRMLVFDPAKRITAKEALEHPYLQTYHDPNDEPEGEPIPPSFFEFDHHKEALTTKDLKKLIWNEIFS

SEQ ID NO: 4916 - protein, 557 aa, Arabidopsis thaliana
  misc_feature (191)..(191): Xaa can be any naturally occurring amino acid
MQRFCVCSPSSYRLNPITSMATGSGSLIWFRKGLRVHDNPALEYASKGSEFMYPVFVIDPHYMESDPSAFSPGSSRAGVNRIRFLLESLKDLDSSLKKLGSRLLVFKGEPGEVLVRCLQEWKVKRLCFEYDTDPYYQALDVKVKDYASSTGVEVFSPVSHTLFNPAHIIEKNGGKPPLSYQSFLKVAGEPXSCAKSELVMSYSSLPPIGDIGNLGISEVPSLEELGYKDDEQADWTPFRGGESEALKRLTKSISDKAWVANFEKPKGDPSAFLKPATTVMSPYLKFGCLSSRYFYQCLQNIYKDVKKHTSPPVSLLGQLLWREFFYTTAFGTPNFDKMKGNRICKQIPWNEDHAMLAAWRDGKTGYPWIDAIMVQLLKWGWMHHLARHCVACFLTRGDLFIHWEQGRDVFERLLIDSDWAINNGNWMWLSCSSFFYQFNRIYSPISFGKKYDPDGKYIRHFLPVLKDMPKQYIYEPWTAPLSVQTKANCIVGKDYPKPMVLHDSASKECKRKMGEAYALNKKMDGKVDEENLRDLRRKLQKDEHEESKIRNQRPKLK

SEQ ID NO: 4917 - protein, 210 aa, Glycine max
MPSRRRTLLKVIILGDSGVGKTSLMNQYVNKKFSNQYKATIGADFLTKEVQFEDRLFTLQIWDTAGQERFQSLGVAFYLAFYRGADCCVLVYDVNSMKSFDNLNNWREEFLIQASPSDPENFPFVVIGNKIDIDGGNSRVVSEKKARAWCASKGNIPYFETSAKEGLNVEEAFQCIAKNALKSGEEEELYLPDTIDVGNSSQPRATGCEC

SEQ ID NO: 4918 - protein, 228 aa, Glycine max
MAAPSSSAAANIMLAISEKKTNSVDLYRPLRNYVAFHYSEREAQNLEYDLQTLKQLRSDVERHSDPSLPARRDLLQSYYKSLCLVETRFPISSDPDHVNALTFVWFDAFKPKQKASQQNIHLEKASVLFNLGAVYSQIGLSYDRNTVDGRRQASHAFIAAAGSFAFLRDNASLKASVGSSTTVDLSVECAGMLEKLMLAQAQECVFENTIAKGSTPGVYAKISRQVRC

SEQ ID NO: 4919 - protein, 421 aa, Xanthomonas oryzae pv. oryzae KACC10331
MPRSPPSCLHQPESAAVEMPMLSEPLIDFLTSGVARLGVWGMLAVLLVFTQLTIFAVTLYLHRSQAHRGVDFHPVIAHFFRFWTWFTTSMISREWVAIHRKHHAKVETEEDPHSPQSKGISQVFWRGVELYREARTQRADIEQYGKAAPTDWIERHLYTPHANAGPVALLVINSVLFGLPGIALWAVQMAWIPFWAAGVVNVLGHWWGYRNFESADTSTNLTPWALRIGGEELHTHHHAFPSSARFSMRRWELDIGWVVIRSVQAFGLAKVLRVAPSLDIRPNIAVLDADTLKPLLSHRFQAMTDYQRNVLKPALREEAAATGAKLRELLPRRLRKGLVDDGRWLKPEARAQLQTWVAQRPRMRTLVEYRARLTAVLEARSHDASERLRQLQQWCHEAEASGNAALQAYAARLKGDALSGA

SEQ ID NO: 4920 - protein, 444 aa, Oryza sativa
  misc_feature (143)..(143): Xaa can be any naturally occurring amino acid
MRMGKYEMGRALGEGHFGKVKLARHADTGAAFAIKILDRQRILAMKIDEQIKREIATLKLLKHPNVVRLHEVSASKTKIYMVLEYVNGGELFDKIALKGKLSEKEGRKLFQQLMDAVSYCHEKGVYHRDLKPENVLVDAKGNXKVSDFGLSALPQNQRKDGLLHTTCGSPNYIAPEVLLNRGYDGSLSDIWSCGVILYVMLTGNLPFDDQNTVVLYQKILKGDARIPKWLSPGAQDILRKILDPNPITRLDITGIRAHEWFRQDYTPAMPFDDDDDNNISDGNLHMTENQDIETSPAISQINAFQLIGMSSCLDLSGFFEKEDVSERKIRFVSNYSPTSLFEKIESTVTEKGFQVQKNSGKLKVIQVCKEPANPRGHGNLLISAEVFEINESLYVVELKRSSGDCSLYRQLCASLSEDLGICKRQQLLKKDSMRQDLCRYNSSF

SEQ ID NO: 4921 - protein, 140 aa, Magnetospirillum magnetotacticum MS-1
MLYPTYLRRSDPFALMRSMMRDLDRGFWPPARAAFPAVNVWQGPEAVGVTAELPGIEPGDIEISVKDNVLTLSGERKAPEVLDGARWHRNERSFGRFSRTIRLPFAASDDKVEARMTNGVLRIVISRPEEEKPKKIEGIL

SEQ ID NO: 4922 - protein, 411 aa, Synechococcus sp. PCC 7002
MLRKRLQAGLCSLLLVLVLVFGPMERAIAFTDEQDLLLQAWRYVSQAYVDETFNHQNWWLIRQKFLKRPLKTRDEAYEAVGEMLALLDDPYTRLLRPEQYRSLKVSTSGELSGVGLQINVNPEVDVLEVILPLPGSPAEAAGIEAKDQILAIDGIDTRNIGLEEAAARMRGKKGSTVSLTVKSPKTDTVRTVKVTRDTIALNPVYDKLDEKNGEKVGYIRLNQFSANAKTEIIKSLNQLQKQGADRYVLDLRNNPGGLLQAGIEIARLWLDQETIVYTVNRQGIFESYSAVGQPLTDAPLVVLVNQATASASEILAGALQDNGRAMLVGEKTFGKGLIQSLFELPDGAGMAVTVAKYETPLHHDINKLGIMPDEVVPQEPIGYAMMGSETDLQYQAALDLLTQDQRSPKFP

SEQ ID NO: 4923 - protein, 459 aa, Bacillus cereus G9241
MNEHYDKQRQSLLGRDFNDNGERNEQAILHSQTVGSRGPVLEQDSVLHEALQEFIHEKILERPVHVKGFGAFGYFQTIYPMPEHTKLNFLQNANEKVPIMVRFSLAVSTKGTPDTARNVRGFSTKFYTKEGIFDLLCNHIPVFSVRDPMRFPETIQALSPSPKNNLIDPNRFWSFVARAPESIHFVVRLYSDNGTVKSLRHMPGHSVNTYVWRNAEGNRKYVKYHWYPFEGVQFITSEEANKLAAENPDYSGKDLYDAIANGKPVEYGLYVQLMDPKDEAHLSYDPLDDTKIWDEKVYPLIPVGKMVLNKNPENYMEQVEKVAFSPSNLLDGAELSDDKMLQGRANIYSDSQRRRIGPEFRKLAINQQQDWAPANQITSGDGRYVEGKLERTSITKQDDFTQAGEFYTKLKPIEKEHLAENLASDLKVISDDIRKVVLGYFHNVSADLVKKIESAMQKL

SEQ ID NO: 4924 - protein, 543 aa, Streptococcus pyogenes MGAS8232
MAKDIKFSADARAAMVRGVDMLADTVKVTLGPKGRNVVLEKAFGSPLITNDGVTIAKEIELEDHFENMGAKLVSEVASKTNDIAGDGTTTATVLTQAIVHEGLKNVTAGANPIGIRRGIETATATAVEALKAIAQPVSGKEAIAQVAAVSSRSEKVGEYISEAMERVGNDGVITIEESRGMETELEVVEGMQFDRGYLSQYMVTDNEKMVADLENPFILITDKKVSNIQDILPLLEEVLKTNRPLLIIADDVDGEALPTLVLNKIRGTFNVVAVKAPGFGDRRKAMLEDIAILTGGTVITEDLGLELKDATMTALGQAAKITVDKDSTVIVEGSGSSEAIANRIALIKSQLETTTSDFDREKLQERLAKLAGGVAVIKVGAPTETALKEMKLRIEDALNATRAAVEEGIVAGGGTALITVIEKVAALELEGDDATGRNIVLRALEEPVRQIALNAGYEGSVIIDKLKNSPAGTGFNAATGEWVDMIKTGIIDPVKVTRSALQNAASVASLILTTEAVVANKPEPAAPAPAMPAGMDPGMMGGF

SEQ ID NO: 4925 - protein, 716 aa, Yarrowia lipolytica CLIB122
MGQSPSKNANSTSSLTTTNGQASGAGLGVISDEGGDDPSSSGCSGTSAHNKTPHHQKSSSSSTRPPTGRSRSSKSSTGGSRKERTSMSFDHDFSIDNASAADFMSKPKRRVSSGASKSAKTDMRHDPTGSERKSRRDKAEEAGLVAAMGEVVISRPHDSQSSSDTDNASLASTNSEGSTSSLTAPVAPIQNSNSEPGTAPGAHTEPISIPGNNDSLAHSKFLSAKRTPATTLPPPGSSGPVATPVIAVSHHDNNGSLTSNVTSEGSLSAISIASSSATSNASPENADKSKMSPQSSQSSSSSEEDLSDLSGLKSPIPTTHIGSSRANAVALSSKPSASTPQRVDLPAGYQSSLSVSVDSVTGSPARNIKNPKIEPAVSGASVASTASSKKATKKQPLPFDVNDFIKRLLDAGGKSGGAAPVPLRPNEIVQLCAAARTVFMSQPVLLELGTPVKVVGDIHGQFGDLIRIFQMSGFPPKTNYLFLGDYVDRGRQSLETILLLFCFKVKYPENFFMLRGNHECASITKVYGFYDECKRRATTKIWKSFVDTFNTLPIAATIGGKIFCVHGGLSPYLNSMDDIRKITRPTNVPDVGLLSDLLWSDPERSIMEWSENDRGVSYCFGRSVVNKFCTKFKFDLVCRAHMVVQDGYEFFNKRKLVTVFSAPNYCGEFDNWGAVMCVSKQLLCSFELLKPMDSASIKDAVRRGIKKTQKVKLGES

SEQ ID NO: 4926 - protein, 158 aa, Zea mays
MSLIRRSNVFDPFSLDLWDPFEGFPFGSGSSSSLFPSFPRTGSETAAFAGARIDWKETPEAHVFKADVPGLKKEEVKVEVEDGNVLQISGERNKEQEEKTDTWHRVERSSGRFLRRFRLPENAKTEQIRAAMENGVLTVTVPKEDVKKPEVKSIQISG

SEQ ID NO: 4927 - protein, 392 aa, Acridocarpus chevalieri
DLEPVNPADVPVTAAGALKSYKLAAKAISRLQSLPSGNIFLLCDVLVKEVRDLTGYDRVMVYKFHEDEHGEVVSECRRSDLEAYLGLHYPATDIPQASRFLFMKNKVRMICDCLAPPIKVIQDERLPQPLSLGASTLRSPHGCHAQYMANMGTIASLVMSVTINEDDDMMDGEQQQMARKLWGLVVCHHTSPRFVPFPLRYACEFLIQVFGVQINKEVELAAQVREKHILQIQTLLCDMLLRDAPVAIITQSPNVMDLVKCDGAALYYKKKFWLLGITPTEAQIRDIVEWLLEFHSGNTGLSTDSLMEAGYPGASVLGDAVCGMAAVSITSKDFLFWFRSHTAKEIKWGGAKHDPDDKDDGRKMHPRSSFNAFLEVVKWRSLPWEDIEMDAI

SEQ ID NO: 4928 - protein, 338 aa, Bradyrhizobium sp. BTAi1
MTAPEGTLESFLEGDCSVSEPLAITVTALAFVAETLAGVISSGPLNGRLGEEVGANSDGDRQKKLDVVADELFAGALAPTPVRWYASEERPTAEMLNPEGTLALAIDPLDGSSNIDVNISIGTIFSVFEAKESGVESFLRPGREQIAAGYVVYGPQTVFILATRTTLAQFVLHRGHFFLVSDSLRIPDRTTEFAINASNYRHWSRPIRAFVDDCIAGDEGPWGENFNMRWVASLVAETHRILTRGGIFLYPADARRGYGQGRLRLVYECAPIAFIVERAGGKATDGIDRILDLTPSELHQRTPLVFGTAEKVSQVCAYHDLPESEVSPLFGTRGLFRA

SEQ ID NO: 4929 - protein, 392 aa, Acridocarpus excelsus
DLEPVNPADVPVMATGALKSYKLAAKAISRLQSLPSGDISLLCDVLVKEVRDLIGYDRVIVYKFHEDEHGEVVSECCRSDLEAYLGLHYPTMDIPQASRFLFMKNKVRMICDCLAPLVKVIQDERLHQPLSLYGSTLRSPHGCHAQYMANMGTIASLVMSVTINEDDDMMDGDQQQMPRKLWGLVVCHHTSPRFVSFPLRYACEFLIQVFGVQINKEVELAAQVREKHILRIQTLLCDMLLRDAPVAIITQSSNVMDLVKCDGVALYYKNKFWLLGITPTEAQISDKVEWLLECHSGNTGLSTDSLMEAGYPGASVLGDAVCGMAVVGITSRDFFFWFRSHTTKEIKWGDAKHDPDDKDDGTKIHHRSSFKAFLKVVKWRSLPWEDVEMDAI

SEQ ID NO: 4930 - protein, 710 aa, Corynebacterium efficiens YS-314
MSANPGIPSSGTPEVNEPTTPVPPLPRKPDQATAEPYSPTGCPMHISPDVNAQQGEYLTTAQGGRLRDTDHSLKAGERGPLLMQDHHFREKITHFDHERIPERVVHARGAAAHGVFKANGAASSICRAGVFAEGKETPVFTRFSTVLGNRGSADTVRDTRGFAVKFYTDEGTWDLVGNNIPVFFIQDGIKFPDVIHAAKPHPDRDIPQAQSAHDTFWDFVTLHTEATHHTIWNMSDRGIPRSYRMMEGFGVNTFRMINDKGETSLVKFHWKPKLGVHSQVWEEAQITGGVDPDFHRRDLADAIESGAFPEWDLGLQVFPDNKEQMFEGIDLLDPTKIVPEELAPVQIVGTMTLNKNVSNFHEETEQVAFHPGHLPPGIDVTADPLLQGRLFSYLDTQISRLGGPNFAQLPINRPHAPVNDMFREGMHQQGQHIGVAPYQPNSLDGGNPFPAEPSNGALIDVPVPVEGEITRSAPASFDDHYSQARLFYVSLSPIEQKHVADAYTFELGKCYEKAIKERAVHVLSNVDHDLASTVAKGLGVPAPEKKDLPEPTPSPALSQVGKTWPIDGRQIGILVTDDLPEDQVADVASLSKAIEDAGMVPLVTSTSGGTIGEPEEATGVAVSRTYVTVRSIEFDAAVVVETPEQPEVSILLSEMIRHGKAVALVGDATAQVPDRMGDAPGVVTVNAAADALDVLTPMLKGHRTWAANPA

SEQ ID NO: 4931 - protein, 392 aa, Acridocarpus orientalis
DLEPVNPADVPVTAAGALKSYKLAAKAISRLQSLPSGNISLLCDVLVKEVRDLTGYDRVMVYKFHEDEHGEVVSECRRSDLEAYLGLHYPATDIPQASRFLFMKNKVRMICDCLAPPIKVIQDERLPQPLSLGGSTLRSPHGCHAQYMANMGTIASLVMSVTINEDDDMMDGDQQQMARKLWGLVVCHHTSPRFVPFPLRYACEFLIQVFGVQINKEVELAAQVREKHILQIQTLLCDMLLRDAPVAIITQSPNVMDLVKCDGAALYYKKKFWLLGITPTEAQIRDIVEWLLEFHSGNTGLSTDSLMEAGYAGASVLGDAVCGMAAVSITSKDFLFWFRSHTAKEIKWGGAKHDPDDKDDGRKMHPRSSFKAFLEVVKWRSLPWEDVEMDAI

SEQ ID NO: 4932 - protein, 395 aa, Legionella pneumophila subsp. pneumophila str. Philadelphia 1
MVFGFLNLSFWGYVLATFILTQITIASVTIYLHRNQTHRALTLHPVVSHFFRFWLWLTTGMVTADWVAIHRKHHATTDVEGDPHSPVVEGIRKVFWQGAELYREARKDRDMVAKYSHGTPTDWIERNVYSRHSSKGILLMLLLDLFFFGIPGMTVWAIQMMWIPLFAAGVINGIGHYWGYRNFECPDAATNIIPWGFWIGGEELHNNHHTFASSAKFSVKWWEFDIGWMYIRILSLFGLAKVKKLPPKLAMDEGKFHVDLDTVRAVISNRFQVMSNYYKNVIRPILKYEKNTGIETKEDKKLFQRAGRLLRREDKLLSTKAKTRLQKLLDAREQLRVVYSYKQSLQNVWLKTATTQKELVEALQQWCRQAEESGLDVLKQFAQQLKGYVPVYTRE

SEQ ID NO: 4933 - protein, 392 aa, Acridocarpus smeathmannii
DLEPVNPADVPVTAAGALKSYKLAAKAISRLQSLPSGNISLLCDVLVKEVRDLTGYDRVMVYKFHEDEHGEVVSECRRSDLEAYLGLHYPATDIPQASRFLFMKNKVRMICDCLAPPIKVIQDKRLPQPLSLCGSTLRSPHGCHAQYMANMGTIASLVMSVTINEDDVMMDGDQQQMARKLWGLVVCHHTSPRFVPFPLRYACEFLIQVFGVQINKEVELAAQVREKHILQIQTLLCDMLLRDAPVAIITQSPNVMDLVKCDGAALYYKKKFWLLGITPTEAQIRDIVEWLLEYHSGNTGLSTDSLMGAGYPGASVLGDAVCGMAAVSITSKDFLFWFRSHTAKEIKWGGAKHNPDDKDDGRKMHPRSSFNAFLEVVKWRSLPWEDVEMDAI

SEQ ID NO: 4934 - protein, 222 aa, Brasenia schreberi
MGRGKIEIKRIENSSNRQVTFSKRKQGILKKAKEISVLCDANVFLILFSSAGKMYEYTSPSANLENILTRYQTASGKKLWDARHEYLNHELDRIKKEHDNMQIELRHLNGEDLSSLSVIDLRNLEDSLQIGYENVILKKTQWMYNELERLKQNGDAIDEENRRLRCLLKQQDAALCDLTDFDLGSNKKGKGNPSHLGMQPFGFHVQPIQPNLQHNKFKSGPC

SEQ ID NO: 4935 - protein, 392 aa, Acridocarpus zanzibaricus
DLEPVNPADVPVTAAGALKSYKFAAKAISRLQSLPSGNISLLCDVLVKEVRDLTGYDRVMVYKFHEDEHGEVVSECRRSDLEAYLGLHYPATDIPQASRFLFMKNKVRMICDCLAPPIKVIQDERLPQPLSLGGSTLRSPHGCHAQYMANMGTIASLVMSVTINEDDDMMDGDQQQMARKLWGLVVCHHTSPRFVPFPLRYACEFLIQVFGVQINKEVELAAQVREKHILQIQTLLCDMLLRDAPVAIITQSPNVMDLVKCDGAALYYKKKFWLLGRTPTEAQIRDIVEWLLEFHSGNTGLSTDSLMEAGYPRASVLGDAVCGMAAVSITSKDFLFWFRSHTAKEIKWGGAKHDPDDKDDGRKMHPRSSFKAFLEVVKWRSLPWEDMEMDAI

SEQ ID NO: 4936 - protein, 182 aa, Triticum aestivum
MSDEAASPPGGGGGGGGGGSDDGGGGGGFGGVREQDRFLPIANISRIMKKAIPANGKIAKDAKETVQECVSEFISFITSEASDKCQREKRKTINGDDLLWAMATLGFEEYIEPLKVYLQKYRETEGDSKLAGKSGDVSVKKDALGPHGGASGTSAQGMGQQVAYNPGMVYMQPQYHNGDISN

SEQ ID NO: 4937 - protein, 217 aa, Nuphar japonica
MGRGKIEIKRIENASNRQVTFSKRKQGILKKAKEISVLCDSQVSLILFSSAGKLYEYCSPSSSLKDVLTRYQKSSGKKLWDARHEYLSTELDRIRKENENMQIELRHFMGEDLSSLTVQELRALEDSLQIGFDSVHIKQTECLNNDIQILKKNERILEEENRQLKYILHQQEQSALRELRDIDLGSNKKGKGYPSQSGVQPFGFRVQPIQPNLQQNK

SEQ ID NO: 4938 - protein, 376 aa, Andropogon ternarius
ALSIAGAVQSQKLAVRAISRLQALPGGDVKLLCDTVVEHVRVLTGYDRVMVYRFHEDEHGEVVAESRRDNLEPYLGLHYPATDIPQASRFLFRQNRVRMIADCHATPVRVIQDPGLSQPLCLVGSTLRAPHGCHAQYMANMGSIASLVLAVIISSGGDDEQTGRGGISSAMKLWGLVVCHHTSPRCIPFPLRYACEFLMQAFGLQLNMELQLAHQLSEKHILRTQTLLCDMLLRDSPTGIVTQSPSIMDLVKCDGAALYYHGKYYPLGVTPTESQIKDIIEWLTVCHGDSTGLSTDNLADAGYLGAAALGDAVCGMAVAYITPSDYLFWFRSHTAKEIKWGGAKHHPEDKDDGQRMHPRSSFKAFLEVAKSRSLPW

SEQ ID NO: 4939 - protein, 154 aa, Lycopersicon peruvianum
MSLIPRIFGDRRSSSMFDPFSIDVFDPFRELGFPGTNSGETSAFANTRIDWKETPEAHVFKADLPGLKLEEVKVEVEEDRVLQISGERNMEKEDKNDKWQRVERSSGKFMRRFRLPENAKMDQVKASMENGVLTVTVPKEEMKKPDVKSIEISG

SEQ ID NO: 4940 - protein, 376 aa, Apluda mutica
ALSIAGAVQSQKLAVRAISRLQALPGGDVKLLCDTVVEHVRELTGYDRVMVYRFHEDEHGEVVAESRRDNLEPYLGLHYPATDIPQASRFLFRQNRVRMIADCHATPVRVIQDPGLSQPLCLVGSTLRAPHGCHAQYMANMGSIASLVMAVIISSGGDDEQTGRGGISSAMKLWGLVVCHHTSPRCIPFPLRYACEFLMQAFGLQLNMELQLAHQLSEKHILRTQTLLCDMLLRDSPTGIVTQSPSIMDLVKCDGAALYYHGKYYPLGVTPTESQIKDIIEWLTVCLGDSTGLSTDSLADAGYLGAAALGDAVCGMAVAYITPSDYLFWFRSHTAKEIKWGGAKHHPEDKDDGQRMHPRSSFQAFFEVVKSRSLPW

SEQ ID NO: 4941 - protein, 571 aa, Candida albicans SC5314
MGNSPSKDDPLPKSSSSNKSSNGGSSSSSSTVSGTDLDPDEMAPALSQLMINDKLNYKKSNSPQRSSSLNVGNSTKYNKTSNNNSNKTNRVFELETSSTSVSATATTTPQRIPSVRSRQSSEAYDFDLEIGMSMAKLLKNQQDFPSSFESSNASVSSPVFTTLGVDTKDEDSLSSINSSPCDTTKSNVIANKQLSHPENMSTVKKLDVIDEINSLESSPSNSSKLSQANLRKHNKTLVHQLTKRISDSSTSSASGSPPLVGTSQKLEVDIDDIIARLLATKKRSTSRKSNKTRLPVETNELKYVLAKSRQIFLDQPTLLRLSPPVKIVGDIHGQFHDLIRIFNCCGYPPHSNYLFLGDYVDRGEKSLETILLLLCYKIKYPENFFMLRGNHESANITKIYGFYDECKRRLPNHKLWKNFIDVFNALPIAAVINEKIFCVHGGLSPDLNNFDQIENIKRPTDVPDKGLLADLLWSDPDASVKNFSLTNWPKNDRGVSYVFGKKHVDYFCSKFKLDLIVRGHMVVEDGYEFFNKRKLVTVFSAPNYCGEFNNFGAIMSVDKHLYCSFELIKPN

SEQ ID NO: 4942 - protein, 376 aa, Bothriochloa odorata
ALSIAGAVQSQKLAVRAISRLQALPGGDVKLLCDTVVEHVRELTGYDRVMVYRFHEDEHGEVVAESRRDNLEPYLGLHYPATDIPQASRFLFRQNRVRMIADCRATPVRVIQDPGLSQPLCLVGSTLRAPHGCHAQYMANMGSIASLVMAVIISSGGDHEQTGRGGISSAMKLWGLVVCHHTSPRCIPFPLRYACEFLMQAFGLQLNMELQLAHQLSEKHILRTQTLLCDMLPRDSPTGIVTQSPSIMDLVKCDGAALYYHGRYYPLGVTPTESQIKDIIEWLTVCHGDSTGLSTDSLADAGYLGAAALGDAVCGMAVAYITPSDYLFWFRSHTAKEIKWGGAKHHPEDKDDGQRMHPRSSFKAFLEVVKSRSLPW

SEQ ID NO: 4943 - protein, 426 aa, Cryptococcus neoformans var. neoformans JEC21
MDNTPRHLFQTPNNVYILQQPWQFVKELGQGAYGCVSSARNSSTGETCAVKKVTNVFQKKILTKRCLRELRLLHHFRGHKNITCLYDMDIVFDPPGSGQFREVYLYEELMEADLHAIIRSGQPLSDAHFQSFLYQTLCGLKYIHSANVLHRDLKPGNLLVNADCELKICDFGLARGFQPGAVQTDQGQAGFMTEYVATRWYRAPEIMLSFANYTSSIDMWSVGCILAELLGGKPIFKGEDYVDQLNKILNLLGTPTEDTLRRVGSPRAQDYIRSLPIKPRVKFETLYPNASPLALDLLSKLLTFDPAKRYGCEEALEHQYLAVWHDPADEPLCEVPFDFSFEEEDSVSGMRDLILEEVRSFRYLVRQQSMPPARKDSHELPPAPPAPQHPGAGVGPAFHERANSEGDMEEHPGSALEKQLERQKLS

SEQ ID NO: 4944 - protein, 342 aa, Glycine max
MDHSADAHRTDLMTITRFVLNEQSKHPESRGDFTILLSHIVLGCKFVCSAVSKAGLAKLIGLAGETNVQGEEQKKLDVLSNEVFIKALISSGRTCILVSEEDEEAIIVEPSKRGKYCVCFDPLDGSSNIDCGVSIGTIFGVYALKDVHEPTIEDVLLPGKNMVAAGYCMYGSSCTLVLSTGAGVNGFTLDPSLGEFILTHPNIKIPKKGKIYSVNEGNAKNWDRPTATYVEKCKFPEDGSSPKSLRYIGSMVADVHRTLLYGGIFLYPADKKSPNGKLRVLYEVFPMSFLMEQAGGQSFTGKERALDLVPTKLHERSPIFLGSYDDVEEIKALYAAAEGEQE

SEQ ID NO: 4945 - protein, 675 aa, Mesorhizobium loti MAFF303099
MCGIAGIVALNAAAASPSREALMRMVGTLAHRGPDEHGLYRDKRAGLAHARLSVVDLSSGQQPLADTGDTSWIVFNGEIFNYVELREKLIALGHRFRTRSDTEVALHAYRAWGEAAFERMNGQWAIAIWDSIAGRLVLSRDRFGICPLHFCEHAGRLYFASEVKAIFAADPTIPRAFDPAGLDQTFTLWTVVPPQGVFQGIHELVPGHVRIYQDGTVREQVFWQPSYPENIGALQGEFTGSCDDAVDRVRDALEAATALRMVRADVPVGCYLSGGLDSSLVATLGRRFAGRRFQTFSLRFADAEYDETRFQRLVAEATGSEHHEVVVSRGDIAAIFPEVIHHTERPILRTAPAPLFLLSRLVRERGIKVVLTGEGADEMFAGYDLFREAKVRRFWGRQPASTRRSRLLERLYPYLTRSPVQQQAMARQFFGRGIEAYDAPGFAHDTRWRSTGAIKRLFSADLRAESQRRDAVSELLARLPAAFSRWSHLAQDQYLEVQTLMSGYLLSSQGDRMLMAHSVEGRFPFLDDELVRLANSLPPSYKLRVLDEKHVLKRVAQPIVPSEIVTRKKQPFRAPNALCFAADAAPEYIREALSETAIRKANVFDPVSVTRLLDKCQARTGDGDLSNADNMALVGVLSTQLLHQQFVASCPSATHVRGLSVDVDREHREERLHVA

SEQ ID NO: 4946 - protein, 371 aa, Pyrococcus furiosus DSM 3638
MKFPRKGIPQEEVMRELEKYTSKDLSFSSGKILGSMCTLPHELAKEVFCMYMDRNLGDPGLHPGTKKIEEEVIEMLSDLLHLERGYGHIVSGGTEANILAVRAFRNLADVENPELILPKSAHFSFIKAGEMLGVKLIWADLNPDYTVDVKDVEAKISENTIGIVGIAGTTGLGVVDDIPALSDLARDYGIPLHVDAAFGGFVIPFAKELGYDLPDFDFKLKGVQSITIDPHKMGMAPIPAGGIVFRHKKYLRAISVLAPYLAGGKIWQATITGTRPGASVLAVWALIKHLGFEGYMEIVDRAMKLSRWFAEEIKKTPGAWLVREPMLNIVSFKTKNLRRVERELKSRGWGISAHRGYIRIVSHASCDGGHD

SEQ ID NO: 4947 - protein, 399 aa, Ashbya gossypii ATCC 10895
MSFSSLPTKELRNTALFKPLKVGNTTIQHRIALAPLTRLRTTNPEHIPTDIVREYYDQRSKRPGTLVITEGTFPSASTAGMNDVPGIWSAEQASEWAKIFKVIHDNKSFAWVQLWVLGSQNDPSVIAKNGLRNDSASDDWYPSDGVRDLAKQLNVPSRAITKDQIKEYIQIYVSAAKRAIEAGADGVEVHSANGYLLNQFLDSVSNKRTDEYGGSIENRARFTLEVLDALAEAVGPEKVGVRFSPYGTFGNMAGTVDPNTVAQYAYIAGQLEKRAAEGKRLAYIHVVEPRVTDPSVEEGQSVYNGGTNDFFYSVWKGIILRAGSYAHHLDAAVRDAELGRTVIVYGRYFISNPDLPDRLEKGLPLNNYRRELFYTNEAEGYIDYPVYEEAVAKGYKQQS

SEQ ID NO: 4948 - protein, 629 aa, Novosphingobium aromaticivorans DSM 12444
MCGIAGIVHTEGPKPVDPDRVRRMCDAIAHRGPDGEGVWTAPGIGLGHRRLSIIDLAGSPQPMKAAEGDAVIVFNGEIYNFRDLRKELQALGAQFRTDGDTEVILQAWRQWGTACLPRLHGMFAFALYDLRQRTTLLARDRLGVKPLFTARLADGAVIFGSELKALLAHPSLRREIDPLAVEDYLAWGYVPDHRSMLKGVEKLPAGHYQLLRHDAPPAAPVQWWDVSFADRANGSAEDLGAHLLHHMRDAVTSRMVADVPLGAFLSGGVDSSSVVALMAEASATPVKTCSIGFDVAALDETAYADRIAARFATEHRKRLVSPDDFSLVDRLAGMFDEPFADASALPTFRVCELAREHVTVALSGDGADEAFAGYRRQTFQHREEQARALLPSALRKPLFGTLGRLWPKADWAPRPLRAKTTLLSLAASGEEGYARALSVTSPELRETLYTPDFKRLRGDYRAEQPLIELMRKAPARSGLDRAQYADLKFYLPGDILTKVDRTSMAVGLEAREPLLDHRLVEFGASLPERLRVRGATGKWLIKQTMRRYLPEDVLFRPKMGFVTPLAQWLRGPLAHEARALASDGLLARTGWLDAARIDALADAHVSGRADHSRLIWQLLMLRKSLQLLG

SEQ ID NO: 4949 - protein, 392 aa, Camarea axillaris
DLEPVNPADVPVTAAGALKSYKLVAKAISRLQSLPSGNISLLCDVLVKEVRDLTGYDRVMVYKFHEDEHGEVVSECRRSDLESYLGLHYPATDIPQASRFLFMKNKVRMICDCLAPPVKVIQDERLPQPLSLCGSTLRSPHGCHAQYMTNMGTIASLVMSVTVNEDDDTMDGDQQHMTKKLWGLVVCHHASPRFVPFPLRYACEFLIQVFGVQINKEVELAAQVREKHILQIQTMLCDMLLRDAPVAIITQSPNVMDLVKCDGAALYFKNKTWLLGVTPTEEQIRGIAEWLLEYHSGNTGLSTDSLMEAGYPGASGFGDAVCGMAAVSITSRDFLFWFRSHTAEEIKWGGAKHDPDDKDDLRKMHPRSSFKAFLEVVKWRSMPWEDVEMDAI

SEQ ID NO: 4950 - protein, 392 aa, Heteropterys aureosericea
DLEPVNPADVPVTAAGALKSYKLASKAISRLQSLPSGNISLLCDVLVKEVMDLTGYDRVMVYKFHEDDHGEVVSERRRSDLESYLGLHYPATDIPQASRFLFMKNKVRMICDCLAPPVKVIQDERLPQPLSLCGSTLRSPHGCHAQYMTNMGTIASLVMSVTINEDDDMMDGDQQQMTRKLWGLVVCHHTSPRFVPFPLRYACEFLIQVFGVQINKEVELAAQVREKHILQIQTMLCDMLLRDAPVAIITQSPNVMDLVKCDGASLYFKNKTWLLGVTPTEEQIRDIAEWLLEYHSGNTGLSTDSLMEAGYPGASVLGDAVCGMAAVSITSRDFLFWFRSHTAKEIKWGGAKHDPDDKDDLRKMHPRSSFKAFLEVVQWRSMPWEDIEMDAI

SEQ ID NO: 4951 - protein, 749 aa, Nocardioides sp. JS614
MSDKSTPRTTSEPAPASGPALHPVSTAELHQVAHGEHGNPHGVLGPHPHDGGVTVRVLRPLASRVVVRWSDGSGTSGEAELAHEHEGIWAGVIALPDVPDYRVAVSYGPDEHVVDDPYRFLPTLGEMDLHLINEGRHELLWTVLGARVHRYPGALGPVTGTSFAVWAPSARAIRIKADFNSWDGREHPMRQLGTSGVWELFVPDVGAGTSYKYTILGPDGQWREKADPMARWAEKPADTASRVFESGYTWNDDVWLEARARRAPVASPMSIYEMHLGSWKKHPDGRYWSWAELAEELPAYVAGLGFTHVELMPVMQHPFGGSWGYHVTSYFAPDARFGDPDGFRLLVDRLHQAGVGVILDWVPGHFATDEWALARFDGTPLYEDPNPQRGWHKEWGSHIFNFGRREVRNFLYANALYWLEEFHADGLRVDGVASMLYLDYAREPGEWTPNIHGGHENLEAVQFLQEMNATVYKRVPGITTIAEESTSWPGVTRPTSADGLGFGFKWNMGWMHDTLDYLAREPVHRAYHHGEMTFSLVYAWSENYVLPISHDEVVHGKGSLLRKMPGDRWQQLANLRAYLGFMWAHPGKQLLFMGAELGQESEWAESRELDWWLLDHPEHRGVQALVRDLNATYVDSPALWARDHEPEGFTWIDANDAGRNVFSFVRRGGDADLVCVSNFAAVPHDDYRLGLPAAGVWDEVLNTDAETYSGSGVGNLGSVTAVEGEWSGQPAHATLVVPPLATVWLRRRH

SEQ ID NO: 4952 - protein, 711 aa, Novosphingobium aromaticivorans DSM 12444
MSSNLYPHLLSPGRIGTLEVKNRIAVTAMGVSLSEDDGTVGERIIAYHEEQARGGAGLIISGVAGVAWPVGAVAMQQTAISDDRFIPGLRKLTDRVHAHGAKIATQLHHGGFVAGYSHARWGHPLWGPAVPPAAKGNFTDYFLMEELAGLAGMKMPELKILEQEDIDVAVQQFAQGARRAKEAGFDGIEIHGGHGYLLSSFTSPYTNTRTDKYGGSLENRLRLTLEVIAAIRAEVGRDYPVWIKLDSREVGKPGGITLDMAKEAAKLVEAAGVDAITITSYHDTSVGKLHSESNIPHLENWNLPATAEIRKVVSIPVIGSGRIEVDSAESAIAKGETDFVAMGRKLLADPHLPRKLTEGATEKVRPCVYCYTCVSAIYMGQPTRCAVNAGLGNEFEGEPPMAGANPRRVAVIGGGPGGMESARRLAALGHKVTLIEKSDRLGGTLRFASLAYEPNERILEWLRREVKEAGIDVRLSTVATPDLLRSIGADAVIVATGAIRDMPPIPGNDQDHVYSGDDMRRMMLGESSEELKRKTGLFTRIATKVGAATGATANLALVRKATHAWMPLADTVTIVGGELVGLELAEFLSERGRTVNVVEEAPRMGKGLTLVRRMRLMAELAEHGVGLHAGASDIVIGKDSVSFTDASGARQTVPAGNVVVAKGAHGDLSLAEALRAAGFEVHAIGDANGVGYIEGAMHGARGAVRAVAGAA

SEQ ID NO: 4953 - protein, 770 aa, Silicibacter sp. TM1040
MKAPLRKLLQSKGILSQIVVSMSLAALLVVVAVGGVARRYEVERVSEQLSEQANLTVSLLSGLMLEAIIVEDVPVLETGLVEAITRYPKILSINIENSEGEVIAEASNSAADEAEGYVMYRRPVEFEGFVFGTMVVQWSTAEGREIVLDKVRQTITWTVLAVIAMSLLMLYLVYRLALNPLQIVHARMSNAVAGAKTGHFSLPWYSSREFQALNVSVGVLEDSFAERDEREKALEHAREQAEIASRAKSEFLANMSHEIRTPMNGVIGMAEVLRETELTPDQELYTETIVKSGNALLSIINDILSFSKIEAGKLELTQATFNLRTVIEDVIMLLAPKAAEKWVQLTLRYDPDLAEFYDGDAGRIRQIVTNVVGNAVKFTSRGSVHIDVTGVARGQLMDLRISVVDTGIGIPAEKLDRIFHAFEQVDGAATRNFEGTGLGLAISTRLLQMMKGRIHVTSSEGKGSVFTIDISLPTSDRAPVAFLPEQPVSGLHALIVDDLELNRRILGERLRSWGLRVTEAASAMEAMLHLDEMRDATDTCDLIFLDYNMPDCDGYELALRIRGLPNTASVPIIVISSVDPALSQSMLADIEVCHQVLKPVRADDLRGVISQALGAGSAVEERAPSGSEDAKIMQRIKVLMAEDNRTNQVVVTRMLKSESVDIIIASNGQEAIEMYLRERPDVILMDMMMPVMDGLDATKAIRKIENETGVRQVPIIALTANALQSHEEACLEVGMDDFLSKPIRKQALLDALHQWTEDRDSAEPQNKLEA

SEQ ID NO: 4954 - protein, 180 aa, Rubrivivax gelatinosus PM1
MSFTTEQQPGVCEQAPAATKGFTLNHSMLRVKDPKVSLDFYTRVLGMRLLRKLDFPEMSFSLYFLAQAEEAAMAPQDVGERTAWTFAQRGILELTHNWGTENDTEFKYHDGNAKPQGFGHICISVPDLDAAVRWFDENGVTYVKRPEQGKMKDVAFIKDADGYWIEIVEPARLAKLGRPA

SEQ ID NO: 4955 - protein, 392 aa, Heteropterys bahiensis
DLEPVNPADVPVTAAGALKSYKLASKAISRLQSLLSGNISLLCDVLVKEVRDLTGYDRVMVYKFHEDEHGEVVSECRRSDLESYLGLHYPATDIPQASRFLFMKNKVRMICDCLAPPVKVIQDERLPQPLSLCGSTLRSPHGCHAQYMTNMGTIASLVMSVTINEDDDMMDGDQQQMTRKLWGLVVCHHTNPRFVPFPLRYACEFLIQVFGVQINKEVELAAQVREKHILQIQTMLCDMLLRDAPVAIITQSPNVMDLVKCDGAALYFKNKTWFLGVTPTEEQIRDIAGWLLEYHSGNTGLSTDSLMEAGYPGASVLGDAVCGMAAVSITSRDFLFWFRSHTAKEIKWGGAKHDPDDKDDLRKMHPRSSFKAFLEVVKWRSMPWEDIEMDAI

SEQ ID NO: 4956 - protein, 217 aa, Nuphar japonica
MGRGKIEIKRIENASNRQVTFSKRKQGILKKAKEISVLCDAQVSLILFSSAGKLYNYCSPSSSLKDILTRYQKSSGKKLWDARHEYLSTELDRIRKENENMQIELRHFMGEDLSSLTVQELRALEDSLQIGFDNVHVKQTECLNNDIHILKKNERILEEENRQMKYILHQQEQMALRELRDIDLGSNNKGKGYPSQSGVQPFGCRVQPIQPNLQHNK

SEQ ID NO: 4957 - protein, 392 aa, Heteropterys bicolor
DLEPVNPADVPVTAAGALKSYKLASKAISRLQSLPSGNISLLCDVLVKEVRDLTGYDRVMVYKFHEDEHGEVVSECRRSDLESYLGLHYPATDIPQASRFLFMKNKVRMICDCLAPPVKVIQDERLPQPLSLCGSTLRSPHGCHAQYMTNMGTIASLVMSATINEDDDMMDGDQQQMTRKLWGLVVCHHTSPRFVPFPLRYACEFLIQVFGVQINKEVELAAQVREKHILQIQTMLCDMLLRDAPVAIITQSPNVMDLVKCDGAALYFKNKTWLLGVTPTEEQIRDIAEWLLEYHSGNTGLSTDSLMEAGYPGASVLGDAVCGIAAVSITSRDFLFWFRSHTAKEIKWGGAKHDPDDKDDLRKMHPRSSFKAFLEVVKWRSMPWEDMEMDAI

SEQ ID NO: 4958 - protein, 560 aa, Zea mays
GPNPPHSVTPPAMEAATAATAAMMWFRKGLRVHDNPALDAARRHGVGAASARLYPVFVLDPRYLRPDPVAASPGSARAGVARIRFLLESLSDLDARLRRLGSRLLLLRARDDVADAVCAALKDWNIGKLCFESDTEPYALARDKKVTDFALASGIEVLTPVSHTLSDPEEIIKKNGGRPPLTYQSFVSIAGEPPAPAMEEYSELPPLGDTGEYELLPVPTVEGLGYGDISQEEIPPFHGGETEALRRMKESLQNKEWVAKFEKPKGDPSAFVKPSTTVLSPYLKFGCLSSRYFYHCIQDVHRSVRNHTKPPVSLTGQLLWRDFFYTVSYGTPNFDRMKGNKICKQIPWSENEDLFVAWRDGQTGYPWIDAIMIQLRKWGWMHHLARHSVACFLTRGDMFIHWEKGRDVFERLLIDSDWAINNGNWLWLSCSSFFYQYHRIYSPITFGKKYDPNGNYIRHFIPVLKDMPREYIYEPWTAPTSIQKKANCIIGKDYPKPVVDHETASKECRKRMGEAYASSRVDAKPSKGKTLNSRRKMLHGDRDTSNSTIAKRLKRNSRVE

SEQ ID NO: 4959 - protein, 463 aa, Novosphingobium aromaticivorans DSM 12444
MGHHADDVFRPVRTHRRPLVLPPPPAALLVRHRPQQAAGGRPQDALAGRAALSRQLPRPVPELEDLLGTPGTAARRPGRTARPAREIHRDHAPRRPPAPPARAELTDMADLFSPVRLGEIELANRIVMAPMTRDRAGPHDEPTDLMVEYYRQRASAGLIVTEGTQPSPNGKGYWRTPGIHSPEQVEGWRRVAEAVHGEGGRIAVQLMHVGRASVRANKAPDAETVAPSAIPCPDPIPGPDGVPVPTEMPRELAAHEIPGVIAEYVAAARNARAAGIDGVELHCASGYLPMQFLSSNSNQRGDAYGGSAENRVRFVVETLSALAAAISPGRVGFRICPGVKFNGMDDADPAETYATLLRAVDHMGLAYCHLIHIPNQGFDSLDLVRANWSGPVIENCGLTRERAEKVLAEGKAEAVSFGYAFIGNPDLVERLRTGAPLAKADRDTFYTGHGDDARGYTDYPRAG

SEQ ID NO: 4960 - protein, 392 aa, Heteropterys byrsonimifolia
DLEPVNPADVPVTAAGALKSYKLASKAISRLQSLPSGNISLLCDVLVKEVRDLTGYDRVMVYKFHEDEHGEVVSECRRSELESYLGLHYPATDIPQASRFLFMKNKVRMICDCLAPPVKVIQDERLPQPLSLCGSSLRSPHGCHAQYMTNMGTIASLVMSATINEDDDMMDGDQQQMTRKLWGLVVCHHTSPRFVPFPLRYACEFLIQVFGVQINKEVELAAQVREKHILQIQTMLCDMLLRDAPVAIITQSPNVMDLVKCDGAALYFKNKTWLLGVTPTEEQIRDIAEWLLEYHGGNTGLSTDSLMEAGYPGASVLGDAVCGMAAVSITSRDFLFWFRSHTAKEIKWGGAKHDPDDKDDLRKMHPRSSFKAFLEVVKWRSMPWEDIEMDAI

SEQ ID NO: 4961 - protein, 414 aa, Triticum aestivum
MAFDAFTDKTAVFRRLKAKPENKMCFDCNAKNPTWASVTYGIFLCLDCSAFHRSLGVHITFVRSTNLDSWTPDQLKMMAFGGNNRAHAFFKQHGWTEGSGKVDSKYTSRAAELYRQILQKEVAKSSTVNVLPSSPVAASQPPNPTDDFPDFKLADAPEETTNGKHEPLVANPPKEPAQAPKAPTHPTYVSSVKKPLGAKKLGAKTGGLGVKKLTTKSNESLYDQKPEEPKPALPTMTTTTSAAKSGPSSHSRFQYMENEPSTESKTGGGNKTGHVAAPKTSDFFHEYGMDNGFQRKTSTAASKTQIEETDEARKKFSNAKAISSSQYFGNTDREQKEAQLSLQKFSGSSSISSADLFGRDTNDSDLDASAADLINRISFQASQDLSSLKNMAGETGKKLTSFASNFITDLDRIL

SEQ ID NO: 4962 - protein, 437 aa, Brassica nigra
GVDFFHRYKEDIQLMKNLNTDAFRMSIAWPRIFPHGRKEKGVSQAGVQFYHDLIDELKRNGITPFVTVFHWDTPQDLEDEYGGFLSERIVKDFREYADFVFQEYGGKVKHWITFNEPWVFSHAGYDVGKKAPGRCSKYVKEECHDGRSGFEAYLVTHNLLNSHAEAVEAFRQCEKCKGGKIGIAHSPAWFEPHDLADSQDGASIDRALDFILGWHLDTTMYGDYPQIMKDIVGHRLPKFTEAQKAKLKNSADFVGLNYYTSMFSNHLEKPDPAKPRWMQDSLINWETKNAYNYSIGSKPITGALPVFARGFRSLLKYIKDKYGNPEIMIMENGYGEELGAADSIEVGTADHNRKYYLQRHLLSMNEAICIDKVNVTGYFVWSLLDNFEWQDGYKNRFGLYYIDFKNNLTRYEKESGRYYKDFLSQGVRPSMINRDEL

SEQ ID NO: 4963 - protein, 442 aa, Agrobacterium tumefaciens str. C58
MIRKVSLLLIGGLMGATAMSVIYSASMPAQAAGPSTYKELSIFGDVFERVRAQYVTPPDDEKLVENAINGMLSSLDPHSSFMNAKDANDMRTQTKGEFGGLGIEVTMENELVKVISPMDDTPASRAGILAGDYISEIDGTPVRGLKLEQAVEKMRGAVKTPIKLTVIRKGADKPLEFTVVRDVIAVRAVKSRVEGDNVGYLRVISFTEKTYDDLEKAIKKIKADVPADKLKGYVLDLRLNPGGLLDQAINVSDAFLERGEVVSTRGRNPDETRRFNATAGDLTDGKPVIVLVNGGSASASEIVAGALQDLRRATVVGTRSFGKGSVQTIIPLGEAGALRLTTALYYTPSGKSIQGTGIEPDIKVEQPLPAELQGRVTAEGESSLSGHIKGQSETDEGSGSSAYVPPEAKDDIQLNYALDLLRGAKTDPSFPPNPDKAVVNKQ

SEQ ID NO: 4964 - protein, 538 aa, Wolinella succinogenes
METSKRLRILYVEDDALIREATLPVLERFALEVFSAQNGEEALKFFREKRPNIIITDIRMPVMDGLAMARLIKTESPYVPIIFVSAHNDTDQLMEAIDLGADAFLVKPFSLQKLREILRKFDRYIAEQEETKRSQRLLEEYKKAVDASAILSISDLSGNIIFANEKLCEITGYTREELLGHPHSMFRHPDTPKEVFERLWSTILEGKIWKGMLKNRKKNGEPYYVDATVVPLMDENNQITQFLGLCYEITSLIRAQNALRVALKRAEEADRVKGVFLANMSHEMRTPLNGIIGFGRLLLEENLNQEQREYVEIIDKSGEHLLGIINDILDLSKIESGKFELESLPMKLSEELRAVADFCEVKAREKGVKLLCLFKEIEGLIIQGDVMRLKQVTANLLGNAIKFTPEGGEVRLGVEVLEEREEAIALDFSVSDTGIGIAPEYLEKIFRPFEQAESSTARNYGGTGLGLSISQELVRLMGGEMRCQSEEGKGSRFSFTLTLPKAKGLTQAEREIPKEAFLMARCWWRRTILPIKSLFASF

SEQ ID NO: 4965 - protein, 376 aa, Chionachne koenigii
ALSIAGAVQSQKLAVRAISRLQALPGGDVKLLCDTVVEHVRELTGYDRVMVYRFHEDEHGEVVAESRRDNLEPYLGLHYPATDIPQASRFLFRQNRVRMIADCHATPVRVVQDPGLSQPLCLVGSTLRSPHGCHAHYMANMGSIASLVMAVIISSGGDDEHTGRGGISSAMKLWGLVVCHHTSPRCIPFPLRYACEFLMQAFGLQLNMELQLAHQLSEKHILRTQTLLCDMLLRDSPTGIVTQSPSIMDLVKCDGAALYYHGKYYPLGVTPTESQIKDIIEWLTVCHGDSTGLSTDSLADAGYLGAATLGDAVCGMAVAYITPSDYLFWFRSHTAKEIKWGGAKHHPEDKDDVQRMHPRSSFKAFLEVVKSRSLPW

SEQ ID NO: 4966 - protein, 376 aa, Chrysopogon fulvus
ALSMAGAVQSQKLAVRAISRLQALPGGDVKLLCDTVVEHVRELTGYDRVMVYRFHEDEHGEVVAESRRDNLEPYLGLHYPSTDIPQASRFLFRQNRVRMIADCHATPVRVIQDPGLSQPLCLVGSTLRAPHGCHAQYMANMGSIASLVMAVIISSGGDDEQTGRGGISSAMKLWGLVVCHHTSPRCIPFPLRYACEFLMQAFGLQLNMELQLAHQLSEKHILRTQTLLCDMLLRDSPTGIVTQSPSIMDLVKCDGAALYYHGKYYPLGVTPTESQIKDIIEWLTVCHGDSTGLSTDSLADAGYLGAAALGDAVCGMAVAYITPSDYLFWFRSHTAKEIKWGGAKHHPEDKDDGQRMHPRSSFKAFLEVVKSRSLPW

SEQ ID NO: 4967 - protein, 910 aa, Legionella pneumophila str. Lens
MLKSIGIKYQLRITTLIPAFLVALLFAFFYNGLFGKDLKQHMSRLGEAYIRQLLPAAQYAMLRNDYRTLQGLINASTINPEVKALAFYNADGRLIAYRGGKHSIHKPFNPPDYTGDYIESKQINPFTINFIAPITIPKFNLYSSTEFKEPSTPKIFQADDILGWLSIDIDTQSLLIKRYQMLIVTIFITLFGLLMGLTIHYFLSKRIYMPIARLRRSMKQILSNEFETEIRVSSPGELGIIEKGCAHLQRQYLNTVRDLNHHIEIATADLQQSLELLEEKNIELSLEKKKTEEKSRQKSEFIANMSHEIRTPMNGVIGFTNVLLESKLDPLQLDYVKTIKSSAQDLLSIINAILDFSKIDAGKLNLDCIPLDVRGCIDEVLSLASPNAHKKVIDLIPITDINVPKMVLGDPLRIKQIISNLVTNAVKFTDHGYVLIRTKIEQETDKDYTLLFAITDTGIGISPEDQTKLFTAFNQADTSITRRYGGSGLGLVICKKLCEEMHGRISLTSEINKGSTFSARIKVEKLVAYEIEKNQTHRFAHLKIICFDDNPLHLEAIGNGLGFWGIEAIRVDSFNKLSRTLTKHKDCKIAFINVNQGCERQAAELIAKHKQIPFVLISKWPINDFAALGARGFLYKPISIQKLQDLIESIANENQTEKNTNQELDTLREQLRFLHPEILIAEDNPVNKMLLTSLLNNNANITTVDDGEMAVTACEDKKFDMILLDLHMPKLNGLEAAKMIRQKSLMNKHSPIVLITASSSDLSSIDMKKSGVDFCFQKPIDEKQLLIQILRIVDKIKHAAIDWQLCVQKVSGNQALAEEFLAKFIEELYKNREEFIGLMHQKNVKGLADLAHKLHGACCFCGVPILQKRVAQLEKLARRTANADNLSEAFTDLIQSIDAVISEYENQYSQ

SEQ ID NO: 4968 - protein, 287 aa, Arabidopsis thaliana
MGDKNKDDSSSQSKAVRKEKRAFLFRKWTRVDVMRVSAVGAVHLLCLLAPFNYTWEAFRFAAMVGISTNLSITFSYHRNLTHRSFKLPKWLEYPFAYSALFALQGHPIDWVSTHRFHHQFTDSDRDPHSPIEGFWFSHVFWIFDTSYIREKCGGRDNVMDLKQQWFYRFLQNTIGLHILTFWILVYLWGGLPYLTWSVGVGGAIGYHATWLINSACHIWGSRAWNTKDTSRNIWWLGPFTMGESWHNNHHAFEASARHGLEWYQVLGLATDVKLPTDAQKRKMSLAR

SEQ ID NO: 4969 - protein, 482 aa, Lactobacillus gasseri
MAEVEPNNSHQKKTTKNKKKHLPKYAQFLLTGIAGAAIGAGLTFGIMEVKELKSPFYQVEKVYEQLQGSYYKKVSSQTLRQGAINGMLDSLNDPFSEGLSGANQEQVNNILEGSTFGGVGIQMAVRNNKVVVDSIVANSPASKSTIKPGDEIVAVDNKKVSAAQFTKVASLVRGKVGTKVTLKLKRANSTFSVTLKRAKISQSSLTKRTEGNATIITITQFDVNTAKDLKVALKSINTKKYPKLIIDLQDNPGGEMNAALKSASYFLPNNKIIMQYKDRKEKEVIRSDKKLSGGFHTSLKPIILINGNTASASEIFTAALVQNHCGVSVGQTSYGKGTVQQVGQTEDSEYKYTVAKWLTPNGTWINQKGLKPTYPVSESPLAKLPQFQSMSILKRSMTGVDVATLQQYLTALGYLPKHVTGVFDDETKNAVIKFQKEHDLTTDGIVNGQVQAQLYLAVAQKLQDDNPALKKALSLNLKDMED

SEQ ID NO: 4970 - protein, 376 aa, Chrysopogon gryllus
  misc_feature (240)..(240): Xaa can be any naturally occurring amino acid
ALSIAGAVQSQKLAVRSISRLQALPGGDVKLLCDTVVEHVRELTGYDRVMVYRFHEDEHGEVVAESRRDNLEPYLGLHYPATDIPQASRFLFRQNRVRMIADCHATPVRVIQDPGLSQPLCLVGSTLRAPHGCHAQYMANMGSIASLVMAVVISSGGDDEQTGRGGISSAMKLWGLVVCHHTSPRCIPFPLRYACEFLTQAFGLHLNMELQLAHQLSEKHILRTQTLVCDMLLRDSPSGXVTQSPSIMDLVKCDGAALYYHGKYYPLGVTPTESQIKDIIEWLTVCHGDSTGLSTDSLADAGYLGAAALGDAVCGMAVAYITPSDYLFWFRSHTAKEIKWGGAKHHPEDKDDGQRMHPRSSFKAFLEVVKSRSLPW

SEQ ID NO: 4971 - protein, 1190 aa, Xylella fastidiosa Ann-1
MRCLKRVRGGLLTALLVFVSLLTATAAVPEMPRFRVLDATSGLPSNVVRAMLQDAAGYLWLATSDGLARYDGTAFKVWRHDPNDPGSLPGDSVLALYIDVQDRIWVLSENAGLAVLDAQRRRFIQIPVGSVAKTDALHTLTGHGDAIWLSDLHASVIRIDSAGALTRYALADVSPTLKDTPVVALTFDANGRLWVGTPDGLLYFEAGRLHLAPPPLDKASIHSIAAVGSRLWVGSTDGVYLQDAEGRWRVPNWGPMFAFGNLLLSVADAGDGEFWLGSERGLWRTRQERPPVQIPLSDMHHGVSTVSSLWRDTSGGLWVPVYGRGLGYLRQDWKRMAVVRPSDSGESAYCNVAPAAYSGGLWQLNRIGELMHLNTSTGELVHTGWQRHELRGVNITTTLEDSRGRLWLANMQNGLSRLDLKNGQWREWAAHGDDAVPLYGPISWIVEMPDSSLWLEALGVLQQRDLESGHVLNQIVPGSHGVDGSRVEQIGLGPDGRLWLAAGSGVYAWESQRRMFVPIPDLTGTRAYSFVPVGGNEVWVHRLRGLEQWRHSSHGWKRIALVGPQHGLPAMESLGMQHDAQGRIWLSTRRGLWRIDNTDELQVRNFGLRDGLGTQEFAEACLWMAPDGVLVGGTTDGYLMLFDTAMPDPAPFVPQLRMETVSVIRAGRRIDLPVDQPFELLPNDRQLIVGARLLSFGDPLSNRYSYWLKGFDTGWIDQGSSGTREFSSLPPADYTLLIQGTDPMGNLSRIHLVTFRVLPPWWRSAWGMSVLTGSGLLLLWGVAWNYHRRLRRRARLQLEQHQREVAERASLAKTQFLATLGHEVRTPMTGVLGMSELLLETPLDTRQHGYATSIQAAGKHLLRLVNDALDLAKIEAGKLSLERRDFDFHALLEQVVAMIRPMVERKGLRFVYRLDPEVPQYVHGDADRLQQILLNLLINATKFTEHGEVVLQVAPGQEQACLGVRIDVADTGPGLSEEQCQRLFRRFEQVNGASTVARYGGSGLGLAICRELATVMEGEIHVDSELGKGTCFRVLLPLPWVLAVQPEVAVMDMEPSPCSNPLHLLLIEDDPTVAEVIVELLRVRGHRVTHALHGLEALVEVTLTRFDVCLCDLDLPGLDGAGLIVQLRAQGQSFPIVVVTARTDADAQRQAFHVGCDAFLRKPVTGEMLEQVLTQVLSAPRQDADVDTPT

SEQ ID NO: 4972 - protein, 376 aa, Cleistachne sorghoides
ALSIAGAVQSQKLAVRAISRLQALPGGDVKLLCDTVVEHVRELTGYDRVMVYRFHEDEHGEVVAESRRDNLEPYLGLHYPATDIPQASRFLFRQNRVRMIADCHATPVRVIQDPGLSQPLCLVGSTLRAPHGCHAQYMANMGSIASLVMAVIISGGGDDEQTGRGGISSAMKLWGLVVCHHTSPRCIPFPLRYACEFLMQAFGLQLNMELQLAHQLSEKHILRTQTLLCDMLLRDSPTGIVTQSPSIMDLVKCDGAALYYHGKYYPLGVTPTESQIKDIIEWLTVCHGDSTGLSTDSLADAGYLGAAALGDAVCGMAVAYITPSDYLFWFRSHTAKEIKWGGAKHHPEDKDDGQRMHPRSSFKAFLEVVKSRSLPW

SEQ ID NO: 4973 - protein, 376 aa, Coelorachis selloana
ALSIAGAVQSQKLAVRAISRLQALPGGDVKLLCDTVVEHVRELTGYDRVMVYRFHEDEHGEVVAESRRDNLEPYLGLHYPATDIPQASRFLFRQNRVRMIADCHATPVRVIQDPGLSQPLCLVGSTLRAPHGCHAQYMANMGSIASLVMAVIISSGGDDEQTGRGGISSSMKLWGLVVCHHTSPRCIPFPLRYACEFLMQAFGLQLNMELQLAHQLSEKHILRTQTLLCDMLLRDSPTGIVTQSPSIMDLVKCDGAALYYHGKYYPLGVTPTESQIKDIIEWLTVCHGDSTGLSTDSLADAGYLGAAALGDAVCGMAVAYITPSDYLFWFRSHTAKEIKWGGAKHHPEDKDDGQRMHPRSSFKAFLEVVKSRSLPW

SEQ ID NO: 4974 - protein, 431 aa, Picrophilus torridus DSM 9790
MNLFIFRRDLRLYDNTALLKSLNNETATIFIMDPAQVKNNEYRSEKALNFMISSLYDLMTDIEGNHGKLAVFHGDPVDVLKRLVNRENINEIYINRDYTPFSIKRDERIKEFSIKNNIKFNALDDYFLSDPELRTGSGSFFKNFTAFYNRAMEINVKKPVYEIKKSNLIPIDGDDMELKYNNYGRKTAIEKMHNFIKNDYSLRDFPELNMTSFLSADIKFGNISIREAYHYIKDPEFRRQLYWRDFYLYIAYHFPYVFGSNFNRKYNIKWENKEKYIDAWKNGLTGYPIVDAAMRSLNETGYINNRLRMIVSSFLVKDLHVDWRIGEKYFAQKLIDYDPASNNGNWQWVASTGVNSRGMYRIINPWIQQKKFDPECKFIKRYVNELSDLEPEIIHNLYKIRLNNYPAPLVDHKTAVMEFRKLINQTPTYLS

SEQ ID NO: 4975 - protein, 794 aa, Psilotum nudum
GSIGSLVMAVIVNDNDAEPSGRGNQPKNRRLWGMVVCHHTTPRAVPFSLRSACEFLMQVFGLQLNMEIELAAQMREKHILRTQTLLCDMLLRDAPIGIVTQSPNIMDLVKCDGAALYYGKKFWLLGTTPTEAQIKDLADWLLDVHRDSTGLSTESLADAGFPGAAALGDAVCGMAAVKITPRDYLFWFRSHTAKEIKWGGAKHNPDDKDDGKKMHPRSSFKAFLEVVKWRSSPWEDVEMDAVHSLQLILRGSFQDIDDSESKTMIHHRLNDLNLHGMDELSTVANEMVRLMETATAPILAVDSSGFINGWNGKAAELTGLPLEDAMNKSLVRDLVVDESVSTVERLLYLALQGEEERNVEIKLKTFGTQADKGPVILVVNACASRNITANVVGVCFVGQDVTGEKVVMDKFTRIQGDYRTIVQSPNPLIPPIFGSDEFGYCSEWNPAMVKLSGWKMEEVLGKMNVGEIFGSEMACCRLRGQDAMTKFMIVLNSAMGGQDSDRFPLGFFDRQGKYVEALLIANKRTDGAGAITGVFCFLHIASAEVQQALQVQKRSARTALDKLKEVAYMRQEIRNPLYGIMFTRRLLEGTNLSEEQKQIIDTSAVCEKQLHQILDEDNFENLDHGNIDLDTIEFTMGTVMDAVISQGMIRSREKGLQLIRETPVDIKNMRLYGDQLRLQQVLADFLTTAVRFTSSSDGWVGIKVVPTMKGLGGGLHVMRFDYRISHPGKGIPEDLVQQMFDCSREITQEGMGLSVSRKLVRLMNGDVSYIREAGVCYFLVNVEFPLADRDDSQN

SEQ ID NO: 4976 - protein, 726 aa, Thiomicrospira crunogena XCL-2
MMNQTVTEEAVRRLAEGTHHDPFQILGCHAVGKKWEVRVWLPTAESASVEGWHALTRVEGTSLFIASLTEKQKKALPLHFKVNWVEANGSEHTVVSPYTFLPQLGELDLHLYAEGRHWHVYDVLGAQVKEVDNISGVQFSVWAPAASRVSVVGDFNGWNGLRHPMRTNGQSGVWELFIPGMVSGDIYKFEIRNYQTDQLLVKTDPYAKAMEFRPQTGSIVYDSTFQWQDRDWLAARAHFDWQASPINIYEVHLGSWQRDHDGFFLNYKEIAQRLVEYVKWMGYTHIELLPISEHPLDESWGYQTTGYFSPTSRFGSPDDFRYFVNYCHENGIGVFLDWVPAHFPKDEFALARFDGTALYEHEDPRRGEHQDWGTYIFNYGRNEVRNFLIANALYWLKELHIDGLRVDAVASMLYLDYSRKDGDWLPNQYGGRENIEAIEFLKTLNAEVHAQCPGALMMAEESTSWPMVSRPTWMGGLGFSMKWNMGWMNDTLDFFQQDPIYRPYHHNQLTFSQMYAYSENFILPLSHDEVVHMKHALVSKMPGDTWQKMANMRLLMGYQTLNPGKKLLFMGGEFAQWQEWSESRGLDWYLCEQPANRGVQMLVRDLNLLYQTSPALYCHDFDQEGFEWIDCHDYEQSVLSFVRISEKESLICVFNFTPVPRYDYRIGLPETGIYEEVLNSDSELYGGGNVGNSGQLTTEDQRWMNRPCSTTLVLPPLAVVVLRKKS

SEQ ID NO: 4977 - protein, 665 aa, Mesorhizobium loti MAFF303099
MCGIAGILLAPDAANTNALRAIGPMMMALRHRGPDGEAFWMSREAGIAFGHRRLAIVDLSEAGRQPMHSASGRYVITFNGEIYNFRDLRRELEGAGHHFRGTSDTEVMLCAIESWGLEAALARFAGMFAFGLWDLKNRTLHLARDRMGKKPLYVASTPEALVFASELKAITCFPGFTPELDVDAAATMLSKGWVPDDRCIWQGVFKLPPGSVLSVTAADFANARGAGSLAHRIRRWWSLADVACKAQRDPIAGSDEDLTTELDSLLRLAVKERMVADVPLGAFLSGGIDSSTVVALMQAQSPTPVRTFTIAFGESGFDEAPHAAAVARHLGTDHTELHLSPAAALEVIPELPRIWDEPFADESQIPTLLVSRLARRHVTVALSGDGGDECFAGYSRHFLATRLRRQHELPSSFRRMLAAGAGLLAQASQKDIFGSLPLSANMRHGLRGDRLNRLARLFAAANEDQLLQRLTESSTNKLIHHKPAASNASATQLDGLLSRLLFDDMTGYLPGDILVKLDRATMANSLEGRCPILDHRVVEFAWRLPTDAKVRSGKGKWILRQLLDRYVPRRLVDRPKQGFDVPVGAWLRGPLRDWATDIIATTRLSGDGVIDCAKVDACWRDHLHGNQDHFRDLWPLLMFQAWRNDAMRPSAPATHASYDIELTGD

SEQ ID NO: 4978 - protein, 505 aa, Arabidopsis thaliana
GLELQLSYTLRHQHPVEYTVPIQLPVINQVFGTSRAVKISPNSPVARLRPVSGKYMLGEVVAVRVPLLHLSNFQINDWPELSTKRYALMVLMLPSDSARQWHVHELELVEVVADQVAVALSHAAILEESMRARDLLMEQNVALDLARREAETAIRARNDFLAVMNHEMRTPMHAIIALSSLLQETELTPEQRLMVETILKSSNLLATLMNDVLDLSRLEDGSLQLELGTFNLHTLFREVLNLIKPIAVVKKLPITLNLAPDLPEFVVGDEKRLMQIILNIVGNAVKFSKQGSISVTALVTKSDTRAADFFVVPTGSHFYLRVKVKDSGAGINPQDIPKIFTKFAQTQSLATRSSGGSGLGLAISKRFVNLMEGNIWIESDGLGKGCTAIFDVKLGISERSNESKQSGIPKVPSIPRHSNFTGLKVLVMDENGVSRMVTKGLLVHLGCEVTTVSSNEECLRVVSHEHKVVFMDVCMPGVENYQIALRIHEKFTKQRHQRPLLVALS

SEQ ID NO: 4979 - protein, 432 aa, Neisseria gonorrhoeae FA 1090
MPSETALPLYADTRAAHTLVWFRQNLRIRDNAALCAAVAEGSPVIGIWIDDAETDNPRRAAFYRQSAAELAQGLARRGIPLYTAASPAGLVRLAVRLNIRAVIADESHTFADKLADNALWHELDKHGIALTFVNDRSVFGKTDLTPDNGTAHTDFNRYREVWLDRFSKQPPAGSDLFAAYRQPFPENLPAPPPAALSDGIFLPQNGGETAAWRQWRRFLEQAASYSVLKDFPSRKNTSLMGAYLSVGCISPRLLARESLERRLNAWADNIIRRDFFLQLALQHADDDPSDGNPEHTLRLTLWQQGRTGIPIIDAAMRCLHKTGSLHPALRRLSADFFCHVLNLPRREGEIWFARQLTDFDAAINQGNWRLAASRHTCPDIAAASYRTDPDGTFIKRHIPELAHLSADTVHTPWRFACSVDTHGYPARPVAGV

SEQ ID NO: 4980 - protein, 531 aa, Neurospora crassa
MGNSSSKDAGASSKNRGDDDLKSYPSFSKSDTKDSSRSFRGLRSKIPGGSKTDSPRNSTILSSEEVAEKMNALSGKNGRPSVHTRPSRRDMSPSPASPSTSSPSSPSLDTATLASPTGEPLPPPSPVHNATGGHHDVRAAQESGEVDHISDQPPSGGGGANSNQQPGQSILVKRENTINPVYDTPNQDPQNEQAVSGVAMSDIKDIDLDDFIKRLLDAAYAGKVTKSVCLKNAEIVAICHRARELFLSQPALLELDAPVKIVGDVHGQYTDLIRMFEMCPFPPNSNYLFLGDYVDRGKQSLETILLLMCYKLKYPENFFLLRGNHECANVTRVYGFYDECKRRCNVKIWKTFVDTFNCLPIAAIVAGKIFCVHGGLSPALGHMDDIRNIARPTDVPDYGLLNDLLWSDPADMDQDWEANERGVSYCFGKKVISDFLATHDFDVVCRAHMVVEDGYEFYTDRILVTIFSAPNYCGEFDNWGAVMAVSTELLCSFELLKPLDSAALKTHIKKGRHRRNNMLNSPPAHFNPQSV

SEQ ID NO: 4981 - protein, 753 aa, Escherichia coli
MSQHNEKNPHQHQSPLHDSSEAKPGMDSLAPEDGSHRPAAEPTPPGAQPTAPGSLKAPDTRNEKLNSLEDVRKGSENYALTTNQGVRIADDQNSLRAGSRGPTLLEDFILREKITHFDHERIPERIVHARGSAAHGYFQPYKSLSDITKADFLSDPNKITPVFVRFSTVQGGAGSADTVRAIRGFATKFYTEEGIFDLVGNNTPIFFIQDAHKFPDFVHAVKPEPHWAIPQGQSAHDTFWDYVSLQPETLHNVMWAMSDRGIPRSYRTMEGFGIHTFRLINAEGKATFVRFHWKPLAGKASLVWDEAQKLTGRDPDFHRRELWEAIEAGDFPEYELGFQLIPEEDEFKFDFDLLDPTKLIPEELVPVQRVGKMVLNRNPDNFFAENEQAAFHPGHIVPGLDFTNDPLLQGRLFSYTDTQISRLGGPNFHEIPINRPTCPYHNFQRDGMHRMGIDTNPANYEPNSINDNWPRETPPGPKRGGFESYQERVEGNKVRERSPSFGEYYSHPRLFWLSQTPFEQRHIVDGFSFELSKVVRPYIRERVVDQLAHIDLTLAQAVAKNLGIELTDDQLNITPPPDVNGLKKDPSLSLYAIPDGDVKGRVVAILLNDEVRSADLLAILKALKAKGVHAKLLYSRMGEVTADDGTVLPIAATFAGAPSLTVDAVIVPCGNIADIADNGDANYYLMEAYKHLKPIALAGDARKFKATIKIADQGEEGIVEADSADGSFMDELLTLMAAHRVWSRIPKIDKIPA

SEQ ID NO: 4982 - protein, 408 aa, Arabidopsis thaliana
MGSLRRSTSNRSRKKGTAVKMNRMPSSLSPPTPPCSAIVGGTGKSKKRRGGVCLWTRFDRTGFMEVAGCDKSTIIERSSVSAKDLRTAFSHSSKILAREKAIVLNLEVIKAVITSEQVMLLDSLRPEVLTLTDRLKHHFPRKDGPENILQASSHGHQEGGEEGLKSKLPFEFRVLEIAFEVFCSFVDSNVVDLETQAWSILDELTKKVSNENLKDLRSLKTSLTHLLARVQKVRDEIEHFLDDKEDMEDLYLTRKWIQNQQTEAASNSIVSQPNLQRHTSNRISTSMVTEEDDIDDMEMLLEAYFMQLEGMRNKILLMKEHIDSTEAYVKILQNSRRNGLIHLMMLVNIGNYAITAGTVVVNLFGMNIPIGLYSTPDIFGYVVWAVVALCIVLFIVTVGYAKWKKLLD

SEQ ID NO: 4983 - protein, 138 aa, Ashbya gossypii ATCC 10895
MWLTESQKFGVAFTFGGCLFFLFGMFTLFDRALLTLGNILFLIGVLLIIGPARTYTFFARPASRRGSILFVVGLTLILFKWTFTGFVLESLGIVGLFGNFFSVIVQFLRSLPVVGPLLSHPAVAPVVDRLAGLRVLPV

SEQ ID NO: 4984 - protein, 494 aa, Bacillus cereus G9241
MPFATPPVCFGKGNSALKRRVAIIGMVVAFLIGAGGMFAGMSLFGVNPAEVTQTISSGNASTAQGNLAKINEAYALIDSRYVEDVKDEKLVEGAIQGMLSTLKDPYSTYMDKETAKQFSESLDPELEGIGAEVNKTDGKLIIVSPIKGSPAEKIGIKPNDQILSVDGNSVKDLSREEAVLKIRGKKGTTVAIEIKRAGVADPIVFKIKREKIPIFTVFSSVKQESGKDIGYMQITSFAENTAKEFKDQLKELEKKNIKGLVIDVRGNPGGYLNSVEEILGEIMTDKKPMLQVEQRNGEKKKFSTELKERKPYPISVLIDNGSASASEILAGALKEGEGYDLIGEKTFGKGTVQQAVPFKDGSNIKLTMFKWLTPDGNWIHKKGIAPTVEVKQPDYYHATPIQIEKTLSYNSNDVQVKHAQEMLKSLGYVTGREDGYFSKETESALKAFQNANKMEATGQLDKKTAEAIQTKIIEKIRSGENDLQLQSALKLMAK

SEQ ID NO: 4985 - protein, 336 aa, Xanthomonas oryzae pv. oryzae KACC10331
MSRPSLTRFLIEEQHAGRIDAELRQLITIVSRACKRISIAVSKGALGGVLGDAGTGNVQGEAQKKLDVLSNDILLEANAWGGHLAACASEEMDHSQPVPEQYPSGDFLLLFDPLDGSSNIDVNVSVGTIFSVLRAPKGTEKPGDEHFLQPGTQQVAAGYCIYGPSTMLVLTLGHGTHAFTLEREEGSFLLTQANMRVPDETAEYAINMSNQRHWEPAMQAYVGDLLAGKDGARGKDFNMRWIASMVADVHRILTRGGIFIYPWDKKDPSKPGKLRLMYEANPMSMLVEQAGGAATTGRERILDIQPTQLHQRVPVFLGSKNEVAAATRYHLDADKA

SEQ ID NO: 4986 - protein, 753 aa, Escherichia coli
MSQHNEKNPHQHQSPLHDSSEAKPGMDSLAPEDGSHRPAAEPTPPGAQPTAPGSLKAPDTRNEKLNSLEDVRKGSENYALTTNQGVRIADDQNSLRAGSRGPTLLEDFILREKITHFDHERIPERIVHARGSAAHGYFQPYKSLSDITKADFLSDPNKITPVFVRFSTVQGGAGSADTVRSIRGFATKFYTEEGIFDLVGNNTPIFFIQDAHKFPDFVHAVKPEPHWAIPQGQSAHDTFWDYVSLQPETLHNVMWAMSDRGIPRSYRTMEGFGIHTFRLINAEGKATFVRFHWKPLAGKASLVWDEAQKLTGRDPDFHRRELWEAIEAGDFPEYELGFQLIPEEDEFKFDFDLLDPTKLIPEELVPVQRVGKMVLNRNPDNFFAENEQAAFHPGHIVPGLDFTNDPLLQGRLFSYTDTQISRLGGPNFHEIPINRPTCPYHNFQRDGMHRMGIDTNPANYEPNSINDNWPRETPPGPKRGGFESYQERVEGNKVRERSPSFGEYYSHPRLFWLSQTPFEQRHIVDGFSFELSKVVRPYIRERVVDQLAHIDLTLAQAVAKNLGIELTDDQLNITPPPDVNGLKKDPSLSLYAIPDGDVKGRVVAILLNDEVRSADLLAILKALKAKGVHAKLLYSRMGEVTADDGTVLPIAATFAGAPSLTVDAVIVPCGNIADIADNGDANYYLMEAYKHLKPIALAGDARKFKATIKIADQGEEGIVEADSADGSFMDELLTLMAAHRVWSRIPKIDKIPA

SEQ ID NO: 4987 - protein, 204 aa, Triticum aestivum
  misc_feature (145)..(145): Xaa can be any naturally occurring amino acid
PPPPRQVSDQHVIDVNDTGTKVGYKPGVVLGGKDLEHDCGVHRGIGYFIEPLILLGLFARSPLSIRLKGITNDTKDPSVDTFRMVTLHMLKHFGVPLDGLELKIENRGAPPRGGGEVLLRVPNINSTLKAVNGIDEGMVKRIRGXAGYGVSVVAETTTGCLISADATVSYPNVDEVSEQSKKPELMSPEDLGEQVASMLLEEVA

SEQ ID NO: 4988 - protein, 392 aa, Heteropterys capixaba
DLEPVNPADVPVTAAGALKSYKLASKAISRLQSLPSGNIFLLCDVLVKEVRDLTGYDRVMVYKFYEDEHGEVVSECRRSDLESYLGLHYPATDIPQASRFLFMKNKVRMICDCLAPPVQVIQDERLPQPLSLCGSTLRSPHGCHAQYMTNMGTIASLVMSVTINEDDDMMDGDQQQMTRKLWGLVVCHHTSPRFVPFPLRYACEFLIQVFGVQINKEVELAAQVREKHILQIQTMLCDMLLRDAPVAIITQSPNVMDLVKCDGAALFFKNKTWLLGVTPTEEQIRDIAEWLLEYHSGNTGLSTDSLMEAGYPGASVLGDAVCGMAAVSITSRDFLFWFRSHTAKEIKWGGAKHDPDDRDDLRKMHPRSSFKAFLEVVKWGSMPWEDVEMDAI

SEQ ID NO: 4989 - protein, 392 aa, Heteropterys catingarum
DLEPVNPADVPVTAAGALKSYKLASKAISRLQSLPSGNISLLCDVLVEEVRDLTGYDRVMVYKFHEDDHGEVVSECRRSDLESYLGLHYPATDIPQASRFLFMKNKVRMICDCLAPPVKVIQDERLPQPLSLCGSTLRSPHGWHAQYMTNMGTIASLVMSVTINEDDDMMDGDQQQMTGKLWGLVVCHHTSPRFVPFPLRYACEFLIQVFGVQINKEVELAAQVREKHILQIQTMLCDMLLRDAPVAIITQSPNVMDLVKCDGASLYFKNKTWLLGVTPTEEQIRDIAEWLLEYHSGNTGLSTDSLMEAGYPGASVLGDAVCGMAAVSITSRDFLFWFRSHTAKEIKWGGAKHDPDDKDDLRKMHPRSSFKAFLEVVKWRSMPWEDVEMDAI

SEQ ID NO: 4990 - protein, 288 aa, Zea mays
VKSLQRCTRHSLERPPFETALGEYCQFPRPSLSPATAAAATSGGRGEVDEGIFVRTPLKRKAPYGEYDTAESTGWSIVSSGFIHGVDSPRKTPISGKTARKYKPKSERTKAAPQAATLNAAGSPGNPPTPAGCRYDNSLALLTKKFINLLNEAQDGILDLNSTAETLGVRKRRMYDITNVLEGIGLIEKKLKNRICWKGLGELGTNLDNDLSVLKIDFENLNLQEQALDEHISKIREKLKDLTEDEGNQRWLFLTEDDIKGLPCFQNKTLIAIKAPRGSSLEVPNPDV

SEQ ID NO: 4991 - protein, 284 aa, Brassica napus
MDPYKYRPASSYNSPFFTTNSGAPVWNNNSSMTVGPRGPILLEDYHLVEKLANFDRERIPERVVHARGASAKGFFEVTHDISNLTCADFLRAPGVQTPVIVRFSTVIHERGSPETLRDPRGFAVKFYTREGNFDLVGNNFPVFFIRDGMKFPDMVHALKPNPKSHIQENWRVLDFFSHHPESLNMFTFLFDDIGIPQDYRHMEGSGVNTYMLINKSGKAHYVKFHWKPTCGVKSLLEEDAVRVGGTNHSHATQDLYDSIAAGNYPEWKLFIQVIDPADEDKFDF

SEQ ID NO: 4992 - protein, 727 aa, Xylella fastidiosa Ann-1
MSLRILNSLKVALLTLAITTSPALMAKSDSASPQVATPDQTTATKLVYGLLSDSRYAYRLRPLDETMSKDIFKRYLEALDNNKQFFTEADIDNFSAFKAEIPDSIRNGNLKPAFSIFTVYKKRVAERVTYANQLLKQNFDFSGQEKYEYDRSKAPWPASPQDLDDIWRRSIMNDWLRLKLAGKKPEDIRKTLKKRYANLLKTVNELKGEDVFQLYLNAYTNSIDPHTDYFTPRTADAFNQQMSLSLEGIGAQLQKQEDMVIIREVIPGGPTALDGTLKPGDRIVGVGQGKGGPIEDVIGLRIDDVVSKIRGKKDTQVRLEYIPAESGIDGAHRIVTLTRQKVRLAEQAAKGETITIEGSNGDAQRRIGIIKLPTFYEDFEGRRRNVANYTSATRDVAKLLTNFKTDKVDGVVLDLRNNGGGSLDEAIQLTGLFIEQGPVVQVRESGGRVTVNGDRDDKVTWDGPLAVLINRGSASASEIFAGAIQDYGRGLVIGETSFGKGTVQNIVDLDRWPANESRRFGQVKLTIAQFFRISGSSTQHKGVLPDIAFPASVGATEFGESTYENALPWTQIASLQHTQYGNFSPILSKLKKIHISRTANDIEFKWWQEDVHNFSLEKEKKYVILNEAKRLAERRKQETQHRERQTIRKNLGLQLDPLSEESDDGLIGNERDIAKDTAREKLADKRPDPLLHESAAILTDTINLLEKDQILSAQVLLQSTTPGHWAN

SEQ ID NO: 4993 - protein, 392 aa, Heteropterys chrysophylla
DLEPVNPADVPVTAAGALKSYKLASKAISRLQSLLSGNISLLCDVLVKEVRDLTGYDRVMVYKFHEDEHGEVVSGRRRSDLESYLGLHYPATDIPQASRFLFMKNKVRMICDCLAPPVKVIQDERLPQPLSLCGSTLRSPHGCHAQYMTNMGTIASLVMSVTINEDDDMMDGDQQQMTRKLWGLVVCHHTSPRFVPFPLRYACEFLIQVFGVQINKEVELAAQVREKHILQIQTMLCDMLLRDAPVAIITQSPNVMDLVKCDGAALYFKNKTWFLGVTPTEEQIRDIAEWLLEYHSGNTGLSTDSLMEAGYPGASVLGDAVCGMAAVSITSGDFLFWFRSHTAKEIKWGGAKHDPDDKDDLRKMHPRSSFKAFLEVVKWRSMPWEDIEMDAI

SEQ ID NO: 4994 - protein, 365 aa, Novosphingobium aromaticivorans DSM 12444
MSLSSSPSSSLFEPLTFAHGPAWRNRLMLAPLTNQQSHPDGRLSDEELRWLEMRGQGGFGMVMTAAAHVQAIGQGFPGQLGVFSDDHVPALSRLADALRRSGAVSAIQLHHAGSRSPAALVGTPVSPSASDNGARALTLQEVERLRDDFIAAAHRADRAGFDGVEVHGAHGYVLAEFLSPTINRREDRYGGSAENRARIVFEVIEGIRATCRPDFQIGLRLSPERFGQDLGEILAVAARAMGEARIDYLDMSLWDVFKHPEDETRRERTLLEWFADLPRGKVRLGVAGKIMGGRDAAHVLEQGCDFAVIGRAAILRHDFPERVRQDGDYVSPALPVTARHLADEGLSKPFLDYMRTWKGFVTEDA

SEQ ID NO: 4995 - protein, 265 aa, Oryza sativa
MRNSTSSAAAQPAPASAAMYGSYASPSSGAGGYAKIPTYPPPPSAYPAAPPPPVMGQPVPPPPAQLHDPTAPPSPIAKAAELVTRFREQGQALIAARRPWGEVFRAPAFSRPPSVGEAVARARRNAAYFRANYALAVLAVVAASLLWHPGTLFALLALCAAWFFLYFARPASSAGQPLRLLGMEFEDGTVLAALTGVTVIALLFTNVGWNVIGSVMIGAALVAAHATLRSTDDLFLTEQEAAGDGLVAAGMSAAGPILPTYVRIA

SEQ ID NO: 4996 - protein, 219 aa, Aspergillus nidulans FGSC A4
MSSTSPSKEPEVEQEPQSGEEHEQMDKEQDNQTQGQGEFEVKEQDRWLPIANVARIMKLALPENAKIAKEAKECMQECVSEFISFITSEASEKCQQEKRKTVNGEDILFAMTSLGFENYAEALKIYLSKYRETQSARGEHQNRPPSSGYAGGGPVGGAASGPSVVRAGGAAAGGAFPEASDNAGSIMNQGLDPSEQDASAYGYPPMVGQGHNGAGGESY

SEQ ID NO: 4997 - protein, 243 aa, Oryza sativa
MGQSKKKFRGGRQRHWGSWVSEIRHPLLKRRVWLGTFETAEEAARAYDEAAILMSGRNAETNFPVARNATGELTPAAAVAGRDGRVGGGSGSSSSMTANGGGNSLSQILSAKLRKCCKTPSPSLTCLRLDPEKSHIGVWQKRAGARADSSWVMTVELNKDTAVSSAATVAAATAVSSSDQPTPSDSTVTTTSTSTTGSPSPPPPAMDDEERIALQMIEELLGRSGPGSPSHGLLHGGEGSLVI

SEQ ID NO: 4998 - protein, 392 aa, Heteropterys lindleyana
DLEPVNPADVPVTAAGALKSYKLASKAISRLQSLPSGNISLLCDVLVKEVRDLTGYDRVMVYKFHEDDHGEVVSECRRSDLESYLGLHYPATDIPQASRFLFMKNKVRMICDCLAPPVKVIQDEGLPQPLSLCGSTLRSPHGCHAQYMTNMGTIASLVMSVTINEDDDMMDGDQQQMTRKLWGLVVCHHTSPRFVPFPLRYACEFLIQVFGVQINKEVELAAQVREKHILQIQTMLCDMLLRDAPVAIITQSPNVMDLVKCDGASLYFKNKTWLLGVTPTEEQIRDIAEWLLEYHSGNTGLSTDSLMEAGYPGASVLGDAVCGMAAVSITSRDFLFWFRSHTAKEIKWGGAKHDPDDKDDLRKMHPRSSFKAFLEVVKWRSMPWEDVEMDAI

SEQ ID NO: 4999 - protein, 392 aa, Heteropterys megaptera
DLEPVIPADVPVTAAGALKSYKLASKAISRLQSLPSGNISLLCDVLVKEVRDLTGYDRVMVYKFHEDEHGEVVSECRRSDLESYLGLHYPATDIPQASRFLFMKNKVRMICDCLAPPVKVIQDERLPQPLSLCGSTLRSPHGCHAQYMTNMGTIASLVMSVTINEDDDMMDGDQQQMTRKLWGLVVCHHTSPRFVPFPLRYACEFLIQVFGVQINKEVELVAQVREKHILQIQTMLCDMLLRDAPVAIITQSPNVMDLVKCDGAALYFKNKTWLLGVTPTEEQIRDIAEWLLEYHSGNTGLSTDSLMEAGYPGASVLGDAVCGMAAVSITSRDFLFWFRSHTAKEIKWGGAKHDPDDKDDLRKMHPRSSFKAFLEVVKWRSMPWEDMEMDAI

SEQ ID NO: 5000 - protein, 376 aa, Coix aquatica
ALSIAGAVQSQKLAVRAISRLQALPGGDVKLLCDTVVEHVRELTGYDRVMVYRFHEDEHGEVVAESRRDNLEPYLGLHYPATDIPQASRFLFRQNRVRMIADCHATPVRVIQDPGLSQPLCLVGSTLRSPHGCHAQYMANMGSIASLVMAVIISSGGDDEQTSRGGISSAMKLWGLVVCHHTSPRCIPFPLRYACEFLMQAFGLQLNMELQLAHQLSEKHILRTQTLLCDMLLRDSPTGIVTQSPSIMDLVKCDGAALYYHGKYYPLGVTPTESQIKDIIEWLTVCHGDSTGLSTDSLADAGYLGAAALGDAVCGMAVAYITPNDYLFWFRSHTAKEIKWGGAKHHPEDKDDGQRMHPRSSFKAFLEVVKSRSLPW

SEQ ID NO: 5001 - protein, 245 aa, Lilium longiflorum
MGRGKIEIKRIENTTNRQVTFCKRRNGLLKKAYELSVLCDAEVALIVFSTRGRLYEYANNSVKGTIERYKKASSDAFNTGSVSEANAQYYQQESSKLRNQIVSLQNAHRSMLGESIGSMGTQGTEIHGEKAGKMDNNKIRTKKNELLFAEIEYMQKREAELQNNSMFLRTKIAENERSQQQQMDMERSQQQHMDMDRSHQRHLEMLPTTSAFETMPTFDSRNFFDINLIEAHHHYQQQQTALQLG

SEQ ID NO: 5002 - protein, 376 aa, Cymbopogon flexuosus
ALSIAGAVQSQKLAVRAISRLQALPGGDVKLLCDTVVEHVRELTGYDRVMVYRFHEDEHGEVVAESRRDNLEPYLGSHYPATDIPQASRFLFRQNRVRMIADCHATPVRVIQDPGLSQPLCLVGSTLRAPHGCHAQYMANMGSIASLVMAVIISSGGDDEQTGRGGISSAMKLWGLVVCHHTSPRCIPFPLRYACEFLMQAFGLQLNMELQLAHQLSEKHILRTQTLLCDMLLRDSPTGIVTQSPSIMDLVKCDGAALYYHGKYYPLGVTPTESQIKDIIEWLTVCHGDSTGLSTDSLADAGYLGAAALGDAVCGMAVAYITPSDYLFWFRSHTAKEIKWGGAKHHPEDKDDGRRMHPRSSFKAFLEVVKSRSLPW

SEQ ID NO: 5003 - protein, 333 aa, Dichanthium aristatum
TGYDRVMVYRFHEDEHGEVVAESRRDNLEPYLGLHYPATDIPQASRFLFRQNRVRMIADCHATPVRVIQDPGLSQPLCSVGSTLRAPHGCHAQYMANMGSIASLVMAVIISSGGDDEQTGRGGISSSMKLWGLVVCHHTSPRCIPFPLRYACEFLMQAFGLQLNMELQLAHQLSEKHILRTQTLLCDMLLRDSPTGIVTQSPSIMDLVKCDGAALYYHGKYYPLGVTPTESQIKDIIEWLTVCHGDSTGLSTDSLADAGYLGAAALGDAVCGMAVAYITPSDYLFWFRSHTAKEIKWGGAKHHPEDKDDGQRMHPRSSFKAFLEVVKSRSLPW

SEQ ID NO: 5004 - protein, 376 aa, Elionurus muticus
ALSIAGAVQSQKLAVRAISRLQALPGGDVKLLCDTVVEHVRELTGYDRVMVYRFHEDEHGEVVAESRRDNLEPYLGLHYPATDIPQAPRFLFRQNRVRMIADCHATSVRVIQDPGLSQPLCLVGSTLRAPHGCHAQYMANMGSIASLVMAVIISSGGDDEQTGRGGISSSMKLWGLVVCHHTSPRCIPFPLRYACEFLMQAFGLQLNMELQLAHQLSEKHILRTQTLLCDMLLRDSPTGIVTQSPSIMDLVKCDGAALYYHGKYYPLGITPTESQIKDIIEWLTVCHGDSTGLSTDSLADAGYLGAAALGDAVCGMAVAYITPSDYLFWFRSHTAKEIKWGGAKHHPEDKDDGQRMHPRSSFKAFLEVVKSRTLPW

SEQ ID NO: 5005 - protein, 376 aa, Heteropogon contortus
ALSIAGAVQSQKLAVRAISRLQALPGGDVKLLCDTVVEHVRELTGYDRVMVYRFHEDEHGEVVAESRRDNLEPYLGLHYPATDIPQASRFLFRQNRVRMIADCHATPVRVIQDPGLSQPLCLVGSTLRAPHGCHAQYMANMGSIASLVMAVIISSGGEGEQTARGGISSAMKLWGLVVCHHTSPRCIPFPLRYACEFLMQAFGLQLNMELQLAHQLSEKHILRTQTLLCDMLLRDSPTGIVTQSPSIMDLVKCDGAALYYHGKYYPLGVTPTEAQIKDIIEWLTVCHGDSTGLSTDSLADAGYLGAVALGDAVCGMAVAYITPSDYLFWFRSHTAKEIKWGGAKHHPEDKDDGQRMHPRSSFKAFLEVVKSRSLPW

SEQ ID NO: 5006 - protein, 704 aa, Saccharomyces cerevisiae
MYNIPDNVKGAVEFDPWLKPFADVLSERRYLADKWLYDITHATPDGSYQSLSKFARDSYKSYGLHANPETKEITYKEWAPNAERAFLVGDFNNWDTTSHELKNKDEFGNFTITLHPLPNGDFAIPHDSKIKVMFILPDGSKIFRLPAWITRATQPSKETSKQFGPAYEGRFWNPENPYKFVHPRPKFSESVDSLRIYEAHVGISSPEPKITTYKEFTEKVLPRIKYLGYDAIQLMAIMEHAYYASFGYQVTNFFAASSRFGTPEELKELIDTAHSMGILVLLDVVHSHASKNVEDGLNMFDGSDHQYFHSISSGRGEHPLWDSRLFNYGKFEVQRFLLANLAFYVDVYQFDGFRFDGVTSMLYVHHGVGAGGSFSGDYNEYLSRDRSFVDHEALAYLMLANDLVHEMLPNLAVTVAEDVSGYPTLCLPRSIGGTGFDYRLAMALPDMWIKLIKEKKDDEWEMGSIVYTLTNRRYGEKVVAYCESHDQALVGDKTLAFWLMDAAMYTDMTVLKEPSIVIDRGIALHKMIRLITHSLGGEAYLNFEGNEFGHPEWLDFPNVNNGDTYKYARRQFNLADDPLLRYQNLNEFDRSMQLCEKRHKWLNTKQAYVSLKHEGDKMIVFERNNLLFIFNFHPTNSYSDYRVGVEKAGTYHIVLNSDRAEFGGHNRINESSEFFTTDLEWNNRKNFLQVYIPSRVALVLALKE

SEQ ID NO: 5007 - protein, 505 aa, Arabidopsis thaliana
GLRLQLSYTLRHQHPVEYTVPIQLPVINQVFGTSRAVKISPNSPVARLRPVSGKYMLGEVVAVRVPLLHLSNFQINDWPELSTKRYALMVLMLPSDSARQWHVHELELVEVVADQVAVALSHAAILEESMRARDLLMEQNVALDLARREAETAIRARNDFLAVMNHEMRTPMHAIIALSSLLQETELTPEQRLMVETILKSSNLLATLMNDVLDLSRLEDGSLQLELGTFNLHTLFREVLNLIKPIAVVKKLPITLNLAPDLPEFVVGDEKRLMQIILNIVGNAVKFSKQGSISVTALVTKSDTRAADFFVVPTGSHFYLRVKVKDSGAGINPQDIPKIFTKFAQTQSLATRSSGGSGLGLAISKRFVNLMEGNIWIESDGLGKGCTAIFDVKLGISERSNESKQSGIPKVPAIPRHSNFTGLKVLVMDENGVSRMVTKGLLVHLGCEVTTVSSNEECLRVVSHEHKVVFMDVCIPGVENYQISLRIHEKFTKQRHQRPLLVALS

SEQ ID NO: 5008 - protein, 402 aa, Thermotoga maritima MSB8
MRLNQISKFAIVSVVVLVLALLLGGSAKTNLTVEEVNKALEPFFDSLSYILNYYYEADKLDINKLIDHAIDGLVKGTGDDFSYYQDPETYRENQIEMKGEYGGLGIEVTYDAEHGAIKVVAPMYGTPAWRAGLKAGDLIITIDGTPVSKMTYMEAVNNLRGEPGTSVTIEVLRDGEKLTFTIVREKIEIKMVLYSFIETEKGSIGYVRITRFGEKADSDMKNALDKIFEKGVKGLIIDVRDNPGGYLDVALKIVSMFVDKGVILKVRNGFGEEDVYESYGNSYPNVPIVLLVNEGSASASEILTGALKDLGIATVVGRKTFGKGSVQTGFPLSNGGVLFLTTAHYLTPSGKDIHKIGIEPDVLVEESVEEELHAETREQIEVDPEKDPFVKKGLEVLLEKIK

SEQ ID NO: 5009 - protein, 368 aa, Synechococcus elongatus PCC 6301
MSESLKLLTPVQVGRYELRNRIVMAPLTRNRATGPDNIPNDLNVLYYQQRASAGLIITEASQISPQGQGYPLTPGIHSPEQVEGWKPIVQAVHDRGGCIFLQLWHVGRISHPSLQPDGALPVAPSAIQPAGMAATFQGEQPFVTPRALETEEIAGVVEDYRRAAENALAAGFDGVEVHGANGYLIDQFSQDGTSQRSDRYGGSFENRSRFLREVLDAVISVWGSDRVGLRLSPWGQFNDMRDSDPVGLFSYVAQMLNPYNLAYLHWIEPRWDKAEESPEFNQMATPVFRSLYNGPVIAAGGYSRSTAEAAIASGAADLVAFGRLYISNPDLVERFALDAPLNPYDRNTFYGGDEHGYTDYPSLEAASV

SEQ ID NO: 5010 - protein, 477 aa, Lycopersicon esculentum
MGLISKIATNDGHGENSAYFDGWKAYENDPFHPTQNPNGVIQMGLAENQLCFDLIQEWIVNNPKASICTYEGVQDFQDTAIFQDYHGLPEFRKAVARFMEKVRGDRVRFDPERIVMSGGATGAHESLAFCLADPGDAFLVPTPYYPGFDRDLRWRTGVQLFPVVCESSNNFKVTKEALEEAYSKAQESNIKVKGLLINNPSNPLGTILDKETLKDILRFINDKNIHLVCDEIYAATAFSQPSFISISEVKSEVVGCNDDLVHIVYSLSKDLGFPGFRVGIIYSYNDAVVNIARKMSSFGLVSTQTQRLIASMLLDTIFVEDFIAKSSMRLLQKHGLFTKGLGQVGITTLKSNAGLFIWMDLRRFLENSTFDDELKLWHIIIDKVKLNVSPGCSFHCSEPGWFRVCFANMDDATMKIALRRIRHFVYLQPNKGVEVATKKQYCRTRSKLEISLSFRRLDDFMNSPHSPMSSPMVQARN

SEQ ID NO: 5011 - protein, 505 aa, Arabidopsis thaliana
GLELQLSYTLRHQHPVEYTVPIQLPVINQVFGTSRAVKISPNSPVARLRPVSGKYMLGEVVAVRVPLLHLSNFQINDWPELSTKRYALMVLMLPSDSARQWHVHELELVEVVADQVAVALSHAAILEESMRARDLLMEQNVALDLARREAETAIRARNDFLAVMNHEMRTPMHAIIALSSLLQETELTPEQRLMVETILKSSNLLATLMNDVLDLSRLEDGSLQLELGTFNLHTLFREVLNLIKPIAVVKKLPITLNLAPDLPEFVVGDEKRLMQIILNIVGNAVKFSKQGSISVTALVTKSDTRAADFFVVPTGSHFYLRVKVKDSGAGINPQDIPKIFTKFAQTQSLATRSSGGSGLGLAISKRFVNLMEGNIWIESDGLGKGCTAIFDVKLGISERSNESKQSGIPKVPAIPRHSNFTGLKVLVMDENGVSRMVTKGLLVHLGCEVTTVSSNEECLRVVSHEHKVVFMDVCMPGVENYQIALRIHEKFTKQRHQRPLLVALS

SEQ ID NO: 5012 - protein, 370 aa, Pneumocystis carinii
MDSKHSVFNVMGQEFVLQKGYEVIKGLGKGSYGVVCSAKNIEVEDNNKVAIKKITNIFSKKMLAKRALREIMLLQHFRNHKNITTLYDMDIVDPSKFNELYLYEELMQANLNSIIRSDQPLTDAHFQSFIYQILCGLKYIHSANVLHRDLKPSNLLINADCKLKICDFGLSRGISVNQGQGTEYMTEYVTTRWYRAPEVMLSFQSYSKAIDLWSVGCILAELLGRKPFFKGSNYVDQLNQIFCILGTPNENIISKIKSASAQSYIRSLPTLPKMPYSKIFPYANPDALDLLNCLLTFDPYDRISCEEALEHPYLIIWHDPNKEPVCSEQFDFGFEAIDSIEEIRQMIINEVSRFKGLTGNQKLYHSISNT

SEQ ID NO: 5013 - protein, 530 aa, Arabidopsis thaliana
  misc_feature (322)..(322): Xaa can be any naturally occurring amino acid
  misc_feature (345)..(345): Xaa can be any naturally occurring amino acid
  misc_feature (410)..(410): Xaa can be any naturally occurring amino acid
MRRFLINQAKGLVDHSRRQHHHKSPSFLSPQPRPLASSPPALSRFFSSTSEMSASDSTSSLPVTLDSINPKVLKCEYAVRGEIVNIAQKLQEDLKTNKDAYPFDEIIYCNIGNPQSLGQLPIKFFREVLALCDHASLLDESETHGLFSTDSIDRAWRILDHIPGRATGAYSHSQGIKGLRDVIAAGIEARDGFPADPNDIFLTDGASPAVHMMMQLLLSSEKDGILCPIPQYPLYSASIALHGGSLVPYYLDEATGWGLEISDLKKQLEEARSKGISVRALVVINPGNPTGQVLAEENQRDIVNFCKQEGLVLLADEVYQEXNVYVPDKKFHSFKKVARSLGYGXKDISLVSFQSVSKGYYGECGKRGGYMEVTGFTSDVREQIYKMASVNLCSNISGQILASLVMSPPXERDGILSSMAKRAKTLEDALNSLEGVTCNRAEGAMYLFPRINLPQKAIEAAEAEKTAPDAFYCKRLLNATGVVVVPGSGFGQVPGTWHFRCTILPQEDKIPAIVNRLTEFHKSFMDEFRN

SEQ ID NO: 5014 - protein, 505 aa, Arabidopsis thaliana
GLELQLSYTLRHQHPVEYTVPIQLPVINQVFGTSRAVKISPNSPVARLRPVSGKYMLGEVVAVRVPLLHLSNFQINDWPELSTKRYALMVLMLPSDSARQWHVHELELVEVVADQVAVALSHAAILEESMRARDLLMEQNVALDLARREAETAIRARNDFLAVMNHEMRTPMHAIIALSSLLQETELTPEQRLMVETILKSSNLLATLMNDVLDLSRLEDGSLQLELGTFNLHTLFREVLNLIKPIAVVKKLPITLNLAPDLPEFVVGDEKRLMQIILNIVGNAVKFSKQGSISVTALVTKSDTRAADFFVVPTGSHFYLRVKVKDSGAGINPQDIPKIFTKFAQTQSLATRSSGGSGLGLAISKRFVNLMEGNIWIESDGLGKGCTAIFDVKLGISERSNESKQSGIPKVPAIPRHSNFTGLKVLVMDENGVSRLVTKGLLVHLGCEVTMVSSNEECLRVVSHEHKVVFMDVCMPGVENYQIALRIHEKFTKQRHQRPLLVALS

SEQ ID NO: 5015 - protein, 374 aa, Vibrio parahaemolyticus RIMD 2210633
MKQRPNKLFEPAQLKALSLQNRIVMAPMTRARTTQPGNIPNEMMATYYQQRASAGLIISEATQISDDSQGYSFTPGVYTDAQVAGWQGVTQAVKLQGAAMFCQLWHVGRVSHPTFQNGEQPIAPSALAPVETQVWIADEQGNGNMVDCVEPRAMTQADINRVVGDFANAAKRAIESGFDGVEIHGGNGYLIDQFLRTNSNHRTDNYGGSRENRIRFLIEVVDAVIAAVGAHRVGVRLAPFITFKDMDCPDIVPTILEASKQLQERDIAYLHLSEADWADAPTIPETFRIELRKRFRNAIIVAGRYDPQRANEVLEKGYADLVAFGRPFVANPDLVSRLQHHHPLAELDGSTLFGGNERGYTDYPALQQECAEQA

SEQ ID NO: 5016 - protein, 753 aa, Escherichia coli
MSQHNEKNPHQHQSPLHDSSEAKPGMDSLAPEDGSHRPAAEPTPPGAQPTAPGSLKAPDTRNEKLNSLEDVRKGSENYALTTNQGVRIADDQNSLRAGSRGPTLLEDFILREKITHFDHERIPERIVHARGSAAHGYFQPYKSLSDITKADFLSDPNKITPVFVRFSTVQGGAGSADTVRQIRGFATKFYTEEGIFDLVGNNTPIFFIQDAHKFPDFVHAVKPEPHWAIPQGQSAHDTFWDYVSLQPETLHNVMWAMSDRGIPRSYRTMEGFGIHTFRLINAEGKATFVRFHWKPLAGKASLVWDEAQKLTGRDPDFHRRELWEAIEAGDFPEYELGFQLIPEEDEFKFDFDLLDPTKLIPEELVPVQRVGKMVLNRNPDNFFAENEQAAFHPGHIVPGLDFTNDPLLQGRLFSYTDTQISRLGGPNFHEIPINRPTCPYHNFQRDGMHRMGIDTNPANYEPNSINDNWPRETPPGPKRGGFESYQERVEGNKVRERSPSFGEYYSHPRLFWLSQTPFEQRHIVDGFSFELSKVVRPYIRERVVDQLAHIDLTLAQAVAKNLGIELTDDQLNITPPPDVNGLKKDPSLSLYAIPDGDVKGRVVAILLNDEVRSADLLAILKALKAKGVHAKLLYSRMGEVTADDGTVLPIAATFAGAPSLTVDAVIVPCGNIADIADNGDANYYLMEAYKHLKPIALAGDARKFKATIKIADQGEEGIVEADSADGSFMDELLTLMAAHRVWSRIPKIDKIPA

SEQ ID NO: 5017 - protein, 505 aa, Arabidopsis thaliana
GLELQLSYTLRHQHPVEYTVPIQLPVINQVFGTSRAVKISPNSPVARLRPVSGKYMLGEVVAVRVPLLHLSNFQINDWPELSTKRYALMVLMLPSDSARQWHVHELELVEVVADQVAVALSHAAILEESMRARDLLMEQNVALDLARREAETAIRARNDFLAVMNHEMRTPMHAIIALSSLLQETELTPEQRLMVETILKSSNLLATLMNDVLDLSRLEDGSLQLELGTFNLHTLFREVLNLIKPIAVVKKLPITLNLAPDLPEFVVGDEKRLMQIILNIVGNAVKFSKQGSISVTALVTKSDTRAADFFVVPTGSHFYLRVKVKDSGAGINPQDIPKIFTKFAQTQSLATRSSGGSGLGLAISKRFVNLMEGNIWIESDGLGKGCTAIFDVKLGISERSNESKQSGIPKVPAIPRHSNFTGLKVLVMDENGVSRMVTKGLLVHLGCEVTTVSSNEECLRVVSHEHKVVFMDVCIPGVENYQISLRIHEKFTKQRHQRPLLVALS

SEQ ID NO: 5018 - protein, 504 aa, Candida boidinii
MSNPPTYTTSQGCPVSDAFSTQRISGTKISIKTPVGPLLLQDFKFLDSLAHFDRERIPERVVHAKGAGAYGVFEVTEDISDICSAKFLDTVGKKTKIFTRFSTVGGEKGSSDSARDPRGFATKFYTEEGNLDLVYNNTPIFFIRDPTKFPHFIHTQKRNPATNCKDANMFWDYLTNNPESLHQIMYLFSNRGTPTSYRKMNGYSGHSYKWYNAKGEWVSSVHFISNQGVHNMTDEEAGDLSGKDPDFQTMDLYKAIEQGDYPSWECYVQTMTLEEAKKQPFSVYDLTKVWPHKDFPLRHFGKFTLNENAQNYFAEVEQAAFSPSHTVPGMEPSNDPVLQSRLFSYPDTHRHRLGVNYSQIPVNCPMRAVFAPQIRDGSMMVNGNLGGTPNYAGAYNCPVQYQAPIKASSKTPEEQYEGETLSYDWTEVNEYDFYQPGRFWEVLGKTKGEQEALVHNVANHVSGADEFIQDRVFAYFSKANPVIGDLIRKEVLKKSPRGASKNKF

SEQ ID NO: 5019 - protein, 728 aa, Xanthomonas oryzae pv. oryzae KACC10331
MTTEGISEMSQTLQALADGLPVDAFAVLGPHPLADGRRQVRVLAPGAEAMGLIDSRGKLLARMQASAIDGVFEGILSIEGPYRLRIVWPDMVQEIEDPYAFAVTLDESLLLQIAAGDGQALRRALGAQHVQCGEVPGVRFAVWAPHAQRVAVVGDFNGWDVRRHPMRQRIGGFWELFLPRVEAGPRYKYAVTAADGRVLLKADPVARQTELPPATASVVPGTDTFAWTDAAWMAKRDPSAVPAPLSIYEVHAASWRRDGHNQPLDWPTLAEQLIPYVQQLRFTHIELLPITEHPFGGSWGYQPLGLYAPTARHGSPDGFAQFVDACHRAGIGVILDWVSAHFPDDAHGLAQFDGAALYEHADPREGMHRDWNTLIYNYGRPEVTAYLLGSALEWIDHYHLDGLRVDAVASMLYRDYGRAEGEWVPNAHGGRENLEAVAFLRQLNREIAAHFPGVLTIAEESTAWPGVTAAISDGGLGFTHKWNMGWMHDTLSYMQRDPAERAHHHSQLTFGLVYAFDERFVLPISHDEVVHGTGGLLGQMPGDDWRRFANLRAYLALMWAHPGDKLLFMGAEFGQWADWNHDQSLDWHLLEGARHRGVQLLVGDLNATLRRTPALYRGTHRAKGFDWSVADDARNSVLAFIRHDPDGGGVPLLAVSNLTAQPLHDYGVGVPRAGAWREILNTDSAHYGGSNLGNSGRLATEPMGMHGHAQRLRLTLPPLATIYLQAEK

SEQ ID NO: 5020 - protein, 753 aa, Escherichia coli
MSQHNEKNPHQHQSPLHDSSEAKPGMDSLAPEDGSHRPAAEPTPPGAQPTAPGSLKAPDTRNEKLNSLEDVRKGSENYALTTNQGVRIADDQNSLRAGSRGPTLLEDFILREKITHFDHERIPERIVHARGSAAHGYFQPYKSLSDITKADFLSDPNKITPVFVRFSTVQGGAGSADTVREIRGFATKFYTEEGIFDLVGNNTPIFFIQDAHKFPDFVHAVKPEPHWAIPQGQSAHDTFWDYVSLQPETLHNVMWAMSDRGIPRSYRTMEGFGIHTFRLINAEGKATFVRFHWKPLAGKASLVWDEAQKLTGRDPDFHRRELWEAIEAGDFPEYELGFQLIPEEDEFKFDFDLLDPTKLIPEELVPVQRVGKMVLNRNPDNFFAENEQAAFHPGHIVPGLDFTNDPLLQGRLFSYTDTQISRLGGPNFHEIPINRPTCPYHNFQRDGMHRMGIDTNPANYEPNSINDNWPRETPPGPKRGGFESYQERVEGNKVRERSPSFGEYYSHPRLFWLSQTPFEQRHIVDGFSFELSKVVRPYIRERVVDQLAHIDLTLAQAVAKNLGIELTDDQLNITPPPDVNGLKKDPSLSLYAIPDGDVKGRVVAILLNDEVRSADLLAILKALKAKGVHAKLLYSRMGEVTADDGTVLPIAATFAGAPSLTVDAVIVPCGNIADIADNGDANYYLMEAYKHLKPIALAGDARKFKATIKIADQGEEGIVEADSADGSFMDELLTLMAAHRVWSRIPKIDKIPA

SEQ ID NO: 5021 - protein, 353 aa, Escherichia coli CFT073
MGLFVKIVAVALLHKHCRESFMKTLGEFIVEKQHEFSHATGELTALLSAIKLGAKIIHRDINKAGLVDILGASGAENVQGEVQQKLDLFANEKLKAALKARDIVAGIASEEEDEIVVFEGCEHAKYVVLMDPLDGSSNIDVNVSVGTIFSIYRRVTPVGTPVTEEDFLQPGNKQVAAGYVVYGSSTMLVYTTGCGVHAFTYDPSLGVFCLCQERMRFPEKGKTYSINEGNYIKFPNGVKKYIKFCQEEDKSTNRPYTSRYIGSLVADFHRNLLKGGIYLYPSTASHPDGKLRLLYECNPMAFLAEQAGGKASDGKERILDIIPETLHQRRSFFVGNDHMVEDVERFIREFPDA

SEQ ID NO: 5022 - protein, 392 aa, Heteropterys nitida
DLEPVNPADVPVTAAGALKSYKLASKAISRLQSLLSGNISLLCDVLVKEVRDLTGYDRVMVYKFHEDEHGEVVSECRRSDLESYLGLHYPATDIPQASRFLFMKNKVRMICDCLAPPVKVIQDERLPQPLSLCGSTLRSPHGCHAQYMTNMGTIASLVMSVTINEDDDMMDGDQQQMTRKLWGLVVCHHTSPRFVPFPLRYACEFLIQVFGVQINKEVELAAQVREKHILQIQTMLCDMLLRDAPVAIITQSPNVMDLVRCDGAALYFKNKTWFLGMTPTEEQIRDIAEWLLEYHSGNTGLSTDSLMEAGYPGASVLGDAVCGMAAVSITSRDFLFWFRSHTAKEIKWGGAKHDPDDKDDLRKMHPRSSFKAFLEVVKWRSMPWEDVEMDAI

SEQ ID NO: 5023 - protein, 392 aa, Heteropterys pauciflora
DLEPVNPADVPVTAAGALKSYKLASKAISRLQSLPSGNISLLCDVLVKEVRDLTGYDRVMVYKFHEDEHGEVVSECRRSDLESYLGLHYPATDIPQASRFLFMKNKVRMICDCLAPPVKVIQDERLPQPLSLCGSTLRSPHGCHAQYMTNMGTIASLVMSVTINEDDDMMDGDQQQMTRKLWGLVVCHHTSPRFVPFPLRYACEFLIQVFGVQINKEVELAAQVREKHILQIQTVLCDMLLRDAPVTIITQSPNVMDLVKCDGAALYFKNKTWLLGVTPTEGQIRDIAEWLLEYHSGNTGLSTDSLMEAGYPGATVLGDAVCGMAAVSITSRDFLFWFRSHTAKEIKWGGAKHDPDDKDDLRKMHPRSSFKAFLEVVKWRSMPWEDVEMDAI

SEQ ID NO: 5024 - protein, 392 aa, Heteropterys rhopalifolia
DLEPVNPADVPVTAAGALKSYKLASKAIARLQSLPSGNISLLCDVLVKEVRDLTGYDRVMVYKFHEDEHGEVVSECRRSDLESYLGLHYPATDIPQASRFLFMKNKVRMICDCLAPPVKVIQDERLPQPLSLCGSTLRSPHGCHAQYMTNMGTIASLDMSVTINEDDDMMDGDQQQMTRKLWGLVVCHHTSPRFVPFPLRYACEFLIQVFGVQINKEVELAAQVREKHILQIQTMLCDMLLRDAPVAIISQSPNVMDLVKCDGAALYFKNKTWLLGVTPTEEQIRDIAEWLLEYHSGNTGLSTDSLMEAGYPGASVLGDAVCGMAAVSITSRDFLFWFRSHTAKEIKWGGAKHHPDDKDDLRKMHPRSSFKAFLEVVKWRSMPWEDVEMDAI

SEQ ID NO: 5025 - protein, 173 aa, Lilium longiflorum
  misc_feature (2)..(2): Xaa can be any naturally occurring amino acid
MXLSVLCDAEVALIVFSTRGRLYEYANNSVKATIERYKKASTDISNTRSVSEANAQYYQQEWTKLRQQINSLQNSNRNLLGESLSNMNLRDLKQLENRLEKAINKIRTKKNELLYAEIEYMQKREMELQSDNMYLRNKVAENEREQQQQMNMMPSTSEYEVMPHFRFTEFPSS

SEQ ID NO: 5026 - protein, 408 aa, Nitrosomonas europaea ATCC 19718
MQPIKKSSKLDNVCYDIRGPVLDRARQMEDEGQRVIKLNIGNPASFGFEAPDEILQDVIRNLSAASGYCDSKGLFAARKAIMHYTQEKNIANVQMDDIYIGNGVSELIMLATQALLENGDEILVPSPDYPLWTAAISLAGGVARHYTCDEQSSWLPDPENIKAQVSSRTRAIVIINPNNPTGALYPDDLLREIIEIARRNNLIIFADEIYDKILYDSASHTSVASLADDVLFVTFNGLSKNYRAAGFRSGWVVVSGNKTHARDYITGLNMLASMRLCANVPAQFGIQTALGGYQSIHDLTMPTGRLKRQRDLAWKLLTDIPGVTCFKPQSALYLFPRLDPDYYPVKDDEQFALDLLLEEKVLVVQGTGFNWSQPDHFRIVFLPNSDDLTEAIGRIAKFLDRYRTRHGS

SEQ ID NO: 5027 - protein, 341 aa, Oryza sativa
MDHAAEAQRTDLMTITRHVLNEQGRHPESRGDFTILLSHIVLGCKFVASAVNKAGLAKLIGLAGDTNVQGEEQKKLDVLSNEVFVKALVSSGRTCVLVSEENEEAIIVDAPLRGKYCVCFDPLDGSSNIDCGVSIGTIFGIYMIKDKDNVTLDDVLQPGTDMLAAGYCMYGSSCTLVLSTGNGVNGFTLDPSLGEFILTHPNIKIPNRGKIYSVNEGSAKNWDAPTAKFVEKCKFPQDGSPSKSLRYIGSMVADVHRTLLYGGIFLYPADQKSPNGKLRVLYEVFPMSFLMEQAGGQAFTGKQRALELVPRKIHDRSPIFLGSYDDVEDIKALYASESIIG

SEQ ID NO: 5028 - protein, 392 aa, Heteropterys sanctorum
DLEPVNPADVPVTAAGALKSYKLASKAISRLQSLPSGNISLLCDVLVKEVRDLTGYDRVMVYKFHEDDHGEVVSECRRSDLESYLGLHYPATDIPQASRFLFMKNKVRMICDCLAPPVKVIQDERLPQPLSLCGSTLRSPHGCHAQYMTNMGTIASLVMSVTINDDDDMMDGDQQQMTRKLWGLVVCHHTSPRFVPFPLRYACEFLIQVFGAQINKEVELATQVREKHILQIQTMLCDMLLRDAPAAIITQSPNVMDLVKCDGASLYFKNKTWLLGVTPTEEQIRDIAEWLLEYHSGNTGLSTDSLMEAGYPGASVLGDAVCGMAAVSITSRDFLFWFRSHTAKEIKWGGAKHDPDDKDDLRKMHPRSSFKAFLEVVKWRSMPWEDVEMDAI

SEQ ID NO: 5029 - protein, 549 aa, Pseudoalteromonas sp. PS1M3
MAAKEVLFAGDARAKMLTGVNILANAVKVTLGPKGRNVVLDKSFGSPVITKDGVSVAKEIELEDKFENMGAQMVKEVASKANDAAGDGTTTATVLAQSIVNEGLKAVAAGMNPMDLKRGIDKAIIAAVAELKALSVPCADTKAIAQVGTISANSDKEIGDIIAEAMEKVGRNTGVITVEEGQSLENELDVVEGMQFDRGYLSPYFINNAEKGAVELDNPFILLVDKKVSNIRELLPTLEAVAKASKPLLIIAEDLEGEALATLVVNNMRGIVKVSAVKAPGFGDRRKAMLQDIAVLTGGTVISEEIGLELEKATVEDLGTAKRVVITKDDTTIIDGAGEEEGITGRVSQIKAQIEEATSDYDKEKLQERMAKLAGGVAVIKVGAATEIEMKEKKDRVEDALHATRAAVEEGVVPGGGVALVRAASKLVELLGDNEDQNHGVKVALRAMEAPLRQIVTNAGDEASVVINAVKGGEGNYGYNAATGEYNDMIEMGILDPTKVTRSALQFAGSIAGLMITTEAMVAEIPKEEAAGAPDMGGMGGMGGMGGMM

SEQ ID NO: 5030 - protein, 724 aa, Novosphingobium aromaticivorans DSM 12444
MATPTKGKAPARAAKERSPALDNALRDHQPGAGQTDEATALGNAGEIHQEAAAENDAAAFLTDNFGHRLSDNQNSLRAGMRGPTLIEDFILREKIFHFDHERIPERIVHARGSGAHGVFEVTRAIPDLTRAGLFQKKGQTCPVFVRFSTVAGGAGSIDTPRDVRGFAVKFYTDEGNWDLVGNNIPVFFIQDAMKFPDLVHSVKMEADRGYPQAASAHDTFWDFIGLMPESMHMIMWAMSDRAIPRTLRMMEGFGVHTFRFVNAAGEGRFVKFHWKPVLGMESLIWDEAVKVAGADPDFHRRDLFESIAAGHFPAWDLGVQVFDEEFAASQPYDVLDATKLIPEEDVPVEIVGRMTLNRNVDNFFAETEQVAFLPSNVIPGIDFSNDPLLQGRLFSYLDTQKSRLGTTNFHQIPVNAPKCPFHNMQRDGLMQTLVPTGRANYEPNSLDEAGEDSGPRACPETGFTSFRENGERHDPTEKVRVRADLFADHYSQAALFFHSQTESEQAHIASALVFELSKVALEHVRARVVSRLRNIDETLAQRVADGLAMDLPEKAPAARQPVKMKPSDALSIQKQAKKTFAGRKVGILFAEGSDKATIDKLKAGVEEAGGTVFLVAPKVGGIPVKGGTLKADGKLDGSPSVLFDAVASVLMPEAAAKLAMQGAAVQWFMDAYGHCKTIAHCNGTRIILEKAGVEPDEGVVPNEKLLEVGPVRHFAREPKVRDLA

SEQ ID NO: 5031 - protein, 392 aa, Heteropterys sericea
DLEPVNPADVPVTAAGALKSYKLASKAISRLQSLLSGNISLLCDVLVKEVRDLAGYDRVMVYKFHEDEHGEVVSECRRSDLESYLGLHYPATDIPQASRFLFMKDKVRMICDCLAPPVKVIQDERLPQPLSLCGSTLRSPHGCHAQYMTNMGTIASLVMSVTINEDDDMMDGDQQQMTRKLWGLVVCHHTSPRFVPFPLRYACEFLIQVFGVQINKEVELAAQVREKHILQIQTMLCDMLLRDAPVAIITQSPNVMDLVKCDGAALYFKNKTWFLGMTPTEEQIRDIAEWLLEYHSGNTGLSTDSLMEAGYPGASVLGDAVCGMAAVSITSRDFLFWFRSHTAKEIKWGGAKHDPDDKDDIRKMHPRSSFKAFLEVVKWRSMPWEDVEMDAI

SEQ ID NO: 5032 - protein, 1005 aa, Staphylococcus epidermidis ATCC 12228
MSKEIFDTFKFKCGAELKNRVLMAPMTIQAGYFDGSVTSEMIDYYQFRAGDASAIIVESCFVENHGRGFPGAIGIDNDDKIPGLKRLAEAIQAKGSKAILQLYHAGRMANPKFNEGEQPISASPIAALRPDAVPPREMTHAQINQMIDDFGEATRRAIEAGFDGVEIHGANTYLLQQFFSPHSNRRQDSWGGSREKRTRFPIEVLTKVQHVVAEKEASHFIIGYRFSPEEIEEPGIRFEDTMFLLNTLAEYEPDYFHISANSYQRTSIVNQEDTEPLINKYIKMQSAQLAKIPLIGVGSIAQRQDAEHALELGYDLLSVGKAYLVEPQWTDKISQNEEVEQFVDIHDQKVLHIPSPLWKVMDFMILDKEEEHRKYEKLKALQNKKVKFNKGTYHVYAKGHNGNLPMKVQLSEDKIVSIEVDDSGESEGIANPVFERLPQDIINGQTLNVDVISGATVTSEGIVQGIADAIEQAGEDPDILRARPKPVVQWSDEVVEETTDVVVIGTGGAGLSAAATVLDEGKEVIMLEKFAAIGGNTIRTGGQVNAAEPKWQNAFPALAGEKETLLQLLNHDENDIDEAYIEDFNTLKRQIKDYLENSSNEDEYLFDSVELHRIQTYLGGKRKDRNNVEISCDYDLVKTLTDNVLESVYWLKDKGVHFDRSFVDMPVGALWRRGHKPMKAQGLEYIENLGDYVKHNHGRIFTETTAEKLIKEGNQVVGIEARKANGAKVKIHTRHGVVLATGGFGANTKMLQQYNTYWDNIPDDIKTTNSPAITGDGIRLGVQAGADIVGMGFSQMMPISDPKTGALFTGLIVTPSNFVFVNKEGQRFVNEFESRDVLSKAALEQKDGIFYIIADANIKALAMNTTEDKINQELEDGTLVKADTLEALAQKLNIDTTTFVNTIERYNTFVEQGQDEDFNKNAFDLKIEKAPFYATPRKPAIHHTMGGLKINTHAQVIDVEGHIIEGLYAAGEVAGGIHAGNRLGGNALADIFTFGRIAGQSAVTK

SEQ ID NO: 5033 - protein, 728 aa, Aspergillus fumigatus
MRLTFIPSLIGVANAVCPYMTGELNRRDEISDGDRAAATEEFLSQYYLNDNDAFMTSDVGGPIEDQNSLSAGERGPTLLEDFIFRQKIQRFDHERVPERAVHARGAGAHGVFTSYGDFSNITAASFLAKEGKQTPVFVRFSTVAGSRGSSDLARDVHGFATRFYTDEGNFDIVGNNIPVFFIQDAILFPDLIHAVKPRGDNEIPQAATAHDSAWDFFSQQPSTMHTLLWAMSGHGIPRSFRHVDGFGVHTFRFVTDDGASKLVKFHWKSLQGKASMVWEEAQQTSGKNPDFMRQDLHDAIEAGRYPERELGVQIMDEEDQLRFGFDLLDPTKIVPEEFVPITKLGKMQLNRNPRNYFAETEQVMFQPGHIVRGVDFTEDPLLQGRLFSYLDTQLNRHGGPNFEQLPINQPRVPVHNNNRDGAGQMFIPLNPHAYSPKTSVNGSPKQANQTVGDGFFTAPGRTTSGKLVRAVSSSFEDVWSQPRLFYNSLVPAEKQFVIDAIRFENANVKSPVVKNNVIIQLNRIDNDLARRVARAIGVAEPEPDPTFYHNNKTADVGTFGTKLKKLDGLKVGVLGSVQHPGSVEGASTLRDRLKEHGVDVVLVAEALADGVDQTYSTSDAIQFDAVVVAAGAESLFAASSFTGGSANSASGASSLYPTGRPLQILIDGFRFGKTVGALGSGTAALRNAGIATSRDGVYVAQSVTDDFANDLKEGLRTFKFLDRFPVDH

SEQ ID NO: 5034 - protein, 313 aa, Geobacter sulfurreducens PCA
MPFSEPGKTKFQVDLRRHLRNQDISDNLVHLICEIAEASKYVINAVRTGDLGVAGTSNLYGEEQLALDVLSDRIIRKRLIHSGVVCNIASEEMDEIFQAQADADGLYSVAYDPLDGSSLVDVNLAVGTIVSIYEGCNLLQKGRNQVAAMYILYGPRVSLVYSVGKGVHEFTMNHLMEYTLSRENVTMKPDGDIYSPGGLRKKYLPETEKFVQHLESKGSKLRYSGGFVPDINQVLMKGKGIFMYPALNGSPNGKLRVLFELNPMAYLIENAGGAATDGKTPILDIEPQSLDQRAPIFIGCSNDVATAMEFMGG

SEQ ID NO: 5035 - protein, 500 aa, Crocosphaera watsonii WH 8501
MCGIAGIWGQTEQTNVEAMMKSIIHRGPDAKGIFTVPNGSGILGHQRLSIMDVDGGDQPIYSKANTQAIIGNGEIYNYPKLQPELAKKYKFLTKSDTEAVLHLYEEKNTTAVGELDGMFAFAIIDDNKFIAARDPIGIKPLYYSEKDGNFWFASELKAITQFCENVEEFPPGHFFSSETGFSQYYSLPDIPPELDANVDELLQEIRETVEASVVKRLMSDVPLGAFLSGGLDSSIIAAIAKKHKSELHTFSVGIAGSKDINAARLVSDYLGTIHHEYIITPEEAIAKLPEIIYYLESFDQDLVRSGIPCYFTSRLASEYVKVILTGEGADELFAGYTYYKDIPSDDTLHRELRRSVNSLHNINLQRVDRLTMAHSIEGRVPFLDLKMIELGQKVPAHLKLKGTPPVEKWILRKAFEDILPEEIVWRKKEQFDEGSGTVDLLTETLKDVMNEQQAQQYQKEHPDIKLRSAEECYYHQIFMKAFDNPDALLTNVARWAETRF

SEQ ID NO: 5036 - protein, 250 aa, Solanum commersonii
  misc_feature (231)..(231): Xaa can be any naturally occurring amino acid
MGRGRVQLKRIENKINRQVTFSKRRSGLLKKAHEISVLCDAEVGLIVFSTKGKLFEYATDSCMERLLERYERYSFAEKQLVPTDHTSPGSWTLENAKLKARLEVLQRNEKLYVGEDLESLNMKELQNLEHQLASALKHIRSRKNQLMHESISVLQKQDRALQEQNNQLSKKVKEREKEVEQQNQWDQQNHEINSSTFVLPQQLDSPHLGEASQNTNVVDNGEVEGGNSSQXQGAANNTVMPQWMVRHLNG

SEQ ID NO: 5037 - protein, 376 aa, Hyparrhenia hirta
ALSIAGAVQSQKLAVRAISRLQALPGGDVKLLCGTVVEHVRELTGYDRVMVYKFHEDEHGEVVAESKRDNLEPYLGLHYPATDIPQASRFLFRQNRVRMIADCHATPVRVIQDPGLSQPLCLVGSTLRAPHGCHAQYMANMGSIASLVMAVIISSGGDDEQTGRGGISSAMKLWGLVVCHHSSPRCIPFPLRYACEFLMQAFGLQLNMELQLAHQLSEKHILRTQTLLCDMLLRDSPTGIVTQSPSIMDLVKCDGAALYYHGKYYPLGVTPTESQIKDIIEWLTVCHGDSTGLSTDNLADAGYLGAAVLGDAVCGMAVAYITPSDYLFWFRSHTAKEIKWGGAKHHPEDKDDGQRMHPRSSFKAFLEVVKSRSLPW

SEQ ID NO: 5038 - protein, 442 aa, Pseudomonas fluorescens
RERIHERVVHARGTGAHGTFTVTDNLSDLTKAKVFAAGETTPVFVRFSAVVHGNHSPETLRDPRGFATKFYTAEGNWDLVGNNFPTFFIRDAIKFPDMVHAFKPDPRTNLDDDSRRFDFFSHVPESTRTLTELYSDSGTPASYREMDGNGVHAYKLINAKGEVHYVKFHWKSLQGIKNLDPKQVTEVQGRDYSHMTNDLVAHINKGDFPKWDLYVQVLKPEDLAKFDFEPLDATKIWPDFTERKVGQMVLNRNLDNVFQETEQVPWPPANLVPGIEPSEIRLLQARLCSYAETQIYRLGAKRLQLRIQRPTVTVNNGNQDGAMNFGKDTTGVNYQPKSSDAREEPATARYSESALAGNTQQAKIQREQNFKQAGDLYRSYSKKERQDLIDNFGGSLATTDDESKHIILSFLYKADPEYGTGVAKVAKGDLARVKALAEKLTD

SEQ ID NO: 5039 - protein, 376 aa, Ischaemum afrum
  misc_feature (261)..(261): Xaa can be any naturally occurring amino acid
ALSIAGAVQSQKLAVRAISRLQALPGGDVKLLCDTVVEHVRELTGYDRVMVYRFHEDEHGEVVAESRRDSLEPYLGLHYPATDIPQASRFLFRQNRVRMIADCHATPVRVVQDPGLSQPLCLVGSTLRAPHGCHAQYMANMGSIASLVMAVIISSGGDDEQTGRGGISSAMKLWGLVVCHHTSPRCIPFPLRYACEFLMQAFGLQLNMELQLAHQLSEKHILRTQTLLCDMLLRDSPTGIVTQSPSIMDLVKCDGAALYYXGKYYPLGVTPTESQIKDIIEWLTVCHGDSTGLSTDSLADAGYLGAAALGDAVCGMAVAYITPSDYLFWFRSHTAKEIKWGGAKHHPEDKDDGQRMHPRSSFKAFLEVVKSRSLPW

SEQ ID NO: 5040 - protein, 223 aa, Capsella bursa-pastoris
MNSSSFSAFSEMFGSDYESPGSSGGGDYCPTLATSCPKKPAGRKKFRETRHPIYRGVRQRNSGKWVSELREPNKKTRIWLGTFQTAEMAARAHDVAAITLRGRSACLNFADSAWRLRIPESTCAKEIQKAAAEAALAFQDEMGDTTTAATTTTDHGLDKEETMVEATVTPEQSDSLYIDEEAMFGMPSFLDSMAEGMLLPPPSVQWNTNYDVDGDDDLSLWSY

SEQ ID NO: 5041 - protein, 323 aa, Microstegium nudum
ALSIAGAVQSQKLAVRAISRLQALPGGDVKLLCDTVVEHVRELTGYDRVMVYRFHEDEHGEVVAESRRDNLEPYLGLHYPATDIPQASRFLFRQNRVRMIADCHATPVRVIQDPGLSQPLCLVGSTLRAPHGCHAQYMANMGSIASLVMAVIISSGGDDEQTGRGGISSAMKLWGLVVCHHTSPRCIPFPLRYACEFLMQAFGLQLNMELQLAHQLSEKHILRTQTLLCDMLLRDSPTGIVTQSPSIMDLVKCDGAALYYHGKYYPLGVTPTESQIKDIIEWLTVCHGDSTGLSTDSLADAGYLGAAALGDAVCGMAVAYITP

SEQ ID NO: 5042 - protein, 727 aa, Magnaporthe grisea 70-15
MPRSSMLGLWASLVWIAQAGCPYADPAALRPREEHTDDYLAQFSVDDQDKFLTSDVGGPIGDQRSLKAGARGSTLLEDFVFRQKITHFDHERVPERAVHARGAGAHGTFTSYGDFSNITSASFLNSAGKRTPVFVRFSTVAGSRGSADSARDVHGFATRFYTDEGNFDIVGNNVPVFFIQDAIQFPDLVHAVKPSPDKEIPTAATGKRPDYKPNPDATHDSAWDFFSQQSSSLHALFWAMSGYGIPRSYRHMDGFGVHTFRMVADNGESRLVKFHFKTKQGKASLIWEEAQVLSGKNPDFHRQDLWDAIEAGHGPEWEFGVQVVNEEDALRFGFDMLDPTKILPEDLVPVHPLGLLKLDRNPINYFAETEQIMFQPGHLVRGIDFTEDPLLQGRVFSYLDTQLNRHNGPNFEQLPINRPRVTVHNNNRDGSGQNFIHKNIHPYTPSALNEFPKQADDDQGRGFMTAPRRRTQDAALVRELSETFDDHWTQPRLFWNSITPAEQQILVNAIRFETSNIVNTHVRQKVLQQLNRISDELAGRVAQALGMEAPAPEPAFYHENTTIGLSIFGIKLPTIKTLRVGVLASTGNVASLSQAADLKARFMGDGVAVAVLGETQVEGVDVTYSQSDATVFDGIIIAAGAEGLVAKDAPASALFPIGRPQQLVVDSFRWGKPIGLAAASDDSANIFSSLGTTGPGVFSGDDLGVLVTDFKEGLSTYKFVERFPMDS

SEQ ID NO: 5043 - protein, 363 aa, Capsicum annuum
MGLAENQLCFDLIQEWVVNNPKASICTAKGAEDFQEIAIFQDYHGLPEFRQAVARFMEKVRGDRVTFDPNRIVMSGGATGAHEMLAFCLADPGDAFLVPTPYYPGFDRDLRWRTGVQLFPVVCESSNDFKVTRKALEEAYEKAQESNIKIKRLLINNPSNPLGTLLDKDTLRDIVTFINSKNIHLVCDEIYAATVFDQPRFISVSEVVDEMIGCNQDLIHIVYSLSKDLGFPGFRVGIVYSYNDTVVDIARKMSSFGLVSTQTQHLLASMLSDEIFIEKFIAESSERLSKRQGMFTKGLAQVGISTLKSNAGLFFWMDLRRLLKEPTFDAELELWRIIIHEVKLNVSPGVSFHCSEPGWFRVC

SEQ ID NO: 5044 - protein, 373 aa, Paspalum simplex
ALFVAGGLQAHKLAVRAISRLQALPGGDVKLLCDTVVELVRDLTGYDRVMVYRFHEDEHGEVVAESRRENLEPYLGLHYPATDIPQASRFLFRQNRVRMIDDCHATPVRVIQDPGLSQPLCLVGSTLRAPHGCHAQYMATWVQLHRLLWQSSFGGDDEQTRGGISSAMKLWGLVVCHHTSPRFIPFSLRYACEFLMQAFGLQLNMELQLARQLSEKHILRTQTLLCDMLLRDSPTGIVTQSPSIMDLVKCDGAALYYHGKYYPWGVTPTESQIKDIIEWLTVCHGDSTGLSTDSLADAGYLGAAALGDAVCGMAVAYITPSDYLFWFRSHTAKEIKWGGAKHHPEDKDDGQRMHPRSSFKAFLEVVKSRSLPW

SEQ ID NO: 5045 - protein, 333 aa, Phacelurus digitatus
TGYDRVMVYRFHEDEHGEVVAESRRDNLEPYLGLHYPATDIPQASRFLFRQNRVRMIADCHATPVRVIQDPGLSQPLCLVGSTLRAPHGCHAQYMANMGSIASLVMAVIISSGGDDEQTGRGGISSAMKLWGLVVCHHTSPRCIPFPLRYACEFLMQAFGLQLNMELQLAHQLSEKHILRTQTLLCDMLLRDSPTGIVTQSPSIMDLVKCDGAALYYHGKYYPLGVTPTESQIKDIIEWLTVCHGDSTGLSTDSLADAGYLGAAALGDAVCGMAVAYITPSGYLFWFRSHTAKEIKWGGAKHHPEDKDDGQRMHPRSSFKAFLEVVKSRSLPW

SEQ ID NO: 5046 - protein, 364 aa, Thiomicrospira crunogena XCL-2
MKHLLSPLKIGNTELPNRVFMAPLTRSRAQQPGNAPGDLNAEYYSQRATAGLIVTEATPVSQQGQGYAYTPGIYTDVQEAGWKKVVDKVHSKGGHMSLQLWHVGRISNTELQEDGAAPVAPSAIQAENSQCSAPVEGGALKMVPCAMPRALETDELPGIVEQYRQAAIRGLKAGFDFFEVHSANGYLLHQFLATNTNHRTDEYGGSIQNRARLVLEVLDAVIKEVGKEKVGVRLSPNFVAHDMNDEASEEMTLYLAKEFSKREIAYLHIAEPDWAGGAPLTDEFRSALRDQFNGALIFCGNYDAEKAEQTLAKGLADAIAFGRAFIANPDLVARFKQGAELNTPNPDTFYGGGAEGYTDYPFMN

SEQ ID NO: 5047 - protein, 532 aa, Arabidopsis lyrata subsp. lyrata
KTTLVELGRTLALEECALWMPTRTGLELQLSYTLRHQHPVEYTVPIQLPVINQVFGTSRAVKISPNSPVARLRPVSGKYMLGEVVAVRVPLLHLSNFQINDWPELSTKRYALMVLMLPSDSARQWHVHELELVEVVADQVAVALSHAVILEESMRARNLLMEQNVALDLARREAETAIRARNDFLAVMNHEMRTPMHAIIALSSLLQETELTPEQRLMVETILKSSNLLATLMNDVLDLSRLEDGSLQLELGTFNLHTLFREVLNLIKPIAVVKKLPITLNLAPDLPEFVVGDEKRLMQIILNIVGNAVKFSKQGSISVTALVTKSDTRDADFFVVPTGSHFYLRVKVKDSGAGINPQDIPKLFTKFAQTQSLATRSSGGSGLGLAISKRFVNLMEGNIWIESDGLGKGCTAIFDVKLGISERSNESKQSGIPKVPAIPRHSSFTGLKVLVMDENGVSRMVTKGLLVHLGCEVTTVSSNEECLRVVSHEHKVVFMDVCLPGVENYQIALRIHEKFTKQRHQRPLLVALTGNT

SEQ ID NO: 5048 - protein, 485 aa, Desulfovibrio vulgaris subsp. vulgaris str. Hildenborough
MDKKRLTTNAGAPVADNQNVMTAGPRGPQLLQDVWFLEKLAHFDREVIPERRMHAKGSGAFGTFTVTHDITRYTRAAIFSEVGKKTDLFVRFSTVAGERGAADAERDIRGFAVKFYTEQGNWDMVGNNTPVFFLRDPLKFPDLNHAVKRDPRTNLRSARNNWDFWTSLPEALHQVTVVMSDRGIPATYRHMHGFGSHTFSFINAKGERFWCKFHFKTQQGIKNLTDAEAEAIVGKCRESHQRDLYDSIERGDFPRWTMYVQVMTEEKAAALPYHPFDLTKVWYHDDAPLIEVGVLELNRNPENYFAEVEQAAFNPANVVPGIGFSPDKMLQGRLFSYGDAQRYRLGVNHHLIPVNMPRCPFHSYHRDGMMRVDGNHGSTLAYEPNSYGEWQEQPGFAEPPLELSGAAAHWNAREDDADYFTQPGKLFRLMTPAQQEELFGNTARALGDAPDAIKLRHIGNCLKADPAYGNGVAKALGLDPAKALG

SEQ ID NO: 5049 - protein, 132 aa, Chlorobium tepidum TLS
MLMKIAKDPMRLFDDIWSGSQMAVAPSFKVDISEDENAYHLDAELPGIAKEQIALNIEDDVLTIKAERTHKEEEKKKNYHRVERTYGSFSRSFNIGEIIDQEHIGATYDNGVLHVTLPKTQPAKKTKEIPIN

SEQ ID NO: 5050 - protein, 727 aa, Xanthomonas oryzae pv. oryzae KACC10331
MTAVSNRWDPGVIRALAEARHGDAFAVLGAHRTDTGRVLRTYLPGAERVSAVLDDGQTIALEAGPEPGLFAGDLPAQGGYRLRIGWPGGEQDTADPYAFGPQLSDFDLHLISEGHHLQLADALGANVVEVDGVRGTRFAVWAPNASRVAVVGDFNSWDARRHPMRLRHQSGVWELFVPDVGPGAHYKYQLRGPHGHELPAKADPVARRAELAPGTASIVADPTPYQWSDDGWMATRARRQAHDAPMSVYEMHAGSWLREEGVDLDWDGLADHLIPYVADMGFTHVELMPVTEHPFGGSWGYQPLGLFAPTARFGTPDGFARFVDRCHREGIGVIVDWVPAHFPTDAHGLAHFDGTALYEHADPREGFHRDWNTLIYNHGRREVSGFLIASAMEFLQRYHVDGLRVDAVASMLYRDYSRNAGEWVPNIHGGRENYETIAFLRRLNALVREHTPGAVMIAEESTAFPGVTADVAHGGLGFHYKWNMGWMHDTLHYASLDPIYRRYHHGELTFSMVYAYSERFVLPISHDEVVHGKGSLLGRMPGDDWQRFANLRAYLGFMFTHPGRKLLFMGCEFGQPTEWNHDSGLPWHLLDDPRHRGVQTLVRDVNRLYVQYPALHAHDDDPSGFAWVVGDDAGNSVVAFLRKGKRGDAPVLVVINFTPVVQHGYRIGVPQGGQWREVFNSDAGIYGGANLGNGGIVTAEQQSMHGHAHALPLLLPPLGAIVLTPPG

SEQ ID NO: 5051 - protein, 612 aa, Candida glabrata CBS138
MENKEHHHHHHHHHHHHSNGSYVSNKVSSLADGSRVGNYQIVKTLGEGSFGKVKLAYHVTTGQKVALKIINKKVLAKSDMQGRIEREISYLRLLRHPHIIKLYDVIKSKDEIIMVIEYAGNELFDYIVQRNKMSEQEARRFFQQIISAVEYCHRHKIVHRDLKPENLLLDEHLNVKIADFGLSNIMTDGNFLKTSCGSPNYAAPEVISGKLYAGPEVDVWSCGVILYVMLCRRLPFDDESIPVLFKNISNGVYTLPKFLSPGASDLIKRMLIVNPLNRISIHEIMQDEWFKVDLAEYLVPQDLKQQEQFNKKSGNEENVEEIDDEMVVTLSKTMGYDKDEIYEALESSEDTPAYNEIRNAYILIKDNKSLIKDMKQDNNVTQELDTFLSQSPPTFQQNGDGMKASEDQKKKHSGRRLASSVTQQRTFHQPPFMDQSKEEDSTISILPTSLPQIHRANMLAQGLPAASKISPLVTKKSKTRWHFGIRSRSYPLDVMGEIYIALKNLGAEWAKPSEEDLWTIRVRWKYDSDESRLIEDGVKKIPNLMKIVIQLFQIETNNYLVDFKFDGWESTYGDSTISTNMSEDEMSTFSAYPFLHLTTKLIMELAVNSQGN

SEQ ID NO: 5052 - protein, 481 aa, Pseudomonas syringae pv. syringae B728a
MSQKTLTTASGAPVADNQNSRSAGPRGPLLLDDFHLIEKLAHFNRENIPERRVHAKGSGAHGTFTVTRDISQYTSARLFDTVGKQTPIFLRFSTVGGERGSADTERDPRGFAIKFYTEEGNWDIVGNNTPVFFIRDPLKFPDFIHTQKRLPQTNLKSPQMMWDFWSHSPEALHQVTILFSDRGIPDGYRHMHGFGSHTYSLISAAGERHWVKWHYKTRQGIKNLTPAEAARIAGTDPDYAQRDLFTAIEKGDFPKWQVCIQLMTEAQAANHHENPFDVTKTWSQKEYPLIEVGELELNRNPLNYFAEVEQAAFGPSNMVPGVGLSPDRMLQGRVFAYADAHRYRVGTNHQQLPINAPKSPVHSYQRDGAMAFGTNGGATPNYEPNSYSDAPKENPRYAEPALSLNGAADRHDHRVDGDYYSQAGKLFNLMSADQQALLIGNIAGAMAGVSSDVVQRQLQHFYKADPAYGEGIARALDVKLG

SEQ ID NO: 5053 - protein, 740 aa, Rhodospirillum rubrum
MDPKAYSEAVAALVGARHSNPFAFLGPHEGRAEGGRGGFCIRCFRPKATAVSLISAADDTVLGRMKRLHPDGLFGIDLPEAPGALAYRLRVSEGDEDRDIEDPYRFGPVLGELDRHLLGEGTHLDIYRKMGAHPMTRDGVRGTGFALWAPNATRVSVIGDFNGWDGRLHPMRAHPGSGVWDIFLPGVVEGHLYKYELLGPDGSLLPAKADPYAFQAEKPPHTASVVRGLGTYAWNDGRWMSERADRVATSAPVSIYEVHLGSWRHGGGDRSLSYREMAEQLIPYVKEMGFTHIELLPVSEFPFDGSWGYQPIGLFAPTSRFGEPDDFRHFVDRCHQEGVGVILDWVAGHFPEDAHGLSWFDGTHLYEHSDPRQGRHMDWGTYIFNYGRNEVRNFLLANALFWLEQFHIDGLRVDAVASMLYLDYSRKAGEWVPNKFGGRENLEAIDFLRRMNELVYGRFPGAVTIAEESTAWPMVSRPVHLGGLGFGYKWNMGWMNDTLSYMSQDPIYRRFHQHDLSFGLLYAFTENFVLPLSHDEVVHGKRSILGRMPGDAWQQFANLRAYYGFMWTHPGKKLLFMGCEFAQGREWNHNASLDWHLLDIDWHKGVQALVRDLNGLYAGVPALHDRDTEGYGFSWIDCTDADQSVLAFLRFGETAEDVVMVVCNFTPNPRHGYRLGAPIAGRWREIFNTDSAHYGGSNMGNSVVETEETKSHGHAQSVVLTLPPLATIVLRPDGPITRIA

SEQ ID NO: 5054 - protein, 673 aa, Rhodospirillum rubrum
MSIRARLDAGEPWPLGAMAREGGVNIAVFSEAATQIDLCLFDGDQETRLPLPARTGDIWHGFLPGGGPGLRYGLRAHGPYDPGRGQRFNPHKLLIDPAARRLDGPVVWDKALFGFDPDHPERDLSFSIRDSAAFVPKAVVEADPATRALRSPPDPGRLLIYEAHVKGLTRTHPQVAPEARGTFDGVAGSAVIAHLKHMGVTALELLPVWAFADEPHLPPLGLTNYWGYNPVCLTAPHAAYGPPDSFRRMIDCLHGADIAVILDVVLNHSGEGDEYGPTLSFRGLDNAAYYRLDPTDPRRYLNDSACGNTLRMEHPQVLRLAMDALRYWVGVMGVDGFRFDLAVTPARHKGAFDPSGPFLSAIAQDPLLSRALVIAEPWDVGPGGYQAGRFPKSWMEWNDLARDGLRRFWLANGRSGDLAAVLAGCAARYAPSGRGPRAGVSYISAHDGFTLADMVSYGHRHNNANGESNRDGSAIELSANHGVEGPTNDLAIRSLRDRQRRNLLACLLLSLGVPMIRGGDELGQTQQGNNNVYCQDNPLNWLDWGGADANFAAFAARAGALRARLPQLGRASFLNGFPDAKGKRDVVWLRPDGGEMSPADWDALPRLLAMRLTGAEKASDLLVLINGQPHEQSFRLPPGPAWTIALRSAGDDAPAAAGSSLVVPEMSLVALTS

SEQ ID NO: 5055 - protein, 141 aa, Oryza sativa
PAVPCHIYRSTKKHTNPPVSLTGQLLWRDFFYTVAFGTPNFDQMKGNKICKQIPWTENEELFPAWRDGRTGYPWIDAIMIQLRKWGWMHHLARHSVACFLTRGDLFIHWEKGRDVFERLLIDSDWAINNGNWMGLFWSSFF

SEQ ID NO: 5056 - protein, 764 aa, Silicibacter pomeroyi DSS-3
MRIACLGGGPAGLYFAISMKLRDPSHQVSVIERNKGDDTFGWGVVLSDDALENLAANDPISAETIRSNFAYWDDIAVVHDGVRTVSGGHGFAGIGRKAMLLLLQDRARELGVDLQFQTEARPIAEYQAEYDLVVACDGLNSRVRSDLAAHFKPDIDTRQCKFIWLGTHQKFDDAFTFIFEKTEHGWMWVHAYQFDEDTATVIVECSQETWDAWGFEHMSKEDSVATCERIFAAHLGGHALMSNASHLRGSAVWINFPRVLCEKWHHENVVLMGDAAATAHFSIGSGSRLAFDSAISLATYLHSEPTMESAFERYQEERRLEVLRLQSAARNSLEWFEQVERYLDMDPVQFNYSLLTRSQRISHENLRLRDADWLRSAEQWFQTRAGAAAEPVRAPMFAPFRLRDMELKNRIVVSPMAQYKAVDGCPTDWHLIHYGERAKGGAGLVYTEMTCVSPKGRITPGCPGLYAPEHEAAWKRLTDFVHGETSAKICCQIGHSGRKGSTQLGWETMDAPLKAENWDLISASPIPWSANNATPREMTRADMDAVRDQFVAAAQMAERAGFDMIELHAAHGYLISSFISPMSNNRSDEYGGSLENRMRYPLEVFTAMRAAWAEERPLSVRISANDWVEEAGVTPEEAVKIAAMFHAAGADIIDVSAGQTSIEAKPVYGRMFQTPFSDRIRNETGIATMAVGNIYEADHANSILMAGRADLICVGRPHLADPYWTLHEAARIGDRHADWPLPYLAGRDQAWRLADRDAETEIRA

SEQ ID NO: 5057 - protein, 435 aa, Arabidopsis thaliana
MGSWIPKLLLLQLVLLLTKHADSSSIIKYLPGFEGPLPFELETGYIGVGEEDEDQMFYYFIKSESNPETDPLLLWLSGGPGCSSFTGLIYENGPLGFKVEAYNGSIPTLVSTTYSWTKVANIIYLDQPVGTGFSYSRNPLADIPSDTGSAKRVDEFLRKWLTKHPEYFSNPFYAGGNSYSGKMVPVIVQEISNGNCIYGKPQIRLQGYVLGSPVTDYDLDRNSRIQFAHGMALISNELYESMKRTCGGNYIFVDPLNTECLELIKDYDNCVSGIYENLILVPKCDLTSPDCHSYRSMLSDYWANNESVRRALKVVEGTTGRWERCKWTLQNNKDIKSSIPYHKKNSIQGYRSLIFSGDHDMLTPYVGTQDWIRSLNYSIIDKWRPWMILDQVAGYTTTYANKMTFATVKGGGHTLDYKPDENSILFKRWISGQLL

SEQ ID NO: 5058 - protein, 682 aa, Escherichia coli O157:H7 EDL933
MNMFFRLTALAGLLAIAGQTFAVEDITRADQIPVLKEETQHATVSERVTSRFTRSHYRQFDLDQAFSAKIFDRYLNLLDYSHNVLLASDVEQFAKKKTELGDELRSGKLDVFYDLYNLAQKRRFERYQYALSVLEKPMDFTGNDTYNLDRSKAPWPKNEAELNALWDSKVKFDELSLKLAGKTDKEIRETLTRRYKFAIRRLAQTNSEDVFSLAMTAFAREIDPHTNYLSPRNTEQFNTEMSLSLEGIGAVLQMDDDYTVINSMVAGGPAAKSKAISVGDKIVGVGQTGKPMVDVIGWRLDDVVALIKGPKGSKVRLEILPAGKGTKTRTVTLTRERIRLEDRAVKMSVKTVGKEKVGVLDIPGFYVGLTDDVKVQLQKLEKQNVSSVIIDLRSNGGGALTEAVSLSGLFIPAGPIVQVRDNNGKVREDSDTDGQVFYKGPLVVLVDRFSASASEIFAAAMQDYGRALVVGEPTFGKGTVQQYRSLNRIYDQMLRPEWPALGSVQYTIQKFYRVNGGSTQRKGVTPDIIMPTGNEETETGEKFEDNALPWDSIDAATYVKSGDLTAFEPELLKEHNARIAKDPEFQNIMKDIARFNAMKDKRNIVSLNYAVREKENNEDDATRLARLNERFKREGKPELKKLDDLPKDYQEPDPYLDETVNIALDLAKLEKARPAEQPAPVK

SEQ ID NO: 5059 - protein, 472 aa, Photobacterium profundum SS9
MISPPDKSEFTTMKYQFPENFWWGSASSATQSEGAAFDGGKGDNIWDLWYQEQPNRFFNNVSATKASTFYQNYQTDIALMKEIGHNTFRTSFSWSRLIPTGRGEVNQEAVAFYGKVIDELIANDIEPFICLFHFDMPVAMQELGGWESREVVEAYADFADVCFKLYGDRVKHWFTFNEPIVPVEGGYLYDFHYPNVVDFKRAATVAFNTMLAHAEAVKRYRAQQLDGQIGIILNLTPSYPRSQNTADVKAANIADLLFNRSFLDPSVKGEYPQELIAFLQEHDQMPACQEGDLATIAAGNVDLLGVNYYQPRRIQAKLHTVNTDGPFLPEWFFDYYEMPGRKMNPHRGWEIYEQGVYDILTNLRENYGNIPCYISENGMGVEGEEKFIENGQVKDDYRIDFIKGHLTWLHKAVQEGANCKGYHLWTFIDNWSWANAYKNRYGFYRLDLETQTRTVKRSGEWFAQASKANGFD

SEQ ID NO: 5060 - protein, 172 aa, Glycine max
LHKMGLQGYRNVMENCRDNMLVLKEGLEKTGRFSIVSKDNGVPLVAFTLKDHTHFDEFQISDFLRRFGWIVPAYTMPPDAQHVTVLRVVIREDFSRTLAERLVADVEKVLHELDSLPARVISSTSVTVTAEENGKVVVAKKSAMETQREITAIWKKFVLERKKNNDKMNGVC

SEQ ID NO: 5061 - protein, 376 aa, Saccharum officinarum
  misc_feature (131)..(147): Xaa can be any naturally occurring amino acid
ALSIAGAVQSQKLAVRAISRLQALPGGDVKLLCDTVVEHVRELTGYDRVMVYRFHEDEHGEVVAESRRDNLEPYLGLHYPATDIPQASRFLFRQNRVRMIANCHATPVRVIQDPGLLQPLCLVGSTLRAPXXXXXXXXXXXXXXXXXVMAVIISSGGDDEQTGRGGISSAMKLWGLVVCHHTSPRCIPLPLRYACEFLMQAFGLQLNMELQLAHQLSEKHILRTQTLLCDMLLRDSPTGIVTQSPSIMDLVKCDGAALYYHGKYYPLGVTPTESQIKDIIEWLTVCHGDSTGLSTDSLADASYLGAAALGDAVCGMAVAYITPSDYLFWFRSHTAKEIKWGGAKHHPEDKDDGQRMHPRSSFKAFLEVVKSRSLPW

SEQ ID NO: 5062 - protein, 119 aa, Brassica napus
MENSATNQTIPLLTPFSMRNFNLSHRIVMAPMARMRSYGSIPQPHAALYYSERATPGGLLISEATGVSETAMAYHDMPGIWTKNQIEAWKPIVDAVHSNGAVSFLLPSSGSDSPPATAP

SEQ ID NO: 5063 - protein, 265 aa, Dechloromonas aromatica RCB
MLEISFIPAFKDNYIWLLTRGKRAFVVDPGDAAPVLARLEAGGLMLEGILITHHHADHQGGVAELKARWQAEVYAPGNESITGCSCPLSGGESIDVLGQKVTVMAVPGHTLGHLAYYAPGALLCGDTLFGAGCGRLFEGTPAQMSASLDSIAALPGDTLIYCAHEYTEMNLRFALAVEPNNQALQARVAKVAALRAAGLPSVPLILAEEKATNPFLRCHEAAVVEAGLQHAASCLLGHAAQQGADIEDRSKTAIFAAIRSWRNTF

SEQ ID NO: 5064 - protein, 332 aa, Schizachyrium scoparium
GYDRVMVYRFHEDEHGEVVAESKRDNLDPYLGLHYPATDIPQASRFLFRQNRVRMIADCHATPVRVIQDPGLSQPLCLVGSTLRAPHGCHAQYMANMGSIASLVMAVIISSGGDDEQTGRGGISSAMKLWGLVVCHHTSPRCIPFPLRYACEFLMQAFGLQLNMELQLAHQLSEKHILRTQTLLCDMLLRDSPTGIVTQSPSIMDLVKCDGAALYYHGKYYPLGITPTESQIKDIIEWLTVCHGDSTGLSTDSLADAGYLGAAALGDAVCGMAVAYITPSDYLFWFRSHTAKEIKWGGAKHHPEDKDDGQRMHPRSSFKAFLEVVKSRSLPW

SEQ ID NO: 5065 - protein, 250 aa, Oryza sativa (japonica cultivar-group)
MEWDKAKASSGEAVDDRGGGEGGLGYVKVMTDEQMEVLRKQISIYATICEQLVEMHRALTAQQDSIAGMRLGNLYCDPLMVPGGHKITARQRWTPTPMQLQILENIFDQGNGTPSKQKIKDITAELSQHGQISETNVYNWFQNRRARSKRKQAALPNNNAESEAEADEESPTDKKPKSDRPLHQNIAMRDHNSERISEMHHFDTEHEQIRRMMYASNDSSSRSSGSLGQMSFYDNVMSNPSTSYKHPCFI

SEQ ID NO: 5066 - protein, 408 aa, Nicotiana tabacum
MDEATCSTNALPPFLTKTYEMVDDPSSDAIVSWSSSNKSFVVWNPPDFARDLLPRYFKHNNFSSFIRQLNTYGFRKVDPEKWEFANEDNFFRGQPHLLKNIHRRKPVHSHSAQNLHGLSSPLTESERQGYKEDIQKLKHENESLHLDLQRHQQDRQGLELQMQVFTERVQHVEHRQKTMLSALARMLDKPVTDLSRMPQLQVNDRKRRLPGNSCLYNETDLEDTRAISSRALTWENMNPSSLLTINAELLNQLDSSLTFWENVLQDVDQAWIQQNCSLELDESTSCADSPAISYTQLNVDVGPKASDIDMNSEPNANTNPEVAAPEDQAAVAGTTTNVPTGVNDIFWEQFLTENPGSVDASEVQSERKDIGNKKNESKPVDSGKFWWNMKSVNSLAEQLGHLTPAEKT

SEQ ID NO: 5067 - protein, 376 aa, Tripsacum dactyloides
ALSIAGAVQSQKLAVRAISRLQALPGGDVKLLCDTVVEHVRELTGYDRVMVYRFHEDEHGEVVAESRRDNLEPYLGLHYPATDIPQASRFLFRQNRVRMIADCHATPVRVIQDPGLSQPLCLVGSTLRAPHGCHAQYMANMGSIASLVMAVIISSGGDDEQTGRGGISSAMKLWGLVVCHHTSPRCIPFPLRYACEFLMQAFGLQLNMELQLAHQLSEKHILRTQTLLCDMLLRDSPTGIVTQSPSIMDLVKCDGAALYYHGKYYPLGVTPTESQIKDIIEWLTVCHGDSTGLSTDSLADAGYLGAAALGDAVCGMAVAYITPSDYLFWFRSHTAKEIKWGGAKHHPEDKDDGQRMHPRSSFKAFLEVVKSRSLPW

SEQ ID NO: 5068 - protein, 376 aa, Tristachya superba
ALSIAGAVQSQKLAVRAISRLQALPGGDVKLLCDTVVEHVRELTGYDRVMVYRFHEDEHGEVVAECRRDNLEPYLGLHYPATDIPQASRFLSRQNRVRMIADCHATPVRVIQDPGLSQPLCLVGSTLRAPHGCHAQYMANMGSIASLVMAVIISSGGDDEQTARGGISSSMKLWGLVVCHHTSPRFIPFPLRYACEFLMQAFGLQLNMELQLAHQLSEKHILRTQTLLCDMLLRDSPTGIVTQSPSIMDLVKCDGAALYYHGKYYPLGVTPTESQIKDIIEWLTVCHGDSTGLSTDSLADAGYHGATALGDAVCGMAVTYITPSDYLFWFRSHTAKEIKWGGAKHHPEDKDDGQRMHPRSSFKAFLEVVKSRSLPW

SEQ ID NO: 5069 - protein, 174 aa, Glycine max
MSDAPASPSHESGGEQSPRGSLSGAAREQDRYLPIANISRIMKKALPPNGKIAKDAKDTMQECVSEFISFITSEASEKCQKEKRKTINGDDLLWAMATLGFEDYIEPLKVYLARYREAEGDTKGSARSGDGSARPDQVGLAGQNSQLVHQGSLNYIGLQVQPQHLVMPSMQSHE

SEQ ID NO: 5070 - protein, 376 aa, Urochloa mutica
ALSIAGAVQSQKLAVRAISRLQALPGGDVKLLCDTVVEHVRELTGYDRVMVYRFHEDEHGEVVAECRRDNLEPYLGLHYPATDIPQASRFLFRQNRVRMIADCHATPVRVIQDPGLSQPLCLVGSTLRAPHGCHAQYMANMGSIASLVMAVIISSGGDDEQTARGGISSSMKLWGLVVCHHTSPRFIPFPLRYACEFLMQAFGLQLNMELQLAHQLSEKHILRTQTLLCDMLLRDSPTGIVTQSPSIMDLVKCDGAALYYHGKYYPLGVTPTESQIKDIIEWLTVCHGDSTGLSTDSLADAGYHGATALGDAVCGMAVAYITPSDYLFWFRSHTAKEIKWGGAKHHPEDKDDGQRMHPRSSFKAFLEVVKSRSLPW

SEQ ID NO: 5071 - protein, 280 aa, Campylobacter jejuni subsp. jejuni NCTC 11168
MQEVISYIQKAVLEISNALKFPDTSYSQNQNFTGDTQLKFDVLSDEIITKTLSQCSSIKAIISEEKDEILTLNERANFIVAYDPLDGSSLMDVNFAIGSIFAIYEEKASAKNLRAALYSMYGARLELVICKDQPKLYRLNANNEFIFIKDLRMNEKGKINATGGTQKFWEEKHAKFIKSLFDEGYRLRYSGAMVSDINQILLKGGGIFSYPATQDAPNGKLRAFFEVFPLAFIIEKAGGKTTNGKNRSLLELEFDKIHATTPCFFGSEYEISKLLKAYNE

SEQ ID NO: 5072 - protein, 592 aa, Prosthecochloris aestuarii DSM 271
MCGIAGELRFDSAAASSTTVDAMLGILEPRGPDAQGVFAHNRICFGHRRLKIIDLSDCASQPMVDSALGLVLVFNGAVYNYRELCTELVGKGYSFFSQSDTEIIIKAYHAWGEDCVGHLQGMFAFAIWERDTGRTFFARDRLGIKPLYFTEDNASMRFASSLPALLKSGAVDTAIDPAALDCYMSFHSVVPAPWTIFRGIRKLPPATTMMVEPDGRKQQRTYWQPDYSRSDEERRRSAGEWIDAVHDALKLAVQRRLVADVPVGVLLSGGLDSSLVVGLLSELVQRHLSTFSVGFEDVAEEEGNEFRYSDIIAERYSTDHHKIFVDHRELQTHLSDCVRAMSEPMVSHDVIGFYLLSREVSQHVRVVQSGQGADEVFAGYHWYPPMMNTPPTEAYSTYSGVFFDRDFNEYRQAVNSSFITEDHAAAFVRNHFAMPGAEEPIDKALRLDSTIMLVDDPVKRVDNMTMAWGLEARVPFLDHELVELAAKIPAEYKVKDGGKYVLKEVGRRIIPHEVIDRPKGYFPVPALKYLEGEYLDMAKNILNQDAAKQRKIFNREYVDMLLNAPQDHITPLRGSKLWQITLLEYWLQEQGL

SEQ ID NO: 5073 - protein, 889 aa, Desulfovibrio vulgaris subsp. vulgaris str. Hildenborough
MCGIAGIISRKDRNVSSQPLNRMLTSQEHRGPDAGYGVSFRRQSTGAFAAGRRHSADALAAGLEPAPVWLGHRRLSILDLSDKSAQPLRRGDLHIVFNGELFNYIELRSELTALGEHFETSGDTEVLLASYRHWGAGCLERFNGIFAFAIFDASRGSLFAARDPFGVKPFHYGVKPFHYAVTHDFLIFASEIKAISASGLVLRKWDPDVASAYLSYALTTAPQGRTFFENIRQIPPGHCLTLASPDDEPSVTRYYAPRITETPRSLHELVDEGAGLIRQSCRIRMRSDRDVGLCLSSGIDSANVAAALVAEGIAPECYSIDAASSSMLDEFPLITALADKLGLHVNPIRHPDAIPTADIVRYMLFNDEPSLFWGSYNQFHLYREMRKLGVIVSMSGHGGDELFCGYQRYYPAVVRDMLAQRRIMSLIWWCLRQSRHLMQDRRTIRSTWDSYSHPLGWANDYAHDIAALHLKHTIADPEEWISTFVGASSWGEQQQKSLFTYELQYLLRDADRNSMAHGIEERVPLLDTRLYEFCASVPLKDLCQDGYLKGLARQLFPAIPESLRFHQIKRGLYTDISSKLPQLQADLMPLVHRSPLLRELVDLQKLPQQLPGIVWWRLCSLAVLDVSGIEEWTAQTPLPRLVDDEMAERIGGVPSGTGRTAVIRHVLDEGLSYLEPGALHGLAETVGLIESAAIPGCIIEAGCALGGSTMVLATAKAKERPLHVFDVFGCIPPPGSNDGEEARARFAVIAAGESTGLNGKRYYGYEPDLLKNVQDNFVALGLPPAEHGITFVPGLYENTLYPSGPVALAHIDCDWYQSVKTCLERIAPHISPGGRMIIDDYDHYSGCRRAVDEFLEASNGQFIRERYARVHLVRTKADGQETDVHRPGD

SEQ ID NO: 5074 - protein, 1417 aa, Pseudomonas aeruginosa PAO1
MNVQQSKFRLSRWAGATLALGLLLSGLGAWGLALVNEQQARMALEREAELLAEAVTRRVELYQYGLRGVRGALLTAGEVHIDRELFRRYSLTRDIDREFPGARGFGFIRRVAAADEAGFLRQARADGQPEFRIQQLTPHDGERYVIQYIEPVARNGQALGLDIASEANRREAARAALETGQVRLTGPITLVQASGLRQQSFLILMPIYRSGITPPPGPQRELEGFGWSYAPLLTGEVLAGLPIDNAAIHLELSDVTGDGAAVPFFVNGAAAPAQRLFGHMLRREIYGRHWQMAFSALPLFVQRLHQPSPRILFLAGSLVSLLLAALVNASALGRLRRRREAATQARLAAIVGNSADGIIGVGLDGVISDWNRGAEALFGYREEQAVGRRVVDLLVPPSKENEELDILARIARKEQVVSFDTVRRHQDGHLLDVAVTVSPILGPDGGVVGASKTVRDISAKKAAEARIRELNTGLEHQIAERTAELRRLNVLLGSVLQAASEVSIITLDRDGIISGFNLGAERMLGYRADEVVGKASPTLLHSERELLARGQELGEEGFRVLVARAEQEGAETREWTYLRKDGSPLSVTLSVTVLRDEAGAINGYLGIAVDVTEWRNAEREMAAARDQLQMAADVARLGIWRWNLADDSLQWNERMCEMYGQPLALRDGGLVYEHWRSRLHPEDLERTEASLRAAVEGRGNYDVIFRVVLPDGGIRFIQAGAQVERDADGNPLQVTGINIDITSDQQLQARLREAKEQADAASAAKSSFLANMSHEIRTPMNAVLGMLQLARQTDLNERQRDYLDKASSAATSLLGLLNDILDYSKIEAGKLVLEMLPFELEPLMQDLAVVLSGNQGDKDVEVIFDIDPELPSAVVGDRLRLQQILINLAGNALKFTARGHVLVSLRRLAHDAHLVRLRVLVADTGIGISAEQQQRIFEGFTQAEASTSRRFGGTGLGLFICKRLVDLMGGELRVESAPGSGSRFWFDLDLDVAHDQPLRAACPGAGEPLRLLVADDNLVAGELLERTVGALGWRADCVGSGSEAVARVQAAMAEGRRYDVVLMDWRMPDLDGLSAAQLIRQLQGDLPPPMVIMITAYGREVLADARDHSAPPFVDFLTKPVTPKQLADSVLHALHGEQGAPANPPPRPVERTQRLRGVRLLVVEDNALNRQVAAELLSSEGARVALADGGLAGVQQVLEASVPFDAVLMDMQMPDIDGLEATRRIRADGRFAGLPILAMTANASLADREACLAAGMNDHVAKPIDKERLVLCLLGHLGRSGARGAPATAADAGELVEARGDIVGRFGGSLELIVQVLRRFVPDMQDLFAQLERQLGEGDVQGSAATLHTIKGSASTVGASALAGRASELEQALRRADPLRGMEILAGIRLDELRTLCDACLLRLQAMFGDVQAESAS

SEQ ID NO: 5075 - protein, 403 aa, Streptomyces avermitilis MA-4680
MQVIQSTKLANVCYEIRGPVLEEAMRLEAAGHRILKLNTGNPAAFGFECPPEILEDILRNVSSAHGYGDAKGLLAARRAVVMHNQTLGIETDVEHVFVGNGVSELIVMAMQGLLDDGDEVLVPAPDYPLWTASVSLSGGTAVHYHCDEQSDWMPDLADVERKVTDRTKAIVIINPNNPTGAVYDEAMLRGLTDIARRHNLLVCSDEIYDKILYDGATHTPTAAVAPDLLTLTFNGMSKAYRVAGYRVGWMAISGPRAHADSYIEGLTILANMRLCANMPGQHGVVAALSGRQTINELVLPGGRLKEQRDVAHELLTQIPGVSCVKPKGALYLFPRLDPKVFKIKDDRQMVLDLLRREKIMVVQGTGFNWPDPDHFRVVTLPTVGDLTSAITRIGNFLDGYSQP

SEQ ID NO: 5076 - protein, 672 aa, Shewanella sp. ANA-3
MSFPHLLEPLDLGFTQLKNRVLMGSMHTGLEEEKGGFEKLAAFYKERALGGVGLIVTGGISPNLRGRLTPHACQLSFPWQVGKHRIVTQAVHEAGGKICMQILHAGRYGYHPFSQAPSRIKSPITPFTPSAMSSRQVRATIKDYASSAALAKRAGYDGVEVMGSEGYLINQFISSRTNTRTDEWGGSFEKRAQFPIEIVNAIRAKVGKDFIIIFRLSMLDLVDNGSTWDEVVQLAKWLEHVGVSIINTGIGWHEARVPTIATSVPRGAFAWVTEKLKKSVSVPLIATNRINTPEIGEQIIASGQADMVSMARPFLADPEFVNKAAANTPELINTCIGCNQACLDHTFSLKRATCLVNPRACYETEINFLPTNNKKRIAVMGAGPAGMAFSVYAAMRGHEVVLFEAKSEVGGQFNLARKIPGKEEFNETIRYFLNQIKLHKIDLRLNTRLDAKVLETETFDEIVIASGVVPRELSLPGFDSPKVVDYQQVLTGQATIGNKVALIGAGGIGFDMAHYLCESESSTLNPEKWLKQWGIDKQYQHAGGLAEPEVDNSDHRQVYLLQRKTSKMGQGLGKTTGWIHRLVLKQHDVKMKTGVNYDKFDNAGLHIRVGEQTEVLAVDNVILCAGQESNRTLVDEMKATGIPVHLIGGVDVAAELDAKRAIRQGAELAMRL

SEQ ID NO: 5077 - protein, 716 aa, Photobacterium profundum SS9
MQLERAAFSDPFSFLGPQYQSKGIALRVWMPGAVSMVVEIENGEKFPLTREDESGFVLISKMDLTAAVYKLHISWPTGEQTIHDPYQFHGFMPSGDALVSPSKMHSEMGAQLISLNKGGQPISGVRFLTYAPNASAVSVIGEFNAWDGRRHPMQRLDDGLWGLFIPDLEDGTQYKFELKDSSGNSLPHKADPWGYSSEQYPSFTSIVYDQSRYQWQDKAWQTRPVSVKHQEALSFYELHAGSWRRNEQGDFLTYRELAEQLIPYLSEMGYTHLELMPVSEHPFYGSWGYQPIGLFSPTSRFGTPDDFKYFVDQCHLAGIGVVLDWVPAHFPSDDHGLANFDGTALFNDPDPRRGWHQDWKSYIYDYGRDHVRRFLISNALFWLEHYHIDGLRVDAVASMLYLDYSREHDQWIPNHDGGNQNYDAISLLRWMNEEVYSHYPNAMTIAEESTAFSGVSRPTDMGGLGFGFKWNMGWMHDSLSYIQEEPVHRKFHHNTITFPLIYAFSENYVLSLSHDEVVYGKGSLLDKMPGDEWQKSANLRTYMGYMYGQPGKKLNFMGAEIAQSAEWSHDGQLEWHWLEYPRHNGMKKLVSDLNHLYQDLPALHELDCSPEGFEWRVQDDAETSVLAHERFALNGDKVLVVSNFTPVPREGYTLGVPAEGEYEVLLNTDAEKYWGSGTPIQQTVKTQLLEKHGLAQSISLDLPPLSTVFLAFKQHA

SEQ ID NO: 5078 - protein, 159 aa, Glycine max
MDFRVMGLESPLFHTLQHMMDMSEDGAGDNKTHNAPTWSYVRDAKAMAATPADVKEYPNSYVFEIDMPGLKSGDIKVQVEDDNLLLICGERKRDEEKEGAKYLRMERRVGKLMRKFVLPENANTDAISAVCQDGVLSVTVQKLPPPEPKKPRTIQVKVA

SEQ ID NO: 5079 - protein, 484 aa, Streptococcus sinensis
CGVAILADTVKVTLGPKGRNVVLEKSFGSPLITNDGVTIAKEIELEDHFENMGAKLVSEVASKTNDIAGDGTTTATVLTQAIVREGIKNVTAGANPIGIRRGIEAAVATAVSALKETAIPVSNKEAIAQVAAVSSRSEKVGEYISEAMEKVGNDGVITIEESKGMETELDVVEGMQFDRGYLSQYMVTDSEKMVADLDNPYILITDKKISNIQEILPLLESILKTNRPLLIIADDVDGEALPTLVLNKIRGTFNVVAVKAPGFGDRRKAMLEDIAILTGGTVITEDLGLELKDATIEALGQASKVTVDKDSTVIVEGSGNPEAIANRVVVIKSQIESTTSEFDKEKLQERLAKLSGGVAVIKVGAATETELKEMKLRIEDALNATRAAVEEGIVSGGGTAFVSVLGAVAALELTGDEATGRNIVLRALEEPVRQIALNAGFEGSIVIDRLKNSEAGTGFNAATGEWVNMIEAGIIDPVKVTRSA

SEQ ID NO: 5080 - protein, 493 aa, Cucumis melo
MGFHQTHETNQVLLSKIAISDGHGEDSPYFDGWKAYDNDPFHPENNPLGVIQMGLAENQLSPDLIVDWIRKHPKASICTDEGLLNFKDIANFQDYHGLPEFRNAIASFMGKARGGRVKFDPSRIVMGGGATGASETVIFCLADPGDAFLIPSPYYAAFDRDLQWRTRAQIIPVHCNSSNNFQITREALEVAYKKAEESNIKVKGLIITNPSNPLGTIYDRDTLKSLVNFVNDNNIHLICDEIYSATVFKSPSFTSIAEIIEEMDHCKKELIHILSSLSKDMGLPGFRVGILYSYNDTVVSIARKMSSFGLVSSQTQHLLAAMLSDEEFVDNFLVENSKRLAKRHARFTEELEKMGITCLNSNAGLFVWMDLRKLLKDQSFESEMELWRVIINEVKLNVSPGSSFHVTEPGWFRVCFANMDDNTVGVALDRIHSFVGKIDKKENSTIPMPPKKKHRENKLRLSFSFSGRRYEEGNVLKSPHMMSPHSPLVRAKT

SEQ ID NO: 5081 - protein, 445 aa, Zea mays
GREPPPFLHLPRNADAATSAPSPTRARHAGRRLRWRSGSGSQQRRGSPRLSGSLSPIALRPRSVPLLTGRFCVAIFSSIACSPTSQFRRLQFLDLSIKSRPYHFSQSCLMALAAAPASGDSQSGPQRNYQVVEMRKHRIVSLVAALLVLLALAAVSSTRSAQKESVADNAGMLAGGIKDVPANENDLQLQELARFAVNEHNQKAVWCRHVSPGVKMPKDYCYESGPRRWDPDPHVCRLGPRRWVYDLHVYRPDPAGRSRISVYVNWTLTRGVQDFKPAYTLGLCSGSNDRAARYRGGRSCHIDTRMVHTVTRMLLRHAVASQRRVRGQRHNGQPLAQAEYPLQCQQLASITINSCARQHGRSLHTSAYQTPLRSRFEPAERNALLGFEKLVKAKTQVVAGTMYYLTIEVKDGEVKKLYEAKVWEKPWENFKQLQEFKPVEEGASA

SEQ ID NO: 5082 - protein, 420 aa, Lotus corniculatus var. japonicus
MVLSNTASSGSESDLSIHSTFASRYVRTSLPRFKMPQESIPKEAAYQIINDELMLDGNPRLNLASFVTTWMEPECDKLIMASINKNYVDMDEYPVTTELQNRCVNMIAHLFNAPLGDSDTVGTVGSSEAIMLAGLAFKRTWQNRRKAEGKPHDKPNIVTGANVQVCWEKFARYFEVELKEVKLSEGYYVMDPQKAVDLVDENTICVAAILGSTLNGEFEDVKRLNDLLIEKNKETGWDTPIHVDAASGGFIAPFIYPELEWDFRLPLVKSINVSGHKYGLVYAGIGWVIWRNKEDLPEELIFHINYLGADQPTFTLNFSKGSSQIIAQYYQLIRLGYEGYKHVMENCRDNMLVLKEGLQKTGRFEIVSKDNGVPLVAFTLKDHTHYNEFQISDSLALRVDSAGIQHAPKYSARDRGPCSH

SEQ ID NO: 5083 - protein, 490 aa, Cucumis melo
MVLVSSNDNGNAKKVLSKLAKGNGHGEDSSYFDGWKAYDSDPFHPIINPRGVIQMGLAENQLSFEFVEKWMKNNPQASICSVEGIDEFKDIAIFQDYHGLPEFRNAVANFMGKVRGNRVKFDPDRVVMSGGATGAHETMAFCLADPGEAFLVPVPYYPGFDRDLRWRTGVEIVPVKCESSNNFKLTREALETAYEEAEKSNIRIKGLLITNPSNPLGTVYDRQTLETAVSFINEKNIHLVCDEIYAATVFSEPGFISISEVIDNMNDVECDRNLIHVVYSLSKDMGFPGFRVGIIYSYNDAVVACARKMSSFGLVSSQTQYLIASMLLDDVFVDNFLAGSAEKLAVRHRNFTKGLAQVGIGYLKGSGGLFLWMDLRHLLKEKTLEAEMALWKVIINEVKLNVSPGSSFHCSEPGWFRVCFANMDDSTMDISITRIRNFVLQNKEVTTKVKKQKFCWRQSSLELRLSSRRLEDVMSPHSPLPQSPMLRATT

SEQ ID NO: 5084 - protein, 1128 aa, Oryza sativa; identical to SEQ ID NO: 163

SEQ ID NO: 5085 - protein, 233 aa, Zea mays
MVQEGRMLLNYVTMNDIVIRKILKKYDKSPWLIELGAFHLNCDASDAYEGFHGVKSAPPEANNLYAQRFKWFVTFIDCYTCMTWIYMLKHKNEVLRCFKDFHNLVTNQFNAKFFEDFSSANESNCKGYKSDSEKGENGTQEGIINGRIPSLMDEIVIRLDDANERNDVHDNNLVVVVGTILCPRNYTGGNQDKEVRPDDMKANEKRVIVYQRRRYKNQGANDATKATITSSLV

SEQ ID NO: 5086 - protein, 482 aa, Arabidopsis thaliana
MDVSKVTTSDGGGDSMETKPSPQPQPAAILSSNAPPPFLSKTYDMVDDHNTDSIVSWSANNNSFIVWKPPEFARDLLPKNFKHNNFSSFVRQLNTYGFRKVDPDRWEFANEGFLRGQKHLLQSITRRKPAHGQGQGHQRSQHSNGQNSSVSACVEVGKFGLEEEVERLKRDKNVLMQELVRLRQQQQSTDNQLQTMVQRLQGMENRQQQLMSFLAKAVQSPHFLSQFLQQQNQQNESNRRISDTSKKRRFKRDGIVRNNDSATPDGQIVKYQPPMHEQAKAMFKQLMKMEPYKTGDDGFLLGNGTSTTEGTEMETSSNQVSGITLKEMPTASEIQSSSPIETTPENVSAASEATENCIPSPDDLTLPDFTHMLPENNSEKPPESFMEPNLGGSSPLLDPDLLIDDSLSFDIDDFPMDSDIDPVDYGLLERLLMSSPVPDNMDSTPVDNETEQEQNGWDKTKHMDNLTQQMGLLSPETLDLSR

SEQ ID NO: 5087 - protein, 235 aa, Oryza sativa (indica cultivar-group)
MAPRAATVEKVAVAPPTGLGLGVGGGVGAGGPHYRGVRKRPWGRYAAEIRDPAKKSRVWLGTYDTAEEAARAYDAAAREFRGAKAKTNFPFASQSMVGCGGSPSSNSTVDTGGGGVQTPMRAMPLPPTLDLDLFHRAAAVTAVAGTGVRFPFRGYPVARPATHPYFFYEQAAAVAAAEAGYRMMKLAPPVTVAAVAQSDSDSSSVVDLAPSPPAVTANKAAAFDLDLNRPPPVEN

SEQ ID NO: 5088 - protein, 273 aa, Lactobacillus gasseri
MKQLTLNNDVKIPIFGFGTYEISPDQTKQAVLSAFEEGYRLIDTAQYYQNEQQVGEAVKASGLNRDEVFITTKTMTDGYEDTKIGLDESLRRIGLDYFDLVLIHWPMGHDIDTWHALEAAYKAGKTRAIGISNFNSRQTLDLIHQSSVRPMVDQIETHLFLQQWKMHEFLEKENIVHESYSPLGNGQQNLISNPVLKEISEKYGKSPIQVILRYLVQNDVVTIPRSTNPAHIKSNIDIFDFELDNDDLKRLRVLDERKPIDGWPAEMREDEDY

SEQ ID NO: 5089 - protein, 334 aa, Erwinia carotovora subsp. atroseptica SCRI1043
MKTLGEFIVEKQHDFSHATGELTALLSAIKLGAKIIHRDINKAGLVDILGASGISNVQGEVQMKLDLYANEKLKAALKARGEVAGIASEEEDEIVIFEGDKAENAKYVVLMDPLDGSSNIDVNVSVGTIFSIYRRITPLGTSVTEADFLQPGSQQVAAGYIVYGSSTMLVYTTGHGVHAFTYDPSLGVFCLSHEKVCFPEKGNMYSINEGNYIKFPSGVKKYIKYCQEQDEETQRPYTSRYIGSLVADFHRNLLKGGIYLYPSTASYPKGKLRLLYECNPMAFLAEQAGGKASDGKHRILDITPEKLHQRSPFFVGTESMVDDVERFIREFPDA

SEQ ID NO: 5090 - protein, 355 aa, Anabaena variabilis ATCC 29413
MTHLFEPLRIREVTFRNRIALSPMCQYSSTNGFANDWHLVHLASRAVGGAGLVMTEAAAVEARGRISPQDLGIWSDAHIEALARTVSLIHNFGAVAAIQLAHAGRKASTSKPSKGGKFIDESQEGWRPVVSSSAIAFSKESPVPEALSIEGIQQVIQAFVQATKRSLQAGFKVIEIHAAHGYLLHQFLSPLVNQRQDDYGGSFENRTRLLREVVEAVREVLPESYPLFVRLSATDWVDKGWDIEQSIAISDKLKSLGVDLIDCSSGGVIPGINIPVKPGYQAQFAERIRKEANIPTGAVGLITSPEQADQIIRSGVADIVLLGRELLRNPYWPHLAAKELGHEKHWPVQYDRAWL

SEQ ID NO: 5091 - protein, 399 aa, Saccharomyces cerevisiae
SFVKDFKPQALGDTNLFKPIKIGNNELLHRAVIPPLTRMRALHPGNIPNRDWAVEYYTQRAQRPGTMIITEGAFISPQAGGYDNAPGVWSEEQMVEWTKIFNAIHEKKSFVWVNLWVLGWAAFPDNLARDGLRYDSASDNVFMDAEQEAKAKKANNPQHSLTKDEIKQYIKEYVQAAKNSIAAGADGVEIHSANGYLLNQFLDPHSNTRTDEYGGSIENRARFTLEVVDALVEAIGHEKVGLRLSPYGVFNSMSGGAETGIVAQYAYVAGELEKRAKAGKRLAFVHLVEPRVTNPFLTEGEGEYEGGSNDFVYSIWKGPVIRAGNFALHPEVVREEVKDKRTLIGYGRFFISNPDLVDRLEKGLPLNKYDRDTFYQMSAHGYIDYPTYEEALKLGWDKK

SEQ ID NO: 5092 - protein, 473 aa, Frankia sp. EAN1pec
MALHGRARGRRGDQAVEVRPHLVIPDEDGPVPRYRMPRSSMSAETAYQIVRDELMLDGNARLNLATFVTTWMDEHADRLMTECAAKNMIDKDEYPQTAELEARCVNMLADLWHAPDATDAVGCSTTGSSEACMLAGLAMLRRWRSTREPHRGEQGGGQRGTGARPNIVMGANVQVCWEKFARYWDVEPRLMPLAPGRTHLTAPEAVARCDENTIGVVAVLGSTFDGTYEPVAEIVAALDQLAASGGPDVPVHVDGASGGFIAPFCDPDLVWDFRLERVVSINASGHKYGLVYPGVGWALWRDARHLPAELVFDVDYLGGSMPTFALNFSRPGAQVVAQYYSLLRLGRAGYRHTARTCRDNARWLADEIAKLGPFELISDGSGIPAFAFTTRDAAEFSVFEVSEALRARGWLVPAYRFPPDLAELAVLRIVVRAEFSRDLAHLLVEDLHRVVGRLSGPRWRTAAGGADLASFHH

SEQ ID NO: 5093 - protein, 625 aa, Zea mays
MAGPEKTVVWFRRDLRIQDNPALAAAAKGGSVLPIFIWCPSDYGQYYPGRCSRWWLKQSLVHLGKSLELLGCPLVLIRAEDSTLAALLECVRSISATRVVYNRLYDPISLVLDNKIKNELPAHGISIQSFNGDLLYEPWDVYDENGQAFTTFNKYWEKCMSLPIEISQYLAPTRLVAAPGLANVRCCSIDDLGLESSKDVESSNALLSRAWSPGWRNAENMLEEFVSYGLLEYSEHGMKVGGSTTSLLSPYLHFGELSVRMIYQLVKMRQVKWQNEGKSEAEESVRLFLRSIGFREYSRYLCFNYPFTHERSFLGNLKHYPWLLDEGRFKSWRQGMTGYPLVDAGMRELWATGWTHNRIRVIVSSFAVKFLQIPWIWGMKYFWDVLLDADLESDILGWQYISGSLPDGHELSRLDNPEVQGQKYDPDGEYVRTWIPELARMPTEWIHSPWAAPNSILQVAGVELGFNYPKPIVELHMARECLDDAISTMWQLDTAAKLAELDGEVVDDNLNNIRNFDIPKVVLNKKLSPSTSSMEHRVLSTNGKDEKSQPTEVKALYKQIIRDDMMNDSNMDDTCSTANLKVTRKRSSSDSYFQKTADRDGTSKVEDNDSEDSGTSISRPSKKAA

SEQ ID NO: 5094 - protein, 293 aa, Brassica napus
  misc_feature (285)..(285): Xaa can be any naturally occurring amino acid
ISHSAGPRLLDRSDFPDDFIFGTATSAFQTEGATSVGGKSPTIWDYFSHTFPERTNMQNADVAVDFYHRYKDDIKLLKELNMDSFRFSISWARLIPSGKVEDGVNKEGLQFYNALIDELLAHGIRPSVTLYHWDHPQALEDEYGGFLSPQIIEDFRNFARVCFENFGDKVKLWTTINEPSVISIAGYDTGNKAVGRCSKWVNNKCQAGDSATEPYIVSHHLLLSHAAAVQEFRKCNKTSKDGKIGIVISPPWLEPYDFTSSADKHAVERGLTVEIDWHLDPGSLXGDYPKIMK

SEQ ID NO: 5095 - protein, 728 aa, Escherichia coli K12
MSDRIDRDVINALIAGHFADPFSVLGMHKTTAGLEVRALLPDATDVWVIEPKTGRKLAKLECLDSRGFFSGVIPRRKNFFRYQLAVVWHGQQNLIDDPYRFGPLIQEMDAWLLSEGTHLRPYETLGAHADTMDGVTGTRFSVWAPNARRVSVVGQFNYWDGRRHPMRLRKESGIWELFIPGAHNGQLYKYEMIDANGNLRLKSDPYAFEAQMRPETASLICGLPEKVVQTEERKKANQFDAPISIYEVHLGSWRRHTDNNFWLSYRELADQLVPYAKWMGFTHLELLPINEHPFDGSWGYQPTGLYAPTRRFGTRDDFRYFIDAAHAAGLNVILDWVPGHFPTDDFALAEFDGTNLYEHSDPREGYHQDWNTLIYNYGRREVSNFLVGNALYWIERFGIDALRVDAVASMIYRDYSRKEGEWIPNEFGGRENLEAIEFLRNTNRILGEQVSGAVTMAEESTDFPGVSRPQDMGGLGFWYKWNLGWMHDTLDYMKLDPVYRQYHHDKLTFGILYNYTENFVLPLSHDEVVHGKKSILDRMPGDAWQKFANLRAYYGWMWAFPGKKLLFMGNEFAQGREWNHDASLDWHLLEGGDNWHHGVQRLVRDLNLTYRHHKAMHELDFDPYGFEWLVVDDKERSVLIFVRRDKEGNEIIVASNFTPVPRHDYRFGINQPGKWREILNTDSMHYHGSNAGNGGTVHSDEIASHGRQHSLSLTLPPLATIWLVREAE

SEQ ID NO: 5096 - protein, 468 aa, Streptococcus suis 89/1591
MSKTLPKDFIFGGATAAYQAEGATKTDGKGPVAWDKYLEDNYWYTAEPASDFYNRYPVDLKLAEEYGVNGIRISIAWSRVFPTGYGEVNRKGVEYYHNLFAECHKRGVEPFVTLHHFDTPEALHSNGDFLNRDNIDHFVAYAAFCFEEFPEVNYWTTFNEIGPIGDGQYLVGKFPPGIQYDLAKVFQSHHNMMVSHARAVKLYKDKGYKGEIGVVHALPTKYPYDPANPDDVRAAELEDIIHNKFILDATYLGRYSEKTMEGVQHILAANGGELDLREEDFSILEAAKDLNDFLGINYYMSDWMQAFDGETEIIHNGKGEKGSSKYQIKGVGRREAPVNVPKTDWDWIIYPQGLYDQIMRVKADYPNYKKIYITENGLGYKDEFVDGTVYDDGRIDYVKKHLEVISDAISDGANVKGYFIWSLMDVFSWSNGYEKRYGLFYVDFETQERYPKKSAHWYKKVAETQVID

SEQ ID NO: 5097 - protein, 308 aa, Triticum aestivum
  misc_feature (171)..(172): Xaa can be any naturally occurring amino acid
  misc_feature (253)..(254): Xaa can be any naturally occurring amino acid
  misc_feature (257)..(257): Xaa can be any naturally occurring amino acid
MDHAADTFRTDLMTITRHVLNEQSRHPESRGDLTILLSHIVLGCKFVASAVNKAGLAKLTGLAGETNVQGEEQKKLDVLSNEVFVNALVSSGRTCVLVSEEDEKVTFVDPKLRGKYCVCFDPLDGSSNIDCGVSIGTIFGIYMIKNQDTVTLEEVLQPGKDMIAAGYCMYXXSSCTLVLSTGNGVNGFTLDPSLGEFILTHPNIKIPNKGKIYSVNEGNARNWDAPTAKYVERCKFPQDGSSPKSLRYIGSMXXDVXRTLLYGGYSVPADKKTQREALFVQGSMSSDGQPRQSSRKVPTSAQRSGHIE

SEQ ID NO: 5098 - protein, 268 aa, Arabidopsis thaliana
MEVTSQSTLPPGFRFHPTDEELIVYYLRNQTMSKPCPVSIIPEVDIYKFDPWQLPEKTEFGENEWYFFSPRERKYPNGVRPNRAAVSGYWKATGTDKAIHSGSSNVGVKKALVFYKGRPPKGIKTDWIMHEYRLHDSRKASTKRNGSMRLDEWVLCRIYKKRGASKLLNEQEGFMDEVLMEDETKVVVNEAERRTEEEIMMMTSMKLPRTCSLAHLLEMDYMGPVSHIDNFSQFDHLHQPDSESSWFGDLQFNQDEILNHHRQAMFKF

SEQ ID NO: 5099 - protein, 215 aa, Fagus sylvatica
MARRADEEYDYLFKVVLIGDSGVGKSNLLSRFTRNEFCLESKSTIGVEFATRTLQVEGRTVKAQIWDTAGQERYRAITSAYYRGAVGALLVYDVTKPTTFEQVWLKELRDHADSNIVIMLIGNKTDLKHSRAVRTEDAQGFMLRKKALSFIETSALKATNVEKAFQTILCLRFTGIISKKSLSSDEPAPSVIKEAVKHIVVGGSEANTKKPCCSN

SEQ ID NO: 5100 - protein, 505 aa, Yarrowia lipolytica CLIB122
MIRADRHTYKVFNQEFTIDKRFQVTKELGHGAYGIVCAAKYTGTPDGPGVAIKKVTNIFSKNILCKRALRELKLLNHFRGHKNITCLYDMDIVDTNNFNELYLYEELMECDMHQIIRSGQPLTDAHYQSFVYQILAGVKYIHSADVLHRDLKPGNLLVNADCELKICDFGLARGFSSDDEKNAGFLTEYVATRWYRAPEIMLSFQSYTKAIDIWSVGCILAELLGGKPLFKGKNYVDQLNQILHYLGTPSEETLKRIGSPRAQEYVRGLPFMPKIPFSTLFPTANPEALDLLEKMLAFDPAERVTVEEALEHPYLKIWHDPRDEPVCPTPFDFSFEEVNDMEAMKQMILDEVVDFRAMVRKPVDEQTRIRDEQIEEQRREEEKQEVERQQKEAERQKQHQQEAERQQHQQQQHHPQQQDSPSTLSGFSDSDQSANPHFYEYAGFGVGSQTSDMGQPPVIQRKDSLGIPEEDFKYQDPPPKPQESGRQGDGDLELELEYGLDGWRS

SEQ ID NO: 5101 - protein, 328 aa, Papaver rhoeas
IGRGAYGIVCAAINSETREEVAIKKIGNAFDNRIDAKRTLREIKLLRHMDHENIIAIKDIIRPPQRESFDDVYIVYELMDTDLHQIIRSTQQLTDDHCQYFLYQLLRGLRYVHSANVLHRDLKPSNLFLNANCDLKIGDFGLARTTSETDFMTEYVVTRWYRAPELLLNCSEYTAAIDIWFVGCILGEILTREPLFPGKDYVHQLRLITELLGSPDDSSLGFLRSDNARRYVRQLPQYPKQHFSARFSQMSQGAIDLLEKMLVFDPSKRITVEEALCHPYLKSLHDINDEPICARPFNFDFEQPSFTEVNIKEPIWRESVKFNPDPTH

SEQ ID NO: 5102 - protein, 210 aa, Zea mays
  misc_feature (187)..(187): Xaa can be any naturally occurring amino acid
DARRFRSGIPGSTHASGRLLILQGSHGRAQPASSGLTDETAFSCCSDPDPSTKDFLLQQTMLRIKDPKKSLDFYTRVLGLTLLQKLDFPAMKFSLYFLAYEDKNDIPKDKSEKTAWTFSRKATLELTHNWGTEDDETQSYHNGNSDPRGFGHIGIAVPDVYSACKRFEELGVKFVKKPDDGKMKGLXAFIQDPDGYWIEILNPNKIATII

SEQ ID NO: 5103 - protein, 264 aa, Prochlorococcus marinus str. NATL2A
MKWTLITPLPKETMLGKKSDFTIHPINVLQDNIVWVWVHNCNAVVVDPSISGPVEKWLLEKNLSLKAILQTHHHDDHIGGTQKLIKTWPEAKVVASKKEHKRIPFQTFSVDDNDIFNLMDAEIKVIEVHGHTDNHIAFYISKQNAKCNILFPGDTLFGGGCGRLLEGSPVQMFESLYKLNSLPENTEIYPAHEYTESNLKWALSLEPGNISIIERLKLIQKKLQKGMSSLPSTLSEERKTNLFLIAENVEKFTMLRKHKDRWKC

SEQ ID NO: 5104 - protein, 225 aa, Petunia x hybrida
MGRGKIEIKRIENNTNRQVTFCKRRNGLLKKAYELSVLCEAEIALIVFSTRGRVYEYSNNNIRAIIDRYKKATVETSNAFTTQELNAQFYQQESKKLRQQIQLIQNSNRHLVGEGLSSLNVRELKQLENRLERGIARIRSKKHEMILAESEDLQKREIQLEQENAFLRSKIAENERLQELSMMPAGGQEYNAIQQYLARNMLQLNMMEGVPSYPLPSDKKSLDLE

SEQ ID NO: 5105 - protein, 167 aa, Triticum aestivum
MAMMKMTHDDYVHLCLMALASVATGGDQAQAAKGQWLQTVTAAAPAASELRFRCSVCGKAFPSHQALGGHKASHRKRAALVLPLQSVSPAEETVASSTSSGVGGHRCSVCHRSFATGQALGGHKRCHYWDGLSVSLTASASRSGSGSSVRDFDLNLTPVPEKAVGGM

SEQ ID NO: 5106 - protein, 532 aa, Arabidopsis lyrata subsp. petraea
KTTLVELGRTLALEECALWMPTRTGLELQLSYTLRHQHPVEYTVPIQLPVINQVFGTSRAVKISPNSPVARLRPVSGKYMLGEVVAVRVPLLHLSNFQINDWPELSTKRYALMVLMLPSDSARQWHVHELELVEVVADQVAVALSHAAILEESMRARNLLMEQNVALDLARREAETAIRARNDFLAVMNHEMRTPMHAIIALSSLLQETELTPEQRLMVETILKSSNLLATLMNDVLDLSRLEDGSLQLELGTFNLHTLFREVLNLIKPIAVVKKLPITLNLAPDLPEFVVGDEKRLMQIILNIVGNAVKFSKQGSISVTALVTKSDTRDADFFVVPTGSHFYLRVKVKDSGAGINPQDIPKLFTKFAQTQSLATRSSGGSGLGLAISKRFVNLMEGNIWIESDGLGKGCTAIFDVKLGISERSNESKQSGIPKVPAIPRHSSFTGLKVLVMDENGVSRMVTKGLLVHLGCEVTTVSSNEECLRVVSHEHKVVFMDVCLPGVENYQIALCIHEKFTKQRHQRPLLVALTGNT

SEQ ID NO: 5107 - protein, 404 aa, Neisseria gonorrhoeae FA 1090
MDKFPKSAKLDHVCYDIRGPVHKKALQLEEEGNKILKLNIGNPAPFGFEAPDEILVDVIRNLPTSQGYCDSKGLYSARKAIVHYYQNKGLRDITVNDVYIGNGVSELIAMSMQALLNDGDEILIPAPDYPLWTAAATLAGGTVRHYLCDEENGWFPNLADMEAKITSKTKAIVVINPNNPTGAVYSKEILLEIAELARKHGLIIFADEIYDKILYDGAVHYHIAALAPDLLTVTFNGLSKAYRVAGFRQGWMVLNGPKHHAKGYIEGLDMLSSMRLCANTPMQHAIQTALGGYQSINEFILPGGRLLEQRNRAWELVNQIPGVSCVKPMGAMYMFPKIDTEMYRIRDDMKFVYDLLVREKVLLVQGTGFNWIKPDHFRIVTLPYVHQIEEAMGRLARFLQTYHQ

SEQ ID NO: 5108 - protein, 632 aa, Escherichia coli CFT073
MVSYFYPSLKSPHSIKPVKNYRSINKYTQKPSPFSSISNRHYVFYFSTAKSLAHRAALRHFFNKQTQHAVNTRLTEKVMCSIFGVFDIKTDAVELRKKALELSRLMRHRGPDWSGIYASDNAILAHERLSIVDVNAGAQPLYNQQKTHVLAVNGEIYNHQALRAEYGDRYQFQTGSDCEVILALYQEKGPEFLDDLQGMFAFALYDSEKDAYLIGRDHLGIIPLYMGYDEHGQLYVASEMKALVPVCRTIKEFPAGSYLWSQDGEIRSYYHRDWFDYDAVKDNVTDKNELRQALEDSVKSHLMSDVPYGVLLSGGLDSSIISAITKKYAARRVEDQERSEAWWPQLHSFAVGLPGSPDLKAAQEVANHLGTVHHEIHFTVQEGLDAIRDVIYHIETYDVTTIRASTPMYLMSRKIKAMGIKMVLSGEGSDEVFGGYLYFHKAPNAKELHEETVRKLLALHMYDCARANKAMSAWGVEARVPFLDKKFLDVAMRINPQDKMCGNGKMEKHILRECFEAYLPASVAWRQKEQFSDGVGYSWIDTLKEVAAQQVSDQQLETARFRFPFNTPTSKEAYLYREIFEELFPLPSAAECVPGGPSVACSSAKAIEWDEAFKKMDDPSGRAVGVHQSAYK

SEQ ID NO: 5109 - protein, 409 aa, Rubrivivax gelatinosus PM1
MAMELVSTMWNGAINGLAHGWLHATWWQVLLCTLVFTHVTIAAVTIYLHRSQAHRALDLHPAVAHFFRLWLWLSTGMVTKEWVAIHRKHHAKCETEDDPHSPQTRGIKKVLLEGAELYRAEAKNAETLSKFSHGTPDDWVERNLYTRYSWQGVGVMLLVNVFLFGAAGLTVWAVQMMWIPINAAGIINGLGHFWGYRNFEAPDASTNVSPWGVIIGGEELHNNHHTYPTSAKFSIKPYEFDIGWVYISVLVKCGLASVRKTAPKLALGTIRPVADSQTLEAIIAHRYELMAGYGRELKAACRVELARLKAEGQQHSPKWNQLHLAHRWLHRDDDRIPQAVRLQVETARAEHPVLDKLVTMREELRQLWTRTNVSAEQLVADLQAWCKKAEESGIAALQEFALRLRSAHA

SEQ ID NO: 5110 - protein, 277 aa, Staphylococcus aureus subsp. aureus MRSA252
MEVKTFYNGNTMPQIGLGTFRVENDENCMESVKYAIEQGYRSIDTAKVYGNEEQVGAGIRAGLESTGIAREDLFITSKLYFEDFGRENVAAAYEASLSRLGLKYLDLYLVHWPGTNEAVMVDTWKGMEDLYKNNKVKNIGVSNFEPEHLEALLAQVSIKPVINQVEYHPYLTQHKLKLYLAAQHIVMESWSPLMNAQFLNDETIKDIAQELGKSPAQVVLRWNVQHGVVTIPKSVTPNRISENFRIFDFELSDEQMTRIDGLNQDKRIGPDPKTFEG

SEQ ID NO: 5111 - protein, 109 aa, Ashbya gossypii ATCC 10895
MSSSVPYDPYVPPEGAQSQSKAAALKAEIDDTVGIMRDNINKVAERGERLTSIQDKADNLAVSAQGFKRGANRVRKQMWWKDLKMRLCLVLVVVLLLIVIIVPIVVHFT

SEQ ID NO: 5112 - protein, 719 aa, Chlamydophila caviae GPIC
MVERIINSEDISLLISGRQSNPHKFLGIISESSSQDRIILFRPGAHFVAIELQGNIAQATHHHSGIFSLVTPKGTLPHDYRIYHQNGLLAHDPYAFSPLWGEMDSFLFHQGTHYKIYERMGAIPCDVGGILGVLFVVWAPHAQRVSVVGDFNYWNGLVNPLRKVSDSGVWELFIPGLDEGTLYKWELVTASGEVLIKTDPYGKGFDIPPQVTSRVINSDRYTWHDQKWMENRKNTKDQPLAIYEVHVGSWQWDNGRPLGYRELAKRLAQYCKELHYTHVELLPITEHPLNESWGYQVTGYYAPTWRYGSFQDFQFFVDHLHCEGIGVILDWVPGHFPTDSFALASFDGEALYESVDHKDPLHPHWHTYTFDYRCSEVVNFLIGSALFWLDKMHIDGLRVDAVTSMLYLDYGRKAGEWSPNIYGGNENLDAIEFIKHFNSVVHREFPAVLTFAEESTDFPKVTESVDSGGLGFDYKWNLGWMHDTFRYIKVDPIFRSYHHNDLTFSLWYAFNERYLLPLSHDEVVHGKGSLLQKIPGDTWTKFAHMRLLLSYQICQPGKKLVFMGGEFAQWKEWSPDNSLDWHLLDNPYHASLHKCVAKMNALYCELPYFWKGDHKQESFLWVDFKDTKNNVISYYRFSGEDRSSALLCIHHFSSEYFPSYVLHCQGIKTCELLFNSDDISFGGSGKGNRLPILCVDHNIPWGIAIELPPLATLIFQVSF

SEQ ID NO: 5113 - protein, 423 aa, Ashbya gossypii ATCC 10895
MLRWIPTRICPRLCTRGFASSCARLAQGPAFFVKPITPNDLFVSCTVFNEKGAVTGVSERYPKLSFLRDRGLYPRDLRKLDTSSIEVIPSIVVKPTCILVNLLHIKAVIEKNRVYVFDTTSKEAAARLGVLMYDLESKLASHSSQPAQHYEHRALESILVNVMTCLETEFKHLSKQCGLVLNELEDQIDRDKLRDLLIHSKDLTSFYQKSLLIRDMLDELLESDEDLAAMCLSPAPGTVEADAAEVEMLLETYYKQCDEYVQQSGSLLQNIKSTEDVVNIILDANRNSLMLFELKVTIYTLGFTVATLLPAFCGMNLKNFIEESVWGFGGVLAVSAVAGLAVTASNFKALRNVARLTVMNSHSTSPGAKNISSARLHLDRDVPTLWMRLKTAFRTIWFGKSRPSRDGRQRDMIWKWLLDDTSK

SEQ ID NO: 5114 - protein, 492 aa, Raphanus sativus
MDPYKYRPSSAYNAPFYTTNGGAPVSNNISSLTIGERGPVLLEDYHLIEKVANFTRERIPERVVHARGISAKGFFEVTHDISNLTCADFLRAPGVQTPVIVRFSTVVHERASPETMRDIRGFAVKFYTREGNFDLVGNNTPVFFIRDGIQFPDVVHALKPNPKTNIQEYWRILDYMSHLPESLLTWCWMFDDVGIPQDYRHMEGFGVHTYTLVSKSGKVLFVKFHWKPTCGIKNLTDEEAKVVGGANHSHATKDLHDAISSGNYPEWKLFIQTMDPADEDKFDFDPLDVTKIWPEDILPLQPVGRLVLNRTIDNFFNETEQLAFNPGLVVPGIYYSDDKLLQCRIFAYGDTQRHRLGPNYLQLPVNAPKCAHHNNHHEGFMNFMHRDEEINYYPSKFDPVRCAEKVPIPNKSYTGIRTKCIIKKENNFKQAGDRYRSWAPDRQDRFVKRWVEILSEPRLTHEIRSIWISYWSQADASLGQKLASRLNVRPSI

SEQ ID NO: 5115 - protein, 521 aa, Triticum aestivum
  misc_feature (36)..(36): Xaa can be any naturally occurring amino acid
  misc_feature (187)..(187): Xaa can be any naturally occurring amino acid
  misc_feature (286)..(286): Xaa can be any naturally occurring amino acid
  misc_feature (315)..(315): Xaa can be any naturally occurring amino acid
  misc_feature (406)..(406): Xaa can be any naturally occurring amino acid
  misc_feature (419)..(419): Xaa can be any naturally occurring amino acid
  misc_feature (434)..(434): Xaa can be any naturally occurring amino acid
  misc_feature (443)..(443): Xaa can be any naturally occurring amino acid
  misc_feature (455)..(455): Xaa can be any naturally occurring amino acid
  misc_feature (476)..(476): Xaa can be any naturally occurring amino acid
  misc_feature (478)..(478): Xaa can be any naturally occurring amino acid
MVLSHAASAGSSDESVHSTFASRYVRASLPRFRMPXNSIPKEAAYQIINDELMLDGNPRLNLASFVTTWMEPECNKLMMDSINKNYVDMDEYPVTTELQNRCVNMIAHLFNAPLGETETAVGVGTVGSSEAIMLAGLAFKRRWQNKMKAAGKPCDKPNIVTGANVQVCWEKFARYFEVELKEVKLSXGYYVMDPEKAVEMVDENTICVAAILGSTLNGEFEDVKMLNDLLVKKNEETGWDTPIHVDAASGGFIAPFLYPELEWDFRLPLVKSINVSGHKYGLVYAXGIGWCIWRSKEDLPDELIFHINYLGADQXPTFTLNFSKGSSQVIAQYYQLIRLGFEGYRNIMGHCQENAMVLKEGLERTGRFNIVSKDQGVPLVAFSLKDSSRHDEFEISEFLRRFGWIXVPAYTMPPNAQHXTVLRVVIREDFNRTXAERLLIDIXKCSTTRPLPSRXNGARPAHPTANCEREGLASNXVXSLWKKASRKKKTRVLTWHRSHLHMVNPISIPAVFKTFHNYKVS

SEQ ID NO: 5116 - protein, 196 aa, Neisseria gonorrhoeae
DPLAGIPAELKTIPMAVLVNSGSASASEIVAGALQDHKRAVIVGTQSFGKGSVQTLIPLSNGSAVKLTTALYYTPNDRSIQAQGIVPDVEVKDKERTFESREADLVGHIGNPLGGEDVNSETLAVPLEKDADKPAAKEKGKKKKDEDLSSRRIPNPAKDDQLRKALDLVKSPEQWQKSLGLAAKKPVSNKDKKDKK

SEQ ID NO: 5117 - protein, 778 aa, Pseudomonas fluorescens PfO-1
MVQHPMDIKFTHRLSYKQARLTVLVGFILGTLLSLLQIGIDYASEDASINREILSLLEISHNPASRIAYNIDAELAQELTLGLLRSPAIISARLTDNNQTVLASVKRPELQSGYRMISDFLFGAKRQFEDRLYLDHLPNESLGTLSLEVDTFAFGSRFLRRAEVTLLNGFARSLILTGILLALFYVMLTKPLVRVIRELSGRDPRSAEPTTLECPGGHANDEIGVLVKVANQQFENIATEIQQRRNAENRLTDYLAQLEDIVSARTAELKAINARLSQSNQELEVARSTALDMAEARSAFLANMSHEIRTPLNGLLGMIALSLDGPLNAEQQQQLSIAHDSGKVLVELLNDILDLSKFDAGQLELEHIPFDLGSLIEDTANLLSQNAAPSVELTCLIDPHFPALVLGDPTRVRQIVSNLLSNALKFTRFGRVDVRLSTWKDGVRIEVCDTGIGIAQEAQVKIFQPFTQAGAGITRQYGGTGLGLALTYNLCEAMQGRLTISSEVGFGSQFCAELPLPCHTRAVIPPPLHGKVLAITNAVSGLAELLESLLPVWGLTYEQRTLDDPLLGLSPDVIITDCPECLFGLRPAVTAPILLVTAYGSFMPGEEATALAPLQQQARPLARNALYQNLRRTLQPDLTTIDRARLESVPSQRRGRVLLVEDNPVNQLVAKGMLGKLGCDVVVAAHGVEALDQLEHDEFDLVLMDCNMPVMDGYEASRQIRQSGRWPHLPIVALTANAMSEERERCRAAGMSDYLAKPFRREELAALLDQWIPTTTVL

SEQ ID NO: 5118 - protein, 537 aa, Streptococcus bovis
MAKDIKFSADARASMMRGVDILADTVKVTLGPKGRNVVLEKSFGSPLITNDGVTIAKEIELEDHFENMGAKLVSEVASKTNDIAGDGTTTATVLTQAIVREGLKNVTAGANPIGIRRGIESAVAVAVDELKAIAQPVANKEAIAQVAAVSSRSEKVGEYISEAMEKVGNDGVITIEESRGMETELDVVEGMQFDRGYLSQYMVTDNEKMVADLENPYILITDKKISNIQDILPLLEEVLKTSRPLLIIADDVDGEALPTLVLNKIRGTFNVVAVKAPGFGDRRKAMLEDIAVLTGGTVITEDLGLDLKDANMTALGQAAKVTVDKDSTVIVEGAGEASSIANRVNVIKSQLEATTSEFDREKLQERLAKLAGGVAVIKVGAATETELKEMKLRIEDALNATRAAVEEGIVAGGGTALVNVISKVAELELDGDEATGRNIVLRALEEPVRQIAFNAGYEGSVIIEHLKNSEVGTGFNAANGEWVNMVEAGIIDPVKVTRSALQNAASVASLILTTEAVVANHPEPAAPAPAAPGMDPS

SEQ ID NO: 5119 - protein, 403 aa, Pseudomonas fluorescens PfO-1
MQFSKSNKLANVCYDIRGPVLKHAKRLEEEGHRILKLNIGNPAPFGFEAPDEILQDVIRNLPTAQGYSDSKGLFSARKAVMQYYQQKQVEGVGIEDIYLGNGVSELIVMSLQALLNNGDEVLVPAPDYPLWTAAVSLAGGNAVHYLCDEGADWFPDLADIKAKITPNTKAMVIINPNNPTGAVYSKEVLLGMLELARQHNLVVFSDEIYDKILYDDAVHICTASLAPDLLCLTFNGLSKSYRVAGFRSGWIAISGPKHNAHSYIEGIDMLANMRLCANVPSQHAIQTALGGYQSINDLVLPQGRLLEQRNRTWELLNDIPGVSCVKPMGALYAFPKIDPKVCPIHNDEKFVLDLLLSEKLLVVQGTAFNWPWPDHFRVVTLPRVDDLDMAIGRIGNFLKSYRQ

SEQ ID NO: 5120 - protein, 304 aa, Arabidopsis thaliana
MDPAVLDDIIRRLLDYRNPKAGTKQAMLNDSEIRQLCFVSREIFLQQPCLLELAAPVKICGDIHGQYSDLLRLFEYGGFPPAANYLFLGDYVDRGKQSLETICLLLAYKIKYPENFFLLRGNHECASINRIYGFYDECKRRFNVKLWKVFTDTFNCLPVAAVIDEKILCMHGGLSPELINVEQIKNIERPTDVPDAGLLCDLLWSDPSKDVKGWGMNDRGVSYTFGADKVAEFLIKNDMDLVCRAHQVVEDGYEFFADRQLVTMFSAPNYCGEFDNAGALMSVDESLMCSFQILKPVDRRSRFF

SEQ ID NO: 5121 - protein, 534 aa, Streptococcus intermedius
MAKDIKFSADARSAMVRGVDILADTVKVTLGPKGRNVVLEKSFGSPLITNDGVTIAKEIELEDHFENMGAKLVSEVASKTNDIAGDGTTTATVLTQAIVREGIKNVTAGANPIGIRRGIETAVATAVEALKANSVPVSNKEAIAQVAAVSSRSEKVGEYISEAMEKVGNDGVITIEESKGMDTELDVVEGMQFDRGYLSQYMVTDNEKMVADLDNPYILITDKKISNIQEILPLLENILKTSRPLLIIADDVDGEALPTLVLNKIRGTFNVVAVKAPGFGDRRKAMLEDIAILTGGTVITEDLGLELKDATIEALGQASKVTVDKDSTVIVEGSGDAEAIANRVAVIKSQIESVTSEFDKEKLQERLAKLSGGVAVIKVGAATETELKEMKLRIEDALNATRAAVEEGIVSGGGTAFVNVLDAVAALELEADEATGRNIVLRALEEPVRQIALNAGFEGSIVIDRLKNSEVGTGFNAATGEWVNMIEAGIIDPVKVTRSALQNAASVASLILTTEAVVASQPEPASPAPAMDPS

SEQ ID NO: 5122 - protein, 536 aa, Streptococcus mutans
MAKDIKFSADARSSMVRGVDILADTVKVTLGPKGRNVVLEKSFGSPLITNDGVTIAKEIELEDHFENMGAKLVSEVASKTNDIAGDGTTTATVLTQAIVREGLKNVTAGANPIGIRRGIETAVATAVDELKAIAQPVSGKEAIAQVAAVSSRSEKVGEYVSEAMEKVGNDGVITIEESRGMETELDVVEGMQFDRGYLSQYMVTDNEKMVADLENPYLLITDKKISNIQDVLPLLEEVLKTNRPLLIIADDVDGEALPTLVLNKIRGTFNVVAVKAPGFGDRRKAMLEDIAVLTGGTVITEDLGLELKDTTIDALGQAARVTVDKDSTVIVEGSGGKEAVANRVNLIKSQIETATSDFDREKLQERLAKLSGGVAVIKVGAATETELKEMKLRIEDALNATRAAVEEGIVAGGGTALINVIEKVAALDLTDDAATGRNLVLRALEEPVRQIAKNAGYEGSVIIDKLKNSSAGTGFNAANGEWVDMIDAGIIDPVKVTRSALQNAASVASLILTTEAVVADHPAPEAPAAAPAMDPS

SEQ ID NO: 5123 - protein, 532 aa, Arabidopsis lyrata subsp. petraea
KTTLVELGRTLALEECALWMPTRTGLELQLSYTLRHQHPVEYTVPIQLPVINQVFGTSRAVKISPNSPVARLRPVSGKYMLGEVVAVRVPLLHLSNFQINDWPGLSTKRYALMVLMLPSDSARQWHVHELELVEVVADQVAVALSHAAILEESMRARNLLMEQNVALDLARREAETAIRARNDFLAVMNHEMRTPMHAIIALSSLLQETELTPEQRLMVETILKSSNLLATLMNDVLDLSRLEDGSLQLELGTFNLHTLFREVLNLIKPIAVVKKLPITLNLAPDLPEFVVGDEKRLMQIILNIVGNAVKFSKQGSISVTALVTKSDTRDADFFVVPTGSHFYLRVKVKDSGAGINPQDIPKLFTKFAQTQSLATRSSGGSGLGLAISKRFVNLMEGNIWIESDGLGKGCTAIFDVKLGISERSNESKQSGIPKVPAIPRHSSFTGLKVLVMDENGVSRMVTKGLLVHLGCEVTTVSSNEECLRVVSHEHKVVFMDVCLPGVENYQIALCIHEKFTKQRHQRPLLVALTGNT

SEQ ID NO: 5124 - protein, 593 aa, Schizosaccharomyces pombe
MVKRHKNTIGVWRLGKTLGTGSTSCVRLAKHAKTGDLAAIKIIPIRYASIGMEILMMRLLRHPNILRLYDVWTDHQHMYLALEYVPDGELFHYIRKHGPLSEREAAHYLSQILDAVAHCHRFRFRHRDLKLENILIKVNEQQIKIADFGMATVEPNDSCLENYCGSLHYLAPEIVSHKPYRGAPADVWSCGVILYSLLSNKLPFGGQNTDVIYNKIRHGAYDLPSSISSAAQDLLHRMLDVNPSTRITIPEVFSHPFLMGCTSLSSMDSTTPPTPSLSIDEIDPLVVDCMCVLWKKSSSKKVVRRLQQRDDNDEKYVYKVLSEILRDDMLKKQRFDENKYLSLYDLIHDNNLFTKASISTTSLVKSNVSTNSRKSSNFEDELARRVSSPLSALNQMSQSPIPIRVSSDKDYDSYACHEVVSNPSTLDDDYNYMFVCPPEEYTYSTDNVRTDSLDLQSLPTPTLEQLESVPFNRYGYVRIFPSTTLSSTASGYYTPDSLSTPEPSIDGLTNLDDVQVGGFVQGSGNQNRRPISFPVISNMQPNITNVRSASAPLCSSPVPSRRYSQYATNARYTPRKVSSGSVLRKISSFFRKD

SEQ ID NO: 5125 - protein, 322 aa, Zea mays
  misc_feature (14)..(14): Xaa can be any naturally occurring amino acid
  misc_feature (90)..(90): Xaa can be any naturally occurring amino acid
  misc_feature (112)..(112): Xaa can be any naturally occurring amino acid
  misc_feature (117)..(117): Xaa can be any naturally occurring amino acid
  misc_feature (132)..(132): Xaa can be any naturally occurring amino acid
  misc_feature (146)..(146): Xaa can be any naturally occurring amino acid
  misc_feature (167)..(167): Xaa can be any naturally occurring amino acid
  misc_feature (210)..(210): Xaa can be any naturally occurring amino acid
  misc_feature (215)..(215): Xaa can be any naturally occurring amino acid
  misc_feature (248)..(248): Xaa can be any naturally occurring amino acid
  misc_feature (271)..(274): Xaa can be any naturally occurring amino acid
  misc_feature (283)..(283): Xaa can be any naturally occurring amino acid
  misc_feature (304)..(304): Xaa can be any naturally occurring amino acid
  misc_feature (319)..(319): Xaa can be any naturally occurring amino acid
SRDTLLDADLESDXLGWQYISGSLPDGRELDRIDNPQFEGYKFDPHGEYVRRWLPELARLPTEWIHHPWDAPESVLQAAGVELGSNYPRXIVELDAANSRLQDALSEMWELXAASRXAAMENGMEEGLGDSXSDEPPIDFPQELRXEVDRQPVQPAIHAPGVTGRRXEDQMVPSMTSSFIRAETELTADFGHTSEDSRPEVPSNIHHLQXRPERXETVDGGTGNAVRVHGNHHQQNLQNNMHRVLGIXPSISEASSSWTGRDGGVVPVWSXXXXASGHSDSYXADEADISSRGYLDRHPQSHTXMNWSQLSQSLTTGWXVDN

SEQ ID NO: 5126 - protein, 201 aa, Clostridium thermocellum ATCC 27405
MVIKCLPIGLFASNCYIVGQNGEGVVIDPGCSPQMIVDAAKENNLEIKYIIITHGHIDHLMSVDEVRKKTGAEVLIHEKDADKLTDPNLNDPVGVGLGRKCKAADRLLKDGEVITVGGLDFEIIHTPGHSAGGICIKVGDVVFTGDTLFCMGIGRTDFPDGDLSTLLDSIKNKLMKLDDNVVVYPGHGEPTTIGRERKEFS

SEQ ID NO: 5127 - protein, 504 aa, Neisseria gonorrhoeae FA 1090
MTTSKCPVTHLTMNNGAPVADNQNSLTAGPRGPLLTQDLWLNEKLADFVREVIPERRMHAKGSGAFGTFTVTHDITKYTRAKIFSEVGKKTEMFARFTTVAGERGAADAERDIRGFALKFYTEEGNWDVVGNNTPVFFLRDPRKFPDLNKAVKRDPRTNMRSATNNWDFWTLLPEALHQVTIVMSDRGIPASYRHMHGFGSHTYSFWNEAGERFWVKFHFRSQQGIKNLTNEEAAKIIADDRESHQRDLYEAIERGEFPKWTMYIQVMPEADAEKVPYHPFDLTKVWPKKDYPLIEVGEFELNRNPENFFADVEQSAFAPSNLVPGIGASPDKMLQARLFNYADAQRYRLGVNFRQIPVNRPRCPVHSNQRDGQGRADGNYGSLPHYEPNSFGQWQQQPDFAEPPLKINGDAAHWDYRQDDDDYFSQPRALFNLMNDAQKQALFDNTAAAMGDAPDFIKYRHIRNCYRCDPAYGEGVAKALGLTVEDAQAVRATDPALGQAGLL

SEQ ID NO: 5128 - protein, 532 aa, Arabidopsis lyrata subsp. petraea
KTTLVELGRTLALEECALWMPTRTGLELQLSYTLRHQHPVEYTVPIQLPVINQVFGTSRAVKISPNSPVARLRPVSGKYMLGEVVAVRVPLLHLSNFQINDWPELSTKRYALMVLMLPSDSARQWHVHELELVEVVADQVAVALSHAAILEESMRARNLLMEQNVALDLARREAETAIRARNDFLAVMNHEMRTPMHAIIALSSLLQETELTPEQRLMVETILKSSNLLATLMNDVLDLSRLEDGSLQLELGTFNLHTLFREVLNLIKPIAVVKKLPITLNLAPDLPEFVVGDEKRLMQIILNIVGNAVKFSKQGSISVTALVTKSDTRAADFFVVPTGSHFYLRVKVKDSGAGINPQDIPKLFTKFAQTQSLATRSSGGSGLGLAISKRFVNLMEGNIWIESDGLGKGCTAIFDVKLGISECSNESKQSGIPKVPAIPRHSNFTGLKVLVMDENGVSRMVTKGLLVHLGCEVTTVSSNEECLRVVSHEHKVVFMDVYLPGVENYQIALCIHEKFTKQRHQRPLLVALTGNT

SEQ ID NO: 5129 - protein, 1234 aa, Magnaporthe grisea 70-15
MTVDHWESIVQIRRSPIVAEHPAGRNPIRSFAWLLRVFMVIVVIAVSLVCLPYDGHSSPSREGYHANLQQPSSNVATQRSSRRPSSHDHQNQHQPQEHSPPIASQSNSPMSSRAAIASPVAVAPAGAPEYYQPTSSDRRRHHAPIAPPRTSSSHQTSAPVNGAQTSRRPVSASHQPQNSSSRRAPDHHGSSADQQTDQSSSSRRRDRHHAPATGDYPPQRQGSTRDPRTATTTTMPIRTNTGGSATASSSKQPSREASEILNSMLVSQPEVDIEREKERLALAQPTSSAHDASEVASPPVVPTQRSRQDHSSKREKHTKFGEYILGNTIGEGEFGKVKLGWKSEGGVQVAIKLIKKDALGSNPNRMQKIMREVSILKQLTHPNIVRLHKMEESERHFGIILEYASGGELFDYILNNRYLKDNAARRLFAQLVSGVGYLHKKGIVHRDLKLENLLLDRNRNIIITDFGFANTFDPALELTEEEEAGLSNREFVKRLGLDKIGANGSRKGDLMQTSCGSPCYAAPELVVSDSLYTGRKVDVWSCGVILYAMLAGYLPFDDDPANPEGDNINLLYKYIVSTPLTFPEYVTPHAKDLLRRILVPDPRRRADLFEVARHSWLSEYAHVVEFITSSTTTHTEIQNTTVPAEDSENPNLARSASVREASRRTPVSPTIGGLASKQGGIDQETEYAARQQKDNKRRTVQVEYVAPTTQTQRGEPAQQQATSGKTRARSGSEGPVEVDPRLSSDKPLPRDPPVSKESYSKPSVRGDPRKPPSSHRNQPSISRPPQSGRVPSDSYVTTMAPGSRPGTSGSMNTAGARPVAGASRSSYGQPLPPTVAGTNVHGRIQQPTDQQSEFGRPSAGGVPSKFAHVPGVAGHDQPDSREGSAKGHRRSNTLGEITGKMFGRSGSIFGNKNRKSSKVDQPQTPTEAKNRDSRKYPPVSMSAAPNPNGEYEPRKSVDSKRSRRSFSFGLGPRKKSGSIHNGSQTSVDKQNKRFSFIPGSISLKAIGIGKETPPGSTQGGGNDSQVDLGYQQEHLREPYRPDSQQQHQRQQSHYVDQRVNEQDLEAAGMDGMYAQLHSPSAPTFSTQQPHQQQQQQHYPAHYTSGQYGDRQMATAVPGYMQSGAHLQTSESESSVNMLSPEQQQFQAHGLRSVSVDHHQKLMEAQGGLGPAGRTGSSVGADGRQARVLQKNKRFVDAYDTDHSGGADHAGSSGAARRVMDFFRRRGKARGGDDR

SEQ ID NO: 5130 - protein, 641 aa, Bordetella pertussis Tohama I
MCGIVGIWGPLRDKANVLAESCRRIRHRGPDSNGYWEDAEADLALAHVRLAILDLTEAGHQPMVSACGRYVIVLNGEIYNHMELRERLQQDGLAPAWRGHSDTETVLACFAGWGIEQTLQAAVGMFAIVLWDRAERKLALMRDRMGEKPLYYGYSQANLLFGSELKAFMPVPGFGRELDRNALASFMRHNYIPAPQSIYAGIRKLPPGAWVEIDAAQMRRGELPEPQVYWSARRAADQGLGDRRRFESDAQAIDALEQVVSQAVRGQMLSDVSLGAFLSGGIDSSTVVALMQAQSAQPVRTFAIGFHEKGYNEAEHAKAVAAHLGTEHTELYVTAEDGLAVVPSLADMYDEPFADSSQIPTSLVTRMARQHVTVALSGDGGDELFGGYSRYFRVDNWWRKCAAMPGPLRHLAGAALRGSAALPGAGAWRGKVGKLGELLGADTRGEFYRLFVSYWADPGRVVIGGTEPLSPFEQPMEGSTFDAMMKLDTVTYLPDDILVKVDRAAMAVSLETRVPLIDHRVYEFAWQLPFEYKVRGGTGKWLLRQLLYRHVPQAMVDRPKRGFAVPLAAWLRGPLRDWAEALLDPARLRQEGWFEPEPILRKWREHLSGHRNWDSHLWGVLMMQAWLDRYRAGAGDEAGRR

SEQ ID NO: 5131 - protein, 274 aa, Listeria innocua Clip11262
MNLKDTVKLANGVEMPRLGFGVWKVQDGDEAVNSVKWAIEAGYISIDTAAAYKNEEGVGQAIKESGVKREDLFVTTKLWNAEQGYESTLAAFDESLRKLELDYVDLYLIHWPVEGKFKDTWRAFEKLYKDKRVRAIGVCNFHEHHLKELMEDAEIAPMVNQIELHPQLTQEPLRKFCAENNIVVEAWSPLGNGKLLANPEIKAIADAHGKSVAQVILRWDLQIGVVTIPKSVHQERIIQNADIFDFELSDEEVAKISGLNKDERTGPDPDNFNF

SEQ ID NO: 5132 - protein, 623 aa, Ustilago maydis 521
MTRNILIALLRNDLRLHDHPILHVCSEPTPSTANFTQPITHVLPVYVFDQRHVEVSGFPRLEKARKDGGGKGSGEYAKTRELGLWRTGIHRIKFINESVFDLRDRLRRLGSDLAMFAGTPESVIASLIHQIRAHGDTVEAVYLSREINTEEVNIQKRLQRMLSDVQCRMHMFETKSLIHSRDLGFPVSKLPDVFTHFRKQVERNRIWRAPLASPDRLKPFAEVPVEDAAGVYSLSANKQHGLDRKNAVEKCLLQPLLDNPVLAHNELLARVMCKRGQVDVAHSAFPYRGGETEALARLDHYFDRSDSCPAASYKQTRNQMLGTDYSTKFGAALALGLLSPRLIAQKATELDNATHDATHNASNKGGGYWIIFELLWRDYFYFVGWKFGSKLFSLRGIEDDISARSAPSKASEWKSSASLSDRDDGFVRWCTAQTGVPLIDANMVEMVQTGFMSNRGRQNVASFLTKDLGWNWRHGAEFFESWLVDYEPNSNWGNWQYVAGVGNDPRSSRQFNPIKQGNDYDANGEYVATWLPLLSDMPPQYRHHPWTCPDAAWAEQAHSAHYPPTPIVEQQMWRKHYSNPEGAPPAHHKPDHVATGRRSANANANRRGARRRSRSTRASTQQS

SEQ ID NO: 5133 - protein, 350 aa, Photobacterium profundum SS9
MTANLFQTYALNKTLSLKNRILMAPLTRCMADDELIPTQDMADYYGRRGEAGLIISEAVIIRPDGQGYPNTPGLFTPAQIDGWRTVTNAVHQNGGKIFAQLWHTGRVAHPHFYQTTGSQDVMAPSAVGVEGSVPRKRELTYQIPKAVSVEEIALLVSDYSQAAANAIDAGFDGVEIHGANGYLIDQFLHHDSNRRSDQYGLTPENMSRFALEVVDAIVARIGNDRTALRVSPGAYFNMAGDSRDRDVFDYLIPELEKRDLAFLHIGIFDDAMEFDYLGGRASSYVRSIYSKTLVGVGSFTAETGSKAIADDKFDLLAIGRPFIANPDYVERVRDGKDLVEYSDEMLTSLI

SEQ ID NO: 5134 - protein, 581 aa, Glycine max
MCGILAVLGCSDDSRAKRVRVLELSRRLKHRGPDWSGLHQHGDCFLAHQRLAIVDPASGDQPLFNEDKSVIVTVNGEIYNHEELRKQLPNHNFRTGSDCDVIAHLYEEHGEDFVDMLDGIFSFVLLDTRDNSFIVARDAIGVTSLYIGWGLDGSVWISSEMKGLNDDCEHFECFPPGHLYSSKERGFRRWYNPPWFSEAIPSAPYDPLVLRHAFEQAVIKRLMTDVPFGVLLSGGLDSSLVASITSRYLANTKAAEQWGSKLHSFCVGLEGSPDLKAAKEVADYLGTVHHEFTFTVQDGIDSIEDVIYHIETYDVTTIRASTPMFLMSRKIKSLGVKWVISGEGSDEIFGGYLYFHKAPNKEEFHRETCRKIKALHQYDCLRANKSTFAWGLEARVPFLDKAFINAAMSIDPEWKMIKRDEGRIEKWILRRAFDDEEHPYLPKHILYRQKEQFSDGVGYSWIDALKAHPPKHVTEKMMLNAGNIYPHNTPKTKEAYYYRMIFERFFPQNSARLTVPGGASAACSTAKAVEWDAAWSNNLDPSGRAALGVHISAYENQNNKGVEIEKIIPMDAAPLGVAIQG

SEQ ID NO: 5135 - protein, 140 aa, Brassica napus
STPASETKQLLQKEATEDAQFRSQFGTRWTRPQSSTLTKNLQDRLNRFAANLKQAGESDVKIERSVRENSALMSILDRRPIEAAVPTLARPMMSLDATEDTILGNLKQILRQLENLGAQQAGLENMLKEMKRKDDILPKL

SEQ ID NO: 5136 - protein, 482 aa, Hordeum vulgare subsp. vulgare
MAATVAVDNLNPKVLKCEYAVRGEIVIHAQRLQEQLKTQPGSLPFDEILYCNIGNPQSLGQQPVTFFREVLALCDHPDLLQREEIKTLFSADSISRAKQILAMIPGRATGAYSHSQGIKGLRDAIASGIASRDGFPANADDIFLTDGASPGVHLMMQLLIRNEKDGILVPIPQYPLYSASIALHGGALVPYYLNESTGWGLETSDVKKQLEDARSRGINVRALVVINPGNPTGQVLAEENQYDIVKFCKNEGLVLLADEVYQENIYVDNKKFHSFKKIVRSLGYGEEDLPLVSYQSVSKGYYGECGKRGGYFEITGFSAPVREQIYKIASVNLCSNITGQILASLVMNPPKASDESYASYKAEKDGILASLARRAKALEHAFNKLEGITCNEAEGAMYVFPQICLPQKAIEAAKAANKAPDAFYALRLLESTGIVVVPGSGFGQVPGTWHFRCTILPQEDKIPAVISRFTVFHEAFMSEYRD

SEQ ID NO: 5137 - protein, 533 aa, Zea mays
GIDSRRSDGCATLRVPLCSSRPAGVPKPHRLNCFAFDCGRRRRTKNQKMTPCALTVDSLNPKVLALADHLGDNAIARRAQCIQNEIEAEPGSHPFREIIDCSLSNPQSMGQRPNKFFREVLALCDYPHLLEQSGTNSLFSSGAIARAREILDLFPGRATGGYSHSQGTEGLRDIIAAGIAARDNFPCNADDIFLTDGAAPPVHMMMHLLIRDQKDGILCPVPSHSLYTSAMLLQGATLVPYFLDESRGWGVSMSDLKKQLDSARSMGVFVRGLVVINPGNPTGHVLVEENQREIVDFCRNEDLVLLADEVYQENIYADEKGFHSFKKIARSMGYGEGDISLVSFHSVSNGYYGECGRRGGYMEVTGFNSDVKKQVYKVVSLSSCSNISGQILMSLVMNPPQVGDESYASYHAERHGVLSSFARCAEAMVRSFNGLEGVTCSEAEGAVFVFPSVRLPKKAVAAAEASNTQPDAFYALRLLETTGIVVVPGSVFGQMHGTWHFRCTVLPHEEKKMTVIISSFVAFHRAFMEEFRD

SEQ ID NO: 5138 - protein, 315 aa, Digitalis purpurea
MAEEIRFFKLNTGAKIPSVGLGTWQSSPGDAAQAVEVAIKCGYRHIDGARLYENEKEIGVVLKKLFDDGVVKREDLFITSKLWSTDHAPEDVPVALDKTLEDLQLDYIDLYLIHWPVRLKKGSVGLDPENFIPTDIPGTWKAMEALYDSGKARAIGVSNFTLKKLSDLLDVARIPPAVNQVGCHPSCAQTKLRAFCKSKGVHLSGYSPLGSPGTPWVKHDVLENPILVDVAEKLGKTPAQVAIRWGLQMGHSVLPKSVHESRIKENIDVFSWCIPDDLFAKFSEIEQVSPGKPEFPVHPEISQYKTVEEMWDGGI

SEQ ID NO: 5139 - protein, 315 aa, Digitalis purpurea
MAEEIRFFELNTGAKIPSVGLGTWQSSPGDAAQAVEVAIKCGYRHIDGARLYENEKEIGVVLKKLFDDGVVKREDLFITSKLWSTDHAPEDVPVALDKTLEDLQLDYIDLYLIHWPVRLKKGSVGLDPENFVPTDIPGTWKAMEALYDSGKARAIGVSNFTLKKLSDLLDVARIPPAVNQVGCHPSCAQTKLRAFCKSKGIHLSGYSPLGSPGTPWVKHDVLENPILVDVAEKLGKTPAQVALRWGLQMGHSVLPKSVHESRIKENIDVFSWCIPDVLFAKFSEIEQVSPGKPEFPVHPEISQYKTVEEMWDGGI

SEQ ID NO: 5140 - protein, 383 aa, Acinetobacter sp. ADP1
MTIEYSKLFESFALTPDIELRNRIIMAPMTTWSANPDGTVSEQELNYIRQRVNCVGLVITGCTHVQENGIGFTNEFAAFDDRFIASLKELAQAAKSGGAPAILQIFHAGNKAIPDLIPNADLVSASALIKTPTGSFVDSQMMTRALSHEEILEVIHAFGETTRRAIEAGFDGIELHGAHGFLIQNFFSPLFNQREDEWGGSLEKRMRFSLEIVKEVKSVIKQYAKKPFALGYRISVEEYDENGLRIGDSLQLIDRLIDSGIDYLHVSLTDILNSKPVDSTDEKLTIQRVIDHVNYRISLISAGKIRTPHQALQALALGLPLVAIGKALVINPDWVILVANHQADQISTELELEKDAELHIPDHLWDEIKIRKGWFPMRQIEQV

SEQ ID NO: 5141 - protein, 368 aa, Erwinia carotovora subsp. atroseptica SCRI1043
MSDDILFSPFTVKGLTLPNRIVMAPMTRSMAEEGIPGPANAEYYRRRAEGGVGLILTEGTVVDRPASRNMPGIPFFHGEAALAGWDAVAKAVHAAGGRIGPQIWHTGSTHGRGWEPDAPVESPSGLVGPDEPRGVVMTEEDIADTVAAFARAAADAKRLGFDTLELHGAHGYLIDQFFWPGTNKRSDAFGGATIRERSHFAAEVIRAVRAAVGEDFPLILRVSQWKQQDYSARLATSPQEMTDWLAPLVEAGVDILHCSQRRFWDPEFPEVDGAEGLNFAGWAKKLTGAATISVGSVGLTSDFFAAFGGEGSGTAALDNLYARMEREEFDLIAVGRVLLSDAQWVQKVRTGQTDKLRGFDAADLAVLA

SEQ ID NO: 5142 - protein, 199 aa, Oryza sativa
MGRGKIVIRRIDNSTSRQVTFSKRRNGLLKKAKELSILCDAEVGLVVFSSTGRLYEFSSTNWACCKPRMGQRGQIAADANSIWQREAASLRQQLHNLQESHKQLMGEELSGLGVRDLQGLENRLEISLRNIRMRKGSLIHQENIELSRSLNVMSQQKLELYNKLQACEQRGATDANESSSTPYSFRIIQNANMPPSLEL

SEQ ID NO: 5143 - protein, 634 aa, Carica papaya
MESCDCIDTPCPGEELLVKYQYISDVLIALAYFSIPLELIYFVQKSAFFPYRWVLMQFGAFIVLCGATHFINLWTFSMHSKAVAVVMTIAKVACAAVSCVTALMLVHIIPDLLSVKTRELFLKNKAEELDREMGLILTQEETGRHVRMLTHEIRSTIDRHTILKTTLVELGRTLGLEECALWMPSRSGLNMQLSHTLNYHIQVGSTLPTNLPIVNEVFNNARAMRIPYTCPLARIRPLVGRYVPPEVVAVRVPLLHLSNFQINDWPDHSAKSYAIMVLILPTDSARKWRDHELELVEVVADQVAVALSHAAILEESMRARDQLMEQNVALNLARQEAEMAIHARNDFLAVMNHEMRTPMHAIIALSSLLLETELTPEQRVMIETVLKSSNLLATLINDVLDLSRLEDGSLKLDSETFNLQGIFREVINLIKPITSVKKLSMTLIMAPDLPACAVGDEKRLMQAILNVVGNAVKFTKEGYVTIVASVAKPDASRDWPECYPVSSEGHFHLCVQVKDSGCGIHPQDIPHLFTKFAQPRSGSSRKNGSAGLGLAICKRFVNLMGGHIWIESEGADKGCTATFIVKLGICNSPTDPSERKVGTKGQTTHGSGDLTRHKPLYRDNNGSTSSNPRYQRSF

SEQ ID NO: 5144 - protein, 383 aa, Nicotiana tabacum
EEKDADPKKQTDSDRWKGLVQDFSDDQQDITRGKGMVDSLFQAPTGTGTHHAVLQSYEYVSQGLRQYNLDNKLDGFYIAPAFMDKLVVHITKNFLKLPNIKVPLILGIWGGKGQGKSFQCELVFRKMGINPIMMSAGELESGNAGEPAKLIRQRYREAAEIIRKGNMCCLFINDLDAGAGRMGGTTQYTVNNQMVNATLMNIADNPTNVQLPGMYNKQENARVPIIVTGNDFSTLYAPLIRDGRMEKFYWAPTREDRIGVCTGIFRTDNVPAEDVVKIVDNFPGQSIDFFGALRARVYDDEVRKWVSGTGIEKIGDKLLNSFDGPPTFEQPKMTIEKLLEYGNMLVQEQENVKRVQLADKYLKEAALGDANADAINNGSFFAS

SEQ ID NO: 5145 - protein, 141 aa, Triticum aestivum
  misc_feature (55)..(55): Xaa can be any naturally occurring amino acid
PDLPDELIFHINYLGADQPTFTLNFSKGSSQVIAQYYQLIRLGFEGYRNIMDNCXRENAMVLKEGLERPGWFNIASQDQRVPLARLPLRDSSATRTTARSRSVMRPRRSGAGPSGTTMTTPNGSDAGRRASGQTGTAPAPR

SEQ ID NO: 5146 - protein, 440 aa, Arabidopsis thaliana
  misc_feature (132)..(132): Xaa can be any naturally occurring amino acid
MNRPKVQRRVGKYEVGKTLGQGTFAKVRCAVNTETGERVALKILDKEKVLKHKMAEQIRREICTMKLINHPNVVRLYEVLASKTKIYIVLEFGTGGELFDKIVHDGRLKEENARKYFQQLINAVDYCHSRGXVYHRDLKPENLLLDAQGNLKVSDFGLSALSRQVRGDGLLHTACGTPNYAAPEVLNDQGYDGATADLWSCGVILFVLLAGYLPFEDSNLMTLYKKIIAGEYHCPPWLSPGAKNLIVRILDPNPMTRITIPEVLGDAWFKKNYKPAVFEEKEEANLDDVDAVFKDSEEHHVTEKKEEQPTSMNAFELISMSRALDLGNLFEEEEGFKRETRFAAKGAANDLVQKIEEASKPLGFDIQKKNYKMRLENVTAGRKGNLRVATEIFQVSPSLHMIEVRKTKGDTLEFHKFYKKLSTSLNDVVWKSGESSGLSK

SEQ ID NO: 5147 - protein, 363 aa, Rhodopirellula baltica SH 1
MGHEFQFTLVLTMSTSEAPAPPESAKRDKLVCDESNDYGSGAVPTEAMAVGETGIDPQRLPRPEETQPLRIMWQYVIVLSLVHLVALAAFVPAWFSYLFTWSGLIAGIAGHFIFGMFGITIGYHRLLTHRGFKCPKWMEHTLAILGMCNLQDSPARWVAIHRMHHQHSDHQPDPHSPLVNFLWGHMGWVVCRHKDLDKTSHYERYVRDLLRDRFYLKLERKDGWFFVFLIHGIIISLIGGAVGYAVSGGDWAVAYRYLLSWTVWAVAIRTVFVLHGTWSVNSLSHVFGYRNYDTRDHSTNNWLVALISHGEGWHNNHHATPRSARHGHKWYEFDMSWGIIRVWEMMGLITDVQRPTKASVAGK

SEQ ID NO: 5148 - protein, 216 aa, Arabis pumila
MSSFSAFSEMFGSDYESMISSVGDYSPTLATSCPKKPAGRKKFRETRHPVYRGVRQRNSGKWVSELREPNKKTRIWLGTFQTAEMAARAHDVAAIALRGRSACLNFADSVWRLRIPESACAKDIQKAAAEAALAFQNELMSDTATTDHGLDMEETLVEAIVTAEQIDTFYIDEETMFGMPSLMANMAEGMLLPLPSIQWINNYDVEGDADMPLWSY

SEQ ID NO: 5149 - protein, 192 aa, Arabidopsis thaliana
MEEKKTESTNKNVKKANLLDHHSIKHILDESVSDIVTSRGYKEDVRLSNLKLILGTIIIVVALVAQFYNKKFPENRDFLIGCIALYVVLNAVLQLILYTKEKNAILFTYPPEGSFTSTGLVVSSKLPRFSDQYTLTIDSADPKSISAGKSVQLTKSVTQWFTKDGVLVEGLFWKDVEALIKNYAEEEPKKKK

SEQ ID NO: 5150 - protein, 135 aa, Haemophilus ducreyi 35000HP
MRILHTMLRVGNLERSIKFYTEVLGMRLLRTSENEQYKYSLAFLGYADESENAVLELTYNWGVDHYDLGNAFGHIALGIDNIYTTVEAVRLAGGKITREPGPVLGGKTVIAFAEDPDGYKIEFIENKNAQVALGN

SEQ ID NO: 5151 - protein, 454 aa, Malus sylvestris
FNSHGEDSSYFLGWQEYEKNPYHEVLNTNGIIQMGLAENQLCFDLLESWLAKNPEAAAFKKNGESIFAELALFQDYHGLPAFKKAMVDFMAKIRGNKVTFDPNHLVLTAGATSANETFIFCLADPGEAVLIPTPYYPGFDRDLKWRTGVEIVPIHCTSSNGFQITETALEEAYQEAEKRNLRVKGVLVTNPSNPLGTTMTRNELYLLLSFVEDKGIHLISDEIYSGTAFSSPSFISVMEVLKDRNCDENSEVWQRVHVVYSLSKDLGLPGFRVGAIYSNDDMVVAAATKMSSFGLVSSQTQHLLSAMLSDKKLTKNYIAENHKRLKQRQKKLVSGLQKSGISCLNGNAGLFCWVDMRHLLRSNTFEAEMELWKKIVYEVHLNISPGSSCHCTEPGWFRVCFANLPERTLDLAMQRLKAFVGEYYNVPEVNGGKQPFKPLKKTVAHKVGFPAILR

SEQ ID NO: 5152 - protein, 327 aa, Idiomarina loihiensis L2TR
MKRLLPTLRADQTSESLISVINTIQIAAKEISFRLHQGALAGVLGSTLDENIQGETQKKLDVVANQLLKTLLLESPNVHAVASEEEDSIVESPNSGHYLVAFDPLDGSSNIDINGGVGTIFSILRKPEGEETSENMFLQPGKAQVAAGYVLYGPATMLVMTTGKAVRIYTLDQTVGEFLLTHEKAEIPKDTKEFAINMSNRRHWADPIRAYISDLLEGEEGPRGKNFNMRWNAAMVSDVHRVISRGGLFTYPWDARKPEKPFKLRLLYEAAPMAMLVEKAGGKATDGYSRLMEIVPEHIHQRVSVVMGSANEVDVCMDYHKQHPKPY

SEQ ID NO: 5153 - protein, 183 aa, Eucalyptus grandis
MGRGRVELKRIENKINRQVTFAKRRNGLLKKAYELSVLCDAEVGLIIFSNRGKLYEFCSSSSMLKTLERYQKCNYGALEPNVSARESLELSCQQEYLRLKARYEGLQRTQRNLLGEELGQLCSKELESLERQLDGSLKQIRSRRTQYMLDQVTDLQHREQVVHEANRTLNQRLMEGYQVMRSS

SEQ ID NO: 5154 - protein, 245 aa, Eucalyptus grandis
  misc_feature (151)..(151): Xaa can be any naturally occurring amino acid
MGRGKVELKRIENKINRQVTFAKRRNGLLKKAYELSVLCDAEVALIIFSNRGKLYEFCSSSSMMKTIEKYQKCSYGSLETNCSINEMQNSYQDYLKLKARVEVLQRSQRNPPWEELGPLNSKELEQLEHQLENSLKQIRSAKTQFMFDQLXHLQHKEQMLVEANRELWKKLEESNTRIPLRLGWEAEDHNNISYSRLPTQSQGLIFQPLGGNPTLQIGYNPAGSNELNVSAADQHPNGFIPGWML

SEQ ID NO: 5155 - protein, 549 aa, Ralstonia solanacearum
MFIHFYVPNVRPRLMRTSLKNISLIAIGLVTGVLATLQLSATAQNATVGPLPLEKLRLMADIFGQIKREYVEPVDDDKLLTEAIKGMVASLDPHSAYLDKKDFQELQEGTQGRFAGLGIEISQEEGLVKVINPIEDTPAFRAGVQPGDLITRIDDKPVRGMPLEQAVKRMRGAPGTKVTLTIYRKKEERTFPLTITRAEIQVQSVKAKLLGDGIAWVRITSFQERTVPDLAKKLNDLAHQDARLKGVILDLRNNGGGVLQAAVGVSAAFLPPDVTVVSTNGQVPDAKRVYKTSFANYRLSNFDTDPLVSLDPEFKTVPIVVLTNAYTASASEIVAGALQDHHRAKVMGKTTFGKGSVQTVRPLSNDTGIKLTIAYYYTPSGKSIQAKGIRPDVPVDQSPEGDPDDALITREIDTERHLHNKQESEEPEMTDREKRRVEELRRLEEETAKKTPEQREKERNKKPIEFGSTDDFMLQQAVAELKGQPVKRSKSVLEAAAAVPDKATKSPAAKESSAPAKLPKGKAAPASEPAAPSGPASGVIPAPEPTGAR

SEQ ID NO: 5156 - protein, 751 aa, Cryptococcus neoformans var. neoformans JEC21
MGPNTRPAPQAPTHYSRHRPQSITGNNAPQSRTKPRIGQYIVERTLGTGSFGKVKLATHAVTGHQVALKLINRSKITTPDMNARVKREIQYLKVLRHPHIIKLYEVITTPTDVIMVMEYAGEELFNYIVQKGKHGMTEDEARRFFQQMIGAIEYCHKHHIVHRDLKPENLFLDSRRNIKIGDFGLSNLMTDGDFLKTSCGSPNYAAPEVISGKLYSGPEIDVWSAGVIMFVLLCGKLPFDDEHIPTLFKKIENGVFHIPSHVSEPARHLLKRMLEVDPLKRCTIAEIRQMPFFQENLPRYLQPLPELADMERYPSLTMDDMTTLLLINEGQADPKKVAEDKGLVFSEDLGVIDPDIVEELLEKITTYSEGMVWEALKMPGDNQVKVAYQLVRDHRRILKDSNAYEDEDSSAMEEFMASSPPAWNADIAPPIDVQQNGADEYPDLEDVDLEIQDIPNAHFDVLDSSLPGWMTPPSSSTSAMSTPTTTHPTSAQNSANPSFSSVTSDTTASGSTAEEAARALLSPAPSSASQSVTSFSSPTPQPQPQRRLDKSMTKPKWHFGIRSRSPPMEVMLEIYRTLNVLGMQWRLKDIPLPDIGGAPPGGYSEEVELVLEDLKEKNGERPVMGRKPPSKKDAMAQEKLAQGLYHVETRARYGDVMVRMDLQLYRVDDQHYLVDFRNLGYYMVSEKDMSLPDVSRQGHSHEEGASNAGGSVPSATSATAAGAKEAGIGGVSGPFHFLEMACQLIAELASG

SEQ ID NO: 5157 - protein, 192 aa, Larix decidua
DEHREVVAEMRRPDLEPYLGLHYPATDIPQASRFLFMKNRVRMICDCCAPPVKVIQDKRLRQPLSLCGSTLRAPHGCRGQYMVNMGSIASLVMSVTTNENGDDSEDIGQRQPQKGRRLWGLVVCHHTSPRVIPFPLRYACEFLMQVFGIHLNKEVELAAQLREKHILRVQTVLCDMLLRDAPVGIVSQTPNI

SEQ ID NO: 5158 - protein, 155 aa, Manihot esculenta
LEEYKFDGFRFDGVTSMLYHHHGINMAFTGDYNEYFSEATDIDAVVYLMLANSLIHNILPDATVIAEDETGMPGLGRSVSEGGIGFDYRLAMAIPDKWIDYLKNKSDEEWSMKEISWSLTNRRYTEKCVAYAESHDQAIVGDKTVAFLLMDKEMY

SEQ ID NO: 5159 - protein, 85 aa, Manihot esculenta
KVIVFERGDLVFVFNFHPENTYDGYKVGCDLPGKYRVALDSDAWEFGGRGRVGHDVDHFTSPEGIPGVPETNFNNRPNSFKILSA

SEQ ID NO: 5160 - protein, 191 aa, Larix decidua
DDHGEVISEIRRSDLEPYLGLHYPATGIPQASRFLFMRNGVRMICDCCAPPITVIQDKRLPRDLSFCGSTLRAPHGCHAQYMANMGSIASLVMAVVISEKEEDADSDGQIQQKGRRLWGLVVCHHTSPRYVPFPLRYACEFLMQVFGIHLNKEVELAVQMSEKRILRTQTLLCDMLLRDAPLGIVSQKPNI

SEQ ID NO: 5161 - protein, 210 aa, Haemophilus somnus 129PT
MNIEIVPVTAFQQNCSIIWDNNKNAAIIDPGGEATKLIKRIEELCLNLELILLTHGHIDHVGAALKLKQYFNVEIWGSNEKDDFLFNSLPQQSEQFGLLFETEVFKPDRWLNQEYEIVRIGEMNFEVLHLPGHTPGHVGFIEYSKKIAFTGDVLFQNSIGRTDFPRGNHAELIQSIRDKLWKLDDDMIIIAGHGNYTTIGKEKKYNPYIR

SEQ ID NO: 5162 - protein, 467 aa, Listeria monocytogenes str. 4b F2365
MLYSEDDKRKQESYRIPLFGSEEESTSIPKYVLKKEPMEPRIAYQLVKDQLMDEGNARQNLATFCQTYMEKEAEILMAETLEKNAIDKSEYPQTAELENRCVNILADLWNAPKDMSYLGTSTVGSSEACMLGGLAMKFRWRNHAEKRGLDIQAKRPNLIISSGYQVCWEKFCVYWDVDMRVVPMDKEHLSIDVDKVFDLVDEYTIGIVGILGITYTGKFDDIQLLDEKVEAYNEANEHQLVIHVDGASGAMFTPFVNPELPWDFRLKNVVSINTSGHKYGLVYPGVGWILWKDKEYLPKELIFEVSYLGGSMPTMAINFSRSASQIIGQYYNFLRYGFEGYREIHEKTKKTALYLAKSVEKSGYFEIINDGANLPIVCYKMKEGLDVEWTLYDLADQLLMKGWQVPAYPLPADLSDTIIQRFVCRADLGYNVAEEFAVDFADALHNLEHARVLYHDKERNDSYGFTH

SEQ ID NO: 5163 - protein, 370 aa, Shewanella sp. ANA-3
MTQLFSPFRLKDITLKNRIAVAPMCQYQAHDGLSNDWHQVHYTSLARGGAGLVVVEATAVSPEGRITPRCLGLWNEEQAAGLANIASAIKGAGAVAGIQIAHAGRKASANIPWEGDDHIEGDEGWQTLSPSAVAFGANLGKVPTAMTIDDIQRVKADFVAAAKRALEAGFEWLELHFAHGYLAQSFFSTYANQRTDEYGGDAQGRGRFLIETVEAVRAVWPEHLPLTARFGVIEFDDKDEQTLSESIALVKQFKRAGLDMLNVSICFSTPTANIPWRPAFLAPIAERVRREVGFPVATSWGMDNPHHAEQAIQDQQMDLVMIGKAFLANPHWPYQAAQTLKVSRPSWVLPSSYAHWLERYSTVKAESSID

SEQ ID NO: 5164 - protein, 244 aa, Zantedeschia hybrid cultivar
GIEPIIMSAGELESENAGEPGRLIRERYRTASQVVQNQGKMSCLTINDIDAGLGRFGNTQVTVNNQIAVGTLMNLSDNPTRVSIGQKWRESDVTHRIPVIVTGNDFSTLYAPLIRDGRMEKFYWQPTHEDIINIVQRMYEKDGISRDAVESIVDSFPNQALDFYGALRSRTYDKSTLKWIDEIGGYENLSDKLLRERKEGKLPTFVPPKQTLEALLESGHSLIEEQELIMNTKLSKEYMKNMDD

SEQ ID NO: 5165 - protein, 192 aa, Macrozamia communis
DDHGEVVAEIRRSDLEPYLGLHYPATDIPQACKFLFMKNRVRMICDCCPAPVRVVQDKKLARDLTLCGSTLRAPHGCHSQYMSNMGSIASLVMAVIINEKEEEEGDNGDQQQLKGRRLWGLVVCHHASPRFVPFPLGYACEFLMQVFGIQLNKEVELAAQLREKHILRTQTLLCDMLLRDAPIGIVTQSPSI

SEQ ID NO: 5166 - protein, 446 aa, Triticum aestivum
  misc_feature (180)..(180): Xaa can be any naturally occurring amino acid
MAAAAGRGGGPRRTTRVGPYELGKTVGEGSFAKVKIAKDTRNAATCAIKVLDRNHVLRHKMVEQIKREIATMKLIRHPNVVQLHEVMASKSKIYMVLEFVEGGELFDKIVNSGKLGEDEARRYFHQLINAVDYCHSRGVYHRDLKPENLLLDSYGALKVSDFGLSAFSPQTKEDGLLHTXCGTPNYVAPEVLADKGYDGMAADVWSCGIILFVLMAGYLPFDDPNLMTLYKLISRANVSCPPWFSTGARNLIKRILDPNPHTRITIAQILEDEWFKKDYKPPHSEHNEDVSLEDVDAAFDSSEEHLVAERREKPESMNAFALISRSEGFNLGNLFEKEMMGMVKRETSFASQRTPQEIMSKIEEACGPLGFNVRKQNYKMKLKGDKTGRKGHLSVATEVFEVAPTLHMVELRKTGGDTLEFHSFYKNFSSELKDIVWKTESNTIAK

SEQ ID NO: 5167 - protein, 675 aa, Haemophilus somnus 129PT
MKLPQQLRYLLCLLFGFVLSLNYAVAVEPKLKLTDLVIPQITQENQLATKRTAARLVHSHYQAVELNDEFSQRIFDRYLKALDFNRNTFLQSDIDNMRAMYADKIDDVLNEGNLDIAFDMYELLMKRRYERYRYALSLLDEEPDLNGNDQIEIDREKADWPKNETEANKLWEHRVKNDVINLKLKGKKWSEIQTRLVKRYNLAIQHLSKVKSDDIVQLYLNAFAREIDPHTSYLAPRKAKNFNENMNLSLEGIGATLQSEDGETTIKSLVPGAPADRSKKLKAGDKIIGVGQATGEIEDVVGWRIDDVVDKIKGKKGTKVRLEIEPAKGGKSQIITLVRDRVRLEDQAAKLTVETVAGNKIAVIKIPGFYNGLTEDVRKLLVEVEAKKAEALIIDLRGNGGGSLPEAIELTGLFITDGPVVQVRDAHQRIRIYDDPDTEQVYSGPLLVMIDRFSASASEIFSAAMQDYNRAIILGQNTFGKGTVQQSRSLNFVYDSNSMAPLGLLQYTIQKFYRINGGSTQLKGVAPDIIFPSSIDDEEYGEEKEDNALPWDKIPSASYSEVGNARLPVDILNQKHLERIAKDPEFIALDEDLKIRDERKERKFLSLNFAQRKAENDKDDEKRLKDLNARFKREGKKPLKDLDALPKDYEDPDFYLKEAQKIAVDLIEFNKKMAE

SEQ ID NO: 5168 - protein, 474 aa, Rubrivivax gelatinosus PM1
MAGWIVVGAVAGALTTMQLTATARNPSAALPLEELQQLAAVFGMVKSDYVEPVDEKKLITDAIGGMVAGLDPHSQYFDKKTFKEFREGTSGRFVGVGIEIGMEDGLVKVVSPIEGSPAFRAGVKSGDLITKIDDSFVKGLTMDQAVKKMRGEPNTKVVLTVFRKAESRSFPVTITREEIRVQSVRAKMIEPGYAWLRVSQFQDRTVEDFATKLADLYKQDPNLKGLVLDLRNDPGGLLEASVAISAAFLPKDVTVVSTNGQIAESKAVFKANPEFYSRRGSDPLKKLPEGLKSVPLIVLVNEGSASASEIVAGALQDHKRATVMGSQTFGKGSVQTVRQLSPDTALKITTARYYTPSGRSIQATGIVPDVWLDETAEGNVFAAIRTREADLEKHISSGQGPEVKDPAREKAREEALKKLEEANGKDKDKAPKPLPEFGSAEDFPLQQALNRLKGKTVLASKTQTERKPEDTKTN

SEQ ID NO: 5169 - protein, 552 aa, Anabaena variabilis ATCC 29413
MAKPIEFTLFAPYNKGAALIASFSDWQEIPMQKGDDGYFRATIELEDGTYQYKFRVQTRSWFFEEDQWVDVTDPYATDIDESSGKDNGIIKIKDGEKIVDTYVWQHDDKPLPADHELVIYELHVGDFSGGEDDLYARGKYKHVIEKLDYLCELGINAIELLPVKEYPGDYSWGYNPRYFFATESSYGSTADLKKLVDECHQRGIRIIMDGIYNHSEASSPLTQIDHDYWYHHEPRDPDNNWGPEFNYEHYDENLETYPARKFIGDTVRYWVGEYHLDGIRYDAARQIANYDFMHWIAQEAKKTAGAKPFYNVAEHIPETTSITNLDGPMDGCWHDSFYHTIKAHICGDTFDLESLKDVIDPKRQGFLGATNVVNYLTNHDHDHIMVELGNREIFHDEAFRRAKLGTAILMTAVGVPLIWMGEEFGEYKPKQQDQSKIDWTLLGNDLNRSLFDYYRGLIGLRKNNHALYTENIDFIHENPEAKVLAYSRWNDEGSRVVVVTNFSEDFLAGYHVPNFPSGGTWHEWTGDYDVEAGDDGIITDIGPYEAKVFVWQ

SEQ ID NO: 5170 - protein, 541 aa, Nocardioides sp. JS614
MPKILEFDEHARRALERGVDALANAVKVTLGPKGRYVVLDKKWGAPTITNDGVTVAREVELDDPFENLGAQLTKEVATKTNDIAGDGTTTATVLAQAMVHEGLRAVTAGANPMGLKRGMDAAAEAVGDALKEAAREVESREDMASVATISSRDSVIGDLLAEAFDKVGKDGVITVEESNTMGTELEFTEGMQFDKGYISQYFVTDPERMEAVLEDPYILLHQGKISAVAELLPLLEKVIQSGKPLFILAEDVEGEALSTLVVNKIRGTFNAVAVKSPAFGDRRKAMMQDIATLTGGQVVAPEVGLKLDQVGLEVLGQARRVVVTKDDTTIVDGAGDPKDVEGRVNQIKAEVENTDSDWDREKLQERLAKLAGGVCVIKVGAATEVELKEKKHRIEDAVSATRAAIEEGIVAGGGSALVHAVSVLSDDLGLTGDEALGVRVVRKAADEPLRWIAENGGVNGYVVTTKVRELGLGNGFNAATEEYGDLVAQGVLDPVKVTRSALVNATSIAGMLLTTETLVVDKPEEEEPAAAGHGHGHGHGH

SEQ ID NO: 5171 - protein, 512 aa, Aspergillus nidulans FGSC A4
MGQSHSKGNSGAGDSLQSYPSFSKSDTKESLRSFRGSIRSKIRSSDSPRASTSALNQSDDKSDAGSMKSVGSRRSSTNLSRPASADSSAASPTDAPDPPPSPTMSSSLKRGHQDVAAMKQSGEVDHVSDAPPSAAPPPGSQAKVGESILIKREDTSNPILDFIMKTPLHSDASSSSPGMGMGALKSIDLDDMITRLLDAGYSTKVTKTVCLKNAEITAICTAARELFLSQPALLELSAPVKIVGDVHGQYTDLIRLFEMCGFPPVSNYLFLGDYVDRGKQSLETILLLLCYKLKFPENFFLLRGNHECANVTRVYGFYDECKRRCNIKIWKTFVDTFNCLPIAATVAGKIFCVHGGLSPSLSHMDDIRNIARPTDVPDYGLLNDLLWSDPADMDEDWEPNERGVSYCFNKNVIMNFLQRHDFDLVCRAHMVVEDGYEFYQDRILVTVFSAPNYCGEFDNWGAVMSVSGELLCSFELLKPLDSAALKSHIKKGRKERNSLINSPPAVVSAQSF

SEQ ID NO: 5172 - protein, 304 aa, Zea mays
LRKWLQDHPRFVMNPLYIAGDSYSGLIIPTLALEIDRSIELGEKIFSGLKGYIAGNPLTGGQFDTDSQIPYFHAMGLVSDELYKNARENCGGKYSAPLNAVCAEAVQAINNCTRDINKQYILDPACPDDDLLSPKTVAETDGTSRLMLESADFLLDSKCAEALYILSYAWGNDDTVQESLGIRKGTIGAWKRYSHALPYNYDIQSAVDYHSRLATKGYRALIYSGDHDAVVPHVGTQAWIRYLNLTIVDDWRPWYVGDQVAGFTRSYASGLTFATVKGAGHVAPLYKTLECQKMFITWISGNPL

SEQ ID NO: 5173 - protein, 468 aa, Streptococcus pyogenes MGAS10394
MTKTLPKDFIFGGATAAYQAEGATHTDGKGPVAWDKYLEDNYWYTAEPASDFYNRYPVDLKLSEEFGVNGIRISIAWSRIFPTGKGEVNPKGVEYYHNLFAECHKRHVEPFVTLHHFDTPEALHSNGDFLNRENIEHFVNYAELCFKEFSEVNYWTTFNEIGPIGDGQYLVGKFPPGIQYDLAKVFQSHHNMMVSHARAVKLFKDSGYSGEIGVVHALPTKYPFDANNPDDVRAAELEDIIHNKFILDATYLGKYSDKTMEGVNHILEVNGGELDLREEDFVALDAAKDLNDFLGINYYMSDWMQAFDGETEIIHNGKGEKGSSKYQIKGVGRRKAPVDVPKTDWDWIIFPQGLYDQIMRVKADYPNYKKIYITENGLGYKDEFVDNTVYDDGRIDYVKKHLEVISDAISDGTNVKGYFMWSLMDVFSWSNGYEKRYGLFYVDFETQERYPKKSAYWYKKVAETQVIE

SEQ ID NO: 5174 - protein, 462 aa, Arabidopsis thaliana
MSEEQPHANLAVPAFKTEKEPITQTRNGQSSVWRFGGSDKAAKASTVTLRGVIYMLFDNCGKDVNKTILPLGHGDPSVYPCFRTCIEAEDAVVDVLRSGKGNSYGPGAGILPARRAVADYMNRDLPHKLTPEDIFLTAGCNQGIEIVFESLARPNANILLPRPGFPHYDARAAYSGLEVRKFDLLPEKEWEIDLEGIEAIADENTVAMVVINPNNPCGNVYSHDHLKKVAETARKLGIMVISDEVYDRTIFGDNPFVSMGKFASIVPVLTLAGISKGWVVPGWKIGWIALNDPEGVFETTKVLQSIKQNLDVTPDPATIIQAALPAILEKADKNFFAKKNKILKHNVDLVCDRLKDIPCVVCPKKPESCTYLLTKLELSLMDNIKDDIDFCVKLAREENLVFLPGDALGLKNWMRITIGVEAHMLEDALERLKGFCTRHAKKTETETESLQALKLSDNNLEM

SEQ ID NO: 5175 - protein, 681 aa, Burkholderia fungorum LB400
MPYPHLLAELDLGFTRLRNRVVMGSMHTGMEDRFWNYPKLAAYFRERAKGGVGLIVTGGISPNRQGWLLPFGGTLNSVFDLRNHRQLTESVHAEGSKIALQILHAGRYGYQPFVVSASALKSPISKFKPRALSIAGIAKTVRDYARCARLAQRAGYDGVEIMGSEGYLLNQFLCPRTNRRTDAYGGSIENRMRLAREIVERVRAECGERFIVMYRISLIDLVEGGNTWDETVQVARALEAAGVTMFNTGIGWHEARVPTIVTSVPRAAFAALSARLRAAVKVPVIVSNRINTPDVAEELLAQGAGDLVSMARPLLADPEFVVKTAEGRTHEINTCIACNQACLDHTFRNQRATCLVNPRAGRETELIYRPVAGPQAARSVAVVGAGPAGLSAATVAASRGHRVTLFDASATIGGQFNLAMRVPGKEEFSETIRYFQSQLQRHRVDVRLDTRVDPALLAAGAYDDVIVATGIVPRRPAIAGIDGANVLSYVDVLRGAPVGQRVAVIGAGGIGFDVSEFLLHRAGDPLPMPRDAWLDEWGVDLAVQERGGLKPPAPAQPPRQIWLLQRKAGKLGMGLGKTSGWVHRATLARNGVKMLGGVSYLEISARGLKIAREDVEEWLEVDTIVVCAGQESLRDLHSQPEAGQAHRAGGPRYHLIGGAKVATELDAKRAIREGAEVAAAL

SEQ ID NO: 5176 - protein, 384 aa, Vigna unguiculata
MVTATATAAATAPSHQAIPLLTPYKMGKFNLSHRVVLAPLSRERSYNNVPQPHAVVYYSQRTSNGGLLIAEATGVSDTAQGYPNTPGIWTKEQVEAWKPIVDAVHAKGGIFFCQIWHVGRVSDSSYQPNGQAPISSTDKPLPPTPRANGLGYIEHTPPRRLTTEELPGIVNDFRIAARNAIEAGFDGVEVHGAHGYLLDQFLKDQANDRTDQYGGSLENRCRLPLEVVEAVVNEVGADRVGIRLSPFADFNDCGDSNPLQLGLYMVNALNKYNILYCHMVEPRMGSVGGPDENLTPMRKVFNGTFIVAGGYDREDGIKAIAEDRADLVAYGRLFLANPDLPKRFALNAPLNQYNRKTFYHEDPDPLVGYIDYPFLDEESNGVAS

SEQ ID NO: 5177 - protein, 283 aa, Oenococcus oeni PSU-1
MVLSRSVPNIVLNDGHSLPAIGLGTYLVRGGQGVDQILSAIEDGYRLIDTSTNYDSEGAVGEAIRRSGIPRSEFIVTSKLPGKYHHYQDALMMIQESIFRMGIDYLDLYLIHWPLPKRDHYVKAWKALVDAQKLGLIRSIGVSNFLPEHLDRIINESGVTPAVNQIEVHPYWVQEDMLAANKSRGIVSEAWSPLGRGSAALKEDIIKNLADKYGKNTGQIILRWHTQRGIIPLPKSSSLIHQRSNIDIFDFSLTSSEIEQINALNRSDGRVDGQDPNTYEEFD

SEQ ID NO: 5178 - protein, 774 aa, Synechococcus elongatus PCC 6301
MTGTTPLPSSSLSVEQVNRIASNQEQNPFDILGPHPYEHEGQAGWVIRAYLPEAQEAAVICPALRREFAMHPVHHPHFFETWVPEETLEIYQLRITEGERERIIYDPYAFRSPLLTDYDIHLFAEGNHHRIYEKLGAHPCELENVAGVNFAVWAPSARNVSILGDFNSWDGRKHQMARRSNGIWELFIPELTVGAAYKYEIKNYDGHIYEKSDPYGFQQEVRPKTASIVADLDRYTWGDADWLERRRHQEPLRQPISVYEVHLGSWMHASSDAIATDAQGKPLPPVPVADLKPGARFLTYRELADRLIPYVLDLGYSHIELLPIAEHPFDGSWGYQVTGYYAATSRYGSPEDFMYFVDRCHQNGIGVILDWVPGHFPKDGHGLAFFDGTHLYEHADSRQGEHREWGTLVFNYGRHEVRNFLAANALFWFDKYHIDGIRVDAVASMLYLDYNRKEGEWIPNEYGGRENIEAADFLRQVNHLIFSYFPGALSIAEESTSWPMVSWPTYVGGLGFNLKWNMGWMHDMLDYFSMDPWFRQFHQNNVTFSIWYAFSENFMLALSHDEVVHGKSNLIGKMPGDEWQKFANLRCLLGYMFTHPGKKTLFMGMEFGQWAEWNVWGDLEWHLLQYEPHQGLKQFVKDLNHLYRNAPALYSEDCNQAGFEWIDCSDNRHSIVSFIRRAHESDRFLVVVCNFTPQPHAHYRIGVPVAGFYREIFNSDARSYGGSNMGNLGGKWTDEWSCHNRPYSLDLCLPPLTTLVLELASGPESLSEAANSPL

SEQ ID NO: 5179 - protein, 149 aa, Nostoc punctiforme PCC 73102
MLFRYNSAQDFNTLESYINGLLGDTRVPSTQFEKGSVKVPAAELQETDDAIYLKLELPGLEAKDLDIQVTEDAVHISGERKSETQIQNNGTTKSEFYYGKFQRVIPLSARVQNTNVTADYKNGILNLTLPKSEREKNKVVKVNLEQTTA

SEQ ID NO: 5180 - protein, 187 aa, Macrozamia communis
DEHGEVVAEIRRSDLEPYLGLHYPATDIPQASRFLFMQNRVRMICDCRATPVRVIQAAELRQPLCLVGSTLRAPHGCHAQYMANMGSIASLVMAVVINGNDEAGGSGRSSMKLWGLVVCHHTSPRAVPFPLRYACEFLMQAFGLQLNMELQLAAQLTEKHILKTQTLLCDMLLRDAPIGIVTQSPSI

SEQ ID NO: 5181 - protein, 189 aa, Macrozamia communis
DDHGEVVAEIRRSDLEPYLGLHYPATDIPQASRFLFMRNRVRMICDCSSPPVKVVQDKRCPKPLSLCGSTLRAPHGCHAQYMANMASIASLVMAVTINDDDDDIGSSGQQKGRRLWGLMVCHHTSPRFVPFPLRYACQFLMQVFGIQLNREVELAAQLREKHILRTQTVLCDMLLRDAPDGIVAQTPNI

SEQ ID NO: 5182 - protein, 472 aa, Escherichia coli CFT073
MTTHLVWFRQDLRQHDNLALAAACRNSSARVLALYIATPRQWAAHNVSPRQAELINTQLNALQIALAEKGIPLLFREVDDFAASVEIVKQVCAEYRVTHLFYNYQYEVNERARDVQAERTLRNVVCEGFDDSVILPPGAVMTGNHEMYKVFTPFKNAWLKRLREGMPECVAAPKVRSSGSIEPAPSITLNYPRQSFDTAHFPVEEKAAIAQLRQFCLNGAGEYEQQRDFPAVEGTSRLSASLATGGLSPRQCLHRLLAEQPQVLEGGPGSVWLNELIWREFYRHLMTYYPSLCKHRPFIAWTDRVQWQSNPAHLKAWQEGKTGYPIVDAAMRQLNSTGWMHNRLRMITASFLVKDLLIDWREGERYFMSQLIDGDLAANNGGWQWAASTGTDAAPYFRIFNPTTQGEKFDREGEFIRQWLPELRDVPGKAVHEPWKWAEKTGVTLDYPQPIVDHKEARLRTLAAYEEARKGA

SEQ ID NO: 5183 - protein, 550 aa, Rickettsia prowazekii
MTTKLIKHVQKAREQMLEGIDILADAVKVTLGPKGRNVLIEQSFGAPKITKDGVTVAKSIELKDKIKNAGAQLLKSAATKAAEVAGDGTTTATVLARALAREGNKLVAAGYNPMDLKRGMDLAVNAVVEEIKRSSKKINSQEEIAQVGTISSNGDKEIGEKIAKAMEEVGKEGVITVEEAKNFSFDVEVVKGMMFDRGYLSPYFVTNSEKMVAELENPFILLFEKKLSNLQPMLPILEAVVQSQRPLLIIAEDVEGEALATLVVNRLRGGLKVAAVKAPGFGDRRKAMMEDIAILTKGELITEDLGMKLENVNIKNLGTAKRVTISKENTVIVDGNGDKKNIEDRVLQIKSQIAETTSDYDKEKLQERLAKLSGGVAVLKVGGATEVEVKERKDRVEDALAATRAAVEEGVVAGGGVTLLHASQTLTKLKVQNKDQQAGIEIVIEALKDPLKQIVKNAGENGGVVVGKLLEHNDKNYGFNAQDMQYVDMIKAGIIDPAKVVRTALQDAASVASLIITTETLIVDEPSDKEEPMPMRGGMGGMGGMGGMDF

SEQ ID NO: 5184 - protein, 154 aa, Zea mays
  misc_feature (9)..(9): Xaa can be any naturally occurring amino acid
  misc_feature (132)..(132): Xaa can be any naturally occurring amino acid
RVCALTRPXARAADHPPSAFLLLLLLLGCASLAIGGADMARHVLLGVKENLPAANSGEGGGLCRFSGGEHNRHENALMEVLRLGEAKEQVEGCTLHHLTLEAVEAGRKKLYKAKGWVKPWLDFKELQEFRHXGGATVFTNDRLGAKQGGHDPAW

SEQ ID NO: 5185 - protein, 775 aa, Photorhabdus luminescens subsp. laumondii TTO1
MTKYSLRIRMMSLILVPILLVGMFFSISFLCYHYRELENQIVRSGISIIEPLSIASEIGINLHNRESVNSLITRLHRRNSEIVRAIAIFNDDNQLFDISNYKYNSAQLQISPDMPLPTTLTKTEVKNSIILRMPIISEHHLSQNQPHSDTPSLRPIGYIAIDLDLRSAHLQQYKEIVIFILLLLICLGWASLFAYHLVRKITKPISDIVSTVDRIRQGQLNSRVSGKYFGELDMLKNGINAMAKSLSSYKEEMQNDIDQATSDLRETMEQFEIQNVELAIAKKRAQDAARIKTEFLANMSHELRTPLNGVIGFTRQTLKTPLTIQQTEYLYIIERSANHLLNIINDILDFSRLEADKLVLENVPFLLQDTIDEVMVLLTLSAKSKNIQLTHHVDPQIPNLVVGDPTRLQQIFTNIIGNAIKFTDQGSVEIKINLLQQKHHKINLEITVSDTGIGISPEQQPHLFQAFHQANASISRHYGGTGLGLVITRKLIQEMGGNISFTSEPKKGSVFRFDLWLGKDDFILTGSVVPQKTLIHPPRLPMTVMAVDDNPANLKLIGSLLDEIVEKTVLCNSGEEALQSAASHHFDLILMDIHMPGMDGICTSNHIHQLPQHYSTPIIAVTAYTCRPKSDTHSPFEDFLTKPLDEHRLRVVLDRYVKTPKSQHINWPLALQQATGKEPLAIDMLQMLVDLLPTIKTITEKVLSGETVENYQQQIHKLHGSCCYSGVPQLKALCQLIEQQLQQGVQLTDIEPELLELTDEIDHVLTAAQKILSRG

SEQ ID NO: 5186 - protein, 407 aa, Candida albicans
MTIESTNSFVVPSDTKLIDVTPLGSTKLFQPIKVGNNVLPQRIAYVPTTRFRASKDHIPSDLQLNYYNARSQYPGTLIITEATFASERGGIDLHVPGIYNDAQAKSWKKINEAIHGNGSFSSVQLWYLGRVANAKDLKDSGLPLIAPSAVYWDENSEKLAKEAGNELRALTEEEIDHIVEVEYPNAAKHALEAGFDYVEIHGAHGYLLDQFLNLASNKRTDKYGCGSIENRARLLLRVVDKLIEVVGANRLALRLSPWASFQGMEIEGEEIHSYILQQLQQRADNGQQLAYISLVEPRVTGIYDVSLKDQQGRSNEFAYKIWKGNFIRAGNYTYDAPEFKTLINDLKNDRSIIGFSRFFTSNPDLVEKLKLGKPLNYYNREEFYKYYNYGYNSYDESEKQVIGKPLA

SEQ ID NO: 5187 - protein, 148 aa, Candida glabrata CBS138
MCCCTFPDFLLMLLAFIFPPAAVVIRSGIASSDLVLNMLLTMCGFVPGCIHAIYYISMTSPLRNDDYSTRYQQGWIDSERLVSSNSDTRPVPLATHDPTPQVESSQGETPQATNDEVSRGYDVQTPLLNDPGYIVDNKKGGMPPPYSP

SEQ ID NO: 5188 - protein, 496 aa, Zea mays
ITMDPTKFRPSSSHDTTVTTTNAGAPVWNDNEALTVGPRGPILLEDYHLIEKVAHFARERIPERVVHARGASAKGFFECTHDVTSLTCADFLRAPGVRTPVIVRFSTVIHERGSPETIRDPRGFAVKFYTREGNWDLLGNNFPVFFIRDGIKFPDVIHAFKPNPRSHVQEYWRVFDFLSHLPESLHTFFFLFDDVGVPSDYRHMEGFGVNTYTFVSAAGKAQYVKFHWKPTCGVRCILTDEEAALVGGRNHSHATQDLYDSIAAGSFPEWTLYVQVMDPDTEEQYDFDPLDDTKTWPEDLLPLRPVGRLVLDRNVDNFFNENEQLAFGPGLVVPGIYYSDDKMLQCRVFAYADTQRYRLGPNYLMLPVNAPRCAHHNNHYDGAMNFMHRDEEVDYYPSRHAPLRQAAPPTPLPPRPVAGRREKATIRKPNDFKQPGERYRSWDADRQDRFVRRFADSLGHPKVSQELRSIWIDLLAKCDASLGMKIATRLNMKPNM

SEQ ID NO: 5189 - protein, 548 aa, Idiomarina loihiensis L2TR
MAAKEVKFGNTARQKMLKGVNILADSVKVTLGPKGRNVVLDKSYGSPVITKDGVSVAKEIELEDKFENMGAQMVKEVASKANDEAGDGTTTATVLAQAIVNEGLKSVAAGMNPMDLKRGIDKAVIAAVEELKKISQPCADSKAIAQVATISANADHTIGEIIAQAMDKVGQEGVITVEEGQALTDELDVVEGMQFDRGYLSPYFINNQESGSVELDNPFILLIDKKISNIRELLPVLEGVSKAGKPLLIIAEDVEGEALATLVVNNMRGIVKVAAVKAPGFGDRRKAMLQDIAVLTGGTVVSEEIGMELEKTQLEDLGTAKRVVITKDNTTVVDGNGDDTAIDGRVNQIKQQMEDTTSDYDREKLQERLAKLAGGVAVIKVGAATEMEMKEKKARVEDALHATRAAVEEGVVPGGGVALVRAASKLAELRGDNEEQNVGIRLALRAMEAPLRQIAMNAGAEGSVVANNVRAGEGNYGYNAGNDTYGDMLEMGILDPTKVTRSALQFAASVGALMITTEAMIADIPQDDNAGGMPGGDMGGMGGMGGMM

SEQ ID NO: 5190 - protein, 290 aa, Streptomyces violaceoruber
MHVPSTAPPPATAAPLFGPFTVGSLALENRIVMAPMTRELSPGGVPGPEVAAYYARRARNGVGLIITEGAAIGHPSSERRAAVPRIHGADALAGWTRVTQAVHAAGGRIAAQLMHVGLDPLLWGMTPAEMDAASPAGFELLSPSGVDPSQPAAATVGREMSDVDISSVIDAYARAAAEARQAGFDAIELHAAHGYLIDQFFWAVTNRRKDRYGGDLSARTRFGADVVRACRHAVGEDFPIFLRFSQWKVGHYAARLADSPDELAAVLGPLVQAGVDAFHCSTRRFWQPEF

SEQ ID NO: 5191 - protein, 282 aa, Oryza sativa
GEFEDVKLLNNLLTEKNKETGWDVPIHVDAASGGFIAPFLYPELEWDFRLPLVKSINVSGHKYGLVYPGVGWVIWRSKEDLPEELIFHINYLGTDQPTFTLNFSKGSSQIIAQYYQLIRLGFEGYKNIMQNCMETPAILREGIEATGRFEILSKEAGVPLVAFSLKASGRYTVFDISEHLRRFGWIVPAYTMPANAEHVAILRVVIREDFSRSLAERLVSDIVKILHELDAHSAQVLKISSAIAKQQSGDDGAVTKKSVLETEREIFAYWRDQVKKKQTGIC

SEQ ID NO: 5192 - protein, 301 aa, Ralstonia solanacearum
MIEESVMLRQHNLRLRKYDYVLGRLFVALPIGGLVVAVLLLFADWRVGRFELAMCLAMYLFTMMGIEVGFHRCFAHRAFKAGTGLQWVLAVAGSMGGHGPLIWWVTTHRRHHRFVDTDQDPHTPNKDLRGPWRNFKSFLYGYVGWTMDTDVKLQEGWQRYGVDLYKNSILFKVHARFALIALLGLLLPTVAGALFHRTAEGALLGLLWGGLVPICLTQHLFWMINAFGHRIGAKPFSGRIVGDSRNCWWLALPTFGQGWHNNHHADPGCATTRKTWWQLDPGAWLIRLFERLGWASAVKWK

SEQ ID NO: 5193 - protein, 379 aa, Photobacterium profundum SS9
MSTTKPPLLWLNVFIFSFSLAVAAIGTPLYAYFIGFDWTQVAMLVVAFSYCGLSITAGYHRLWSHKTYEANAVMRFIFAIGGAFALQNSILHWSSDHRVHHRHVDNNDKDPYSAKMGFFYSHIGWMLREYQASRYTDYSNCRDLQKDKIVMWQDKYYGILAIVTNFGFPLIFGVVHGDIWGALLLVGVVRLVLSHHTTFFINSLAHVWGSQPYSDKNTARDNGILAYLTFGEGYHNYHHIFENDYRNGIRWWQFDPTKWLIKSCSYFGFTRKLRVSPEDRIEKARAKMQLVRLQAKLTATSNANNCDVQARIRLLEEEYELLMSKISDYYAAKKRMVELKKKHLTKHYENFEFMQQYNDMKLHLQEQRKSWKMLTAQYA

SEQ ID NO: 5194 - protein, 467 aa, Listeria monocytogenes str. 4b H7858
MTSVMWFRRDLRVNDNKALYHACKEDDLLLLFQVNPAQFITGSPSHQAFFASVAHFKQEIDKTAHLQIMFGEPIECFQQLKDSLPSWDKVYFNRDETGYGAKRDEAAQAFFDEQKIEVQAFHDSYLHSAEEVKKSPTEYYKIFTPYYKKWREEIKETPFKVTLKHENIRKESLFLKYEEQFAEMTSDLPILDIGERAANTRLANFIKHDVADYDKARDFPELDKTSHLSRYLRTGEISIRTIWQTLQETEATEGRATFEKELCWRDFYNMIYVSFPNQKNEPIQENYRFIEWENNREYFKAWQEGKTGFPLVDAAMRQLKETGWMHNRLRMITASFLTKDLLIDWRFGEKYFQQMLIDYDPASNIGGWQWAASTGTDAVPYFRIFNPTTQSQKFDSTGKFIRKYVKELANLPDKYIHQPEKMSETEQKEHGLLLGKDYPFPIVDHKERRKLAIARYEFSKEHSRGNI

SEQ ID NO: 5195 - protein, 155 aa, Arabidopsis thaliana
MSLIPSFFGNNRRINNNIFDPFSLDVWDPFKELQFPSSSSSAIANARVDWKETAEAHVFKADLPGMKKEEVKVEIEDDSVLKISGERHVEKEEKQDTWHRVERSSGGFSRKFRLPENVKMDQVKASMENGVLTVTVPKVETNKKKAQVKSIDISG

SEQ ID NO: 5196 - protein, 466 aa, Oryza sativa (japonica cultivar-group)
MGEFCGEERLRSRSKSCYAVDRPAEIAPRVQNPIFSVWPVEDLEADPQGRASTPTNFLGKKLKKQVTSAVNYHGKSSNINRFKVMAKELDEGKQTDQDRWKGLAYDISDDQQDITRGKGFVDSLFQAPTGDGTHEAVLSSYEYLSQGLRTYDFDNTMGGFYIAPAFMDKLVVHISKNFMTLPNIKVPLILGIWGGKGQGKSFQCELVFAKMGINPIMMSAGELESGNAGEPAKLIRQRYREAADIIKKGKMCCLFINDLDAGAGRMGGTTQYTVNNQMVNATLMNIADNPTNVQLPGMYNKEDNPRVPIIVTGNDFSTLYAPLIRDGRMEKFYWAPTRDDRVGVCKGIFRTDNVPDEDIVKIVDSFPGQSIDFFGALRARVYDDEVRKWVSDTGVENIGKRLVNSREGPPEFEQPKMTIEKLMEYGYMLVKEQENVKRVQLAEQYLSEAALGDANSDAMKTGSFYG

SEQ ID NO: 5197 - protein, 272 aa, Lactococcus lactis subsp. lactis Il1403
MKLNNQIEIPELGLGVFQIPNDETADVVKNAIVNGYRLIDTAKIYENEEGTGQGIKEGLAMTGLSRDDLFITSKLWGDNHSYEETVQNFEKSLKKLDLDYLDLYLIHWPGTHYAYKEAWNAMEDLYKAGKIKAIGVSNFQKSHLEELLSYAKITPVLNQIELHPKLSQEELRNFLELHDIKVQAWSPLMQGQLLDNEVLKKIADKHGKSVAQIILRWDIQQDILVNVKSIKSERMIANRQIFDFSLDSEDMKAINSLNEELRVGPDPEHFNF

SEQ ID NO: 5198 - protein, 710 aa, Rhodobacter sphaeroides 2.4.1
MAEDKPAARSGSFENLVSDYGAGGEFHQHAGEGDERLTTAQGVTIADNQNSLRSGAPGPTALEDFILREKIFHFDHERIPERVVHARGFGAHGLFECTKAIPEITRAAPFQKEGKITETFVRFSTVAGSKGSVDLARDVRGFAVKFYTDEGNWDLVGNNIPVFFIQDAIKFPDLIHSVKPEPDRGFPQAQSAHDNFWDFISLTPESMHMVMWQMSDRAIPRSFRFMEGFGVHTFRFINAEGQSSFVKFHWKPKLGMQSVLWDEALKINGADPDRHRRDLWEAITAGDFPEWELGLQIFDEEFANRFDFDVLDPTKIIPEELVPLTIVGTLTLDRVVDNFFAETEQVAFCTQNVVPGIDFTDDPLLQGRNFSYLDTQLKRLGSPNFTKLPINAPRGCPVHNFQQDGHMQTSNRKGRVNYEPNGWGKGPRAHPLEGYVSYAVRNEGEKRRLRPESFADHYSQARQFFLSQTPVEQGHIRDALVFELSKCQEIEIRARIVAHLLNIDGALAQAVADGLGLTEMPEPAPAARPTRTDLPPSDALSMLKNPPPNFAGRTVGVLAGNGVEAELLTELRSILQAEGAMMKLVAPRVGGVTDSAGTLHPADEKLGGGPSVIFDAVAVLPGSDAAMLAANPAAQDFLTDAHAHCKFIAHHGAGPLIEACALGAKMDEGWIEIGSSSDIDGFVAACRGMRHWPREATLGGNPPLARTFSP

SEQ ID NO: 5199 - protein, 545 aa, Enterobacter aerogenes
MAAKDVKFGNDARVKMLRGVNVLADAVKVTLGPKGRNVVLDKSFGAPTITKDGVSVAREIELEDKFENMGAQMVKEVASKANDAAGDGTTTATVLAQAIVNEGLKAVAAGMNPMDLKRGIDKAVVAAVEELKALSVPCSDSKAIAQVGTISANSDETVGKLIAEAMDKVGKEGVITVEDGTGLQDELDVVEGMQFDRGYLSPYFINKPETGAVELESPFILLADKKISNIREMLPVLEAVAKAGKPLLIIAEDVEGEALATLVVNTMRGIVKVAAVKAPGFGDRRKAMLQDIATLTGGTVISEEIGMELEKATLEDLGQAKRVVINKDTTTIIDGVGDEAAIQGRVTQIRQQIEEATSDYDREKLQERVAKLAGGVAVIKVGAATEVEMKEKKARVEDALHATRAAVEEGVVAGGGVALIRVASKIAGLKGQNEDQNVGIKVALRAMEAPLRQIVLNCGEEPSVVANTVKAGDGNYGYNAATEEYGNMIDMGILDPTKVTRSALQYAASVAGLMITTECMVTDLPKSDAPDLGAAGGMGGMGGMM

SEQ ID NO: 5200 - protein, 550 aa, Wolbachia endosymbiont strain TRS of Brugia malayi
MTNVVVSGEQLQEAFREVAVMVDSTVAITAGPRGKTVGINKPYGAPEITKDGYKVMKGIKPEKPLHAAITSIFAQSCFQCNDKVGDGTTTCSILTSNMIMEALKSIAAGNDRVSIKNGMQKAKDAVLEGITSMSRTIPLEKMDEVAQVAIISANGDKDIGNSIADAVKKVGKEGVITVEESKGSKELEVELTTGMQFDRGYLSPYFITSNEKMIVEFDDPYLLITEKKLSIIQPLLPILEAVVKSGKPLLIIAEDIEGEALSTLVINKLRGGLKVTAVKAPGFGDRRKEMLEDIAALTGAKYVIKDELGIKMEDLTLEDLGTAKNVKVTKDNTTIVSGSSDSDRVKARVEQIKSQIETSTSDYDKEKLRERLAKLSGGVAVLKVGGVTEVEVKERRDRVEDALHATRAAIEEGIVPGGGVALLYASSALDKLKGGSDEEQIGINIIKKVLSAPIKRLVKNAGLESAVIIDHLTKQNDKELIYNVEAMNYANAFTAGVIDPAKVVRIAFETAISVASVLITTESMIVDVPNKEENASSSMGAGGMGGMNGF

SEQ ID NO: 5201 - protein, 766 aa, Vibrio fischeri ES114
MTFRLKTIIGISIIQCIMLLILVFSSVKFISDSNEQRLIARANASVHMFSNAIKDSILNNQYDKVASLMDDFITLEKICYIRIFREDGSLIVEGGPKLHEVANPDSSILHNASDGTYDVILPIITNDKTLGKVEIGFGTHGENTFLSQAKSWIYAIASIELIFVIGLSFLLGNALTRNLHKLKKAVNTVASQGPGAQVDISSIGDLGDVAQAFNNMSLKLEQNYQDLQQARNEAEAANKSKSRFLASMSHEIRTPMNAVLGLLAILKDTTLKPNQKELVNTATDSSELLLSIINDILDFSRMEANTFYLENHIFNIHKSLNSVLKTFHPQAQNKQLELSLFIADNVPTYVQGDAHRLRQILLNLVGNSLKFTDDGQVQILVNAEEHEGRIQLHCSVQDSGIGIQQEQLEYLFDEFTMADNSFSRTHEGSGLGLAICQRLVHMMDGTITVNSQYGLGSEFSFNIQLDKATTKEINYLLSKEKIEQQKDIEQQKNCVFSDANILVVEDNHANQIVIKNTLNYAGYSIDIAQNGKEAITKAINTQYDLIFMDISMPEMDGMTATKKIRSLSDTHQNMPIIALTAHALSGDKERFIEAGMTDYLSKPFNRSDLLECLAKYLFKQGKQDPSFCQECDLCEFNESTEEPKSMDNELLLVDEQIIQQIIADTDASVMPELIRFYIIESKERVETISNAAKNKDLYALEFEAHTLGSSALTLGNVALSTLAREIEIHCINQQFDDALEKTAHLPDLATLSLDALEKRNKQGFSK

SEQ ID NO: 5202 - protein, 188 aa, Triticum aestivum
  misc_feature (26)..(26): Xaa can be any naturally occurring amino acid
  misc_feature (93)..(93): Xaa can be any naturally occurring amino acid
MSTSSGAKEAPANNPGLQAEADPATXKGYIMQQTMFRVKDPKVSLDFYSRVMGMSLLKRLDFPEMKFSLYFLGYEDLSAAPADPVQRTGWTFXQKATIELTHNWGTESDPEFKGYHNGNSDPRGFGHIGVTVDDVYKACERFERLGVEFVKKPDDGKMKGIAFIKDPDGYWIEIFDLKRIGEVTATAS

SEQ ID NO: 5203 - protein, 947 aa, Arabidopsis thaliana
MDGVTGGGTNIGEAVTAPPPRNPHPATLLNANSLPPPFLSKTYDMVEDPATDAIVSWSPTNNSFIVWDPPEFSRDLLPKYFKHNNFSSFVRQLNTYGFRKVDPDRWEFANEGFLRGQKHLLKKISRRKSVQGHGSSSSNPQSQQLSQGQGSMAALSSCVEVGKFGLEEEVEQLKRDKNVLMQELVKLRQQQQTTDNKLQVLVKHLQVMEQRQQQIMSFLAKAVQNPTFLSQFIQKQTDSNMHVTEANKKRRLREDSTAATESNSHSHSLEASDGQIVKYQPLRNDSMMWNMMKTDDKYPFLDGFSSPNQVSGVTLQEVLPITSGQSQAYASVPSGQPLSYLPSTSTSLPDTIMPETSQIPQLTRESINDFPTENFMDTEKNVPEAFISPSPFLDGGSVPIQLEGIPEDPEIDELMSNFEFLEEYMPESPVFGDATTLENNNNNNNNNNNNNNNNNNNNTNGRHMDKLIEELGLLTSETEHYRSNISRSNAANPGVVFVCNRFLCVIERNDQRKLSGKVMMKSSVNFRQNLSVALVRIVSVLLVSSISVVTTDSPPSWGLTEENLLFLEAWRTIDRAYIDKTFNGQSWFRYRETALRNEPMNTREETYMAIKKMVATLDDPFTRFLEPGKFKSLRSGTQGAVTGVGLSIGYPTASDGPPAGLVVISAAPGGPANRAGILPGDVIQGIDNTTTETLTIYDAAQMLQGPEGSAVELAIRSGPETRLLTLTRERVSVNPVKSRLCELPGSGSNSPKIGYIKLTTFNQNASSAVREAIETLRGNNVNAFVLDLRDNSGGSFPEGIEIAKFWLDKGVIVYICDSRGVRDIYDTDGSNAIATSEPLAVLVNKGTASASEILAGALKDNKRALVYGEPTYGKGKIQSVFELSDGSGLAVTVARYETPAHTDIDKVGVTPDHPLPKSFPKDEEAFCGCLKDPTAACYLNQGLLFSR

SEQ ID NO: 5204 - protein, 262 aa, Cucumis sativus
MSKHYQSPLTRMIKEEGKGKLQIKGMFQNQEEKMSDSPQRKMGRGKIEIKRIENTTNRQVTFCKRRNGLLKKAYELSVLCDAEVALIVFSSRGRLYEYANNSVKATIDRYKKASSDSSNTGSTSEANTQFYQQEAAKLRVQIGNLQNSNRNMLGESLSSLTAKDLKGLETKLEKGISRIRSKKNELLFAEIEYMRKREIDLHNNNQMLRAKIAESERNVNMMGGEFELMQSHPYDPRDFFQVNGLQHNHQYPRQDNMALQLV

SEQ ID NO: 5205 - protein, 194 aa, Phyllocladus trichomanoides
DDHGEVISEIRRNDLEPYLGLHYPATDIPQASRFLFMKNKIRMICDACASPVRVIEDKRLPRELSMVKSTLRAPHACHAEYMYNMGSIASLVMAVVVNEREEDDDGQQQIQSVQARRRLWGLVVCHHSSPRFVPFHLRYACEFLMQVFGIQLNKEVELTALGMEKQILRTQTLLCDMLLRGDKPMGIVTRRPNI

SEQ ID NO: 5206 - protein, 229 aa, Cucumis sativus
MGRGKIEIKRIENTTNRQVTFCKRRNGLLKKAYELSVLCDAEVALIVFSSRGRLYEYSNNSIKTTIERYKKACSDSSATSSVTELNTQYYQQESAKLRQQIQMLQNSNSNLVRHLMGDSLSALTVKELKQLENRLERGITRIRSKKHEMLLAEIEYLQKREIELENENVCIRTKIAEVERVQQANMVSGQELNAIQALANSRNFFSPNIMEPAGPVSYSHQDKKMLHLG

SEQ ID NO: 5207 - protein, 251 aa, Brassica napus
  misc_feature (211)..(211): Xaa can be any naturally occurring amino acid
MGRGRVELKRIENKINRQVTFAKRRNGLLKKAYELSVLCDAEVALIIFSNRGKLYEFCSSSNMIKTLERYQKCSYGSIEVNNKPAKELENSYREYLKLKGRYESLQRQQRNLLGEDLGPLNSKELEQLERQLDGSLKQVRSIKTQYMLDQLSDLQTKEQMLLETNRALAMKLDDMIGVRSHHMGGGGGGDWEGNEQNVSYAHHQAQSQGLXQPLECNPTLQMGYDNPVCSEQITATTQAQAQPGYIPDWML

SEQ ID NO: 5208 - protein, 161 aa, Oryza sativa (japonica cultivar-group)
MSLIRRSNVFDPFSLDLWDPFDGFPFGSGGSSSGSIFPSFPRGASSETAAFAGARIDWKETPEAHVFKADVPGLKKEEVKVEVDDGNILQISGERNKEQEEKTDQWHRVERSSGKFLRRFRLPDNAKPEQIKASMENGVLTVTVPKEEAKKPDVKSIQISG

SEQ ID NO: 5209 - protein, 187 aa, Pseudotsuga menziesii
DEHGEVVAEIRRSDLEPYLGLHYPATDIPQASRFLFMQNRVRMICDCMATPVKLIQSEELMQPLCLVGSTLRAPHGCHAQYMANMGSVASLVMAVIINGNDDEGGGSGRNSMKLWGLVVCHHTSPRAVPFPLRYACEFLMQAFGLQLNMELQLAAQLTEKHILRTQTLLCDMLLREPQWNVTQSPSI

SEQ ID NO: 5210 - protein, 195 aa, Podocarpus neriifolius
DDHGEVISEIRRNDLEPYLGLHYPATDIPQASRFLFMKNKIRMICDACASPVRVIEDKSLPRELSLVGSTLRAPHECHTQYMYNMNSIASLVMAVVISEREEEERDTDGQQQPQEAVRRLWGLVVCHHTRPRFVSFHLRYACEFLMQVFSIQLNKEVELAAQVREKQILRTQTLLCDMLLRGVAPLGIVTRRPNI

SEQ ID NO: 5211 - protein, 600 aa, Neocallimastix patriciarum
MLSARSLICKSMIKSGFRRAVAPSVAMAASSMTLTARRNYSSKYKDIIFAQEGRDKLAKGVNVLAKAVSVTLGPKGRNVLIEQEFDPPKITKDGVTVAKSVELEDKFENLGARIVQDVAIKTNDEAGDGTTTATVLARAIFAEGLKNVSAGVNPVELRRGVQKAVDVVVDFLKEQAHPISTFEEIAQVGTISANGDKHIGGLLAEAMKKVGKDGVINIHEGKTLEDELTITEGMKFDNGFLSPHFITDNKGKKCELENPYILITEEKISAVQDIVPALEIAANNRRPLLIIADDVEGDALATCVLNKIRGQVQVCCIKAPGYGDHRKNNLGDIACLTNGTVMSPNVELTLDKVTEELLGSCERITVTRDDTVFLNGAGDKAKIAERCNQIRSIIKTADLSIYEKEKHEERLAKLTGGVAVIKVGGVSEVEVGEKKDRFVDALHATRAAIEEGIVPGGGTALLKASKVLTNLKADTFDQQLGVDLVKKAIQEPCKTIVNNAGGEGAVVVGRLYNSFEVKGVEDKAVSKKDYKPFTYGFDAYKGEYCDMIKAGIIDPVKVVRTAIVDASGVASLLTTSECMIVDGPDDEPPAPPAGMPMGMM

SEQ ID NO: 5212 - protein, 191 aa, Triticum aestivum
  misc_feature (132)..(132): Xaa can be any naturally occurring amino acid
ELHSFVVGLEGSPDLKAAREVADYLGTIHHEFHFTVQDGIDAIEEVIYHDETYDVTTIRASTPMFLMARKIKSLGVKMVLSGEGSDELLGGYLYFHFAPNKEEFHRETCRKVKALHQYDCLRANKATSAWGXEVRVPFTRSHNVRWHGPEWKCPQELGRSRMGQRKGPHDSTYCQDISTGEEIMTGKWLPI

SEQ ID NO: 5213 - protein, 190 aa, Huperzia selago
DEHGEVVAEIRRSDLEPYLGLHYPATDIPQASRFLFMKNRVRMICDFSDPPVNVVQDKDLRQPISLAGSTLRAPHGCHSKYMRNMGSIASLVMAVVINDSEETQNERTQKPKGRKLWGLVVCHHTLPRAVPFPLRSACEFLMQVFGLQINMELELAAQFKEKHILRTQTLLCDMLLQDAPIGIVSQSPNI

SEQ ID NO: 5214 - protein, 179 aa, Daucus carota
MERADQQARGFQGYRKIHQQQQLPASGTASTGTDNNPAAGDQDCLVREQDRFMPIANVIRLMRKSIPSHAKISDDAKELVQESVSEFISFVTSEANYRCQKEQRKTITAEDVLWAMSSLGFDDYVEPLTFYLDRFREADGGERTALRGEPLVKKSGEHGHRGFLQHLHHGTIWGRIMRF

SEQ ID NO: 5215 - protein, 83 aa, Daucus carota
WPMAKLGFEDYIEPLKVYLARYREMEGDTKGSGKGAEGSSRKEGVQPVHQGQLVHQGSYPQGVIYGNSQQQTQHMMVPMQGPQ

SEQ ID NO: 5216 - protein, 62 aa, Daucus carota
WAMGTLGFEDYIEPLKVYLARYREMEGDTKRSGKGAEGSSRKEVYNRFIRDSLFIKVHIHRV

SEQ ID NO: 5217 - protein, 61 aa, Daucus carota
DPLKAYLARYRELEGDTKGSARGEGSAKKDQVGAHISNQQYAHQGSYSQGMSYVKLTHLLC

SEQ ID NO: 5218 - protein, 401 aa, Shewanella sp. MR-4
MKQLIRNIVCLGLGLSLGLSISLSSQENAKSYQSDFDYPLLQDVLETVETYYVKTVSKDELVQAAIKGIFEHLDPYSSFLNHQELLDLKDSNRGEYFGFGFEVASDKDHISIIAPFANSPAEQAGIQAGDIIIKLNNTPTTETNLADILNQIKQHSINNQSIRLTLKHRNDAVEFEVSLKPSTITIQSVASKLLDGNIGYIRLSSFQENSTEDMVRSLSQWQNAHLTGLILDLRNNPGGLLDQAIKIADLFLAKGRIVSTSGRFFDANSDYYASPQTMLTNVPMLVLINKGSASASEVLAAALQENGRAKLLGETSFGKGTVQSLIPILNDGNAIKLTIAQYNTPRGENIHDIGIVPDIKVTTETGSNQKNMAIIDAISARTDVSQDSLVTSAIAWIQHHD

SEQ ID NO: 5219 - protein, 547 aa, Cochliobolus heterostrophus
MQSSNEGPADIIAKVAGVTQGGKREDDGPYFTNNEGIPWPDAEHSKTIGGIPVASDVFLFQKQQTFNRSKNLERMVHPCGSGAFGYFETTKDVTHLTKADFLKTVGEKTPIFIRFSTVTPGREYPDEARNPRGFAIKFYTGEGNYDIVGLNFPVFFCRDPIQGPDVIRSQWRNPKNFLFDYDAIFDLLANTPEGNHAGLMFFSDHGTPQGWRFNHGYGCHTFKWVNKDGQFVYIKYHFVAEHGQKQFTQEQATQMCGEDPDYSKRDLYETIENGEEVVWKAHVQVMSPEEADPDKLGFDPFDVTKVWPRKQFPMQEFGRLVLNKNPENFHRDVEQAAFSPGSMVPGVEDSPDPLLQFRMFFYRDAQYHRIGVNLHQIPVNCPFMAKSFASLNFDGQMRVDANHAGNKPYAPNSFAHKFRPDVAEAPYQVNDNIMSRKSHYWHEGKKNEYDQAKELWSRVMSVQEKQNTIKNTANMLKFVRYPEIQQYNIGTDLSRGIYDLLPKPAFDFSEVEELSHTAHEWYKEKKFRSIDGERLTGFPPSMPVYNY

SEQ ID NO: 5220 - protein, 740 aa, Cochliobolus heterostrophus
MASEILGNVTEKAKDLAGSKSTKMAQLAEVTKDVHDDKWRITSDYGVKQNNTDDWLKVATDDQTGPMLLEDQFAREKIHRFDHERIPERVVHARGSGAFGKFTLFESASDVTSAGILTDTSRETPVFLRFSTVLGSRGSADTVRDVRGFAVKFYTEEGNWDIVGNNIPVFFIQDSMKFPDVIHAGKPEPDCEVPQAQSAHNNFWDFQYMHPEATHMFMWAMSDRTIPRSYRMMQGFGVNTYTLINAKGERHFVKFHFTPELGVHSFVWDEALKIAGQDPDFHRKDLWMAIDSGAYPKWKFGIQVIPEAKEHDFEFDILDATKVWPEELVPVRYIGELELNKNPDEFFTQTEQVAFCTSHIVPGIGFSNDPLLQGRNFSYQDTQLSRLGINWEELPINKPVCPVMNFNRDGAMRHTITKGKVNYWPNRFQTVPPATEKEGGYVEFPEKTAGIKVRMQSKKFREHKSQAELFYNSMSENEKMHMKAAFAFELDHCDDPVVYERLCERLCEIDLELAQSVAEMVGGEQPTKQTRPKHNKTAKGLSQMDFQPEKPTIATRMVAILIADGYDKAAYTGMKAALTAAGALPFTISPRRNKIFADGEDRSGSGVVADHHLEGQRSTMYDSVFVPGGARSIETLSKNGRAVHWVREAFGHLKAIGGTGEAVSFIKQAVDLPGMEFSTSGDVVNSYGVVTATAVQPESFKEAVNMVKEAKDFASAYMYAISQHKNFERETAGLNAMVAY

SEQ ID NO: 5221 - protein, 227 aa, Lycopersicon esculentum
LSFDLLESWLAQNPDAAGFKRNGESIFRELALFQDYHGLPDFKNALVQFMSEIRGNKVTFNPNKLVLTAGATSANETLMFCLANPGDAFLLPTPYYPGFDRDLKWRTGAEIVPIQCTSSNGFRITQSALEESYKLAKTRNLRVKGILVTNPSNPLGTTLTRNELELLVSFVAEKGIHLISDEIYPGTVFNSPKFVSVMEVLIENNYMYTEVWDRVHIVYSLSKDLGL

SEQ ID NO: 5222 - protein, 251 aa, Erwinia carotovora subsp. atroseptica SCRI1043
MNLISIPALQDNYIWLLSNKANRCVIVDPGEASPVLNALDQNALLPEAILLTHHHNDHVGGVSEILNHYPNLPVFGPKETAKCGATYLVEEGNTVSLLNSEFSVIEVPGHTSGHIAYYNAPFLFCGDTLFSAGCGRIFEGTPKQMYESIQKIAELPDDTVVCCAHEYTLSNLRFSNDIWPEDPDIESYLHKISQIREKSQSSLPTTLGLERRINLFLRCHEIDLKRKISNEPENIENWQVFKMLRSKKDCF

SEQ ID NO: 5223 - protein, 226 aa, Yarrowia lipolytica CLIB122
MSELKDDAIYAAIAHGDTILCQHDFAKRDPKEVVQLVLAKISPGESKKASLMYQDLSIHYITTQATSDTPEGVTFILITKESCGRKAPFLCLLELEKKFNQQYSLQTIGSASKDSLNKFEGEMVTLVNSGKYEDVAKVAQSEINKVRDIMVENVEQILERGERISLLVNRTDEMTNNAVAFRKRSTQAKRNLWWKNVKMGALLGTGVAGLVYVAIGSVCGFGFQCV

SEQ ID NO: 5224 - protein, 154 aa, Oryza sativa (japonica cultivar-group)
MSMIRRSNVFDPFSLDLWDPFDGFPFGSGSGSLFPRANSDAAAFAGARIDWKETPEAHVFKADVPGLKKEEVKVEVEDGNVLQISGERIKEQEEKTDKWHRVERSSGKFLRRFRLPENTKPEQIKASMENGVLTVTVPKEEPKKPDVKSIQITG

SEQ ID NO: 5225 - protein, 397 aa, Burkholderia sp. 383
MLNSLLDFLSHGLLHFSWWQVALFALAVTHVTIIGVTVYLHRCQAHRALELHPIASHFFRLWLWMTTGMLTGQWAAIHRKHHAKCETEEDPHSPQTRGIWKVFLEGAELYRAEAKNEETMRKFGHGTPSDWVERNVYSKYPILGISLMMVIDVALFGVIGLTVWAVQMVWIPFWAAGVVNGFGHFWGYRNFNSTDASTNLFPWGIVIGGEELHNNHHTFATSAKLSNKWYEFDIGWMYIRIMSAFGLAKVKKVAPTPRLNKPKTVLDQETLQAVLSNRYEVMARYGKAVKRAYRQELAHLKEIGGEKYQMMRGARKWFHKDADGLDEPQKKLLPEIFANSQKLQTYFQLRQDLAAIWDRSTASREQLLAQLQDWCHRAEQSGIKALQEFATRLRRYA

SEQ ID NO: 5226 - protein, 190 aa, Huperzia selago
DEHGEVVAEIRRSDLEPYLGLHYPATDIPQASRFLFMKNRVRMIVDCTAAPVKVIQDKELRQPLSLAGSTLRAPHGCHSQYMSNMGSTASLAMAVIINDNDEERSSAVSVQKGRKLWGLVVCHHSTPRAVPFPLRSACEFLMQAFGLQLNMEVELSAQVKEKHILRTQTPLCDMLLRDAPIGIVSQSPNI

SEQ ID NO: 5227 - protein, 358 aa, Ustilago maydis 521
MADFVKLSIFGTVFEVTTRYVDLQPVGMGAFGLVCSANDQLTSTSVAIKKIMKPFSTPVLSKRTYRELKLLKHIRHENIISLSDIFISPLEDIYFVTELLGTDLHRLLTSRPLEKQFIQYFLYQILRGLKYVHSAGVVHRDLKPSNILVNENCDLKICDFGLARIQDPQMTGYVSTRYYRAPEIMLTWQKYDVAVDVWSAGCIFAEMLEGKPLFPGKDHVNQFSIITELLGTPPDEVIKTICSENTLRFVQSLPKRERVPFSQKFKNADPMALDLLEKMLVFDPRTRISAAEALAHPYLAPYHDPTDEPEAEEAFDWSFNDADLPVDTWKVMMYSEILDFHNIDNSGQDEGPVPPVNN

SEQ ID NO: 5228 - protein, 161 aa, Oryza sativa (japonica cultivar-group)
MSLIRRSNVFDPFSLDLWDPFDGFPFGSGSRSSGSIFPSFPRGTSSETAAFAGARIDWKETPEAHVFKADVPGLKKEEVKVEVEDGNVLQISGERSKEQEEKTDKWHRVERSSGKFLRRFRLPENTKPEQIKASMENGVLTVTVPKEEPKKPDVKSIQVTG

SEQ ID NO: 5229 - protein, 338 aa, Listeria monocytogenes str. 4b F2365
MSKLFSEYKLKDVTLKNRIVMSPMCMYSVENKDGIATDFHFAHYVSRAAGGTGLVILEATAVQEVGRISEFDLGLWNDEQVPALKKLVDGLHYHGAKAGIQLAHAGRKAVLPGEIVAPSAIAFDEKSDKPVELTKEAIKEVVADFKRAAYRAKEAGFDVIEIHAAHGYLIHQFLSPITNRREDNYGGPAGNRYKILSDIIKAVKEVWDGPIIVRVSATDYAHGGLQLEDHIPFAKWMKADGVELIDVSTGGLVNVAPPVFPGYQVPFADEIRRGAGIATGALGLITRGEQAEEILCNERADLIIVGRELLRNPYFAKDAAKQLGETIEGPKQYSRAWK

SEQ ID NO: 5230 - protein, 159 aa, Oryza sativa (japonica cultivar-group)
MSLIRRGNAFDPFSLDLWDPVDGFPFGSGGSSSSSGSLFPRANSDAAAFAGARIDWKETPEVHVFKADVPGLKKEEVKVEVDDGNILQISGERSREQEEKSDKWHRVERSSGKFLRRFRLPENTKPEQIKASMENGVLTVTVPKEEPKKPDVKSIQISG

SEQ ID NO: 5231 - protein, 683 aa, Colwellia psychrerythraea 34H
MQKFCRIALAVSLSLGLSVSAIAFEKPITPEELPVLMPESQHATASKRITARFTRAHYKKVIIDDALSGEVFDRFIKQLDYARNIFLATDIDDFQKYRLEFDTVLTRGKLATAYDIYNLNMQRRLERYEYAVSLLNSKGDKNPFNFTKEEIYSFDREEAPWPVSEAELNELWRLKVKSDVLNLTLTKKEWPKIKEVLTKRYEYAIKRLKQSESEDAFQLVMNSFARVVEPHTSYLSPRNAERFQVDMNLSLEGIGAELRSIEDYTVIHRVVTGGPADKSKQLKSKDRIVGVAQGDKDFEDVIGWRLDDVVELIKGAKGTTVRLQILSGDSDDEANIKVVSIVRDIIKLEDRAAKSEVYLENPDVADSKKLGVITIPSFYNNLSKDVKKEIAKLKEQEVEGIIVDLRGNGGGSLSEATLLTGLFIDKGPVVQIRDGANRIQVNSDRDGVSFFDGPLTVMVDRYSASASEIFSAAIQDYGRGVIIGEHTFGKGTVQQHRGLGRVYDLYEKPLGSIQYTIAKFYRINGGSTQHRGVLPDISFPAAVNPEDWGESKEENALPWDQIQKAKYSPLNELNTDIEYLSSLYQQRIKENPEFNYLLEDISIYQAEKDDKTISLNLATRKSEREERKSKRLVRVNEQLVLLGKEKVTDLDDLSDELDDLDPFLDEAARITFDFVSLGKIAKK

SEQ ID NO: 5232 - protein, 456 aa, Rickettsia sibirica 246
MLLRLIITLFFIINSICAFAEGEKETENKISNQEAYKQFQDVFERIEKAYVQVPDRQKMIDEAINGMLNSLDPHSSYYTDEDLEDIFTFTKGEFGGIGVEIMYDSGAIKIISPIDDLPAFKAGLKGGDYIVGVDDELVSTLGPNKAIKEMRGTPGTKVKLLIIKEEEAKPQELELTREIVKIKPIKAHLEKNNIAYIRITTFNESTISELKAAVKKLKTESKDDLKGIILDLRNNAGGILDQAIAVSDYFIDSGVIVTTKGRTTSSNSEIKANEFSLKAPKVPMIVLINGNSASASEIVAGALQDHKRAIILGTKSFGKGSVQALTQINSRAAVKLTISKYYTPSGRSIQAEGIEPDILIEPAKVEYPEVKKIDKRFSESSLKNYLKNDNEKNKDNASKNKDSQKETKAKNNKQEENELSELYKKDYQFARAYDVITGLIINKKLETKERVKQEDK

SEQ ID NO: 5233 - protein, 190 aa, Marattia laevis
DDHGEVVAEIRRSNLEPYLGLHYPATDIPQASRFLFMKNRVRMICDCSAPPVKVIQDKKLGQPLSLTSSTLRAPHGCHSLYMGNMGSIASLVMAVVINDNEDDIIKNGHAYQGRRLWGMVVCHHTSPRFVPFPVRSACEFLMQVFGLQLNMEVGMAAQLREKHILKTQTVLCDMLLRDAPIGIVSKSPNI

SEQ ID NO: 5234 - protein, 571 aa, Triticum aestivum
  misc_feature (477)..(477): Xaa can be any naturally occurring amino acid
  misc_feature (484)..(484): Xaa can be any naturally occurring amino acid
MALLAAATLNPTTHLSLRSRAGRNSENLWLRSAASSQKSKGRFCNLTIRAGTPSKPAEPIGPVFTKLKPWQIPKRDWFDKDFLFGASTSAYQIEGAWNEDGKGPSTWDHFCHTYPERISDRTNGDVAANSYHLYEEDVKALKDMGMKVYRFSIAWSRILPDGTGKVNQAGIDYYNKLINSLIDNDIVPYVTIWHWDTPQALEDKYGGFLNRQIVDDYKQFAEVCFKNFGDRVKNWFTFNEPHTYCCFSYGEGIHAPGRCSPGMDCAVPKGDSLREPYTAGHHILLAHAEAVELFKACYNKHGDSKIGMAFDVMGYEPFQDSFLDDQARERSIDYNLGWFLEPVVRGDYPFSMRSLIGDRLPKFTKEEQEKLASSCDIMGLNYYTSRFSKHIDISSDFTPKLNTDDAYASSETKGSDGNDIGPITGTYWIYMYPKGLTDLLLIMKEKYGNPPIFITENGIADVDSDPTMTDPLDDWKXRLDYLQXRHISAVKDAIDQGADVRGHFTWGLIDNFEWSLGYSSRFGLVYIDKKDGNKRKLKKSAKWFAKFNSVPKRLLKTTNNNATVTVTSVSV

SEQ ID NO: 5235 - protein, 190 aa, Marattia laevis
DEHGEVVAEIRRSDLEPYLGLHYPATDIPQASRFLFMKNKVRMICDCTIPPVGVIQHKGLRQPLSLAGSTLRAPHGCHTQYMENMGSIASLVMAVLVNDNDEESSKSSYHTKYRKLWGLIVCHHTKPRAVPFPLRSACEFLMQVFGLQLNMEVELAAQMREKHVLRTQTLLCDMLLRDAPIGIVSRSPNI

SEQ ID NO: 5236 - protein, 421 aa, Arabidopsis thaliana
MVIKGMRVGKYELGRTLGEGNSAKVKFAIDTLTGESFAIKIIEKSCITRLNVSFQIKREIRTLKVLKHPNIVRLHEVLASKTKIYMVLECVTGGDLFDRIVSKGKLSETQGRKMFQQLIDGVSYCHNKGVFHRDLKLENVLLDAKGHIKITDFGLSALSQHYREDGLLHTTCGSPNYVAPEVLANEGYDGAASDIWSCGVILYVILTGCLPFDDANLAVICRKIFKGDPPIPRWISLGAKTMIKRMLDPNPVTRVTIAGIKAHDWFKHDYTPSNYDDDDDVYLIQEDVFMMKEYEEEKSPDSPTIINAFQLIGMSSFLDLSGFFETEKLSERQIRFTSNSLAKDLLENIETIFTEMGFCLQKKHAKLKAIKEESTQKRQCGLSVTAEVFEISPSLNVVELRKSHGDSSLYKQVMMHSCNIS

SEQ ID NO: 5237 - protein, 375 aa, Arabidopsis thaliana
MNRRQQVKRRVGKYEVGRTIGEGTFAKVKFARNSETGEPVALKILDKEKVLKHKMAEQIRREIATMKLIKHPNVVQLYEVMASKTKIFIILEYVTGGELFDKIVNDGRMKEDEARRYFQQLIHAVDYCHSRGVYHRDLKPENLLLDSYGNLKISDFGLSALSQQVRDDGLLHTSCGTPNYVAPEVLNDRGYDGATADMWSCGVVLYVLLAGYLPFDDSNLMNLYKKISSGEFNCPPWLSLGAMKLITRILDPNPMTRVTPQEVFEDEWFKKDYKPPVFEERDDSNMDDIDAVFKDSEEHLVTEKREEQPAAINAFEIISMSRGLNLENLFDPEQEFKRETRITLRGGANEIIEKIEEAAKPLGFDVQKKNYKYIT

SEQ ID NO: 5238 - protein, 250 aa, Photorhabdus luminescens subsp. laumondii TTO1
MELISIPALSDNYIWLLCDENRHVVIVDPAESQPVLDTLESRGWIPDAILLTHHHHDHVGGVPGIIDRFPELLVYGPAETQSKGATIIVCGGDSINFGHFSFQIIDVPGHTLGHIAFYQAPYLFCGDTLFSGGCGRLFEGTAEQMYTSIGKIAELPDDTLICCAHEYTISNMKFAHAVLPNQTISEYQQKVIRMRENNQPTIPTTLQTEKKINIFLKCDDIDLQRNIGITPNSQPLSAVFHQLRRQKDQF

SEQ ID NO: 5239 - protein, 414 aa, Archaeoglobus fulgidus DSM 4304
MTIDDVLSLLEKAESEDLNPRTGRLFAYVYETGDENIRKVAEKALVRFAEKNLLDFTVFRSAVFFEKEVVGFARNLMHGDAAVGSFTFGGTESIMLAVKAARDYYRKKEGTAEVPEILAPISIHPAFLKAADYLGLKVVRLPVKDAKGDVDAFAEAVSGKTALIALSAPNWPFGTIDPVEEIAEIAAERNVLLHVDACLGGFILPFFEMLGEKIPKFDFRVEGVTSISLDAHKYGYAPKGASVVLFRDAELKKCSMFVDVTSPGYVFVNQAVLSSRPEGPLAAAFAVIKYLGVEGYKELASKILSARDKIYRGLKSLGFESVGEVESSVLAMTNPDVDLMGFVNNMKKLGWQLHLQKGLKEYDIPDNIHLTLSPVHDGVAEKFVEDAAKALEMEPELTLSRFTQWLKGGSLPKS

SEQ ID NO: 5240 - protein, 426 aa, Pichia pastoris
MSGDHKSFTVFNQEFIIDRDFELIKALGQGAYGVVCSAQYKGNEDGGKVAIKKVTNIFSKKILAKRALREIKLLRHFRGHKYITCLYDLDVIPDQNNNFNEIYLYEELMECDLHHIIKSKQPLTDSHYQSFIYQILGGLKYIHSADVLHRDLKPVNLLVNSDCELKICDFGLARGYSSDAEKNAGFLTEYVATRWYRAPEIILSFQTYTKAIDIWSVGCILAELLGGRPIFRGRDYVDQLNLILSTLGTVSEETLQSIRSERAQDYVRSLPFMPKIPFSQLFPGANPEAIDLLDRMLTVDPTHRITVTEALEHPYLKVWHDPNDEPVCSSKFDFSFEVVDDIETMKQMIVDEVLSLREFVRRPIQEQQLPFTEPDKHFDVSFDQPQIEPPAENYRDDHLPRPHELESQILDLEHELQYGLDRYGTQ

SEQ ID NO: 5241 - protein, 633 aa, Lactobacillus plantarum WCFS1
MCGFAGCLTDRTKADNAAYDQTIHEMTKMIVHRGPDDDGYFADDNITMGFRRLSIIDLAGGHQPLSYDNERYWMTFNGEIYNYVELREQLKQEGYEFKTSSDSEVILAMYAKYHADATKYLRGMFAFVIWDKQEKTLFAARDQFGIKPFYYAISGDDFYYASESKAIYKILKDKTFDKNALQDYMTFQFVPEPETLTKEIKMLAPGCSLTKKLGSAPRIDRYYHREFHPVERSEDEYAQKIKDALIDSVKIHMRSDVPVGSFLSGGIDSSIIVAIAKNFNPNLETISVGFEREGYSELDVAQETAEKLGVKNYSMTITPEAFMKAFPHFVWSMDDPLADPAAVPQYFLAKEAVKHVKVCLTGEGADELFGGYTIYHEPESLKPFRYTKPINGALKRIALMMPEGMRGRSFLLRGTTPLENRYVGNAFIFGEQEKQAFFKNYNQNHPFQSITQPLYDESVDYDPISRMQFIDMHTWLNGDLLHNADRTTMAHSLELRTPFVDREVYNLAAEIPADLRISHGTTKYILRKAVEDIVPAHVLHRKKLGFPVPIRFWLKDEMYDWAKQIINDSQTDQYFNKDYFLKLLDDHKAGVRDNSRKLWTVLTFMMWHRLYVESDHLMDSPEANAVAEKVEEF

SEQ ID NO: 5242 - protein, 749 aa, Oryza sativa
AREINSPFCSRTIRVTSAALVSNAGGHGQIRVSSGKARRIPPPPPLTPRGGKGRSCLPPLQPLNITRRSLDEWPRAGSDDVGEWPNPTTPGASKAEGAGSAKPGEGLRLDLSSLRSQGRKDQIAFFDKECSKVADHVYLGGDAVAKNRDILRKNGITHVLNCVGFVCPEYFKSDLIYRTLWLQDSPTEDITSILYDVFDYFEDVREQGGRVFVHCCQGVSRSTSLVIAYLMWREGQSFDDAFQLVKAARGIANPNMGFACQLLQCQKRVHAIPLSPNSVLRMYRMAPHSPYAPLHLVPKMLNEPSPAALDSRGAFIVHVLSSIYVWVGMKCDQVMEKDARAAAFQVVRYEKVQGHIKVVREGSEVPEFWDAFSSAPVNSDSNTKISKDQIDSASKTGPGNRRVESYDADFELVYKAITGGVVPAFSSSGAGDETHLPARESTWSSLRRKFISRSLARVYSDSALIRDLDPRVDRVQHLAAEASTSPPFLSPSSLSSDSSISSKYSSDSPSLSPSTSSPTSLGLSPASSNFSHTLVPSSRSPLHQSSNEEPSKSGLGSIRSPSKTSSIAERRGGFSSLKLPSFQKDLVLPPRVPTSLRREEEVTDKSNNNSVKQLTGVCCPEKCTGNTSTVHTKTGITERTDSISEACGNLQLLVYRWPSKEKLTTFTRKDLDPKSVLIFVTPEDSRSEAVKTVHIWVGGEYESSKCVDTVDWQQVVGDFFHLKELGNTLPVKVFKEHETENLLEVLNAR

SEQ ID NO: 5243 - protein, 730 aa, Cochliobolus heterostrophus
MVRSNVLTAIAAICHVAHAVCPYMDDQPLARREGATAMSTDDFMKQYEIDDSKAYLTSPVGGPQPDQESLSAGERGPSLLEDQILRRKIMSFDHERVPERAVHARGAGAHGTFKSYGDWSNITGASFLANSEKETPVFIRFSTVAGSRGSADTARDVHGFAVRFYTDEGNFDIVGNNIPVFFIQDAIKFPDLIHAVKPKPDREIPQAATAHDSAWDFFSQQPSTMHTLLWAMSGHGTIRSYRHTDGWGVHTFRFVRDDGKSKLVKFRFRSLQGKASLLWEEAQTTAGMNADMHRQDLFESIENGYYPEWIFEAQIMEESDQLRFGFDVLDPTKIVPEDIVPFTPLGKLTLNRNPRNYFAETEQIMFQPGHLVRGIDVSDDPLLQGRMFSYLDTQLNRNGGPNFEQIPINQPRVPVHNNERDGAGQMYIPLNTAAYSPNTLNGGYPKQATQAEGRGFFTAPSRSVSGNLVRTVSSTFADNWSQPRLFYNSLSAVEQQFVINAIRFETSQLQSEVVKQNVLIQLNRISHDIATRVATALGMTAPAPDDKFYHNNKTIGVNPAGEPLLKIEGLKVGYLTSAGSTGDKGKALKAALKDEKVSLTVVAEHLGAGIDQTYSATSAVNFDAIIVDGSASALFAPAGSLANSNSTAAKGRSTLYPAGRPLEILQTGYQFGKPVGVLGASNSTLSAAGVVAGTPGVYSFDSASDMAAVVTKITEGLRTFKFLDRYPLDN

SEQ ID NO: 5244 - protein, 822 aa, Leptospira interrogans serovar Copenhageni str. Fiocruz L1-130
MNMRFLLLYIIFLFHYSLMAESLSPVSGKISQLQKDSSLSFFVYYFSSDSDENFRERIFAKDSSLSFQNIPAEVFSLGFTSNTAWFYIPLKNDTKKDYRGEFEIFNPYLEEVDIFYRYGSKDSIHEILAGTSRVYEKSFPALNFYLRPGEEIQIVCKIKSGTPMRIPIVLESEENFNFTKLFRAILFGLTLGFGIAMGLYNFSLYMFFRTRSYLYYFIMILFSTVYLTSWDGLISPLFKPNYGRYYLPFILVLFYTSALFLFLFSMEFLYPEKKERYVKIIIFLYVVVNLLLIPLSIFYPTHLNRISYYLGLVNNLIIVYFCIVRIRGGFKSAKNFLIIHLVFPVAGILTNLSTFGAISIDYLSLHLLKLAFISQSVLFSVMLVQRIKELEFRLKDGLQSEIHKNIVLLKKEIQQRRETEWELIQAKEVAEKASKVKSNFLANMSHEIRTPMNGVLGMVQLLGTTKLNDEQKEYVEVLSVSAKSLLQIINDILDFSKIEAGKVILEREVFSIRSVLDEIHDLLYPLAKQKEINFRLEGKLEIQEYVYGDPLRLRQILWNLAGNGIKFTSRGEVVLKVTQKNISKSSVSIEFTVMDSGIGIPLEKQKQVFEAFSQNDTSTARKFGGSGLGLSITKQLVELQGGVLKLESKDGEGSKFTFTIDYDIPSALEIEKILEAEKTKDLEKSFQDVVAKSTRILVAEDNETNCLLIERALKKLGYDPTVVHNGREVIERMQLEAFDIILMDIHMPEVDGIEATKWIRSKNQNSEFPIIIALTADAIESSKEKYISKGMNDCLTKPLDLPILKSTLDLWSNRVDVSHWKL

SEQ ID NO: 5245 - protein, 204 aa, Zea mays
VKSTIERYKKANSDTSNSGTVAEVNAQSLYEVQSHAQTAYILQCSLFILAFYGHDYVVDLKTTPHKHYQQESSKLRQAIDSLQNANSRTIVGDSIHTMGLRELKQMEGKLEKAINKIRARKNELLYAEVEYMQRREMDLQTDNMYLRSKIAENNNETGQPAMNMIGVPSTSEYDHMASFVDSRNFLQMMKLRIFGQQSMHASTQ

SEQ ID NO: 5246 - protein, 466 aa, Escherichia coli K12
MDQKLLTDFRSELLDSRFGAKAISTIAESKRFPLHEMRDDVAFQIINDELYLDGNARQNLATFCQTWDDENVHKLMDLSINKNWIDKEEYPQSAAIDLRCVNMVADLWHAPAPKNGQAVGTNTIGSSEACMLGGMAMKWRWRKRMEAAGKPTDKPNLVCGPVQICWHKFARYWDVELREIPMRPGQLFMDPKRMIEACDENTIGVVPTFGVTYTGNYEFPQPLHDALDKFQADTGIDIDMHIDAASGGFLAPFVAPDIVWDFRLPRVKSISASGHKFGLAPLGCGWVIWRDEEALPQELVFNVDYLGGQIGTFAINFSRPAGQVIAQYYEFLRLGREGYTKVQNASYQVAAYLADEIAKLGPYEFICTGRPDEGIPAVCFKLKDGEDPGYTLYDLSERLRLRGWQVPAFTLGGEATDIVVMRIMCRRGFEMDFAELLLEDYKASLKYLSDHPKLQGIAQQNSFKHT

SEQ ID NO: 5247 - protein, 530 aa, Lactococcus lactis subsp. lactis Il1403
MCGFLFMETSDLTIEEFKSNLELIEHRGPDDQQHVRDTLGNDFGFCRLSIMDLSDLGRQPFGLNGKRVMCNGEIYNFLSLRKFLETKGYKFTGDSDCEVLLPLFETTGIETMVKMLDAEFAFVLVDENTAEIFAARDPFGIRPLFYGYNKVTGKISFSSEAKALISTCNDVTPFPPGYYYANGEFHVFNDIAEVSTIVEEPLAEISGHIRRKLERAVKKRLHADAPMGYLLSGGLDSSLVCAIAAKELESPIKTFAIGMETDPIDLKYAREVADFLRTDHTEILMTKEDVLSAVREVIWHLETWDITTIRASIGMYLICKYIHENTELKVLMTGEVSDEMFGYKYTDFAPSAGAFQKEAQKRVHELYMYDVLRADRCLAAHSLEARVPFADLDFAAYVMSINPSRKLNTYGKGKYLLRHAFEGTELLPDEILFREKAAFSDAVGHSMVDYLKEFADEKYSDEDLAKASEKYPKHTPFTKESLMYREIFEEFYPGYEDWILDFWMPNRDWVGAEVTDPSARVLSNYGDSGK

SEQ ID NO: 5248 - protein, 906 aa, Cryptococcus neoformans var. neoformans B-3501A
MSNFLPIPTKAATPLPSFAKHLLDYISAHFRDTHSEAFRKDVDVLVGMRKDWVEAKLEAHPEIIRAFMRYHAQLAFLSTKFPSDINLPFAYYLPFPATFSLSPDAPISLSSLTFERACVLFNMTALYASMAAAERRAEAEGIKRALGYLTVVHQAAAGVLEYLITSVLPTLRSELSSPQAAGYDMTESFLGTLKEFVLAEAQECYWQQAVLQGTYKNGLIGKLSMKVSEYYKAALASMNGTDYPSSSYFPLNWTAHMNVKQMHFEAAAQFRLSQEDLEKSRYGEEIGRLKVAESLAKKGLDAARKGVADSVVSDLKQLHAAIKSSLERAVRDNDLVYVQPIPPANQLAPIVGVGMVKVNVPAEVAEPVAWLMGGKAGMEPLFSGLVPYGVHLALSIYDDRKDTLVRDLDGKREELDGLAASTLQSLNLPGSIQALDRPVGLPPSLLKKSEEVASSGGIERIRSLLDEVNRLAHANVQSLNEAMDILDQEATENESLIARQPELQQTRQPSHVANQPLIQMAEQYEATIKQAGGSDATVRAKWEEWARLVGILAAGEMEMEDYVPGTTSPSGSLPPSVRPLRASLEELDDRIAHRARLVREARQISAADDIRPEVLKEAAKLAHGGSGDVKTEWFEDLFEKGLEKYMGVKREMDEEVAKHDELLEQIRTQNESFLSERKDDPIIKERERRLQDMDLAYWKWREIVDNAEEGIKFYNSFAEMLHGFKAACGQFLNTRRIDVGQMTTQFQQQMNVSEPQQQPEPRYQSPSPQSFQPSFSPSPSHFQPSAPSSFSSSPVRSPAPSAPARRESPPKTLSFLPHPSSSAWQPASVDFLPPPPPPPILRSGGIQSQPKVAPPVTPSITAIRDQTQGTPRRMTRAAAAAAERDEATERNKYSSGGPRRKGGGVV

SEQ ID NO: 5249 - protein, 372 aa, Idiomarina loihiensis L2TR
MSSAFDDFELKGHKLENRFVVAPMTRTSADKKGKPTELMGEYYERFAKGGWSMIISEGVYTDRQASQGYENQPGITDAPQTDAWKEIVERVHKHDCKFIMQLMHAGAQFQHNEYTDTPIAPSEVKPKGEPLDLYGKTDGWPEVKAMDETDFDAVMNGFVGAVNRAKEAGFDGVELHAANGYLLNEFLSDYFNQRPDQWGGDMAKRMHFLELVVKAAKSAAGDDFIVGVRLSQITVTDSDYQWPEGEDAMIKVVKAMEKAGVDYIHTTDTDVMRKPFKGGSNKSLGDIVQEFSDIPLIVNGGISEKNYEHVAGHYPNALLAMAKTSLANPDFPIRIKSSEPIRQLDFAMLQPTATLENEWKWRDENDAHIELD

SEQ ID NO: 5250 - protein, 677 aa, Arabidopsis thaliana
MANKYVSSVLKSLLVLLHLVFLSKQHVDSASIVKSLPGFEGQLPFELETGYIGVGEEEEVQLFYYFIKSERNPKEDPLILWLTGGPGCSAISGLLFENGPLTMKLDVYNGTLPSLVSTTYSWTKTSSIIFLDQPVGTGFSYSRTQQFNKPSDSGEAKRIHEFLQKWLGKHQVFSSNPFYVAGDSYSGLVVPATVQEISKGNYECCNPPINLQGYVLGNPLTDYTTGSNSRIPFAHGMALISDELYESLKKTCKGEYTNVHPRNTQCLKFVEEFNKCTNRIFQQLILDPLCETETPDCYIYRYLLTTYWANDATVREALQINKESIGEWVRCYYSIPYNNDIKSSMPYHVNNSISGYRSLIYSGDHDFEVPYLGTQAWIRSLNYSIIDDWRPWMVKNQIAGYTRTYANKMTFATIKGGGHTAESKPEEASIMFQRSFVEAPLGQWLTKGSLMLLQQDVWGSSPNYCDLLVDLQINGGKCAGDLQRCTIMDLIRKKKTKRSFSSILDWIKGMANNYVSSVLKSLLLLLHLVFLILLLSSIFFLVSLCARNRVCFQSLCVIKSVYIGANEEEEVQLFYYFIKSDRNPKEDPLILWLTGGPGCSAISGLLFENGPLAMKLDVYNGTLPFLVSTTYSWTKTSSIIFLDQPVGTDQPVSIPLERHAKVSKRDIPVGSEVKNLP

SEQ ID NO: 5251 - protein, 451 aa, Triticum aestivum
MATAHQSDGAAAANGKSNGHAVPPAANGESNGHAEAAPVNGESNGHAAAAAAEPEEAVEWNFAGGKDGILATTGAKMSIRAIRYKISASVQESGPRPVLPLAHGDPSVFPAFRTAVEAEDAVAAALRTGQFSCYPAGVGLPAARSAVAEHLSQGVPYKLSADDIFLTAGGTQAIEVIIPVLAQTAGANILLPRPGYPNYEARAAFNKLEVRHFDLIPEKGWEVDIDSLESIADKNTTAMVIINPNNPCGSVYSYDHLAKVAEVARKLGILVIADEVYGKLVLGCAPFIPMGVFGHTTPVLSIGSLSKSWIVPGWRLGWVAVYDPRKILEETKISTSITNYLNVSTDPATFIQAALPQILENTKEDFFKGIIGLLKESSEICYREIKENKYITCPHKPEGSMFVMVKLNLHLLEEIHDDIDFCCKLAKEESVILCPGRTAFSHLSTEIKCME

SEQ ID NO: 5252 - protein, 258 aa, Oryza sativa
KREIKILRLFIHPHIIRLYEVIYTPTDIYVVMEYCKFGELFDYIVEKGRLQEDEARRIFQQIISGVEYCHRNMVVHRDLKPENLLLDSKYNVKLADFGLSNVMHDGHFLKTSCGSPNYAAPEVISGKLYAGPEVDVWSCGVILYALLCGTLPFDDENIPNLFKKIKGGIYTLPSHLSALARDLIPRMLVVDPMKRITIREIREHQWFQIRLPRYLAVPPPDTAQQAKMVLCVTFLTSCSLMYQTLYTNIIFLRYTYRV

SEQ ID NO: 5253 - protein, 891 aa, Schizosaccharomyces pombe
MEYRTNNVPVGNETKSAALNALPKIKISDSPNRHHNLVDAFMQSPSYSTQPKSAVEPLGLSFSPGYISPSSQSPHHGPVRSPSSRKPLPASPSRTRDHSLRVPVSGHSYSADEKPRERRKVIGNYVLGKTIGAGSMGKVKVAHHLKTGEQFAIKIVTRLHPDITKAKAAASAEATKAAQSEKNKEIRTVREAALSTLLRHPYICEARDVYITNSHYYMVFEFVDGGQMLDYIISHGKLKEKQARKFVRQIGSALSYLHQNSVVHRDLKIENILISKTGDIKIIDFGLSNLYRRQSRLRTFCGSLYFAAPELLNAQPYIGPEVDVWSFGIVLYVLVCGKVPFDDQNMSALHAKIKKGTVEYPSYLSSDCKGLLSRMLVTDPLKRATLEEVLNHPWMIRNYEGPPASFAPERSPITLPLDPEIIREMNGFDFGPPEKIVRELTKVISSEAYQSLAKTGFYSGPNSADKKKSFFEFRIRHAAHDIENPILPSLSMNTDIYDAFHPLISIYYLVSERRVYEKGGNWNRIAKTPVSSVPSSPVQPTSYNRTLPPMPEVVAYKGDEESPRVSRNTSLARRKPLPDTESHSPSPSATSSIKKNPSSIFRRFSSRRKQNKSSTSTLQISAPLETSQSPPTPRTKPSHKPPVSYKNKLVTQSAIGRSTSVREGRYAGISSQMDSLNMDSTGPSASNMANAPPSVRNNRVLNPRGASLGHGRMSTSTTNRQKQILNETMGNPVDKNSTSPSKSTDKLDPIKPVFLKGLFSVSTTSTKSTESIQRDLIRVMGMLDIEYKEIKGGYACLYKPQGIRTPTKSTSVHTRRKPSYGSNSTTDSYGSVPDTVPLDDNGESPASNLAFEIYIVKVPILSLRGVSFHRISGNSWQYKTLASRILNELKL

SEQ ID NO: 5254 - protein, 291 aa, Haloarcula marismortui ATCC 43049
MSKSLDISTTEAEQTVTEVIDTIVATTPDVRRAVADYRGQSNSVNPTGDDQLAADLRADELFEQRVLGIDGVASYASEERADVKTTDGRLHVAMDPLDGSSNLEPNSGMGTIFGIYSEQPPTVGTNLLAAGFVIYGPITSMVVARDGSVREYILEDGDKRVVDDDVTVPEDPTVFGFGGGVDSWTDEFESYAEAVRHELKLRYGGAMVADINQVLTYGGIFSYPALESRPEGKLRVQFEGHPMAYILESAGGRSSDGDQSLLEIEPDELHERTPLYLGNDDLIDRLEANID

SEQ ID NO: 5255 - protein, 610 aa, Pseudomonas aeruginosa PAO1
MCGLAGWVDYTRKLDDEFPAIFAMTDTLALRGPDAEGIWKHRNALLGHRRLAVIDLSGGVQPMSYRFPTGQEVTLVYTGEVYNHDALRERLRRAGHEFRTRSDTEVVLHAYLQWGERCCEYLTGMFAFAVFDGRDGHLLLVRDRLGIKPLYYARHREGLLFGSEIKSILAHPEFAARLDAVGLVDLLTLSRGTSQTPFREVQELLPGHLLSWRPNSQAKLRRYWEVRRQEHADDLQSTVQRTRELVTRALGAQLHADVPVCSLLSGGLDSTALTGIAQRIAKAEHGGDINSFSVDFVGQAEQFRSDDLRPDQDQPFALLAAQYIGSRHRTVLIDNAELVCERAREEVFRAKDVPFTFGDMDTSLHLMFGEIRRHSTVAISGEGADELFGGYGWFRDPQAVAAARFPWASRVRLPAGFIDAGFNRRCDLLQYQQASYDDGLRQVEHLAGDSPEERRMREFSHLHLKRWMVLLLERKDRLSMCNGLEVRVPYTDHELVEYVYNVPWSIKSRDGEEKWLLKRACADYVPEAVLKRRKSPYPTSANLGYERFLRGSVRRLLEDAVNPVFGIVSREFLAAELEHPEGYFNTQVSRHNLETALALEGWLRLYGLSA

SEQ ID NO: 5256 - protein, 189 aa, Osmunda regalis
DEHGEVVAEIRRSDLEPYIGLHYPATDIPQASRFLFMKNRVRMICDCTLPPVKVIQDRNLAQPLSSTGSTLRAPHGCHAQYMGNMNSIASLVMAVIVNDTAEVDANGRAYQGTRLWGLVVCRHTSPRAVPFPLRSACEFLMQVFGLQLNMEVGMAAQVREKHILRTQTVLCDMLLRDAPIGIVSQSPNV

SEQ ID NO: 5257 - protein, 616 aa, Listeria monocytogenes str. 4b H7858
MCNNYANTDGTLSDTSLAYYKERALGGFGLITFEATVVDVRAKGGANKACLYSDHQIASFKRVIDVCHDAGAKISVQLQHAGPEGNSKVSGYPLRAASAIASAAGRNTPEAISREELYELIELYGEAALRAKKAGADAVEVHCAHGYLVSSFLSARTNKRVDEFGGCFENRMRLPRLIIESIRKRVGHSIAILCRINSTDGVEGGLSVQDSATVAAYLEDCGLDGLHVSRSVHIRDEYMWAPTVLHAGFSSDLVTQIKRAVSIPVITVGRFTEPHYAELMVREGRADLVAFGRQSLADPETPNKAAAGKLDELLPCIACLQGCVANMYAGKPITCLVNPLLGRESEAYSPKTPSKKVVVIGGGVGGLYAGWMAGSRGHDVTVYEASDMIGGQMRLAAYPPGKGDLTNMVRSYIKKCEQFDVEIKTNTPVTPELIQEVAPDAVIIATGATPLVLPIPGIEDAGLIHAVDLLDGKEKCGQKVLVVGGGMVGSETAAFLGEAGHDVTVVELRDEVGADVISEHRKFLMRDFDEYKIKSVTNAKVTSFFEDGVTYSLADNKEHRIDGFDSVVLAMGSRAYNPLEEAIKKMVPETYVIGDAIRARRALDATKEALDAVLQL

SEQ ID NO: 5258 - protein, 543 aa, Malus x domestica
MGCYSSKENAPKPGSKGFGSSQPYQQPQTAAQPQKVSSQQPHNPPPPPRPQPQQRAQPAPQPRAQYQQPSPPPAKPAPQPNSILGKPFDDIKQYYTLGKELGRGQFGITYLCTENSTGHSYACKSILKRKLVSKNDRDDIKREIQIMQHLSGQPNIVEIKGAYEDRYSVHLVMELCAGGELFDRIIAQGQYSERAAAAILRDIVNVVHICHFMGVLHRDLKPENFLLSSKDEKAMLKATDFGLSVFIEEGKVYRDIVGSAYYVAPEVLRRSYGKEIDIWSAGVILYILLSGVPPFWAETERGIFDAILEGVIDFDSQPWPSISDSAKDLVRKMLTQDPRKRITSAEVLEHPWLRVGGVASDKPLDSAVLSRMKQSRAMNKLKQLALKVIAENLSEEEIKGLKTMFTNMDTDKSGTITYEELKTGLARIGSRLSEAEVRQLMDAADVDGNGSIDYIEFISATMHRQRLERDEHLYKAFQYFDKDSSGYITRDELEAAMKEHGMGDDNTIREIISEVDADNDGRINYSEFCAMMRSGAQQPAKLF

SEQ ID NO: 5259 - protein, 187 aa, Osmunda regalis
DEHGEVVAEMRRSDLEPYLGLHYPATDIPQASRFLFMKNRIRMICDCCASPIQVIQDEKLRQPLSLAGSTLRAPHGCHSQYMVSMGSVASLVMAVIVNNNDEEPSSRSYQTKLWGLVVCHHTTPRAVPFPLRSACEFLMQVFGLQLNMEVKLSAQMREKHILRTQTLLCDMLLRDAPIGIVSQSPNI

SEQ ID NO: 5260 - protein, 395 aa, Rickettsia typhi str. Wilmington
MLNKLNKPALFALIFYPILIISLVVKYSFDYGIGLLEIIFIIASYYINNITVGIGLHRLWSHNAYKINKYAEFVLVMLSAGTLQGPALSWASNHYKHHAKTDTDQDPHSPLKFDNKVLGFLWSHIGWMLVGSGSYKFIDRITWAKLGKNNLLKWQLKYYWKIAAFMNIVVPLFTGYLIGGTIQSAYAGFLFIGLGRFLQQQATFSVNSLCHFVGSKKYYRGTAGDIWWMALFLLGENWHNYHHAFPSDYRNGVKWYHFDVHKWIIFLMSKIGLASELERTTKVRIQAKMQETLSYLSEKQKQKLSLMQTKIDNLLENLCLKSKEIEESSLIIKEQLKKSFVEIQESLKNLAEQVSSATQITEKPSEKLLKIVNKKIIDAEQSIYKLYNQLNTLKV

SEQ ID NO: 5261 - protein, 190 aa, Polypodium vulgare
DEHGEVVAEIRKSDLEPYLGLHYPATDIPQASRFLFMKNRVRMISDCRAIPVKVIQDRGLRQPLGLAGSTLRAPHGCHSQYMANMGSAASLGMAVTVNDNEGESSSRDHQPKQRKLWGLVVCHHTTPRAVSFPLRSACEFLMQVFGLQLNMEVELAAQMREKHILRTQTLLCDMLLRDAPIGIVSESPNI

SEQ ID NO: 5262 - protein, 469 aa, Arabidopsis thaliana
VIKCEYAVRGEIVNIAQKLQEDLKTNKDAYPFDEIIYCNIGNPQSLGQQPITFFREVLALCSYTALLDESATHGLFSSDSIERAWKILDQIPGRATGAYSHSQGIKGLRDAIADGIEARDGFPADPNDIFMTDGASPGVHMMMQLLITSEKDGILCPIPQYPLYSASIALHGGTLVPYYLDEASGWGLEISELKKQLEDARSKGITVRALAVINPGNPTGQVLSEENQRDVVKFCKQEGLVLLADEVYQENVYVPDKKFHSFKKVARSMGYGEKDLALVSFQSVSKGYYGECGKRGGYMEVTGFTSDVREQIYKMASVNLCSNISGQILASLIMSPPKPGDDSYESYIAEKDGILSSLARRAKTLEEALNKLEGVTCNRAEGAMYLFPCLHLPQKAIAAAEAEKTAPDNFYCKRLLKATGIVVVPGSGFRQVPGTWHFRCTILPQEDKIPAIVDRLTAFHQSFMDEFRD

SEQ ID NO: 5263 - protein, 445 aa, Arabidopsis thaliana
MASNGVTNCNANANVWRFKGNGATSDAAAVTLRKLAFGMFKNCTMNSGKTILFPTPGEPSAHSNFRTCPEAEEAVAAAARSGMANSYAPSPGVFKARRAVAEYLNGELPTKLKAEDVYITGGCNQAIEIVIDSLAGNPSANILLPRPGYPHYDARAVYSGLEIRKYDLLPESDWEINLDGLEAAADENTVAMVIINPNNPCGNVYTYDHLNKVAEMARKLGIMIISDEVYDHVVYGDKPFIPMGKFASIAPVITLGSISKGWVNPGWRVGWIAMNDPNGIFVSTGVVQAIEDFLDLTPQPSFILQEALPDILEKTPKEFFEKKIKAMRRNVELSCERLKDIPCLFCPKKPESCSYLWLKLDTSMLNNIKNDFDFCTKLVSEESLILIPGVALGAENWVRISIGTDESVVQEIFDRLKGFYDRHAISKEAIKLSGHAINQIVVSVN

SEQ ID NO: 5264 - protein, 372 aa, Arabidopsis thaliana
MPEIEIAAGSGDNNDALFGKYELGKLLGCGAFAKVFHARDRRTGQSVAVKILNKKKLLTNPALANNIKREISIMRRLSHPNIVKLHEVMATKSKIFFAMEFVKGGELFNKISKHGRLSEDLSRRYFQQLISAVGYCHARGVYHRDLKPENLLIDENGNLKVSDFGLSALTDQIRPDGLLHTLCGTPAYVAPEILSKKGYEGAKVDVWSCGIVLFVLVAGYLPFNDPNVMNMYKKIYKGEYRFPRWMSPDLKRFVSRLLDINPETRITIDEILKDPWFVRGGFKQIKFHDDEIEDQKVESSLEAVKSLNAFDLISYSSGLDLSGLFAGCSNSSGESERFLSEKVAGDVGGGSGGVCERGESEDEEEEGGRVWV

SEQ ID NO: 5265 - protein, 64 aa, Oryza sativa
QALLEFEKLVSVKQQVVAGTVDYFTIEVKEGDAKKLYEAKVWEKPWMDFKELQEFKPVDASANA

SEQ ID NO: 5266 - protein, 253 aa, Bartonella quintana str. Toulouse
MLIEQFICREDNFGVLIHDERSGYTAAIDAPESKAICSALKRRNWTLQTIFVTHHHHDHIEALAELKQIYKAVVIGPEAEKEKIGHLDQALQPDESLFFGTHTLLALSTPGHTLGSLSYYFPQENLLFSGDTLFSLGCGRLFEGTPAQMLNSFKKLRQLPDETLLYCGHEYTKTNALFALTLDSHNQKLHQRVEDVFLLRAKNAMTLPVTLGQEKATNPFLRWDDRTLRKNLAMEKETDEEVFAEIRKRKDNF

SEQ ID NO: 5267 - protein, 373 aa, Vibrio fischeri ES114
MNHKTLFEKTYLKNITLQNRIVMAPMTRARTSQPGNIPNDMMATYYKQRATAGLIISEATQISDDSQGYSFTPGVYTDEHVKGWQPITSAAHKEGAAIFCQLWHVGRVSHPIFQKGGLPIAPSALAPVETKVWISDEEGNGKMVDCIQPRAMTQDDIDRVIQDFAYSAKRAIEAGFDGIEIHGGNGYLIDQFLRTNSNHRTDKYGDTRENRIRFLLEVVDAVSKEIGSDKVGVRLAPFITFKDMDCPDIVPTILDASRELQSRNIAYLHLSEADWDDAPVIPENFRIELRKLFSNTIIVAGSYTQERANEILNKGYADLVAFGRPFVSNPDLVSRLKNNYELAALDGNTLFGGNAKGYIDYPVYNTKVLEVEV

SEQ ID NO: 5268 - protein, 368 aa, Debaryomyces hansenii CBS767
KHCTTNKQHSENAYIRCTIFDSKGDIVVHGKDIRRLQFMKTHNLVPRDFRKITRHYHGSNMSSMNNINVDIVPSIVTRGNSILLNLSNIKALIKSDTVVIFDSLSKNSGSGMNKSHSHGSFLKDMNEKLKTKNEQDDLPYEFRALECISIHVMLNLTTEMNVHKTVLQNILSRLEESIERVKLRYLLIQSKKIAQFHQKTKLIRDLLDNILEQNDELNALYLTEISKGKPRLQANHAEAEMLLESYYKTIDEIVQTVENLRSQIKTSEEIINIVLDSNRNELMLLGLKFSTGLLSMGCALYIAALYGMNLENFIEETDGGFELVVGGGSILLLILLMFSVKQLKKVQRITMTGMGRENSRISINDNKR

SEQ ID NO: 5269 - protein, 247 aa, Brassica napus
  misc_feature (16)..(16): Xaa can be any naturally occurring amino acid
  misc_feature (139)..(140): Xaa can be any naturally occurring amino acid
  misc_feature (235)..(235): Xaa can be any naturally occurring amino acid
RSDNCPYVLKAEHIGXLGVLGASEAAPILEALSRNNWNLTYILNTHHHDDHIGGNAELKAKYGAKVIGSAVDKDRIPGIDILLKDSDKWMFAGHEVRVIDTPGHTQAHVSFYFPGSATVFTGDLIHTLSCATRPGGTPXXLLSSLQKIVSLPDDTNIYCGRENTAGNIKFALSIEPKNETLHSYATRVAHLRSQGLPSIPTTVKVEKACNPFLRTSSKEIRRSLSIPDSANEAEXALRCIHRARDRF

SEQ ID NO: 5270 - protein, 515 aa, Aspergillus parasiticus
MEDGTQVSTLERVVKEVQAPALQTPTDEQFWSPEDPSKPNLQFLKQHFYREGRLTEDQALWIIQAGTQLLKAEPNLLEMDAPITVCGDVHGQYYDLMKLFEVGGDPSETRYLFLGDYVDRGYFSIECVLYLWSLKIWYPNTLWLLRGNHECRHLTDYFTFKLECKHKYSERIYEACIESFCSLPLAAVMNKQFLCIHGGLSPELHTLEDIKSIDRFREPPTHGLMCDLLWADPLEEFGQEKTGDYFVHNSVRGCSYFFSYPAACAFLEKNNLLSIIRAHEAQDAGYRMYRKTRTTGFPSVMTIFSAPNYLDVYNNKAAVLKYENNVMNIRQFNCTPHPYWLPNFMDVFTWSLPFVGEKITDMLIAILNTCSKEELEDDTPTTVSPTGPPSPPVPMDVESSEFKRRAIKNKILAIGRLSRVFQVLREESERVTELKTATGGRLPAGTLMLGAEGIKQAITNFEDARKVDLQNERLPPSSEEVYKRSEEERQAALERAQREADNDAGLATVARRISM

SEQ ID NO: 5271 - protein, 320 aa, Triticum aestivum
  misc_feature (54)..(54): Xaa can be any naturally occurring amino acid
  misc_feature (173)..(173): Xaa can be any naturally occurring amino acid
  misc_feature (187)..(187): Xaa can be any naturally occurring amino acid
  misc_feature (239)..(239): Xaa can be any naturally occurring amino acid
  misc_feature (294)..(294): Xaa can be any naturally occurring amino acid
PFAVPAEYHRFPLPPSSSAPAAASRGSAGGDVEEGIVITTPLKRKAPCERKRPXESTEWMITSPGFTEGVSSPHMTPISGKAARTYKSKAKGSKDGLQTPISNAGSPGTPLTPGSSRAEHSLGELTKKCISLLKQAEDGILDLNNVAEILVVKKRRIYDITNVLEGIGLLEKXLKNRIRWEGLDDSXANLDNEISILETELENLKLQEKALDNRISEMHEKVRELTEEENHQRWLYLTXEDDIKGLPCFQNETLIAIKAPHGTTLEVPDPDEAGDYVQRRYTIVIRSTMGSIDXYLVSKFEENLEELVGVTTPPRHANVA

SEQ ID NO: 5272 - protein, 547 aa, Rhodopseudomonas palustris CGA009
MSAKEVKFGVDARDRMLRGVDILANAVKVTLGPKGRNVVLDKSFGAPRITKDGVTVAKDIELDDKFENMGAQMVREVASKSADAAGDGTTTATVLAQAIVREGAKAVAAGMNPMDLKRGIDLAVEAVVADLVKNSKKVTSNDEIAQVGTISANGDAEIGKFLADAMKKVGNEGVITVEEAKSLETELDVVEGMQFDRGYISPYFVTNADKMRVEFDDAYILINEKKLSNLNELLPLLEAVVQTGKPLVIVAEDVEGEALATLVVNRLRGGLKVAAVKAPGFGDRRKAMLQDIAILTGGQAISEDLGIKMENVTLQMLGRAKKVMIDKENTTIVNGAGKKADIEARVAQIKAQIEETTSDYDREKLQERLAKLAGGVAVIRVGGATEVEVKERKDRVDDAMHATRAAVEEGIVPGGGVALLRASEQLKGLKTKNDDQKTGVEIVRRALSAPARQIAINAGEDGSVIVGKVLEKEQYAFGFDSQSGEYGDLVKKGIIDPTKVVRTAIQNAASVAALLITTEAMIAELPKKGGAGAGGMPPGGGMGGMDF

SEQ ID NO: 5273 - protein, 190 aa, Polypodium vulgare
DEHGEVLAEIRRSDLEPYLGLHYPATDIPQASRFLFMKNRVRMICDCRALPVRVIQDKELRQPLGLAGSTLRAPHGCHSQYMENMGSIASLVMAVVVNDNDEDVSNRSHHPKMRRLWGLVVCHHTTPRAVPFALRSACEFLVQVFGLQLNMELELAAQMREKRILRTQTLLCDMLLRDAPIGIVSESPNI

SEQ ID NO: 5274 - protein, 554 aa, Vibrio vulnificus CMCP6
MCSVFGILDIKSDAAALRPIALEMSKKLRHRGPDWSGIYASDRAILAHERLAIVGLNSGAQPLYSPDKKLILAVNGEIYNHKEIRARYEGKYDFQTDSDCEVILALYQEMGADLLEELNGIFAFVLYDEEKDQYLIGRDHIGIIPLYQGYDEHGNYYVASEMKALVPVCKTISEFPPGSYYSSTDAGPQRYYIRDWNEYAAVQGNTSSKEELTAALEAAVKRQLMTDVPYGVLLSGGLDSSITSAVAKRYAAMRIEDDEQTEAWWPQLHSFAIGLDGAPDLKAAREVAAKIGTVHHEMTYTIQEGLDAIRDVIYHIETYDVTTIRASTPMYLMGRKIKAMGIKMVLSGEGADEIFGGYLYFHKAPNAQEFHEETVRKLLALNMFDCARANKSLAAWGVEGRVPFLDKEFIDVAMRLNPADKMCGNGKMEKHILRECFEHYLPDSIAWRQKEQFSDGVGYGWIDTLKAVAEEKVTDQQMEAAKFRFPYNTPTTKEGYVYREIFEELFPLTSAAECVPGGPSVACSSAKAIEWDESFKNCIDPSGRAVKAVHNEAY

SEQ ID NO: 5275 - protein, 122 aa, Arabidopsis thaliana
  misc_feature (68)..(68): Xaa can be any naturally occurring amino acid
  misc_feature (80)..(81): Xaa can be any naturally occurring amino acid
  misc_feature (84)..(84): Xaa can be any naturally occurring amino acid
  misc_feature (87)..(87): Xaa can be any naturally occurring amino acid
  misc_feature (94)..(94): Xaa can be any naturally occurring amino acid
  misc_feature (97)..(97): Xaa can be any naturally occurring amino acid
  misc_feature (102)..(102): Xaa can be any naturally occurring amino acid
  misc_feature (104)..(104): Xaa can be any naturally occurring amino acid
MASSMLSSTAVVTSPAQATMVAPFTGLKSSASFPVTRKANNDITSITSNGGRVSCMKVWPPIGKKKFXTLSYLPDLSDVXXAKXVDXLLRNKWXPCXEFEFXHXFFVGRETNSRIMIYAKFW

SEQ ID NO: 5276 - protein, 286 aa, Listeria monocytogenes str. 4b H7858
MILPGNETIPYIGLGVFQVTEQEFIAGAVEKAIEVGYRLFDTAAVYNNEAIVGQAIASSAVSREELFISSKVWNGDLGFDETLFAFERTLRNLKLDYLDLYLIHWPVAGKYRDSWRAMERLHDEKLIKSIGVANFKQHHLSDLLVAANEKPVLNQVETHPLLPQNDLRKYLAEQNIAHAAWSPLAKGILMQNPVITEIAKKHQASVDQVILQWHLNRNTIIFPKSITSSRIEENSRLSYFQLDAIDMEKIDRLETGKRVGPDPDDLEYFLSSIERERAYLSGENAE

SEQ ID NO: 5277 - protein, 198 aa, Glycine max
MAMLGGVRDVPSNENSVEVESLARFAVDEHNKKENALLEFARVVKAKEQVVAGTMHHLTLEIIEAGKKKLYEAKVWVKPWLNFKELQEFKPSTTITPSDLGCKKGEGASGWREVPGDDPEVQHVADHAVKSIQQRSNSLFPYELQEVVHANAEVTGEAAKYNMVLKLKRGEKEEKFKVEVHKNHEGVLHLNHMEQHHD

SEQ ID NO: 5278 - protein, 402 aa, Bordetella pertussis Tohama I
MDSILSFISGGLTQATWWQIVLFTLVVTHITIVSVTVFLHRSQAHRGLDLHPAVMHFFRFWLWMTTGMVTKEWVAIHRKHHAKCEKEGDPHSPMLFGIWKVLFRGAELYREESANKETMAKFGHGTPDDWLERNIYSKHSLAGVLTMLAIDLALFGAVGLTVWAVQMAWIPFWAAGVVNGIGHYWGYRNYNSPDTSTNVFPWGIIIGGEELHNNHHAHGTSAKFSAKWYELDIGWGYISILKFFGLAKVKKVAPKLKLESGSKGIDLSTLQGVITHRYEVMARYGDLVKRAAREELSKLKSSRQQDAANCRWTTLRRVRRWLHRNEEVLQPEQRAEVDQAIAQNQSLSTLVQMRRELGRLWESSSASSEQLLHDLQAWCQRAQQSGIAGLEQFALHLRRYAA

SEQ ID NO: 5279 - protein, 190 aa, Pilularia globulifera
DEHGEVVAEIRKSDLEPYLGLHYPATDIPQASRFLFMKNRVRMICDCRAIPVKVIQDRELRQPLSLAGSTLRAPHGCHSQYMANMGSIASLVMAVIVNDNEEETSSRSQQPKMRKLWGLVVCHHTTPRAVPFPLRSACEFLMQVFGLQLNMELELSAQMREKHILRTQTLLCDMLLRDAPIGIVSESPNI

SEQ ID NO: 5280 - protein, 545 aa, Pseudomonas putida
MAAKDVKFGDSARKKMLVGVNVLADAVKATLGPKGRNVVLAKSFGAPTITKDGVSVAKEIELKDAFENMGAQLVKEVASKANDAAGDGTTTATVLAQSIVNEGLKAVAAGMNPMDLKRGIDKATAAVVAELKNLSKPCADSKAIAQVGTISANSDSSIGEIIAEAMEKVGKEGVITVEEGSGLENELSVVEGMQFDRGYLSPYFVNKPDTMVAELEGPLLLLVDKKISTSRAAASTERASAGRPLLIVAEDVEGEALATLVVNNMRGIVKVAAVKAPGFGDRRKAMLQDIAVLTGGQVISEEIGVSLETATLEHLGNAKRVILSKENTTIIDGAGADTEIEARVKQIRAQIEETSSDYDREKLQERLAKLAGGVAVIKVGAGTEVEMKEKKARVEDALHATRAAVEEGVVPGGGVALVRALNAIVDLKGDNEDQNVGIALLRRAVESPLRQITANAGDEPSVVANKVKQGSGNFGYNAATGEYGDMIEMGILDPAKVTRSALQAAASIGGLMITTEAMIADAPSDAPAGGGMPDMGGMGGMGGMM

SEQ ID NO: 5281 - protein, 283 aa, Listeria monocytogenes EGD-e
MKTVKLNNGVEVPILGFGTYQITDAAEAEHAVKDAIKAGYRHIDTAQSYMNEEAVGRGIAASGVDRKELFITTKIWVENVSYKGVMSSFDRSLKRLGLDYVDLLLIHQPFNDVYGAWIAMEELQASGKIRAIGVSNFSPDRVIDLAAFNEVTPQVNQIEVNPFQQQTANLAILRKEGVAIEAWAPFAEGKNDIFNNPVLTKIGAKYGKSAAQVILRWLVEQDIIVLAKSVKPERMAQNLAIFDFELTEADKEEIAGLDQGESQFFSHADPEMVKWMASRKLNV

SEQ ID NO: 5282 - protein, 375 aa, Streptomyces avermitilis MA-4680
MTVTTDATDRAAQILSRPVTLNGLTVPNRIVMAPMTRQFSPGGIPGEDVASYYARRAAAGVGLIVTEGTYVGHESAGQSDSIPRFHGEEQLAGWSKVADAVHAAGGTIVPQLWHIGMVRGAGEPPFADAPPVGPSGIGTEGAEVTGKAMTQQDLDDVIEAFAKAAADAERIGFDGVELHGAHGYLIDQFLWAGTNRRTDAYGGDPVARTKFAAEIVAAVRSAVSPSFPVLFRYSQWKQQAYDARLAETPEELEAILAPLAAAGVDAFHASTRRYWQPEFDGSDLNLAGWTKKITGKPAISVGSVGLNGEFLKAFQGEGSTVRGIDDLLDRLESGEFDLVAIGRALLQDPEWAAKVLAGRFSELAAYDASSLKTLH

SEQ ID NO: 5283 - protein, 505 aa, Arabidopsis thaliana
MEVLASSSLSPISFTKPNKINPNFSIQISKASKFSYARSRSNISRSNAANPGVVFVCNRFLCVIERNDQRKLSGKVMMKSSVNFRQNLSVALVRIVSVLLVSSISVVTTDSPPSWGLTEENLLFLEAWRTIDRAYIDKTFNGQSWFRYRETALRNEPMNTREETYMAIKKMVATLDDPFTRFLEPGKFKSLRSGTQGAVTGVGLSIGYPTASDGPPAGLVVISAAPGGPANRAGILPGDVIQGIDNTTTETLTIYDAAQMLQGPEGSAVELAIRSGPETRLLTLTRERVSVNPVKSRLCELPGSGSNSPKIGYIKLTTFNQNASSAVREAIETLRGNNVNAFVLDLRDNSGGSFPEGIEIAKFWLDKGVIVYICDSRGVRDIYDTDGSNAIATSEPLAVLVNKGTASASEILAGALKDNKRALVYGEPTYGKGKIQSVFELSDGSGLAVTVARYETPAHTDIDKVGVTPDHPLPKSFPKDEEAFCGCLKDPTAACYLNQGLLFSR

SEQ ID NO: 5284 - protein, 541 aa, Streptomyces avermitilis MA-4680
MAKIIAFDEEARRGLERGMNQLADAVKVTLGPKGRNVVLEKKWGAPTITNDGVSIAKEIELEDPYEKIGAELVKEVAKKTDDVAGDGTTTATVLAQALVREGLRNVAAGANPMALKRGIEKAVEAVSGALLEQAKDVETKEQIASTASISAADTQIGELIAEAMDKVGKEGVITVEESQTFGLELELTEGMRFDKGYISAYFATDMERMEASLDDPYILIANSKISSVKDLLPLLEKVMQSGKPLLIIAEDVEGEALSTLVVNKIRGTFKSVAVKAPGFGDRRKAMLGDIAILTGGEVISEEVGLKLENASIDLLGRARKVVITKDETTIVDGAGSADQVAGRVNQIRAEIENSDSDYDREKLQERLAKLAGGVAVIKAGAATEVELKERKHRIEDAVRNAKAAVEEGIVAGGGVALIQASSVFEKLELTGDEATGANAVRLALEAPLKQIAVNGGLEGGVIVEKVRNLPVGHGLNAATGEYVDMIAEGIIDPAKVTRSALQNAASIAALFLTTEAVIADKPEKAAAGGAPGGMPGGDMDF

SEQ ID NO: 5285 - protein, 679 aa, Magnetospirillum magnetotacticum MS-1
MAANGETEMTRVHPDGLFAVKVKGSPAYRLRVNRHDGGTEDLDDPYRFPPVLGDLDVHLLAEGTHLRTFEKLGAQVRTVDGVGGVEFALWAPNASRVSVVGDFNGWDGRRHPMRLRHQAGVWEIFIPGLGQGCIYKYEIVASDGRLLPLKADPYGHFAEVPPKTASVVWELGRRDWADDDWMAAQKARNDRHAPVSIYEVHLGSWRRVPEDSNRPLSYLEMADQLGDYVADLGFTHVEFLPVHEHPFGGSWGYQPVGLFAPTSRYGTPDEFRTLVERLHLKGIGVIIDWVAGHFPNDPHGLHQFDGTHLYEHEDPRLGIHKDWNTLIYNYGRGEVVNYLYANALYWMEQYHVDGLRVDAVASMLYLDYSREPGEWIANRHGGNENLEAIEFLRRMNMLVYAEHPGAMTIAEESTAWPMVSRPVHLGGLGFGYKWNMGWMHDTLRYFAKDPIHRRYHHDSLTFAQLYAYHENFVLPLSHDEVVHGKGSIFGRMPGDPWQRFANLRAYYAFMWTQPGKKLLFMGSEFAQEREWNEDASLDWHLLADGRNEGVRRLIRDLNRLYRTEPALHQLDNEQAGFAWIDCLDRDNSVLTWLRKGFDPSDFLVVAGNYTPMVRESYRIGVPEPGWYRELLNTDSEWYGGANIHNGGGVQSEEVPWHGHGWSICLRLPPLATCVFKRER

SEQ ID NO: 5286 - protein, 495 aa, Leptospira interrogans serovar Lai str. 56601
MDLIYRSIYKRRKIMSRKTLTTAGGHPVSQNQHSLTAGPRGPVLIQDTHLIEKLAHFNRERIPERVVHAKGAGAYGTLTITQDLTKYSRASIFSKKGKQTSLFLRFSTVAGEKGSADTERDPRGFAVKFYTDEGIWDLVGNNTPVFFARDPLKFPDFIHSQKRDPVTGYKNPIRMWDYWAGSPEAFHQITILFGDRGIPDGYRFMNGYGSHTFGLWNSKGERFWTKFHFKSMQGIRNLSMEKASALAGTDPDYATRDLFEAIERKEFPKWKFCVQIMPEKEATKYKFNPFDLTKVWSHKDYPLIEVGVLELNSNPKNYFEEVEQAAFSPSNMPPGIGASPDKMLQGRLFAYPDAHRYRLGIQYQQLPVNRPKNSVNVYHRDGRTRFQCDGNYDNYEPNGFEGPVQDSSYAEPPLSISGDMDRYNSHIGNDDYSQAGDLYRLMSVEERERLTSAIASTMHNLPKPLLEANLKHFHLCDPEYGEQLAAKVGLALSRV

SEQ ID NO: 5287 - protein, 494 aa, Oryza sativa
  misc_feature (181)..(181): Xaa can be any naturally occurring amino acid
  misc_feature (263)..(263): Xaa can be any naturally occurring amino acid
MDPYKHRPSSSFNGPLWSTNSGAPVWNNNNSLTVGSRGPILLEDYHLVEKLANFDRERIPERVVHARGASAKGFFEVTHDITHLTCADFLRAPGVQTPVIVRFSTVIHERGSPETLRDPRGFAIKFYTREGNWDLVGNNFPVFFIRDGMKFPDMVHSLKPNPKSHVQENWRILDFFSHHPXESLHMFTFLFDDIGIPADYRHMDGSGVNTYTLVNRAGKSHYVKFHWKPTCGVKSLLDDEAVTVGGTNHSHATQDLYDSIAAXGNFPEWKLFIQTIDPDHEDRFDFDPLDVTKTWPEDIVPLQPVGRMVLNRNIDNFFSENEQLAFCPGIIVPGIYYSDDKLLQTRIFSYSDTQRHRLGPNYLLLPPNAPKCAHHNNHYDGFMNFMHRDEEVDYFPSRYDPAKHAPRYPIPSATLTGRREKVVIAKENNFKQPGERYRSWDPARQDRFIKRWIDALSDPRLTHEIRSIWLSYWSQADRSLGQKLASRLSAKPSM

SEQ ID NO: 5288 - protein, 218 aa, Brucella melitensis 16M
MRQLQAIIVPVTPFQQNCTILFDGETKKGVVIDPGGDLARIREAIESQGIDVEAIWITHGHIDHAAAALDLKEALGVDIIGPHRDDKFLLDNLVAAGLKYGITEGVRNVTPDQWLEEGDKVCVAGHVFDVFHCPGHAPGHVVFFNPEARFAIVGDVLFNGSVGRTDLPGGDHATLIRSITEKLLPLGDDIGFICGHGPGGRFGEERRSNPFLTDTGYA

SEQ ID NO: 5289 - protein, 563 aa, Xylella fastidiosa Ann-1
MCSIFGIFNLQPSDNLQILRHQALECSQRQRHRGPDWSGVYVDVGAILVHERLAIVDPAGGAQPLLSEDGTLALAVNGEIYNHAVLKGTLQQPYAFQTHSDCEVINALYREETPTSFLNRLNGIFAFVLWDKTTGRGLIARDPMGVVPLYWGHDQDGRLRVASEMKALVEHCSDVAQFPPGHWYDTTTGTLVKYYERPWKNYSAVEGVQVSLQELREAFERAVHRQLMTDVPYGVLLSGGLDSSLVAAVAARYARHRIETNDQSEAWWPRLHSFAIGLKDSPDLSAANVAAEALNTVHHRFEYTFQEGLDVLPEVIRHIETYDVTTIRASTPMFLLARRIKAMGVKMVLSGEGSDEIFGGYLYFHKAPNAREFHEELVRKLNALYYYDCLRANKAMMAWGVEPRVPFLDREFLDVAMRMDAQHKMVDKTSNGPQRMEKGILRAAFDGYLPPSILWRQKEQFSDGVGYGWIDGLKAHAETQVSDHALATAETRFQVNPPQTKEAYYYRSIFERFFPSPAAAETVPGGKSIACSSPAAIAWDASFATMADPSGRAVSGVHQQALL

SEQ ID NO: 5290 - protein, 503 aa, Zea mays
MEGAGRDANPLSGYRIGKTLGIGSFGKVKIAEHILTGHKVAIKILNRKKIRSMDMEEKVKREIKILRLFMHPHIIRLYEVIDTPADIYVVMEYVKSGELFDYIVEKGRLHEEEARHFFQQIISGVEYCHRNMVAHRDLKPENLLLDSKYNIKIADFGLSNVMRDGHFLKTSCGSPNYAAPEVISGKLYAGPEVDVWSCGVILYALLCGTLPFDDENIPNLFKKIKGGIYTLPSHLSPSARDLIPRMLVVDPMKRITIREIREHVWFKIRLPRYLAVPPPDTAQQVKKVDEETLNDVIKMGFDKNQLIESLQNRLQNEATVAYYLLLDNRLRTTSGYLGSEFQESMDSSFSQVIAETPTSATELRQHGFSESPGSGLRQHFAAERKWALGLQSRAHPREIISEVLKALQELNVYWKKIGHYNMKCRWSPGCLESMMHNSDSFSAESAIIETDVFMEKSTPTVKFEIQLYKTRDEKYLLDLQRVSGSHLLFLDLCSAFLTQLRVL

SEQ ID NO: 5291 - protein, 156 aa, Fragaria x ananassa
MALSLFGNSRRSNVFDPFSLDTWDPFQGFGPLMNSSSTAGDTSAFAQTRIDWKETPEAHVFKADLPGLKKEEVKVELEEGNVLQISGERSKEQEEKNDKWHRVERSSGKFVRRFRLPDNAKVDQVKAAMENGVLTVTVPKAPEPKPQVKSIDISGA

SEQ ID NO: 5292 - protein, 351 aa, Legionella pneumophila str. Paris
MVNSDLILNPYQLNEKITLKNRVIMAPMTRNMANDDFSPTRQMADYYARRADAGLIITEGTIISPDGQGYSNAPGIFTQTHIDGWKMVTEAVHERGGKIFLQIWHVGRVSHPIFLHGNLPISASETMMTGKVRRADELYYGKSRAATLEEINELIQNYALAARRAMIAGFDGIEIHGANGYLIDQFLHYHTNQRHDQYGQYPENMGRFALEVVKACINEIGGQSVGLRLSPGAYLNEIVGDERDAMVFRYVLEELNHYGIAYVHTGNFDDGIQFKELGFKTMTEFMRAHFKGTIIASGSYTLHQARKDIQNKKYDLIALGRPFIANPDLMNRIKWNADFVPYENRMLDTLF

SEQ ID NO: 5293 - protein, 508 aa, Zea mays
  misc_feature (490)..(490): Xaa can be any naturally occurring amino acid
MAFAVSGAVLGGAVRAPRLTGGGEGSLVFRHTGLFLTRGARVGCSGTHGAMRAAAAARKAVMVPEGENDGLASRADSAQFQSDELEVPDISEETTCGAGVADAQALNRVRVVPPPSDGQKIFQIDPMLQGYKYHLEYRYSLYRRIRSDIDEHEGGLEAFSRSYEKFGFNRSAEGITYREWAPGAFSAALVGDFNNWDPNADRMSKNEFGVWEIFLPNNADGTSPIPHGSRVKVRMDTPSGIKDSIPAWIKYSVQAPGEIPYDGIYYDPPEEVKYVFRHAQPKRPKSLRIYETHVGMSSPEPKINTYVNFRDEVLPRIKKLGYNAVQIMAIQEHSYYGSFGYHVTNFFAPSSRFGTPEDLKSLIDRAHELGLLVLMDVVHSHASSNTLDGLNGFDGTDTHYFHSGPRGHHWMWDSRLFNYGNWEVLRFLLSNARWWLEEYKFDGFRFDGVTSMMYTHHGLQVTFTGNFNEYFGFATYVDAEVYLMLGNDLXIHGLYPEAVTIGEEVSGM

SEQ ID NO: 5294 - protein, 496 aa, Lactobacillus acidophilus NCFM
MFYKKLDNFPKDFLWGASSAAYQIEGAANEDGKGPSIWDKYTHEKGNTYKDTNGDVAIDHYHHYKEDVELMAKMGLKAYRFSVAWSRIIPDGKGKVNPKGIEFYHNLIKDLRDHNIEPVLTMYHWDLPLNLQEKYQGWESRETIKAFRKYAQVLYREFGDEVKYWVTINEQNVFTSMGYRWGTHPPKKHDIKAMFLANHHVNIANALVVKDFHQMVPDGLIGPSFGYGPVYPKTCDPNDVLAALNAQDFNDNWWLDVYCRGKYPFFTKKQLTDLGIMPEVTAEDQKILEDPEAYPDYLGINYYHGGTVQQNRLEKQVDDQKDERKFNKVDPYLMQPKGDKAQNPEVPMFNNVENQYVDKTKWGWEIDPTGMRIALREIYEKYQLPIMITENGLGALDIVKDGKINDTYRINYLKDHVKAMKEAITDGVDLIGYCAWSFTDLLSWLNGYSKRYGFVYVDQNDNENGSLKRIPKASFSWYKQVIASDGNDENLLEHKE

SEQ ID NO: 5295 - protein, 554 aa, Shewanella oneidensis MR-1
MCSIFSILDIQSDAKELRQVALEMSKLMRHRGPDWSGIYASDKAILAHERLAIVDIEHGAQPLLTEDGSLILAVNGEIYNHKELKAQLGDKYSYQTNSDCEVILALYQEYGTEFLDKLNGIFAFVLYDKAKDAYLIGRDHMGIIPLYTGRDAAGNLYVASEMKALMPVCKTVEEFQPGQYLYSSDAAAVKYYTRDWQQYDAVKDNGASQEELREALEAAVKRQLMSDVPYGVLLSGGLDSSVISAITQTFAKRRIEDDGETGAWWPQLHSFAVGLKGAPDLIAAKKVADAIGTIHHEINFTFQEGLDAIKEVIYHLETYDVTTIRAATPMYLMARKIKAMGIKMVLSGEGADELFGGYLYFHKAPNAQAFHEELVRKLDKLHLFDCLRANKAMAAWGLEARVPFLDKEFMDVAMRINPEAKMSKDGRIEKHILRQAFEHKLPKEVAWRQKEQFSDGVGYSWIDGLKAHAAEQVDDLQLANAKFRFPYNTPETKEAYFYRCFFEEHYPLPSAAETVPGGKSVACSTPEALAWDESLRGIIDPSGRAVRSVHAASY

SEQ ID NO: 5296 - protein, 226 aa, Triticum aestivum
TTCYAEAGCPFRNSRELFTKGPAISHPLLGGANQRPSSSPFPFFPSVLPGGGGGFFKGFSGAGWRRRTSGTPRVAGGVREQDPFFPIANISRIMKKAVPANGKIAKDAKETLQECVSEFISFVTSEASDKCQKEKRKTINGDDLLWAMATLGFEEYVDPLKIYLQKYRDMEGDSKLTSKSGEGSVKKDIIGAHSGATSSNAQAMVQHGGYAQGMGYMQPQYHNGDT

SEQ ID NO: 5297 - protein, 359 aa, Arabidopsis thaliana
MTFLSYLKQWRGTAKEAFENVSIVAKFLCLLHVTDRYIISTTHVHGPSMLPTLNLTGDVILAEHLSHRFGKIGLGDVVLVRSPRDPKRMVTKRILGLEGDRLTFSADPLVGDASVSVLVPKGHVWIQGDNLYASTDSRHFGPVPYSLIEGKALLRKKSHGPDIVSETRTSISNVKIHIVGIEKAALNTRNFLKAPEKSGSETMSLIPSIFGGRRTNVFDPFSLDVFDPFEGFLTPSGLANAPAMDVAAFTNAKVDWRETPEAHVFKADLPGLRKEEVKVEVEDGNILQISGERSNENEEKNDKWHRVERSSGKFTRRFRLPENAKMEEIKASMENGVLSVTVPKVPEKKPEVKSIDISG

SEQ ID NO: 5298 - protein, 479 aa, Pyrococcus abyssi GE5
MCLIAGGFNVSREDAIKIINLGKHRGPDSFGFWSERQMLKSDNFSDVSEIEGGEIALIQCRLAMTGSKSYTQPFYNEIILVHNGEIYNHESLRKYLIERGVAFETDVDSEVILRLLEYLVFDRKLKVEEAIKLSMKMLRGDYAVAFFFNGKFYLFRDPLGVRPLYYSSRGHFASEKKVLWGLGEDAEPVLPGEIVSISKHGITRVRGFNVFSIRTQGKDYFNGLQNLLIDSVKVRASKKVGVLFSGGVDSSLIALIASRYSDVILYTSGTEDSKDVEWARRVAEELGLKLRESLFSREDIENEIERIMFAIEEPNPMNLAIAIPLYFSTKRAREDGVKVLLSGQGADELFGGYAKYLQNPGLMLKDVEELGERNLARDDKVAMLNGVETRYPYLDLPFAILALNVPLELKIRDGKRKFILREIAKSLGLPEWVAEREKKAAQYGSNAQKILEKIAKSRGVKLKGLADILFSKVFHGIQN

SEQ ID NO: 5299 - protein, 133 aa, Brassica napus
YKFLQRTVMYHILAFGFLLYYCGGLSFLTWGMGIGVAMEHHVTCCINSLCHIWGSRTWKTNDTSRNVWWLSVFSFGESWHNNHHAFESSARQGLEWWQIDISWYIVRFLEIIGLATDVKLPSESQRRRMALVR

SEQ ID NO: 5300 - protein, 222 aa, Arabidopsis thaliana
MGQESFIYSFVARGTMILAEYTEFTGNFPSIAAQCLQKLPSSSNSKFTYNCDHHTFNFLVEDGYAYCVVAKDSLSKQISIAFLERVKADFKKRYGGGKASTAIAKSLNKEFGPVMKEHMNYIVDHAEEIEKLIKVKAQVSEVKSIMLENIDKAIDRGENLTVLTDKTENLRSQAQEYKKQGTQVRRKLWYQNMKIKLVVLGILLLLVLIIWISVCHGFNCTD

SEQ ID NO: 5301 - protein, 193 aa, Glycine max
  misc_feature (43)..(43): Xaa can be any naturally occurring amino acid
  misc_feature (71)..(71): Xaa can be any naturally occurring amino acid
  misc_feature (79)..(79): Xaa can be any naturally occurring amino acid
MVRGRVELKRIENKINRQVTFAKRRNGLLKKAYELSVLCDAEXVALIIFSNRGKLYEFCSSSSMLKTLERXQKCSYGAXEVSKPAKELETLREYLKLKARFESLQRTQRNLLGEDLAPLNIKELEHLERQLDSSLKQVRSTKTQFMLDQLSDLQTKMLVEANRSLTVKLEEINSRNHYMFKHNKVGTGGGKGV

SEQ ID NO: 5302 - protein, 705 aa, Sinorhizobium meliloti 1021
MAKKPSAPNNTKPATIHDQKATRGNGGELHQIAEGDTPVLTTAQGGPVADDQNSLRAGERGPTLIEDFHFREKIFHFDHERIPERVVHARGYGVHGFFETYESLAAYTRADLFQRPGERTPAFVRFSTVAGSKGSFDLARDVRGFAVKIYTKEGNWDLVGNNIPVFFIQDAIKFPDVIHSVKPEPDREFPQAQSAHDNFWDFISLTPESMHMIMWVMSDRAIPRSFRFMEGFGVHTFRFVNAKDESTFVKFHWKPKLGLQSVVWNEAVKINGADPDFHRRDMWQAIQSGNFPEWDLHVQLFDQDFADKFDFDILDPTKIIPEEVLPTKPVGRLVLDRMPENFFAETEQVAFMTQNVPPGIDFSDDPLLQGRNFSYLDTQLKRLGSPNFTHLPINAPKCPFQHFQQDGHMAMRNPVGRVNYQPNSWGEGPRESPMKGFRHFPSEEQGPKLRIRAESFADHYSQARQFFISQTPPEQRHIADALTFELSKVETPVIRERMVAHLLNIDETLGKKVGHALGLETMPKPADAAVATRQDLDPSPALSIIQRGPKRFEGRKLGILATDGADGALLDALIAAVEKEKAAFELIAPKVGGFTASDGKRIAAHQMLDGGPSVLYDAVVLLPSAEAVTDLIDVATARDFVADAFAHCKYIGYAGAAVPLLERAGIAELLDEGTIELTDAASAAAFLTEIGKLRVWGREPSVKLK

SEQ ID NO: 5303 - protein, 621 aa, Magnetospirillum magnetotacticum MS-1
MCGIAGLSAARPEILDEMVRRLAHRGPDGHGTFVCERTGFGLAHARLAVIDLTEGGRQPMHSPCGRWTIAFNGEIYNHAELRLELEGRGHTFRSSSDTEVLLALLAEKGEAALERLVGMFALALLDRADGSVLLARDRVGIKPLVWAGLPGGGLAFASEIKALKAVPGVDLSLDREALSQFLACLYVPAPYSIHAGIRKLAPGHLLRWKPGAAPEIACWWRPAFTAERALSVDDATEELMPALRDAVRSCMVADVPVGCFLSGGIDSSVIAALMAEARREQGASAPASFTMTFDEAAYDERVAARAVSDHVGTLHTELPASARLVDGLERMIAAFGEPFGNPTALLIGDLSAKARQHVTVALVGDGGDEVFGGYPRYQGGLLAAKWRKIPAFLRNGLIEPIVALLPESTSGRHTWRRIREFVAGAGLSDAEMYASWVEYFDPAQRRALLGGGTPPRPVADIYRATGRVHPLDAMQETDLLSFLPGNLMAYGDAMSMMHALELRLPLLDHRLIERVQAISAATRFQAGKKTLLKAAARRLLPAEIVDRPKLGFNPPMGLWLKNELAPMVAERLIPARMADLGLEWKGVEALLAEHRAGRRDLSLPVWALLVLERWQGLEASA

SEQ ID NO: 5304 - protein, 252 aa, Sinapis arvensis
ENQLCFDLLESWLIQNPDAAGFKRDGQSIFRELALFQDYHSLSSFKNALAVFMSENRQNRVSFDSNNLVLTAGATSANETLMFCLANPGDAFLLPTPYYPGFDRDLKWRTGVEIVPIQCSSSNGFRITKLALEEAYEQAKKLNLNVKGVLITNPSNPLGTTTTQTELNILFEFISKNKNIHLVSDEIYSGTAFSSSEFISVMEILKNNQLENTDVFNRVHIVYSLSKDLGLPGFRVGAMYSNDKDVISAATK

SEQ ID NO: 5305 - protein, 199 aa, Triticum aestivum
LQASGANAGYWTTNSGAPVWNNNNALTAGQRGPILLEDYHLIEKLAQFDRERIPERVVHARGASAKGFFEVTHDVSQLTCADFLRAPGVQTPVIVRFSTVVHERGSPETLRDPRGFAVKFYTREGNFDLVGNNMPVFFIRDGMKFPDMVHAFKPSPKTNMQENWRIVDFFSHHPESLHMFTFLFDDIGIPLNYRHMDSF

SEQ ID NO: 5306 - protein, 474 aa, Lactobacillus casei subsp. casei ATCC 393
MSKQLPQDFVMGGATAAYQVEGATKEDGKGRVLWDDFLDKQGRFKPDPAADFYHRYDEDLALAEKYGHQVIRVSIAWSRIFPDGAGEVEPRGVAFYHKLFADCAAHHIEPFVTLHHFDTPERLHEAGDWLSQEMLDDFVAYAKFCFEEFSEVKYWITINEPTSMAVQQYTTGTFPPAESGRFDKTFQAEHNQMVAHARIVNLYKSMQLGGQIGIVHALQTVYPYSDSAVDHHAAELQDALENRLYLDGTLAGEYHQETLALVKEILDANHQPMFQSTPQEMKAIDEAAHQLDFVGVNNYFSKWLRAYHGKSETIHNGDGTKGSSVARLQGVGEEKLPDGIETTDWDWSIYPRGMYDILMRIHNDYPLVPVTYVTENGIGLKESLPENATPDTVIEDPKRIDYVKKYLSAMADAIHDGANVKGYFIWSLQDQFSWTNGYSKRYGLFFVDFPTQNRYIKQSAEWFKSVSETHIIPD

SEQ ID NO: 5307 - protein, 1130 aa, Gloeobacter violaceus PCC 7421
MIAKFKSQRKGSIARRLLLTLGSLLLVFLLVFGFNYGLVFNQVENLRQSYRLSRELNINVYRMQEGMTDQETGVRGFLLARQEEFLAPFYQGRVQYLRSLEEARRVVQLITVRIEDPQMRSQMLSALDAAGQAAESWYEFVRAGEIESLRRGDVAAALDLGRSRQGKERFDRFRQAAAEVRRRNDLLFAQLEARISERQNQSEILSIGLLAMAGLLAGAISLGLVRSLRRPFAALEAAAVALGEGNFQTRVPAEVIENDDELAVLARSFNQTAERLGRQNLELRERDILGSLRVLDAVIVEEIDLDCLCGRLLESLGELTGSQLGALYLLEGERLLLQSSLGLSAPAPAIRLGEGMVGLAASRCAPVVLQSPPTGEPLSLETPAGALQPRSLSAWPLLSKQQLVGVLFVAGLEPLAPMARNLLESVSSQLAVALLNSRSVRAVEEARARLEATFEQMSDGVSIADARGNPQLINPAGLRILGLPADQDLTDSDWQNRFEVFTLEGEPLEAQEVPVRRAVRFGTTVRADLQIRIRQGRSVLLSVSASPLKDGRGNIYGVVAVFRDVTVERERERRLVQQARELEALNTELAATNEELEAQQSELEAINAELEQQRLQIESQNQELVEADRQKNNFLASMSHELRTPLNAIIGFSQLLLRNKNLQEQPQVLLQLDRVYQNGKIQLRLVNDILDLAKIKAGKVELRYQPVALEPFVREVYAALESLALQKNLSVRIAVDPSIGSVETDPQQLRTILINLLSNAFKYTERGEVEVRARRPAADRFELEVRDTGVGIDPDQQQKVFDEFSRLEGAATRQASGTGLGLAICKRLVTLMGGEISLVSTPGVGSTFTVRLPCGPAVIPAGRSAGEPPKVLFIEHDLQVQQLVATRLAERSYRLLFAPDSIEGIQIAKAERPDAIVLDPTLPRTDLWGVLFELRTDPTTAGIPILLQSIAGERGLAIPLGLADFLTRPVGQESLLAVLKRRRVAPEGDAILIVDDSADNREYLAACLRDEGYRVQPAASGHEALAYLESHRPQLVILDLMMPQMDGFEVLRRLRRMPGGRQLPVLILSAMDLTEQQRQTLLAEQTEQILKKGDQNIDELLSLLDDTLRRQLETARAAGAERLTPDTRSL

SEQ ID NO: 5308 - protein, 83 aa, Citrus maxima
MSLIPSIFGGRRTNVFDPFSLDVWDPFDGFLSSALTNAPSSARETSQFANARIDWKADLVHVFKADLPGLRKEEVKVEVEECR

SEQ ID NO: 5309 - protein, 344 aa, Triticum aestivum
MDHAAEAQRTDLMTITRHALNEQGRHPESRGDFTILLSHIVLGCKFVASAVNKAGLAKLIGLAGETNVQGEEQKKLDVLSNEVFVKALVSSGRTCVLVSEENEAAIFVDAPLRGKYCVCFDPLDGSSNIDCGVSIGTIFGIYMIKDKDNATLEDVLQPGTDMIAAGYCMYGSSCTLVLSTGNGVNGFTLDPSLGEFILTHPNIKIPPKGKIYSVNEGNAKNWDTPTAKYVEKCKYPTDGSSPKSLRYIGSMVADVHRTLLYGGIFLYPADKKSPSGKLRVMYEVFPMSFLMEEAGGQSFTGKGRSLDLIPTDIHERSPIFLGSSDDVEEIKALYAEEAKKAGSA

SEQ ID NO: 5310 - protein, 514 aa, Glycine max
MDRSTGRGGGGSVDMFLRNYKLGKTLGIGSFGKVKIAEHVRTGHKVAIKILNRHKIKNMEMEEKVRREIKILRLFMHHHIIRLYEVVETPTDIYVVMEYVKSGELFDYIVEKGRLQEDEARHFFQQIISGVEYCHRNMVVHRDLKPENLLLDSKFNIKIADFGLSNIMRDGHFLKTSCGSPNYAAPEVISGKLYAGPEVDVWSCGVILYALLCGTLPFDDENIPNLFKKIKGGIYTLPSHLSPGARDLIPRMLVVDPMKRMTIPEIRQHPWFQVHLPRYLAVPPPDTLQQAKKIDEEILQEVVNMGFDRNQLVESLSNRIQNEGTVTYYLLLDNRFRVSSGYLGAEFQETMDSGFNRMHSGEVASPVVGHHSTGYMDYQGVGMRQQFPVERKWALGLQSRAQPREIMTEVLKALQELNVCLEEDWTLYHECRWVAGTAGHHEMINNSLHSNHYFGNDSGIIENEAVSKSNVVKFEVQLYKTREEKYLLDLQRVQGPQFLFLDLCAAFLSQLRVL

SEQ ID NO: 5311 - protein, 556 aa, Arabidopsis thaliana
MSGSVSGCGSGGCSIVWFRRDLRVEDNPALAAAVRAGPVIALFVWAPEEEGHYHPGRVSRWWLKNSLAQLDSSLRSLGTCLITKRSTDSVASLLDVVKSTGASQIFFNHLYDPLSLVRDHRAKDVLTAQGIAVRSFNADLLYEPWEVTDELGRPFSMFAAFWERCLSMPYDPESPLLPPKKIISGDVSKCVADPLVFEDDSEKGSNALLARAWSPGWSNGDKALTTFINGPLLEYSKNRRKADSATTSFLSPHLHFGEVSVRKVFHLVRIKQVAWANEGNEAGEESVNLFLKSIGLREYSRYISFNHPYSHERPLLGHLKFFPWAVDENYFKAWRQGRTGYPLVDAGMRELWATGWLHDRIRVVVSSFFVKVLQLPWRWGMKYFWDTLLDADLESDALGWQYITGTLPDSREFDRIDNPQFEGYKFDPNGEYVRRWLPELSRLPTDWIHHPWNAPESVLQAAGIELGSNYPLPIVGLDEAKARLHEALSQMWQLEAASRAAIENGSEEGLGDSAEVEEAPIEFPRDITMEETEPTRLNPNRRYEDGSKHYFFFDQT

SEQ ID NO: 5312 - protein, 397 aa, Puelia ciliata
TGYDRVMVYRFHDDEHGEVVAESRHADLEPYLGLHYPATDIPQASRFLFRQNRVRMIADCHAAPVRVIQDPALPQPLCLVGSTLRAPHGCHAQYMANMGSIASLVMAVIITSGGDDEHNMARGGISSAMKLWGLVVCHHTSPRCIPFPLRYACEFLMQAFGLQLNMELQLAHQLSEKHILRTQTLLCDMLLRDSPTGIVTQSPSIMDLVKCDGAALYYHGKYYPLGVTPTEAQIKDIIEWLTLCHGDSTGLSTDSLADAGYHGAAALGDAVCGMAVAYITPSDYLFWFRSHTAREIKWGGAKHRPEDKDDGQRMHPRSSFKAFLEVVKSRSLPWEHAEMDAIHSLQLILRDSFRDAAEGTSNSKAIVNGQVQLGELELRGIDELSSVAREMVRLIET

SEQ ID NO: 5313 - protein, 393 aa, Sesleria insularis
EPARTEDPALSIAGAVQSQKLAVRAISRLQALPGGDVKLLCDTVVEHVRELTGYDRVMVYKFHDDEHGEVLAESRRADLEPYLGLHYPATDIPQASRFLFRQNRVRMIADCHAAPVRVIQDPAMPQPLCLVGSTLRSPHGCHAQYMANMGSIASLVMAVIISSGGEDNMSRGGAVPSAMKLWGLVVCHHTSPRCIPFPLRYACEFLMQAFGLQLNMELQLAHQLSEKHILRTQTLLCDMLLRDSPTGIVTQSPSIMDLVKCDGAALYYHGKYYPLGITPTGAQIKDIIEWLKVCHGDSTGLSTDSLADAGYPGATALGDAVCGMAVAYITPSDYLFWFRSHTAKEIKWGGAKHHPEDKDDGQRMHPRSSFKAFLEVVKSRSLPWENAEMDAIH

SEQ ID NO: 5314 - protein, 382 aa, Sorghum halepense
EPARTEDPALSIAGAVQSQKLAVRAISRLQALPGGDIKLLCDTVVEHVRELTGYDRVMVYRFHEDEHGEVVAESRRDNLEPYLGLHYPATDIPQASRFLFRQNRVRMIADCHATPVRVIQDPGMSQPLCLVGSTLRAPHGCHAQYMANMGSIASLVMAVIISSGGDDEQTGRGGISSAMKLWGLVVCHHTSPRCIPFPLRYACEFLMQAFGLQLNMELQLAHQLSEKHILRTQTLLCDMLLRDSPTGIVTQSPSIMDLVKCDGAALYYHGKYYPLGVTPTESQIKDIIEWLTVCHGDSTGLSTDSLADAGYLGAAALGDAVCGMAVAYITPSDYLFWFRSHTAKEIKWGGAKHHPEDKDDGQRMHPRSSFKAFLEVVKSRSL

SEQ ID NO: 5315 - protein, 393 aa, Sporobolus giganteus
EPARTEDPALSVAGAVQSQKLAVRAISRLQALPGGDVKLLCDTVVEHVRELTGYDRVMVYRFHEDEHGEVVAESRRDDLEPYLGLHYPATDIPQASRFLFRQNRVRMIADCHATPVRVIQDPGLSQPLCLVGSTLRAPHGCHAQYMANMGSIASLVMAMIIIVVVMTKQTSRSGISSAMKLWGLVVCHHTSPRFIPFPLRYACEFLMQAFGLQLNMELQLAHQLSEKHILRTQTLLCDLLLRDSPTGIVTQSPSIMDLVKCDGAALYYHGKYYPLGVTPTESQIKDIIEWLTVCHGDSTGLSTDSLADAGYHGAAALGDAVCGMAVAYITPSDYLFWFRSHTAKEIKWGGAKPHPEDKDDGQRMHPRSSFKAFLEVVKSRSLPWENAEMDAIH

SEQ ID NO: 5316 - protein, 682 aa, Salmonella enterica subsp. enterica serovar Typhi Ty2
MNTFFRLTALAGLLALAGQSFAVEDITRADQIPVLKEETQHATVSERVTSRFTRSHYRQFDLDEAFSAKIFDRYLNLLDYSHNVLLASDVEQFAKKKTVLGDELRTGKLDVFYDLYNLAQKRRFERYQYALKVLERPMDFTGNDTFNLDRSKAPWPKDEAELNALWDGKVKFDELSLKLTGKSDKEIRETLTRRYKFAIRRLAQTNSEDVFSLAMTAFAREIDPHTNYLSPRNTEQFNTEMSLSLEGIGAVLQMDDDYTVINSLVAGGPAAKSKSISVGDRIVGVGQAGKPMVDVIGWRLDDVVALIKGPKGSKVRLEILPAGKGTKTRIITLTRERIRLEDRAVKMSVKTIGKEKVGVLDIPGFYVGLTDDVKVQLQKLEKQNVNSIVINLRSNGGGALTEAVSLSGLFIPSGPIVQVRDNNGKVREDSDTDGVVYYKGPLVVLVDRFSASASEIFAAAMQDYGRALIVGEPTFGKGTVQQYRSLNRIYDQMLRPEWPALGSVQYTIQKFYRVNGGSTQRKGVTPDIIMPTGNEETETGEKFEDNALPWDSIDAAKYVKSDDLAPFGPELLKEHNARIAKDPEFQYIMKDIARFNAMKDKRNIVSLNYAQREKENNEEDALRLARINDRFKREGKPLLKKLDDLPKDYQEPDPYLDETVKIALDLAHLEKEKPAEQAATDK

SEQ ID NO: 5317 - protein, 394 aa, Streptochaeta angustifolia
EPASTEDPALSIAGAVQSQKLAVRAISRLQALPGGDVKLLCDTVVEHVRELSGYDRVMVYRFHDDEHGEVVAENRRADLEPYLGLHYPAMDIPQASRFLFRQNRVRMIADCHAAPVRVIQDPSLKQPLCLVGSTLRAPHECHAQYMANMGSIASLVMAVIISSGGDDENSVGRSGISSATKLWGLVVCHHTSPRCIPFPLRYACEFLMQAFGLQLNMELQLAHQLSEKHILRTQTLLCDMLLRDSPTGIVMQSPSIMDLVKCDGAALYYHRKYYPLGITPTEAQIKDIIDWLAMCHGDSTGLSTDSLADAGYPGAAALGDAVCGMAVAYITPNDYLFWFRSHTAKEIKWGGAKHHPEDKDDGQRMHPRSSFKAFLEVVKSRSLPWENAEMDAIH

SEQ ID NO: 5318 - protein, 397 aa, Streptogyna americana
TGYDRVMVYRFHDDEHGEVVAESRRADLEPYLGLHYPATDIPQASRFLFRQNRVRMIADCHAAPVKVIQDPALPQPLCLVGSTLRAPHGCHAQYMANMGSIASLVMAVIISSGGDDEHNMMRGGIPSAMKLWGLVVCHHTSPRCIPFPLRYACEFLMQAFGLQLNMELQLAHQLSEKHILRTQTLLCDMLLRDSPTGIVTQSPSIMDLVKCDGAALYYHGKYYPLGVTPTEAQIKDIIEWLTLCHGDSTGLSTDSLADAGYPSAAALGDAVCGMAVAYITPSDYLFWFRSHTAKEIKWGGAKHHPEDKDDGQRMHPRSSFKAFLEVVKSRSLPWENAEMDAIHSLQLILRDSFRDAAEGTSNSKAIVNGQVQLGELELRGIDELSSVAREMVRLIET

SEQ ID NO: 5319 - protein, 396 aa, Thysanolaena maxima
  misc_feature (393)..(393): Xaa can be any naturally occurring amino acid
TGYDRVMVYRFHEDEHGEVVAESRRDGLEPYLGLHYPATDIPQASRFLFRQNRVRMIVDCHATAVRVIQDPGLSQPLCLVGSTLRAPHGCHAQYMANMGSIASLVMAVIISSGGDDEQTMRGGISSAMKLWGLVVCHHTSPRFIPFPLRYACEFLMQAFGLQLNMELQLAHQLSEKHILRTQTLLCDMLLRDSPTGIVTQSPSIMDLVKCDGAALYYHGRYYPLGVTPTEFQIKDIIEWLTACHGDSTGLSTDSLADAGYHGAAALGDAVCGMAVAYITPSDYLFWFRSHTAKEIKWGGAKHHPEDKDDGQRMNPRSSFKAFLEVVKSRSLPWENAEMDAIHSLQLILRDSFRDSAEGTSNSKAIVNGQVQLGELELRGINELSSVAREMVRXIET

SEQ ID NO: 5320 - protein, 341 aa, Spinacia oleracea
MDHAGDAMRTDLMTITRYVLNEQSKRPESRGDFTILLSHIVLGCKFVCSAVNKAGLAKLIGLAGETNIQGEEQKKLDVLSNEVFVKALTSSGRTCILVSEEDEEATFIEPSLRGKYCVVFDPLDGSSNIDCGVSIGTIFGIYMVKDFETATLEDVLQPGKNMVAAGYCMYGSSCTLVLSTGSGVNGFTLDPSLGEYILTHPDIKIPNKGKIYSVNEGNAKNWDGPTTKYVEKCKFPTDGSSPKSLRYIGSMVADVHRTLLYGGIFLYPGDKKSPNGKLRVLYEVFPMSFLMEQAGGQAFTGKQRALDLIPTKIHERSPVFLGSYDDVEDIKALYAAQEKTA

SEQ ID NO: 5321 - protein, 394 aa, Zizania aquatica
EPARTEDPALSIAGAVQSQKLAVRAISRLQALPGGDVKLLCETVVEHVRELTGYDRVMVYRFHEDEHGEVVAESRRNDLEPYLGLHYPSTDIPQASRFLFRQNRVRMIADCHSAPVRVIQDPALPQPLCLVGSTLRAPHGCHAQYMANMGSIASLVMAVIISSAGDDEHNMARGGIPSAMKLWGLVVCHHTSPRCIPFPLRYACEFLMQAFGLQLNMELQLAHQLSEKHILRTQTLLCDMLLRDSPTGIVTQSPSIMDLVKCDGAALFYHGKYCRLGVTPTEAQIKDIIEWLTVCHGDSTGLSTDSLADAGYPGAATLGDAVSGMAVAYITPSDYLFWFRSHTAKEIKWGGAKHHPEDKDDGQRMHPRSSFQAFLEVVKSKSLPWENAEMDAIH

SEQ ID NO: 5322 - protein, 461 aa, Serratia marcescens
MEYQFADGFWWGSATSAPQSEGAAARDGKSRNIFDYWYEIAPERFHERVGPTEASTFYDHFRTDIGLLKTLGHNTFRTSISWSRLIPDGDGEVNPQAVAFYNAMIDVQLAQGITPFINLYHFDMPLCMQQRGGWESRAVVEAYARYADTCFGLFGDRVTHWFTFNEPIVPVEAGYLNDLHYPCVVDFKRAVTVAYHSVLAHAMAVQRFRARRLPGSIGIILNLSPTYPRSDAPEDRQAAHDADLLLNRSFLDPVAKGRYPAALLHLLERHGLMPYCEPQDAQLIEGGVVDILGVNYYQPRRVQAKAGRRAEGPIASPEDLFSYYAMPGRKINPHRGWEIYEKGLYDILMDLKENYGNLPCYISENGMGVEGEEAFIRADGRVEDDYRIDFIREHLKSLHRALAERSQCKRYHLWTFIDCWSWLNAYKNRYALVRLDRADQRRTIKKSGYWFAEAARRNGFD

SEQ ID NO: 5323 - protein, 326 aa, Aspergillus fumigatus
MAEFVRAQIFGTTFEITSRYTDLQPVGMGAFGLVCSARDQLTGQPVAVKKIMKPFSTPVLSKRTYRELKLLKHLRHENIISLSDIFISPLEDIYFVTELLGTDLHRLLTSRPLEKQFIQYFLYQILRGLKYVHSAGVVHRDLKPSNILINENCDLKICDFGLARIQDPQMTGYVSTRYYRAPEIMLTWQKYDVEVDIWSAGCIFAEMLEGKPLFPGKDHVNQFSIITELLGTPPDDVIQTICSENKRIRAGEALAHEYLSPYHDPTDEPEAEEKFDWSFNDADLPVDTWKIMMYSEILDFHNIDQGNDAGQVLMEGGVAQAQQNYA

SEQ ID NO: 5324 - protein, 471 aa, Nocardia farcinica IFM 10152
MPLSHPSFPQDPGPSEVAVNPVFTREPVSVPRDRLPAGELDADIAYQVVHDELMLDGNARLNLATFVTTWMEPSARVLMAECFDKNMIDKDEYPRTADLEQRCVRMLADLWHAADPAHATGCSTTGSSEACMLAGLALKRRWQHRRRAAGLSTERPNLVMGANVQVCWEKFADYWDVEARLVPMAGDRFHLTAEAALPHCDENTIGVVAVLGSTFDGSYEPVAEICAALDELERQRGWDIPVHVDGASGAMVAPFCDPDLVWDFRLPRVASVNTSGHKYGLVYPGVGWVVWRDAAALPEDLIFRVNYLGGQMPTFALNFSRPGAQVVAQYYTFLRLGRSGYTRVQQYCRDVATRLADRIAALGAFRLLTDGRQLPVFAFTLAEGETGYSVFDVSAALREQGWLVPAYTFPADREDLAVLRIVVRNGFSHDLADMLLDALAAVLPRLRAQDRPQHGPDTATFAHGAQAPSGH

SEQ ID NO: 5325 - protein, 253 aa, Idiomarina loihiensis L2TR
MRVHAIEAFDDNYIWAIETNDKDKVIIVDPGEAQPVQQWLEQNSKSIETILVTHHHYDHTGGIAELIEQSPCPVIGPENPEIKTLTKTVTEGDELTVGGIQWQVLTTPGHTLDHISFYTPGFLFCGDTLFSGGCGRMFEGTPEQFTQSLLKLRKLPGETRVFCAHEYTQANVNFALKVEPENAVLQSYAEKVRMLREQEQITLPSTLQLELAINPFLRFDQKSVIAAANKHAESVKNSPEDVFYTIRQWKDNA

SEQ ID NO: 5326 - protein, 542 aa, Lactococcus lactis subsp. lactis Il1403
MSKDIKFSSDARTAMMRGIDILADTVKTTLGPKGRNVVLEKSYGSPLITNDGVTIAKEIELEDHFENMGAKLVSEVASKTNDIAGDGTTTATVLTQAIVREGLKNVTAGANPVGIRRGIELAAETAVASIKEMAIPVHDKSAIAQVATVSSRSEKVGEYISDAMERVGSDGVITIEESKGMQTELDVVEGMQFDRGYLSQYMVSNTEKMVAELDNPYILITDKKISNIQEILPLLEQILKTNRPLLIVADDVDGEALPTLVLNKIKGVFNVVAVKAPGFGDRRKAQLEDLAILTGGTVITEELGLDLKDATLEALGQAAKATVDKDHTTIVEGAGSADAISDRVAIIKAQIEKTTSDFDREKLQERLAKLAGGVAVVKVGAATETELKAMKLLIEDALNATRAAVEEGIVSGGGTALVNAIAALDKLSEEGDIQTGINIVRRALEEPVRQIAANAGYEGSVIIDKLRSEEVGTGFNAATGQWVNMIEEGIVDPAKVTRSALQNAASVAGLILTTEAVVANKPEPAAPAMPPMDPSMGMGGMM

SEQ ID NO: 5327 - protein, 496 aa, Arabidopsis thaliana
MASTVSVQPGRIRILKKGSWQPSDQTVGPVVYWMFRDQRLKDNWALIHAVDLANRTNAPVAVVFNLFDQFLDAKARQLGFMLKGLRQLHHQIDSLQIPFFLLQGDAKETIPNFLTECGASHLVTDFSPLREIRRCKDEVVKRTSDSLAIHEVDAHNVVPMWAASSKLEYSARTIRGKINKLLPDYLIEFPKLEPPKKKWTGMMDKKLVDWDSLIDKVVREGAEVPEIEWCVPGEDAGIEVLMGNKDGFLTKRLKNYSTDRNNPIKPKALSGLSPYLHFGQVSAQRCALEARKVRSTSPQAVDIFLEELIVRRELSDNFCYYQPHYDSLKGAWEWARKSLMDHASDKREHIYSLEQLEKGLTADPLWNASQLEMLYQGKMHGFMRMYWAKKILEWTKGPEEALSISIYLNNKYEIDGRDPSGYVGCMWSICGVHDQGWKERPVFGKIRYMNYAGCKRKFNVDSYISYVKSLVSVTKKKRKAEEQLTRDSVDPKITIV

SEQ ID NO: 5328 - protein, 397 aa, Rickettsia conorii str. Malish 7
MLSKLNKPALFALIFYPIFIISLVVKYSFDYGIGLTEVIFIIASYYINNITVGIGLHRLWSHNAYKINKYAEFVLIMLSAGTLQGPALSWASNHYKHHRYTDQDQDPHTPLKFDNKFLGFMWSHIGWMLVGSGSYKSIDRITWAKHGKNNLLKWQLKYYWQIAAFMNIVVPLFIGYLVGGTMQSAYAGFLFMGLGRFLQQQATFCVNSLCHFAGSKKYYKGTAGDIWWMALFLLGENWHNYHHAFPSDYRNGAKWYHLDVHKWIIFLMSKIGLASELERTTKVRIQAKMQETLNYLSEKQKQKLTLMQTKIDHLLENLCLKIKELEESSITIKEQFKKSFVEIQESLKNLAEQVSAATQITEKSSEKLLKIVNKKIIDAEQSIYKLYNQLNTLKVSH

SEQ ID NO: 5329 - protein, 615 aa, Cytophaga hutchinsonii
MCGITGFISIKWGSDELHSMTRRLQHRGPDAEGFYINESVHLGHRRLSILDLSVAANQPFFSKDKRYVMVFNGEVFNYKELAVKYAIPTDTTSDTEVILELFALQGPAAFQEFNGMFAIAIWDTYEKKLTLLRDRFGIKPVCYYDGPDGFGFASEIKSLLELPIPRLINSEALADYLFLEYIPKPNTIFQNIKKLTNGCYLEVTDGVRVAVKAFYDIREKYDPKPLKEKEGLEEFHHLLSDAVKSRMISDVPIGAFLSGGVDSSLVVSKFQENSTLPVETFTIGFDEKQYDESAYAKKVSELLKTNHHEYRLPAEDVFSVLKDAIEFYDEPFAVSSVLPSLLISKVSRQHTTVALTGDGADELFMGYNTYYWYNRIETLKRIGGKASLKLAGNIFKMFGGKPAIKSRLFEGWADKHPYINLWSQEQQMFTQQEIGKLLNYRYTHETTIPYWESLEKISLNNEQAVSFFDIQHYLADDLMYKMDIASMRHGLEVRCPFLDYNLVEFAVNLPLELKINNGTQKYILKKALEKYIPQSLIYRTKWGFSAPSEEWLKRSHTYLIDHYLDPARISAQGIFNAQEIQKLIASFRSGHYYHGKRLWSLVIFQLWYEQYMVAK

SEQ ID NO: 5330 - protein, 208 aa, Zea mays
MEVEACYNYGFLPADRGRHQPPPPPHATLPHAAEDAGELWEYFPCPFCYIEVEVPFICNHLQEEHCFDTRNAVCPICANNLGKDMAAHFRLQHTHLLKRRKPYRPSSCPAAATSPATYQVNSYYEEAEPQQHYSRPYKDPAPDPLLSQFICSVDAVPGDDNAQKDDQRLKLNNKGATASDDDASSKLGLEERLQRIDFLTEILMSTIL

SEQ ID NO: 5331 - protein, 226 aa, Vitis vinifera
VTIFHWDLPQTLEDKYNGWLDPQIIKDFALYAETCFQQFGDRVKHWITFNEPHTFTVQGYDIGLQAPGRCSIPLFLFCRAGNSATEPYIVAHHALLSHATVADIHHKKYKAKQQGSLGVAFDVIWFEPKTNSTEDIEATQRAQDFQLGWFIDPLMYGDYPKSLKDGVGSRLPNFTRDESALLKGSLDFVGINHYTTFYAEYDANNLTGMLLNDSLADNGTILHLAE

SEQ ID NO: 5332 - protein, 300 aa, Arabidopsis thaliana
MCDPTRDDGSSRSRVVSTMQKRAYFQRQWPLVDVVRASVVVIVHFLCLLAPFNFKWEALRFGLVLFALTTLSITFSFHRNLSHRSFKIPKWLEYPWAYSAVFALQGDPMDWVSIHRFHHQFTDSDRDPHSPKEGLLFSHILWIFDTQYIKYKCGGRDNVLDLKKQWFYKFLRRTIAVHILMFWTILYLYGGLPYLTCGGGVGIFIGYHVTWLVNSACHIWGSRSWNTKDTSRNVWWLSLFTMGESWHNNHHAFESSARQGLEWWQIDITWYLIRLFEVLGIATDVKLPSELQKQKMALVR

SEQ ID NO: 5333 - protein, 321 aa, Mucor mucedo
MSTDYLTLNRTGDKMPIRGFGCWKIDTKDCEETVYQAIKTGYRLFDGACDYGNEVEVGRGINKAINEGLVKREDLFIVTKLWNTFHSKKHVRALFDRQLKDTGLEYFDLYLIHFPVPLQYVDPATVYPPGWYVGDAKSLQFEQSPIHECWAELEKIVDAGLARNIGVANFNCQAILDLLTYARIKPAVLQIELHPYLPQERLVKWVKEQGIQITAYSSFGPTSYVDLTESGKTYTSLLEHASVKSVADKHNVSTGQVLLRWALDREFAVIPKSVNAGRMKANLEILDIKLDAEDNKTLDSLKTNQRFNDPMTYGFGLPLFD

SEQ ID NO: 5334 - protein, 364 aa, Agrobacterium tumefaciens str. C58
MTDKTLFEPYALGAISLSNRIVMAPLTRNRAGAGFVPGDLTAEYYTQRASAGLIISEATQISQQGQGYQDTPGIYTRAQIDGWRKVTAAVHEKGGRIVLQLWHVGRISHIDLQPNGGQPVAPSAIRAATKTFVNNAFVDVSEPRALEIEELAGIVNDFRKAAANAIDAGFDGVEIHGANGYLLEQFAKDGANVRTDAYGGSVENRARLMLEVTAAVAQEIGPARTGIRISPVSPANGISCSDAQAQYDYIVDQLDALGVAYIHVVEGATGGPRDVAPFDYGSLRRRFSKTYIANNGYDLELAATHIAEGKADLIAFGRPFIANPDLVKRLQSGAPLAEIDPATIYGGGAEGYTDYPRFNEASGS

SEQ ID NO: 5335 - protein, 419 aa, Zea mays
  misc_feature (230)..(230): Xaa can be any naturally occurring amino acid
  misc_feature (237)..(237): Xaa can be any naturally occurring amino acid
  misc_feature (253)..(253): Xaa can be any naturally occurring amino acid
MDPYKHRPTSGANSGYWTTNSGAPVWNNNNALTVGQRGPILLEDYHLIEKLAQFDRERIPERVVHARGASAKGFFEVTHDVSQLTCADFLRAPGVQTPVIVRFSTVVHERGSPETLRDPRGFAVKFYTREGNFDLVGNNMPVFFIRDGMKFPDMVHAFKPSPKTNMQENWRIVDFFSHHPESLHMFTFLFDDVGIPLNYRHMDGFGVNTYTLISRDGKAHLVKFHWKPTXVGVKCLXLDDEAVTVGGTCHTHXATKDLTDSIAAGNYPEWKLFIQTIDADHEDKFDFDPLDVTKTWPEDIIPLQPVGRMVLNKNIDNFFAENEQLAFCPAITVPGIHYSDDKLLQTRIFSYADTQRHRLGPNYLMLPVNAPKCAHHNNHHDGLMNFMHRDEEVNYFPSRFDPTRHAEQYPIPPRVLSGC

SEQ ID NO: 5336 - protein, 1315 aa, Botryotinia fuckeliana
MEDSTIAHTTAILQTLALSSIDLPLTNVYGNKGIRLPGADTAEKLALERELAALVSRVQRLEARAITVNNQTLPDTPNELGAPSAFADVLTGAPSRASKSTTSRQQLVNSLLAAREAPTGGERPPKFTKLSDEELEALREHVDHQSKQLDSQKSELAGVHAQLFEQKQRQEQALNVLEVERVAALERELKKHQQANEAFQKALREIGEIVTAVARGDLSKKVQIHSVEMDPEITTFKRVINTMMDQLQIFSSEVSRVAREVGTEGILGGQAKISGVDGTWKELTDNVNVMAQNLTDQVREIASVTTAVAHGDLTQKIERPAQGEILQLQQTINTMVDQLRTFAAEVTRVARDVGTEGILGGQAEIEGVQGMWNTLIVNVNAMANNLTTQVRDIAIVTTAVAKGDLTQKVQAECKGEIKQLKETINSMVDQLQQFAREVTKIAREVGTEGRLGGQATVHDVEGTWRDLTENVNGMAMNLTTQVREIAKVTTAVARGDLTKKIEVEVQGEIASLKDTINTMVDRLSTFAFEVSKVAREVGTDGTLGGQAQVDNVEGKWKDLTENVNTMARNLTTQVRGISTVTQAIANGDMSQKIEVAAAGEILILKETINNMVDRLSIFSNEVQRVAKDVGVDGKMGGQADVAGIGGRWKEITTDVNTMANNLTTQVRAFGDITNAATDGDFTKLITVEASGEMDELKRKINQMVYNLRDSIQRNTLAREAAEFANRTKSEFLANMSHEIRTPMNGIIGMTQLTLDTDLTQYQREMLNIVHNLANSLLTIIDDILDLSKIEANRMIMEEIPYTLRGTVFNALKTLAVKANEKFLDLTYRVDSSVPDHVVGDSFRLRQVILNLVGNAIKFTEHGEVSLTIQKAEQDHCAPNEYAVEFCVSDTGIGIQADKLNLIFDTFQQADGSMTRKFGGTGLGLSISKRLVNLMRGDVWVKSQYGKGSSFYFTCTVRLATSDISFIQKQLKPYQGHNVLFIDKGQTGHGKEIITMLTQLGLVPVVVDSEQHTILLGNGRTKEKIASTYDVIVVDSIESARKLRSIDEFKYIPIVLLAPVIHVSLKSALDLGITSYMTTPCLTIDLGNGMIPALENRAAPSLADNTKSFDILLAEDNIVNQRLAVKILEKYHHVVTVVGNGQEALDAIKEKRYDVILMDVQMPIMGGFEATAKIREYERSLGTQRTPIIALTAHAMLGDREKCIQAQMDEYLSKPLKQNHLIQTILKCATLGGALLEKGREVRQSANEESPNSQNGPRGAQHPASSPTPAHMRPAIEPRAYTTTGPINHGSAESPSLVTADAEDPLARLLMRAHSS

SEQ ID NO: 5337 - protein, 844 aa, Zea mays
MASFAVSGARLGVVRPGGSARSGGERRSAVDLPSVLFRRKDAFSRTVLSCAGAPGKVLVPGGGSDDLLSSAEPVVDTQPEELQIPEAELTVEKTSSSPTQTTSAVAEASSGVEAEERPELSEVIGVGGTGGTKIDGAGIKAKAPLVEEKPRVIPPPGDGQRIYEIDPMLEGFRGHLDYRYSEYKRLRAAIDQHEGGLDAFSRGYEKLGFTRSAEGITYREWAPGAYSAALVGDFNNWNPNADAMARNEYGVWEIFLPNNADGSPAIPHGSRVKIRMDTPSGVKDSIPAWIKFSVQAPGEIPYNGIYYDPPEEEKYVFKHPQPKRPKSLRIYESHVGMSSPEPKINTYANFRDEVLPRIKKLGYNAVQIMAIQEHSYYASFGYHVTNFFAPSSRFGTPEDLKSLIDKAHELGLLVLMDIVHSHSSNNTLDGLNGFDGTDTHYFHGGPRGHHWMWDSRLFNYGSWEVLRFLLSNARWWLEEYKFDGFRFDGVTSMMYTHHGLQVTFTGNYGEYFGFATDVDAVVYLMLVNDLIRGLYPEAVSIGEDVSGMPTFCIPVQDGGVGFDYRLHMAVPDKWIELLKQSDEYWEMGDIVHTLTNRRWLEKCVTYCESHDQALVGDKTIAFWLMDKDMYDFMALDRPSTPRIDRGIALHKMIRLVTMGLGGEGYLNFMGNEFGHPEWIDFPRGPQSLPNGSVIPGNNNSFDKCRRRFDLGDADYLRYRGMQEFDQAMQHLEGKYEFMTSDHSYVSRKHEEDKVIIFERGDLVFVFNFHWSNSYFDYRVGCFKPGKYKIVLDSDDGLFGGFSRLDHDAEYFTADWPHDNRPCSFSVYAPSRTAVVYAPAGAEDE

SEQ ID NO: 5338 - protein, 487 aa, Arabidopsis thaliana
MGSKLKLYPLLNHSSVFHPDSRYQSAPTMEEEQQQLRVLFAKYEMGRLLGKGTFGKVYYGKEITTGESVAIKIINKDQVKREGMMEQIKREISIMRLVRHPNIVELKEVMATKTKIFFIMEYVKGGELFSKIVKGKLKEDSARKYFQQLISAVDFCHSRGVSHRDLKPENLLVDENGDLKVSDFGLSALPEQILQDGLLHTQCGTPAYVAPEVLRKKGYDGAKGDIWSCGIILYVLLAGFLPFQDENLMKMYRKIFKSEFEYPPWFSPESKRLISKLLVVDPNKRISIPAIMRTPWFRKNINSPIEFKIDELEIQNVEDETPTTTATTATTTTPVSPKFFNAFEFISSMSSGFDLSSLFESKRKLRSMFTSRWSASEIMGKLEGIGKEMNMKVKRTKDFKVKLFGKTEGRKGQIAVTAEVFEVAPEVAVVELCKSAGDTLEYNRLYEEHVRPALEEIVWSWHGDNHNNNIVKSNGNYVSDENSGSDC

SEQ ID NO: 5339 - protein, 531 aa, Zea mays
MDPYKHRPSSAFNAPYWTTNSGAPVWNNDSSLTVGARGPILLEDYHLVEKLANFDRERIPERVVHARGASAKGFFEVTHDITHLTCADFLRAPGVQTPVIVRFSTVIHERGSPETLRDPRGFAVKFYTREGNWDLVGNNFPVFFIRDGIKFPDMVHALKPNPRTHIQDNWRILDFFSHHPESLHMFSFLFDDVGIPADYRHMDGSGVHTYTLVSRAGTVTYVKFHWRPTCGVRSLMDDEAVAVGGANHSHATKDLTDAIAAGNFPEWTLYIQTMDPEMEDRLDDLDPLDVTKTWPEDAFPLQPVGRLVLNRNIDNFFAENEQLAFCPGLIVPGIYYSDDKLLQTRIFSYSDTQRHRLGPNYLLLPANAPKCAHHNNHYDGSMNFMHRHEEVDYFPSRYDAVRNAPRYPIPTAHIAGRREKTVISKENNFKQPGERYRAMDPARQERFITRWVDALSDPRLTHEIRTIWLSNWSQADRSLGQKLASRLSAKPSITLVEDRTRPKQHRHCIHGYCAEAELLVSVECLAGFPSE

SEQ ID NO: 5340 - protein, 497 aa, Leifsonia xyli subsp. xyli str. CTCB07
MSENHTTTQTGTPVASDAHSLTAGQDGATALHDRYLVEKLAQFNRERIPERIVHAKGGGAFGTFAVTGDVTAYTKAAVFQPGAKTETVQRFSSVAGEQGSPDTWRDVRGFSVKFYTSEGNYDIVGNNTPVFFIRDGMKFPDFIHSQKRLPGSGLRDADMQWDFWTLSPESAHQVTYLMGDRGLPRSWRTMPGYGSHTYQWINAAGERFWVKYHFHALHGNEEMHGAEAEKIAGEDADYYRRDLYEAIERGDFPAWKLSVQVMPYEDAKTYRLNPFDLTKVWPHSDYPLIEVGVHTLNRNPENFFAQIEQAAFSPANTVPGIDISPDKMLTARVFSYPDAQRYRVGTNYNELPVNAPVAPVHNYSQDGAARHGFKAAEAPVYAPNSFGGPVADPALAGEGSWESDGALVRAAATLHAEDDDFGQAGSLYRDVFDAKAKERFLDTIAGAVGGVQRDDIRERAIQYWTSVDAGLGGLLRTRLASGVTDADEAAEFVGVAG

SEQ ID NO: 5341 - protein, 349 aa, Vicia faba
MDMPPPIMHDSDRYDFVRDIGSGNFGVARLMTDKLTKDLVAVKYIERGDKIDENVKREIINHRSLRHPNIVRFKEVILTPTHLAIVMEYASGGEMSDRISKAGRFTEDEARFFFQQLISGVSYCHSMQVCHRDLKLENTLLDGDPALHLKICDFGYSKSSVLHSQPKSTVGTPAYIAPEVLLKQEYDGKIADVWSCGVTLYVMLVGSYPFEDPDNPKDFRKTIQRVLSVQYSVPDFVQISPECRDIISRIFVFDPAERITIPEIMKNEWFRKNLPADLVNENIMDNQFEEPDQPMQSMDTIMQIISEATVPAAGSYYFDEFIEVDEDMDEIDSDYELDVDSSGEIVYAI

SEQ ID NO: 5342 - protein, 471 aa, Escherichia coli
MKAFPETFLWGGATAANQVEGAWQEDGKGISTSDLQPHGVMGKMEPRILGKENIKDVAIDFYHRYPEDIALFAEMGFTCLRISIAWARIFPQGDEVEPNEAGLAFYDRLFDEMAQAGIKPLVTLSHYEMPYGLVKNYGGWANRAVIGHFEHYARTVFTRYQHKVALWLTFNEINMSLHAPFTGVGLAEESGEAEVYQAIHHQLVASARAVKACHSLLPEAKIGNMLLGGLVYPLTCQPQDMLQAMEENRRWMFFGDVQARGQYPGYMQRFFRDHNITIEMTESDAEDLKHTVDFISFSYYMTGCVSHDESINKNAQGNILNMIPNPHLKSSEWGWQIDPVGLRVLLNTLWDRYQKPLFIVENGLGAKDSVEADGSIQDDYRIAYLNDHLVQVNEAIADGVDIMGYTSWGPIDLVSASHSQMSKRYGFIYVDRDDNGEGSLTRTRKKSFRMVCAEVIKTRGLSLKKITIKAP

SEQ ID NO: 5343 - protein, 240 aa, Zea mays
FIRHHRTATEEGGMAAAGGGPRRTTRVGPYELGKTVGEGSFAKVKIAKDTRNAATCAIKVLDRNHVLRHKMVEQIKREIATMKLIRHPNVVQLHEVMASKSKIYMVLEFVEGGELFDKIVNSGKLGEDEARRYFHQLINAVDYCHSRGVYHRDLKPENLLLDSYGALKVSDFGLSAFSPQTKEDGLLHTACGTPNYVAPEVLADKGYDGMAADVWSCGIILFVLMAGYLPFDDPNLMDSV

SEQ ID NO: 5344 - protein, 536 aa, Methanosarcina mazei Go1
MASKQIMFDESARKALLSGVDKVANTVKITLGPKGRYVVLDKSTKPVVTNDGVTIAKEIELHDKFENMGAKLVKEVASKTQDNTGDGTTTATLLAQSMIREGLKNISAGANPIEVKKGIEIATEKVVGYLKGKSVEVKGKDKIIQVATISANNDEEIGNLIADAMERVGYNGVITVEDSKTMETSLDVVEGMQFDRGFVSPYMALDTEKMVCEFEDPYILITDKKINSMKQIVPVLEKVASEGRSLLIIAEDVDGDAQAALILNIIRGALRVCAVKAPGFGNERKEMLEDIAVLTGGQVISEEKGMKLEEFSDYMLGNARKVTVDNHKTIIVEGRGDKADIDERVRVIEAQINIAEADYRKTELKKRMAKLGGGVAVIKVGAATETELKEKKMRIDDALNATKAAVEEGVVTGGGISLFRAAATLDSLDLDGDRQIGVKIVQRAIEDPVRQIAANAGREGAEVVAAIKAESSEHFGYNAKTDVFEDLFEAGVIDPTKVVRSGLQNAASIAGMVLTTEALVTDFDEEKDERTAAIII

SEQ ID NO: 5345 - protein, 550 aa, Buchnera aphidicola str. Bp (Baizongia pistaciae)
MAAKDVKFGNEARVKMLRGVNVLADAVKVTLGPKGRNVVLDKSFGAPSITKDGVSVAREIELEDKFENMGAQMVKEVASKANDAAGDGTTTATLLAQAIVNEGLKAVAAGMNPMDLKRGIDKAVISAVEELRIMSVPCADSKAITQVGTISANADEKVGSLIADAMDKVGKDGVITVEEGTGLQDELEVVKGMQFDRGYLSPYFINKPETGIVELENPYILMADKKISNVRELLPILEAVAKSGKPLLIISEDLEGEALATLVVNSMRGIVKVAAVKAPGFGDRRKAMLQDISILTSGSVISEELAMELEKSTLEDLGQAKRVVINKDTTTIIGGIGEKYNIQSRISQIRQQIQEATSDYDKEKLNERLAKLSGGVAVLKVGAATEVEMKEKKARVEDALHATRAAVEEGVVPGGGVALVRVAAKISNIVGQNEDQNVGIRVALRAMEAPLRQIVSNSGEEPSVVTNNVKDGKGNYGYNAATDEYGDMISFGILDPTKVTRSALQYASSVAGLMITTECMVTDLPKDEKSDLGNSSAPSAGGMGGMGGMM

SEQ ID NO: 5346 - protein, 323 aa, Dechloromonas aromatica RCB
MLALAALIPHATMAADPTPDASQVVAAVEGVFGVTPGERRNHIKGTCAAGEFVGTKEAAKLSRSPLFSGKPVPVVARFSLSGGNPKAPDVAKSARGMALQFQLPKGQLHHITMLNTPMFGAANPQTFLDLMQALQPDPATGKPDPEKMKAFKASHPDNQAQAQYLASNNPPASYASSSYWGIHTFKFVDKKGKATLVRWQFVPQDGEKRLSDDELKTAGANFLESALIERAKQGAVRWDMMVSIGQPGDSETDPTVLWPAERPRIKAGTLTIRSAEAQKGAPCEPINFDPLVMAPGIQPTDDPVLRFRSPAYAVSFGKRLSER

SEQ ID NO: 5347 - protein, 465 aa, Haloarcula marismortui ATCC 43049
MRLHWHRRDLRATDNAGLAAATPSDPVVPVFIFDTAVLDHAGPPRVAFMLDALDSLREWYRDKGSDLVVAEGDPTSVLPELAAQHGAEKVTWGKDYSGLARERDAAVRQALDDADVAREAVQNAVLHEPGEITTNDGDPYSVFTYFGRKWHDREKAAPYDPPSADTLADVDGDALPTLADLGFEEPEADVPAAGTEEARALLDDFLDENVYEYEERRDFPADECTSRLSAHLKFGTIGIREVYDRTQAAKEGTGGDRRDSVREFQSQLAWREFYTQVLFAHPHVVSSNYKSYENPIEWENDEELLQAWKDGDTGYPIVDAGMRQLRDEAYMHNRVRMIVASFLTKDLLIDWRHGYEWFREKLVDHDTANDNGGWQWAASTGTDAQPYFRIFNPMTQGEDYDPNAEYIKEYVPELRDAAPEIIHDWNDCSLTQRRSAAPEYPDPVVDHSERREEALAMFERARGDD

SEQ ID NO: 5348 - protein, 611 aa, Pyrococcus abyssi GE5
MCGINGFSWGDEELVKRMNDAIRHRGPDDEGVYVDDNVSLGHVRLAIIDLSPKGHQPMKYEKDGKEVWIVYNGEIYNFMEIRKELEEKGYTFTSNTDTEVILAAYLEWGFDCVERFNGMWAFVIYDKSKNILFLSRDRFGIKPLYYYYDGKNIIFSSEIKGILQHNIPRKPNDAVIFDFLYYNLLDHTEDTFFEGIKRLMPGYNAVFDLNTRKFEAWKYYDLRERIEKRKEISDPQGFKDLFLRAVKMRLVADVPVGSCLSGGLDSSSIVCAMRHLLPDGEIKVFSLVFPGKEIDESKYQRIVVDECRVSWYRTTFNVEDVLADIIDLIRTQEEPFSTLSIYGQYRVMKLARENGMKVLLDGQGSDEILAGYHYFFGYYFVELLRKFKWGKLLREILAYKRIHGSLVPLKNMVLYILPVWVTKRLWRRRFPYLREEFIEKFKKRPSKELIWKIKTLNEALLLAETYYSLPHLLRFEDKNAMRWSIESRVPFCDHELVEYVLSLPPESKVSAGITKVLLRKGLKGILPDEIRNRASKVGFATPDKDILKTNEGQKFALAVIDSESFKKRPYWDYRKVLRMFEEHVSGKKNWSQELWKVIIMELWLREWMDNG

SEQ ID NO: 5349 - protein, 725 aa, Methylobacillus flagellatus KT
MLTKSKQDPHLNHILNARHHDPFSYLGLHQDGTQYILRLFQPFAARAWLQTASGWVPLQRSHEAGLFEWKGNTPPPVPCRIRLEENGHSWETYDAYTFWTTLSPEELYLFGEGRLKQAYRTFGAHLCEQQGVAGVRFVVWAPNAERVSVIGNFNHWDGRMHQMRVHGSSGVWEIFIPGLTSSDLYKFEIRNRQTGQILVKTDPYGFSFEQRPGTAARVTAHGHYAWQDAEWLEDRARADWLHAPFNCYEVHLGSWRRDAHGEFLGYRELAHQLVPYMQEMGYTHIELLPVSEHPLNESWGYQTTGYFAPTNRFGSPDDLRYFVDQCHQAGIGVILDWVPGHFPKDDWALARFDGSALFEHEDPRLGEHQDWGTYIFNYGRNEVRNFLLASAHYWLEEFHMDGLRVDAVASMLYLDYSRKEGEWLPNRHGGRENLEAIDFLKQLNVMVHEDFPGALTIAEESTSWPMVSRPVYLGGLGFSMKWNMGWMNDTLSYMQHDPIHRRFHHDKLTFGQIYAYSENFVLPFSHDEVVHGKRSLLDKMPGDTWQKFANLRLLATYQMTASGKKLNFMGNELAQGREWNVNSSLDWHLLDLHWHQGIQRLHRDLSHLYRQVPALHELDFDAHGFEWIDCSDSDQSIINYLRRARDGSFVLVLLNFTPVLRSGYRVGTPLAGHYREIFNSDAGYYGGSNQGNGNGLQTEAYPWMGHSHSLVVTIPPLGGVIIQPG

SEQ ID NO: 5350 - protein, 155 aa, Brassica napus
  misc_feature (140)..(140): Xaa can be any naturally occurring amino acid
NTITQRVGEPNNVGDLEKQPFYQFLKNTYIWHPVALAAALYAMGGFPFIVWGMGVRIVWVYHITWLVNSACHVWGNQAWNTGDLSKNNWWVAALAFGEGWHNNHHAFEFSARHGLEWWQFDMTWYVVRFLQAIGLATEVXLPSEAQKQRMGLTSD

SEQ ID NO: 5351 - protein, 98 aa, Arachis hypogaea
MAAVGAPREVAGNENSLEIDSLARFAVDEHNKKQNGLLEFKRVISAKQQVVAGTLHHITLEAASGDSKNVYEAKVWEKPWMNFKEVQEFKLAGDGSNA

SEQ ID NO: 5352 - protein, 246 aa, Malus x domestica
QMKSESYISLLIASFFVLLLPAFSSAAEESSTPIGCGHTSHRNMATLGGVHESHGAQNSAEVEDLARFAVQEHNNKENALLEFVSVVKAKEQVVAGTLHHLTIEAIEAGKKKLYQAKVWVKPWMGFKEVQEFKHADEEETPSVTSSDLGVKQGGHPPGWQSVPPHDPQVQDAANHAVKSLQQRSNSLLPYELQEVVHAQAEVAEEHAKFNMLLKVKRGSKEEKFKAEVHKNMEGTFSLNQMEADHS

SEQ ID NO: 5353 - protein, 268 aa, Candida albicans SC5314
MYLRSIFKSTIRKMHIESIPMRWGHGDNYAYLVVDTPTKQAWLIDSAQADEVLEYFKKHKTDFNLKAIVNTHHHYDHSDGNPFFHKKYPDLPIIAGKDSPLVTYTPSDKETLELGEDLTITALHTPCHTQDSICYFVQDKKTNEKAVFTGDTLFISGCGRFFEGTGKEMNYSLNQVLAKLPKETKVYPGHEYTKSNVKFSQTVLSNEAIKELAEYCKSHEHTTGKFTIGDELQFNPFMKLTDPQVINSTGLTSPDEIMDKLRTMKNNM

SEQ ID NO: 5354 - protein, 537 aa, Exophiala dermatitidis
MDGPLHKAVVNKKPVPEIDFTLHIMEDGTQVSTQERVCKDVQAPAMQRPTDDQFWSPIDRSKPNLPFLKQHFYREGRLTEEQALWIIHEGTKILRSEPNLLEMDAPITVCGDVHGQYFDLMKLFEVGGDPAETRYLFLGDYVDRGYFSIECVLYLWSLKIWYPNTLWLLRGNHECRHLTDYFTFKLECKHKYSERIYDACMESFCALPLAAVMNKQFLCIHGGLSPELHTLEDIKSIDRFREPPTHGLMCDILWADPLEEFGQEKTGEYFVHNHVRGCSYFFSYPAACNFLEKNNLLSIIRAHEAQDAGYRMYRKTRTTGFPSVMTIFSAPNYLDVYNNKAAVLKYENNVMNIRQFNCTPHPYWLPNFMDVFTWSLPFVGEKITDMLIAILNTCSKEELEEDTRTSSAEPETPPFAPDAETTEAKRRAIKNKILAIGRLSRVFQVLREESQRVTELKTQAGGRLPAGTLMLGAEGIKQAIHNFEDARKVDLQNERLPPSPEEIEKRSAEDRKAALERAATEAENDTTLQGVARRISL

SEQ ID NO: 5355 - protein, 428 aa, Desulfovibrio vulgaris subsp. vulgaris str. Hildenborough
MRVTLWVVSLGLCAAVAFSGGAVFATTEESKYDALKRFSQVLDIVERYYVRDVPRKDLMNGAVKGMLQGLDPHSTFLSPEEFKEMQETTSGEFFGIGIEISSENGQLTVVSPIEDTPAFKAGLKAGDLILAVDGQPTQEMSTQEAVSRIRGPKGSEVELLILHREAKAPSTVKIVRDAIPLVSVKSKQLEQGYVWVRLTRFSERTTSDLLEALREANKRGPVKGVVLDLRNNPGGLLDQAVSVSDVFLRDGGIVSIRGRGDDTGREYNAKAQSTDVTAPMVVLINAGSASASEIVAGALRDQKRALLVGERSFGKGSVQNVIPLSDGAGLKLTVALYYTPNGRSIQAEGIDPDIEIPFEAPREDDAKPMQRFNMLREKDLSRHLENGAGGKQGKNDQSDEVRDLLERDNQLRMALQFVKRLPALKEIR

SEQ ID NO: 5356 - protein, 551 aa, Haemophilus influenzae R2846
MAAKDVKFGNDARVKMLKGVNVLADAVKVTLGPKGRNVILDKSFGAPTITKDGVSVAREIELEDKFENMGAQMVKEVASKANDAAGDGTTTATVLAQAIVNEGLKAVAAGMNPMDLKRGIDKAVSAVVSELKNLSKPCETAKEIEQVGTISANSDSIVGQLISQAMEKVGKEGVITVEDGTGLEDELDVVEGMQFDRGYLSPYFINKPETATVELDNPYLLLVDKKISNIRELLPVLEGVAKAGKPLLIIAEDVEGEALATLVVNTMRGIVKVAAVKAPGFGDRRKAMLQDIAILTAGTVISEEIGMELEKATLEDLGQAKRVVINKDNTTIIDGIGDEAQIKGRVAQIRQQIEESTSDYDKEKLQERVAKLAGGVAVIKVGAATEVEMKEKKDRVDDALHATRAAVEEGIVAGGGVALVRAAAKVAASLKGDNEEQNVGIKLALRAMEAPLRQIVTNAGEEASVVASAVKNGEGNFGYNAGTEQYGDMIEMGILDPTKVTRSALQFAASVAGLMITTECMVTDLPKDDKADLGAAGMGGMGGMGGMGGMM

SEQ ID NO: 5357 - protein, 600 aa, Dunaliella salina
  misc_feature (276)..(276): Xaa can be any naturally occurring amino acid
MLRCAQPKYAPLKRQAFNQKLNRLVAAARTPSKSSSTSRMASTSSGQQGRSILWFRKGLRLHDNPALRDACTGSAAVFPIFIIDPYFLQKSNNKVGVNRYQFLLESLSDLNSSLTSLGSQLLVLRGTPEEVIPRVLRDWSIKKLCYEIDTEPYAKARDARVDDMAREAGVEVKKHWSHTLYDTDMLVRENKGKAPLTMQAFEKLVDRVGHPLTALPAPTARLPPVDVSLPGIKDAEVGVPTWQEMGFKEAPTAIFKGGETEALKRLEHYMKDTKWXASFEKPSTDPSAFTEPSTTALSPYLKFGCLSARFFHQRLLDVYRLHPKHSQPPMSLRGQLLWREFFYTLGSHTPNFDRIAGNPICRQITWDTNPALLKAWRDGATGYPWIDAAMTQLREWGWMHHLARHSVACFLTRGDLYLSWESGKEVFEELLLDADYFINAANWMWLSASAFFAQYFRVYSPVVFGKKYDKEGAYIRKFLPVLKDMPAKYIYEPWTAPKEVQQRANCIIGRDYPAPIVDHAVASKECIARMGAAYKATNTGGSAGKASPAKAASSGDAGTSASAGAPSSSKKTTGKRAASADQGGKRQKTLEESMTKKRCQ

SEQ ID NO: 5358 - protein, 1049 aa, Polaromonas sp. JS666
MSTSTPSSGSPVKILIVEDSPTQAQQLQHILEQEGYEVGIARNGRLALKMLPQFRPALIISDVIMPEMDGYELSRRIKTQPDLRNIPVILVTTMSDPQDVIRGLECGADNFVLKPYDERYMLARVRYVLVNREMHREQDMGLGVEIYFNDQRHFITADRLQILNLLLSTYDAAIQRNKDLTQTQESLGQRSAEVAAVNRFLDSVIETIPDMIFVKDAADLRFVRFNRAGEELLGYSRDELVGKNDYDLFPEAEADAFTSKDQEVLTRGMVLDIPEEPIHTRNKGDRILHTKKIPIFDSKGRPLYLLGISRDVTEKKKLEDALRKRNEELSKSQEDLQWSNSELNKLRLALEARVNQRTQQLTAVVEALRESEARTRLTIDTALDAVVAMDAHGLVREWNAQAETIFGWKRDEAIGKPLAGLVIPRQHREGHARGLERFLATNEGPILSQRLELTALHREGREFPVELSITPMLLQGEWTFSAFLRDITDRKQMEERTLNLNRELEQRVAQRTTELVAAREAADTANRAKSTFLATMSHEIRTPMNGMFGMLELLGLTELDTDQRATLAIVRESSQSLLCIIDDILDFSKIEAGKLTVRPEVASIKDVIEHVRNMYAGNASGRGLLLKHGTDPQISPALMFDPLRLGQILNNLVSNALKFTSRGSIEIKAELIARTNGEDQVRFVVTDTGMGVSAEDQQRLFQPFTQGGGDTARWAGGTGLGLTICRRLAGMMNGTVEMVSELGKGTTMILTLSLPIADPKELAKIRRAQMQDSARTTHTARRDAPTVARAETEGTLVLLVDDHPVNRMLLMRQVHVLGYAAESAKNGVEALAKWQSRRFGIVITDCNMPEMNGYDLARSIRGLESGNEGKHVPIIACTANALSGEAESCFAAGMDDYLVKPVELSQLREKLDQWLPIPDATVMPEATSGTSSKHMAATAAAVPVDRSVIAEFSGGDASTERHIFTEFRSANDEDAAMLKRAVAASDGVQITRTTHRMLGASRMIGARDFARVCESIEHASRTSDWAAVEAHMSAFQHELQRLNAYLDAL

SEQ ID NO: 5359 - protein, 547 aa, Magnetospirillum gryphiswaldense
MAAKEVKFSTEARAKMLRGVDILADAVKVTLGPKGRNVVIEKSFGAPRITKDGVSVAKEIELSDKFENMGAQMVREVASKTADLVGDGTTTATVLAQAIVREGNKAVAAGMNPMDLKRGIDLAVEAVVADVKSRAKKVSTNEEIAQVGTISANGERDIGAKIAEAMSKVGNEGVITVEEAKGFETELDVVEGMQFDRGYSSPYFVTNAEKMTCELDSPYILLFEKKLSGLQPLLPVLEAVVQSGRPLLIIAEDVEGEALATLVVNKLRGGLKVSAVKAPGFGDRRKAMLEDIAILTGGQVISEDLGIKLESVTLEMLGTAKRVTITKEDTTIVDGAGARGDIEARCKQIRAQIEETTSDYDREKLQERLAKLAGGVAVIKVGGATEVEVKERKDRVDDALHATRAAVEEGIVPGGGTALLYSVRALDGIAVANNDQKVGIDIVRRALQSPVRQIAENAGHDGAVVAGKLLEATDTNFGFDAQTGTYVDMIKAGIIDPVKVVRTALQDAASVAGLLITTEAMIAEKPKKDSGPSMPGGGMGGMGDMDF

SEQ ID NO: 5360 - protein, 439 aa, Thiomicrospira crunogena XCL-2
MFFGAILGAMAVVGTTVWAEGDNADAGTETTKEVSVPLEELRAFVEVFDRISTDYVEPIEDKKLLEGAIDGMLSSLDPHSAYLPPKNYKRMEEHTTGQFGGLGMEVGMEDGFVKVVSPIDDTPAQKAGVKAGDLIIKLDEHPVKGKSLAEAVKIMRGKPGSKITLTIVRDGVDKPIVMVLTRAIIKVKSVKEQLLKDGMGYVRISQFQLRTGEDLIKSIKALEKKNKKPLNGLVLDLRNNPGGVLRAAVQVSDAFLNDGLIVYTKGRVKNSEMRFEAEEGDVLNGKPIVVLINEGSASASEIVSGALQDQKRALIAGRTSFGKGSVQTLIPLNNGGAIKVTTARYFTPSGRSIQAEGIVPDIKIDQVKIEKLKAADFTRIKEKDLSGHLDNEDDKIQAEKVVQKADKALEELLANDYELHEALSLLKGMYFTQQMRGHE

SEQ ID NO: 5361 - protein, 555 aa, Sulfolobus solfataricus P2
MDLSKLLEPIRIGDIVLKNRIAMSPMISNLGTPEGYPSDAHIAYLAERAKGGVGLIITEYTYVNHVDARGSVNELGMDSDELTPKFMRLTELIHALGSKIFVQLVHVGRKTRKDIIWGNKPIAPSPIPIMDEVREMTKEDIERVKNDFIDASIRAKRAGFDGIELHGAHGYLLAQFLSPATNKRNDEYKDGVRFIEEILKGIKEKAKITVGIRISVTEFDNEGLTPEIVAEIGKKLEKAGIDYIHLSAGRDGPLGSSMPYYYKRLAFLEEAKVVRDAVNIPIFLVGSVITPVDAIKAREIADVVVLGRQLLADPYWLEKAKRDLPIRPCIRCNQTCRGVVYKEVRCDVNPELGWELLPPLEKGKGEVIVVGGGVMGLEAARVLALRGFTVTLYEQNNKLGGQFLLYKDPWKVKEFQELINYYERELKRLNVEVKLNSKIECSDCIMAIPDYEIPKMPDVKGEKLLIDSNLYVYHDYAFELAKYNEIYITERSFKGLDRTREYLLRKELSEVGVKFLEEKNSMKFDVEIHNIADDQPSIGKAIQRGYWLGRTFKSY

SEQ ID NO: 5362 - protein, 154 aa, Oryza sativa (japonica cultivar-group)
MSMIRRSNVFDPFSLDLWDPFDGFPFGSGSGSLFPRANSDAAAFAGARIDWKETPEAHVFKADVPGLKKEEVKVEVEDGNVLQISGERIKEQEEKTDKWHRVERSSGKFLRRFRLPEDTKPEQIKASMENGVLTVTVPKEEPKKPDVKSIQITG

SEQ ID NO: 5363 - protein, 556 aa, Cicer arietinum
MGCQGSKEKNKPTPDFTARHHGSSATAASASGVATNNHQYHSVQPSSTHVQTPPPKPDSNPKPTVTTQNVKTVHKTDTTILGKPFDDIKKHYTLGQELGRGQFGITYFCTENSTGNTYACKSILKRKLVSKSDREDIKREIQILQHLSGQPNIVEFKGAYEDRFSVHLVMELCAGGELFDRIIAQGHYSERAAASICRAVVNVVHICHFMGVLHRDLKPENFLLSSKDEGATLKATDFGLSVFIEEGKVYRDMVGSAYYVAPEVLRRSYGKEIDIWSAGIILYILLSGVPPFWAETEKGIFNAILEGELDFASEPWPSISDSAKDLVRKMLNHDPKKRITSAQVLEHPWMREGGEASDKPIDSAVLSRMKQFRAMNKLKKLALKIIAENLSEEEIKGLKAMFANMDTDNSGTITYEELKTGLARIGSRLSETEVKQLMELADVDGNGSIDYLEFISATMHRHRLERDEHLYKAFQYFDKDNSGHITREELETAMTQHGMGDEATIKDIISEVDTDHDGRINYEEFCAMMRSGMPPPGTTIINLQSEFDFICSCNSL

SEQ ID NO: 5364 - protein, 237 aa, Glycine max
EAQEGSSQKKMGRGKIEIKRIENTIFMQVTFCKRRNGLLKKAYELSVLCDAEVALVVFSTRGRLYEYANNSVRATIERYKKANAAASNAESVSEANTQFYQQESSKLRRQIRDIQNLNRHILGEALGSLSLKELKNLEGRLEKGLSRVRSRKHETLFADVEFMQKREIELQNHNNYLRAKIAEHERAQQQQSNMMSGTLCESLPSQSYDRNFFPVNLIASDDQQQYSSQDHTALQLV

SEQ ID NO: 5365 - protein, 97 aa, Glycine max
MAALGGIRDVAGTQTSLEVDGLARFAVEEPHKNQIPLLEFEKVVSPKHQVVFGTLSPPPLEAKNGGQKKVYEPKVWEKAWFNFKEGQKFKLVGEAPP

SEQ ID NO: 5366 - protein, 469 aa, Bacillus anthracis str. 'Ames Ancestor'
MVVAFLIGAGGMFAGMSLFGVNPAEVTQTISSGNASTAQGNLAKINEAYALIDSRYVEDVKDEKLVEGAIQGMLSTLKDPYSTYMDKETAKQFSESLDPELEGIGAEVNKTDGKLIIVSPIKGSPAEKIGIKPNDQILSVDGNSVKDLSREEAVLKIRGKKGTTVAIEIKRAGVADPIVFKIKREKIPIFTVFSSVKQESGKDIGYMQITSFAENTAKEFKDQLKELEKKNIKGLVIDVRGNPGGYLNSVEEILGEIMTDKKPMLQVEQRNGEKKKFSTELKERKPYPISVLIDNGSASASEILAGALKEGEGYDLIGEKTFGKGTVQQAVPFKDGSNIKLTMFKWLTPDGNWIHKKGIKPTVEVKQPDYYHATPIQIEKTLSYNANDVQVKHAQEMLKSLGYVPGREDGYFSKETESALKAFQNANKMEATGQLDKKTAEAIQTKIIEKIRSGENDLQLQSALKLMAK

SEQ ID NO: 5367 - protein, 480 aa, Desulfovibrio vulgaris
MTKHKLTTNAGAPVPDNQNAMTAGPRGPMLLQDVWFLEKLAHFDREVIPERRMHAKGSGAYGTFTVTHDITSYTKAALFSKIGKKTDLFVRFSTVAGERGAATAERDIRGFAIKFYTEQGNWDLVGNNTPVFFLRDPLKFPDLNHAVKRDPRTNMRSAKNNWDFWTSLPEALHQVTVVMSDRGIPASYRHMHGFGSHTFSFISPDNQRYWVKFHLRTQQGIKNLTDAEAEAIVARDRESHQRDLYDSIERGDFPRWTNYVQVMPEKDAEKLPYHPFDLTKVWFHKDCPLIEVGVLELNRNPENYFAEVEQAAFNPANVVPGISFSPDKMLQGRLFSYGDAHRYRLGVNHHLIPVNAARCPVHSYHRDGAMRVDGNHGSTLAYEPNSYGEWQEQPDFAEPPLAIRGDAAHWNFREDDADYYDQPGRLFRLMTPQQQDELFQNTARAMGDAPEEIKRRHVGNCAKADPAYGAGVARALGLKM

SEQ ID NO: 5368 - protein, 157 aa, Brassica rapa
MSLIPSFFGGRRTNVFDPFSLDLYDPFEGFLTPSGMTNATSKDVAAFTNAKVDWRETPEAHVFKADLPGLKKEEVKVEVEDGNILQISGERSSENEEKSDRWHRVERSSGKFMRRFKLPENAKVDEVKASMENGVLSVTVPKMAERKPEVKSIDISG

SEQ ID NO: 5369 - protein, 477 aa, Synechococcus sp. WH 8102
MTTPRVLFWHRRDLRLTDNLGLAAAAAISPAVTGVYVLDPQVISPSEHLLPMAPARLWFLIESLIELQQRWRDAGSRLLVVEGDPVQLLPQLAERIAAEAVVWNRDVEPYARERDRQVAQRLQADGRKVVVDWDQLLIAPELLKTGGGDPYRVYGPFLRNWRGQVQAKQPVTVPAPAGLVDLDPAAVPSGEPLMARRDSHGFKGTELCPCRPGEAAAMQQLTSFCDGALFGYEPDRNFPGVVGTSYLSAALSVGTLSPRQAWSAAQEAREQARSEEQLHAIAVWEQELCWREFYQQALFHFPELSDGPYREQWRRFPWENNEDWFDFWREGQTGMPIIDAAMRQLNQTGWMHNRCRMIVASYLVKDLICDWRWGERAFMELEVDGDLAANNGGWQWSASSGMDPKPLRIFNPATQASKFDAAGDYIRQWVPELRHVNTKDLLSGEIGALERRDYPEPLVNHKTQQAKFKALYATIRS

SEQ ID NO: 5370 - protein, 572 aa, Debaryomyces hansenii CBS767
MGNNSSKPKDLRGSPLSRTDTGNSAKSSRSIRSRISMLRDDNSTSGSPKTGSKATSRKNSSTSLNNMNSSSHSMNIPINGNNSAHSNNNSSANLSNSFSNLSLHKNPSNQHSNNNFNLPPSMIQVEPKEPILIRRNTGPDGEDTPLSPKNHSFNSNSPHLASSFDNSNPSSNPSNNISRTSTNHSHHSGSINNYPLSPQPTSSSANGSTKDLQEDTSKNFDSQLLNENRNKDVLINNLLHSSTTESNESDDSGSIDIENLIQRLLDAGYSGKKTKSVCLKNHEIQLICAKARNILLLQPSLLELSPPVKVVGDVHGQYGDLIRIFTKCGFPPQTNYLFLGDYVDRGKQSLETILLLLCYKIKYPENFFLLRGNHECANVTRVYGFYDECKRRCNIKTWKLFIDTFNTLPIAAIVAGKIFCVHGGLSPVLNSMEEIRNIARPTDVPDFGLLNDLLWSDPADTMNEWEDNERGVSYVFSRVAINKFLQKFGFDLVCRAHMVVEDGYEFFNDRTLVTVFSAPNYCGEFDNWGAVMSVSDELLCLFELLDPLDSIALKQVMKKGKEERKNAQLQQL

SEQ ID NO: 5371 - protein, 981 aa, Myxococcus xanthus DK 1622
MASSQPPSDSPADNASLLLVAGERECQRVEEALQHAGVTVVTERATTAAAAEAALSRTWGLVLCGSEVPDMGFAEVQALWSKHGKELPFVVLSRDWCEATLEASVRAGALDYITEDRFSRLAPVVQRELRMTADRRRHTATAVQLERTNYLMENIIDAIPFVLFVKDADTRRLVVANKTFADAFRVTKEWLLGKLDHDYFPKEQAESFIAIDTEILETKQMKSFEEVARADGVDRIFATRKLPLLDEHGVARYVMGVTEDITERKHHEEMLRASKAELEAANKQLAASLEEIKRTRAVSARSLASYQQRALQMEIIRQQNEDLDRLAQELAVAKRNEEERAREAEAAARLKSEFLANFSHEIRTPLNGIIGYCDLLMREEGQRLTAHGRRDLNVVKTNAKTLLALINDILDLSKIESGRVEVVTEQVDVQELAEECLATVKEYLKGKDVALTTNIDPSARMLRSDALKLRQIMLNLLSNAAKFTDAGEVALSLVPAGSEVIMTVEDTGVGIPSDELPFIFEKFRQVDGSTTRKVGGTGLGLAIVRELSRVLGGNVTVTSTLGRGTTFTVRLPTTLETPDNGGGPHLERGVPVSEVAQHVGTMAQPGSTVLVVDDDPLIQQLVAGQLEPAGFKVVVAEDGIAALKRARELRPQAILLDIHLPKLDGWSVLSQLKSEPSLAGIPVILISVEEQRARGFSLGACEYLVKPVEPDRLVEVVQRSLHQSSGTSTSVGEVLVVDDDSATRELVSRNLRRAGFSTSEARSGEDALLKARVSPPALVVLDLMMPNLDGFEVLRRLRAEKLQVPVVVLTGKTLSAEEEALLRDGFAGFVKKGGHALEDVIAQAKGLLLSQRAASAGKLARILYVEDSAQNRDIVRRYLNGHFEVIEAEDGEHGLERAIRDAPDLILMDLSLPRLDGWEVTRRLRALPAAANVPVIAVTAHAGREYQDKAHAAGCTAYLTKPLDRDQLLEMIRKHLGRTHV

SEQ ID NO: 5372 - protein, 572 aa, Gibberella zeae PH-1
MASPPHIGSLSRLPANLRGSIESVKRGGHNVSWPLLNLDLLRNVLLFLFFWRWSRRAFWQLRGRGIIGSVVELYTNIRRILYGYFLRAPGVRGKVQQQVNESLVKLSDKLVPKDQIRYLTLPKEGFSHDVVRSELENLANMDHTRWEDGYVSGAVYHGEDELLALQTEAYGKFTVANPIHPDVFPGVRKMEAEVVSMVLSMFHAPPGAAGTSTSGGTDSILMACLAARQKAYAERGVTEPEMILPETGHTAFRKAAEYFKIKLHLVACPAPEYQVDVNAVRRLINPNTVILVGSAPNFPHGIIDDISALSKLALRKNIWLHVDCCLGSFLVPFLERAGFETLLFDFRLKGVSSISCDTHKYGFAPKGNSTVLYRTAEHRKFQYFVSPDWSGGVYASPGMAGSRPGALIAGCWASLMTMGESGYIDSCTKIVGTAKKIAEAIQTTPALGGELEIMGKPLVSVVAFTARNLNVYDIADGMGTKGWHLNALQSPPAIHVAVTLPITKVWEKLITDLEAVVEEEREKERVRLVEGKGTHGKAMGDASALYGVAGSLPNKSVVVDLASGFLDLLYKA

SEQ ID NO: 5373 - protein, 1023 aa, Schizosaccharomyces pombe 972h-
MNAQPFHNNTSDVQSFQDIISNSYQKPLSLVDSTDRALPDSSLSSLSRSTFQFHKHHLSGNENPQPSSESPYFTNNERLNSSSFPQIHDNQLSPSFNTSYQAIPSSSSNRSRGGPYTPSIRDDSLLALLSFSSNHRLHSMPSQLQPFNNASSYTTPMAPFTASFSNKVSHSAYPTRRLPSQAKKTSAIERVPVNLNFLQSDNLVVQSSPQTNFENFEFPKKIPSKEDLETREVLLLPPQTSKLSNKNLDTKSFTDVNKISQQGFVEISSNSSKVTPNTSLHQSFGIASSSSNNYMQTSSELTSSTEKMNGSHPLQLSNKSLLSIHLMQSKNQGHVSMTGSDKLSSHVQSETENAPVSKPSKPNTLTEDEKPLQSTKLPGNSLTVGELYQEPKSIQLPELSVSRTTYSAQSSSVKNCNERIPSAKALKKQKHLVPENKSKLQYVWQKKESLPYANLTSASNTHFFLSENQNDTSERLTRTLRKSTKNYTFGSYILGRTIGTGEFGKVKLGWPLPKANSTIHRSTPQVVIKIVLSTKQNCQTSRLMREVAILKGLGNNHPHIVKYLDFVKTKHHFGIVLDYVNGGELFDYILARRRLEDSVACRLFAQLISGVAYLHSRGVVHRDLKLENILLDTNRNIVIADFGFATTFGHFNTLSEHSLPTEKPDLFSTSCGSPCYAAPELVNCKSGMYAGTQADIWSCGVILYAMLAGYLPFDDDPHNPNGENVPRLYRYICSTPLIFPEFFKSKARDILKKILVPDPAKRVRMSAIMNHAYLRSHVSLFETYNDDEATSLRPSPIRLLSQKSLASVSSVSSISTYSSSIELTPQITKTSLNREKPALHGSINLKHSTRPVVPIADGIYASTTLHPIDNAKNRLVSLLRRPKHKVKHAKVETRESPMKNKPTKKQHKRAFSMFERPTSQKAPLSPVESKINLMVAPKRVLNCASDSLRALLAGKTDKSFWGSRIPFLFNKLKSKQKAVSSSFNTENSFLILQAVSPLTFGGCFKEENAYGQKKQHMRHATVF

SEQ ID NO: 5374 - protein, 1248 aa, uncultured bacterium
MPLRSPGKGADLPKDHPAISPDKEIMRSTWTFMLALGALVVTTGATLAWGWSGLGLALAGWAAAGIGYLARQRQEPAADQPGTTRPPEAGAEAEAADLIARVSPQDNGEAQRWLALSQEIVEAAHGANSLAQALQRVGQALHLQMGSRAWVCLRVDGWNGESALLRPWVNADGDAGDIIDVTAIATTHREERPLGQALSTLRPRAAQGEAELAPQSTCPWRPVHTRKVLAVPVSVEGWPLALLEFDDPQQDCAELSHVLDIAALQLGFVAQRDANLAHMATSAEHLGRLALVASRISSGVAITDRHGTIEWINSAFVALTGWPEDKVLGRKLGELLAQEVSAPTTVRELEDHLARGVPFRLSYEAARQGGQLITRYWGEIDAIQMLDETGGRSQYVCLFNDITKRKAQEHVRDQEREFLEALLGNLPVSLFVLDPVNLNVVAINRYTEIEFKLQRDQVVGKSITQALGESVLKLTEGPMQEALETGQTIEHDFEWQNASQQRIVNARHFALRHSNGRPRLLISLVRDITSARQSQADLEESERRFRELVESMDDGVYVASEHRANYLYLSHRTQDLWGVSAEDIQAHPARLKSLVLPEDQHLLAEQEALEDQDQPTDTLLRLQHPDKGLRFLRHRTRARRLPDGQSRIYGLVSDVTDEHGQALELQRARDLAEAASQAKSQFMANMSHEIRTPMNGILGMTELLLGTPLNDKQRRFAQAVYRSGESLLEIINDILDFAKIEAGRLELATCDFVLRTLVEDTLELMAPRAHEKGLELSFREQPGLPSVIHGDPLRLRQILTNLVANAIKFTEHGEIVVDIRRAIGGAVELPKPGSLETMELEFMVRDTGIGIPAEVVPRLFSAFVQANGGMARRYGGTGLGLAISKQLVELMGGQIEVNSAPGVGSEFLFRVPVCIGTTQADMAMLEEPDMPSFNVLVVDDNDTNRTVIENMLTAWGMHVVQAIDGREALNVLMAHPSQDAPFDLALVDMNMPNLDGMGLAEAVRTSGRYPLLKMILLSSVSSPDDVRRAQDVGFQRFVAKPLRKAELRQAILGISAERGDNAQEARRINKAVLVIEDNTVNQEVCSQMLKRLGCEVRVASSALEGLRRLGEQRFDLILMDIQMPGMDGVEALGWFRRGSNNRFSFITPSDTPVIAVTANALEGDEERFLGLGFDDYLSKPFRQSQLHKMLVEHTHIDPGDLPDAPITVPTPLHDDHAPSPAIATAAPPRGSPARCHRRIPQRRLVGRP

SEQ ID NO: 5375 - protein, 724 aa, Polaromonas sp. JS666
MPRPKRKAAGPTRPADGARDKQTQLDAFTAGSANVLTTNQGLQIPDNHNSLKGGVRGPTLLEDFILREKITHFDHERIPERVVHARGSGAHGYFKPYKSMVQYTSAAFLQDPAIETPVFVRFSTVAGSRGSADTVRDVRGFAVKFYTAEGNYDLVGNNIPVFFIQDAIKFPDLIHAVKPEPHHEMPQAASAHDTFWDFASLMPESTHMLMWTMSDRALPRSFRMMEGFGVHAFRFINARGDSHFVKFHWKPKLGVHGLAWDEAQKIAGKDPDFHRRDLWEAIESGHFPEWELGVQIVDDGQESELGFDILDATKLIPEEQVPVQIIGKLVLNRNPDNFFAETEQVAFHPGHLVPGIDFSNDPLLQGRLFSYTDTQLSRLGGANFHELPINRAVCPMHNFQRDGMHRQAISKGRVAYEPNTLGNGAEYRVDGAAQGFQSYPEQLEPPKIRRRSPSFDDHFSQATLFWNSQSVAEKDHIVAAFRFELSKVDVPEIRQRIVDNLAHVDLKLAGRVAVTLGIAAPDPKAAAGRLGFRDYRITSKVDEDPTLRMVGRPGGGVKTRKVAILVANGVESAPLRRIQQDLTEAGALCKLVAQHLGTVSTASGRQLAVDHTFANMPSVMFDAVLIPGGASSAAALSGLGEAVHFVLEAYKHGKTICAVNDGVQLLGTLGFSQGKNPELVTVPTVGVLIADGRKVLDGQVSQDFMAAIALHRHWDRLNIDAIPA

SEQ ID NO: 5376 - protein, 548 aa, Brassica napus
MKLLHGLALVFLLAAASCKADEEITCEENNPFTCSNTDILSSKNFGKDFIFGVASSAYQIEGGRGRGVNVWDGFSHRYPEKAGSDLKNGDTTCESYTRWQKDVDVMGELNATGYRFSFAWSRIIPKGKVSRGVNQGGLDYYHKLIDALLEKNITPFVTLFHWDLPQTLQDEYEGFLDRQIIQDFKDYADLCFKEFGGKVKHWITINQLYTVPTRGYAIGTDAPGRCSPMVDTKHRCYGGNSSTEPYIVAHNQLLAHATVVDLYRTKYKFQKGKIGPVMITRWFLPFDESDPASIEAAERMNQFFHGWYMEPLTKGRYPDIMRQIVGSRLPNFTEEEAELVAGSYDFLGLNYYVTQYAQPKPNPYPSETHTAMMDAGVKLTYDNSRGEFLGPLFVEDKVNGNSYYYPKGIYYVMDYFKTKYGDPLIYVTENGFSTPSSENREQAIADYKRIDYLCSHLCFLRKVIKEKGVNVRGYFAWALGDNYEFCKGFTVRFGLSYVNWEDLDDRNLKESGKWYQRFINGTVKNAVKQDFLRSSLSSQSQKKRFADA

SEQ ID NO: 5377 - protein, 376 aa, uncultured archaeon GZfos24D9
MEERGISKQELKSFLKEQRQKDLTYRKVLSSMCSYPHEMATYAHNLFLDSNLGDSGLFPGTKAMEDELIRMIGALLGNENAHGYISTGGTESNIQAIRAIRNRKRKERLQEMNIIVPKTAHFSFDKIEDLLSLEVKKAGLDDKLRVDVNLVEELIDDNTISIVGIAGTTEFGQIDPIKELADIAHDSDIFLHVDAAFGGFVIPFLDAEYQFDFSLDAVSSVSIDPHKMGMSTIPAGCILFRDESYLADLAVDTPYLTTNEQCSLIGTRSGAPVAATFAVLKYLGRSGLKAIVDDCMQLTRMLVRGAKAMDIYPVIEPVTNVVTLRFPDVDRVAKALEARGWRVSTTRAPKALRLVIMPHVTEDTIELFLNDLACVT

SEQ ID NO: 5378 - protein, 453 aa, Prochlorococcus marinus str. MIT 9313
MPISRSLRSLGRQRSSWLVLLGAGGAATAIALASPSLGLPRSSSSAISDSPKEVIDQVWQIVYRDYLDSTGKYNPEVWKGLRKDLLAKNYSATSESYEAIRGMLASLDDPYTRFLDPKEFKEMQIDTSGELTGVGIQLSLDKDTKELVVVSPIEGTPASKAGVQPKDVIVFINGQSTKGMSTADAVKLIRGKEGSEVTLGLRRRGEVIQVPLIRARIEIQAVDIQLNTTVSGTKIGYIRLKQFNAHAAKGMRSAIKNLEKEGAQGYVLDLRSNPGGLLEASIDIARQWLDEGTIVRTKTRDGIQDVRRANGSALTQRPVVVLVNEGSASASEILSGALQDNHRGVLVGQKTFGKGLVQSVRGLSDGSGLTVTIAKYLTPSGTDIHKNGIKPDIKAVMSEKEINNLKLEDLGSGKDSQYKVAETTLIKALSKILDGPMYKPVGVKLPQAIPSTL

SEQ ID NO: 5379 - protein, 578 aa, Avena sativa
MALLCSALSNSTHPSFRSHIAGANSENLWHLSAHPAQKSKRRCNLTLSSRAAARISSALESGKLKPWQIPKRDWFPPEFTFGAASAAYQIEGAWNEGGKGPSSWDNFCHNYPERIMDGSNWDVAANSYYMYKEDVRMLKEIGMDSYRFSISWPRILPEGTLEGGINHEGIQYYNDLLDCLIENGIKPYITLFHWDTPQALADKYNDFLDRRIVKDYTDYATVCFEHFGDKVKNWITFNEPHSFCGLAYGTGLHAPGLCSPGMDCAIPQGDALRQPYIVGHNLLLAHAETVDVYKKFYKGDDGQIGMVMDVMAYEPYGNNFVDQQAQERSIDFHIGWFLEPMVRGDYPFSMRSLVGDRLPFFTKSEQEKLVSSYDFVGINYYTARFSEHIDISPEIIPKLNTDDAYSTPEFNDSNGIPIGPDLGMYWILSYPKGLKDILLLMKEKYGNPPIYITENGTADMDGWGNPPMTDPLDDPLRIEYLQQHMTAIKEAIDLGADVRGHFTWSLIDNFEWSMGYLSRFGIVYIDRNDGFKRIMKKSAKWLKEFNGATKEVNNKILGASSCCSGELMWFLVQNPYGK

SEQ ID NO: 5380 - protein, 278 aa, Corynebacterium sp. ATCC 31090
MTVPSIVLNDGNSIPQLGYGVFKVPPADTQRAVEEALEVGYRHIDTAAIYGNEEGVGAAIAASGIARDDLFITTKLWNDRHDGDEPAAAIAESLAKLALDQVDLYLVHWPTPAADNYVHAWEKMIELRAAGLTRSIGVSNHLVPHLERIVAATGVVPAVNQIELHPAYQQREITDWAAAHDVKIESWGPLGQGKYDLFGAEPVTAAAAAHGKTPAQAVLRWHLQKGFVVFPKSVRRERLEENLDVFDFDLTDTEIAAIDAMDPGDGSGRVSAHPDEVD

SEQ ID NO: 5381 - protein, 459 aa, Streptomyces coelicolor A3(2)
MSEYPGFPPGFVFGAATASYQIEGAATEDGRGPSIWDTYSRTPGLVVNGDTGDVACDHYHRYPEDVALLRDLGVDSYRFSIAWPRIVPDGSGAVNPKGLDFYSRLVDELLAAGIEPAATLYHWDLPQALEDRGGWRVRETAERFAEYTAVVAEHLSDRVPRWITLNEPWCSSFLGYSIGRHAPGAKEGRGALAAAHHLLVGHGLAVKALRAAGVREVGITLNLDRNLPATDSPADLAAVVRADTQHNLVWTEPILAGRYPATEEETWGELITGEDFRRDGDLELISQPLDFLGVNYYRPIVVADAPHRESDPARRVATDNRYEEVRHPGVRHTAMNWPVVPDSFTDLLVALKRQYGDALPPVHITENGSAEDDAAAADGTVHDTDRVAYLRDHLTALRAAIDAGVDVRGYYVWSLLDNFEWAYGYDKRFGIVRVDYDTQRRTPKDSYRWYREMIAANRG

SEQ ID NO: 5382 - protein, 299 aa, Synechococcus sp. WH 8102
MPSTPSPHNPGDLPRQFASRDALEALLVEEFPSAEGPLSPIPGGRQAAEAKLAGVQPARYAKSRNHLNGAVTGLSPYIRHGVLTLAEVKQAVFERIRKRDDGGKLINELGWRDFWQRMWLDLGDGIHDDQEAFKTGHDASSYARELPQDVRDGRTGLACMDGFRDKLVTTGWLHNHARMWMAAWLVHWRRVHWTAGANWFLEHLLDGDPASNHLSWQWVASSFSHKPYFFNRGNLERYSDGRYCEECPSAADCPFEGSYDQLESQLFAPMPAIRDTGTGRNRQRRNGGGASAALARPKR

SEQ ID NO: 5383 - protein, 146 aa, Legionella pneumophila subsp. pneumophila str. Philadelphia 1
MKYLHTMVRVSNLEQSLDFYCNKLGLIEVKRTENAKGRFTLVFLAAPADIEQVQTSYGPMLELTYNWDPEDYTEGRNFGHLAYHVDDIYKICQHLQECGVVINRPPRDGHMAFIRSPDNISIELLQKGEPLPKQEPWLSAPNIGHW

SEQ ID NO: 5384 - protein, 545 aa, Caulobacter crescentus CB15
MAAKDVYFSSDARDKMLRGVNILANAVKVTLGPKGRNVVIEKSFAAPRTTKDGVSVAKEIELADKFENLGAQMIREVASKTNDKAGDGTTTATVLAQAIVQEGLKSVAAGMNPMDLKRGIDKAVAIAIEDIKTSSKKVTTNAEIAQVGTISANGDKEVGEMIAKAMDKVGNEGVITVEEAKTAETELDVVEGMQFDRGYLSPYFITNADKMEVQLEEPLILLSRKKLSSLQPLPVLEAVVQSGRPLLIIAEDVEGEALATLVVNKLRGGLRVAAVKAPGFGDRRKAMLEDIAILTGAQVVSEDIGIKLENVSLEMLGRAKKVSITKDDTTIVDGVGEKADIEARIAQIKRQIEDTTSDYDKEKLQERLAKLAGGVAVIRVGGSTEVEVKEKKDRVDDALNATRAAADEGIVPGGGTALLKASKASAVVGDNDDQTAGIAIVRRALQAPIRQIAENAGVEGSIVVGKILENDNSAFGFNAQTEQYVDLVVDGVIDPAKVVRTALQNAASVAGLLITTEAAIVVSPQEGRRRPAGGGMPGGMGDMDF

SEQ ID NO: 5385 - protein, 279 aa, Helicobacter hepaticus ATCC 51449
MISIIIDSLRESALHIDSLLKDTSTSYLQSINASGDMQLEIDVRVDKFLSEKLLNLPCVKAICSEEQEEIMYSENKNAPYIIAYDPLDGSSLIDSNLSIGTIFGIYNEELSAKHLIASGYIIYGPRLEMVVAQEQALHYRYNGNMWRNLGALALNTKGKINAPGGTQKHWENKHKAMIESLFAQGYRLRYSGGMVPDLHQILIKGGGLFSYPATSDAPNGKLRKLFEVFPFAFVYEKAGGFATNGTYRILELEVAHLHDSTPCFFGSQSEMNLVKEVYE

SEQ ID NO: 5386 - protein, 548 aa, Corynebacterium glutamicum ATCC 13032
MAKIIAFDEEARRGLEKGLNTLADAVKVTLGPKGRNVVLEKAWGAPTITNDGVTIAREIELEDPYEKIGAELVKEVAKKTDDVAGDGTTTATVLAQALVREGLRNVAAGSNPMGIKRGIEKAVAQVTEKLLEAAKEVETEEQIAATAGISAADPAIGAQIAKAMYAVGGGKLNKDSVITVEESNTFGVELEVTEGMRFDKGYISGYFATDMERLEAVLEDPYILLVSGKISNIKDLLPLLEKVMQSGKPLLIISEDVEGEALSTLVVNKIRGTFKSVAVKAPGFGDRRKAQLQDIAVLTGGQVISEEVGLSLETADLPLLGQARKVVVTKDDTTIVDGAGSEAQIEGRVNQIRVEIENSDSDYDREKLNERLAKLAGGVAVLKVGAATEVELKERKHRIEDAVRNAKAAVEEGIVAGGGVALLQAAHVLDNDLELSGDEATGVRIVREALTAPLKQIAANAGLEPGVVADKVSQLPQGEGLNAANGEYVDLMAAGINDPVKVTRSALQNAASIAALFLTTEAVVADKPQPAGAAGMPGADEMGGMGGF

SEQ ID NO: 5387 - protein, 336 aa, Glycine max
MEERYEPLKELGAGNFGVARLAKDKKTGELVAVKYIERGKKIDENVQREIINHRSLRHPNIIRFKEVLLTPTHLAIVLEYASGGELFERICTAGRFSEDEARYFFQQLISGVSYCHSMEICHRDLKLENTLLDGNPSPRLKICDFGYSKSALLHSQPKSTVGTPAYIAPEVLSRKEYDGKISDVWSCGVTLYVMLVGAYPFEDPEDPRNFRKTIGRIIGIQYSIPDYVRVSSDCRNLLSRIFVADPAKRITIPEIKQYPWFLKNMPKEIIEAERKGFEETTKDQPNQKVEEIMRIIQAARIPGQGSKAGEGGQAGTGSLDIEDDEEIDVSGDYEQV

SEQ ID NO: 5388 - protein, 353 aa, Aeropyrum pernix K1
MDGSMGEGGGQILRTAVALAAVLGRPLRIVNIRAKRRPPGLRPQHLTAVRAVAAISGGRLRGAEVGSTSLEFTPGRVRGGRYRFDVGTAGSVALIIQALAPLLAYSDSPVEVELTGGTDVPMAPTIDYMREVFASILAMLGYEIEIRVLRRGHYPRGGGRVVVRVPDPPGGFRARSFVERGPLKGVYVRSHAVKLPGSIAERQARSAASLVRERLGVDPIVEIEAYKPHRDPHLGPGTGVLVWAVFGETVMGGDSIGKKGKPAEVVGREAAESLLEDMATGAALDRHMSDMAPVYLALAGGVSTVFGARLTGHASTILELLRIMVDGFEYRILEGGLERPFKAELRGAGVSPR

SEQ ID NO: 5389 - protein, 658 aa, Desulfitobacterium hafniense DCB-2
MTSNEGITISDDENTLTAGERGPTLIEDFLSREKLAHFDRERIPERVVHARGYGAHGEFQPYESLADLTMADFLQDPNKKTPLFVRFSQVVGSKGCNETNRDVRGFSIKFYTDEGNFDLIAINMPVFFIQDAIKFPDLIHAVKPEPDNEYPQGQTDHNTFWDFMANNKETAHMSLWIASNRAFPKSFRTMEGFGVHTFRLVNKDGKSHFVKFHIKPLLGVHSLIWDEAQRLGSDADFHRRDLWENIEIGNYPEYEMAIQVIKEEDEFAYDFDLLDPTKLWPEEEIPLRRIGKIILNRNVENAFAETEQSAFHPGNIVRGIDFSNDPLLQGRLFSYTDAQQARLGPNHQQLPINRPVCPFANNQRDGASRLVIDRGKVAYHRNGLANNSPYTVPGTQGGFVTYPSTVEGHKVRSTAPSFKDHYSQAKMFWNSMSEVEKRQIIGAYCFELGKCGPFVRQEWVDVLAHISTELAKSVSKELGTTVPADVEESPVTKSSPALSLHNTIFVPDTLRVAVFLAQGFDGPGVSKVLETLAEAKLRVVIVHDTLGKVSGTEGVTYEVHDSFLTGSPLVYDGILIVGSGNITPYFTYTAQKFTTDIYNHFKPIGIIQKGDAVLEPLGLLADEGIVTDSGPDFAGRFIKAMAKQRFWNRPSFLYPAMV

SEQ ID NO: 5390 - protein, 376 aa, Arabidopsis thaliana
MSAESCFGSSGDQSSSKGVATHGGSYVQYNVYGNLFEVSRKYVPPLRPIGRGAYGIVCAATNSETGEEVAIKKIGNAFDNIIDAKRTLREIKLLKHMDHENVIAVKDIIKPPQRENFNDVYIVYELMDTDLHQIIRSNQPLTDDHCRFFLYQLLRGLKYVHSANVLHRDLKPSNLLLNANCDLKLGDFGLARTKSETDFMTEYVVTRWYRAPELLLNCSEYTAAIDIWSVGCILGETMTREPLFPGKDYVHQLRLITELIGSPDDSSLGFLRSDNARRYVRQLPQYPRQNFAARFPNMSAGAVDLLEKMLVFEPSRRITVDEALCHPYLAPLHDINEEPVCVRPFNFDFEQPTLTEENIKELIYRETVKFNPQDSV

SEQ ID NO: 5391 - protein, 376 aa, Arabidopsis thaliana
MAKEIESATDLGDTNIKGVLVHGGRYFQYNVYGNLFEVSNKYVPPIRPIGRGAYGFVCPAVDSETHEEIAIKKIGKAFDNKVDAKRTLREIKLLRHLEHENVVVIKDIIRPPKKEDFVDVYIVFELMDTDLHQIIRSNQSLNDDHCQYFLYQILRGLKYIHSANVLHRDLKPSNLLLNSNCDLKITDFGLARTTSETEYMTEYVVTRWYRAPELLLNSSEYTSAIDVWSVGCIFAEIMTREPLFPGKDYVHQLKLITELIGSPDGASLEFLRSANGGKYVKELPKFPRQNFSARFPSMNSTAIDLLEKMLVFDPVKRITVEEALCYPYLSALHDLNDEPVCSNHFSFHFEDPSSTEEEIKELVWLESVKFNPLPSI

SEQ ID NO: 5392 - protein, 438 aa, Desulfotalea psychrophila LSv54
MRQQQITARTLGVCLIFLTLFIANSALAEQKSTDKTYKQLEVFATSLSILEQNYIQPLDPEKSLTDAISGILQGLDPHSSYLSAKEFHDLQSETSGSFSGIGIEVSTRNNNLTIIAPLDGSPAAQAGIEAQDQIIEINGKKTAEMSSQQALMLLRGPIGSSISLSLKREGEENLLHISLIRERISLQSVSFLPLGRDIFYSRITSFQSNTSHDYVEKLNRIKKKREIRGLILDLRNNPGGLLSQAISISDLFISSGAIVHTRGRAAEQNMTFEARDLGEDNDFPMLVLINGGSASASEIVAGALQDQGRAIIVGTDSFGKGSVQTIIPLPNGAALKITTAQYYTPKNRSIQAQGIHPDITLSRLKKGSSCRESADQSTEASLTNHLDNPNGKAKRAPRSAREKKVQKLLADDNQIRVARDILRGILRYSAYQDAQVGE

SEQ ID NO: 5393 - protein, 429 aa, Desulfovibrio desulfuricans G20
MRLSLWTATFIVFLTLTVSIGPGNATDGPGRFESLKRFSQVLDLVERFYVSDVSRDELMEGAIRGMLQNLDPHSAFLDAAEYREMQESTSGEFFGIGIEITQQNDRLVVVAPIADTPAARAGLRAGDIILAVDGKLTQEMTLRESVSRIRGPRGSTVKLTILHEGENSPETVSIERDSIPLISVKSHELEPGYLWVRLSRFSERTTNELHDAIREERKRGPIKGLILDLRNNPGGLLDQAVHVADTFLSEGTIVSIKGRIESNNRDFKATAQATDVKAPLVVLVNAGSASASEIVAGALRDHKRGLLLGERTFGKGSVQNVIPLADGSGLKLTIALYHTPDGTSIQAEGVEPDIKLPFVQPAREEESKAKHPFGIMREKDLARHLENGEDKKSPETERDKESVASLERDNQLRMALQLVKQLPRLQAIH

SEQ ID NO: 5394 - protein, 711 aa, Gibberella zeae PH-1
MAPRGFEDEELTISLSSSHVRRPQQTQPQSQSQQQDDSHDAPQAASRPADAPLKERIKTEQRIGAYKVLRTLGEGSFGKVKLAIHNGTGQQVALKIIARKKLISRDMAGRVEREIEYLQLLRHPHIIKLFTVIKTPNEIIMVLEYAGGELFDYIVQHGRMKEPEARRFFQQMLCAVEYCHRHKIVHRDLKPENLLLDENLNVKIADFGLSNIMTDGNFLKTSCGSPNYAAPEVIGGKLYAGPEVDVWSCGVILYVLLVGRLPFDDEHIPSLFAKIAKGTYSIPQWMPTGAANLIKKMLVVNPVHRATIEDIRADPWFTTELPVYLQLPVEEFFNTGVDPNKAIKKNDIAPNASEKVQERLHNEVTEKISKTMGYGKSDVEEALQAAEPSAIKDAYMIVRENKMMQVNHNSEALLAEPEGSSPMLSMSSARSTISQATTTPRPYVSKVGILPSSLPAYHKDYMEREKAGSVENSPPKVLINDEPQLNRTDAEKEETARRLRPHSRSQLRIDEANTRPQGMTPINPPKKTKPVRWQFGIRSRNSPWEALLCIHKALYKLGATYIPDEDYESRTAEERAEASGDSSFVDSHDGYRGSTSSIDPKKRYNLPADPWHINVRWDTSAIKKKAGNTPSAPSTPSSPSTPDGHHAKEPFVALHLDIQIYEMEHGVYLVDFKCSGYETAHGRLLEEKDVTSPFPFLDMAAKLIMQLAEAD

SEQ ID NO: 5395 - protein, 281 aa, Solanum demissum
MVGKISSDLPPGFRFHPTDEELIMYYLRYQATSRPCPVSIIPEIDVYKFDPWELPEKAEFGENEWYFFTPRDRKYPNGVRPNRAAVSGYWKATGTDKAIYSANKYVGIKKALVFYKGKPPKGVKTDWIMHEYRLSDSKSQTYSKQSGSMRLDDWVLCRIYKKKNLGKTIEMMKVEEEELEAQNVSINNAIEVGGPQTMKLPRICSLSHLLELDYFGSIPQLLSDNLLYDDQSYTMNNVSNTSNVDQVSSQQQNTNNITSNNCNIFFNYQQPLFVNPTFQSQ

SEQ ID NO: 5396 - protein, 413 aa, Arabidopsis thaliana
MASSSADNLTDKNIVFRKLKSKSENKVCFDCSAKNPTWASVTYGIFLCIDCSATHRNLGVHISFVRSTNLDSWSPEQLRTMMFGGNNRAQVFFKQHGWTDGGKIEAKYTSRAADLYRQILAKEVAKAIAEETNSGLLSSPVATSQLPEVSNGVSSYSVKEELPLSKHEATSATSSPKASNTVVPSTFKKPIGAKRTGKTGGLGARKLTTKPKDNLYEQKPEEVAPVIPAVSSTNNGESKSSAGSSFASRFEYNDDLQSGGQSVGGTQVLNHVAPPKSSSFFSDFGMDSSFPKKSSSNSSKSQVEESDEAREKFTNAKSISSAQYFGDQNKNADLESKATLQKFAGSASISSADFYGHDQDDSNIDITASDLINRLSFQAQQDLSSLVNIAGETKKKLGTLASGIFSDIQDRML

SEQ ID NO: 5397 - protein, 691 aa, Dechloromonas aromatica RCB
MKQLCWIVLGLTVSAQAAELAPQPQHQRVVRISAALLGHYHYKPAVLDDALSEAIFERYLKTLDSEKYYFTQSDIDQLSEYRTRLDDAIIEENLQAPFAIFNLYARRAEEHFSYARSLLKGGFRFDQNDRFTFVRDKAEWASSDEALREIWQQRVKNDWLRLKLAGKSDPEIVTALDKRYEQSIRRINRLKSDDAFQMFMNAYTTAIEPHTTYLGPRASADFDISMRLSLTGIGAVLQERNDYTMVREVTPGGPAARSGQLKAGDRIVAVAQGEKGAFVDVVGARLDDTVALIRGAADSVVRLDILPANAGPDAKHRQITLVRKKVDLAQQAAKKAVLDVTDNGSARRIGVITLPAFYDDFEGRRKGDPNFRSATRDVAKLLKELGKEKVDGVVLDLRHNGGGSLKEAIELTGLFIDTGPVVMERNAQGQVFVDGDTTPGTAWDGPLGVLIDGESASASEIFAAAIQDYGRGIVIGEQSYGKGTVQTVLNLDQAVGSEKPALGELRMTIAQFFRINGSTTQVRGVQPDIALPAANDPTLTGEASNDNALPWTHIRAAAYDRVADKGEVIPALLARHVARAANDPEFQRLEETASELQRLRLQTSVSLNEAERRRENESLEKRLSGLARADDGLLDSEREPDTDGKDEKAGNKAKDTRLLAAARIIADEVDLQREKGKPGALERPNQAAINR

SEQ ID NO: 5398 - protein, 163 aa, Solanum demissum
MVGKISSDLPPGFRFHPTDEELIMYYLRYQATSRPCPVSIIPEIDVYKFDPWELPEKAEFGENEWYFFTPRDRKYPNGVRPNRAAVSGYWKATGTDKAIYSANKYVGIKKALVFYKGKPPKGVKTDWIMHEYRLSDSKSQTYSKQSGSMRVRTSLICRLIASN

SEQ ID NO: 5399 - protein, 368 aa, Triticum aestivum
AGSHRWPAAASRSSGGVATSCGRRGSGMERYEVIKDIGSGNFGVAKLVRDVRTKELFAVKFIERGHKIDENVQREIMNHRSLRHPNIVRFKEVVLTPTHLAIVMEYAAGGELFERICSSGRFSENEARFFFQQLLSGVSYCHSMQICHRDLKLENTLLDGSEAPRLKICDFGYSKSSVLHSQPKSTVGTPAYIAPEVLSRREYDGKVADVWSCGVTLYVMLVGAYPFEDPDEPKNFRKTITRILSVQYAVPDYVRISMECRHLLSRIFVANPEQRITIQEIKNHPWFLKNLPIEMTDEYQMSLHMVGVNAPPQTLEEVMAIIQEARIPGDGSKFAGQLSVPGLGSMELDDIDDVDADVEDSGDFVCAL

SEQ ID NO: 5400 - protein, 400 aa, Physcomitrella patens
MKRRNECEEHHVEMNGWNGYTNSDLSPAPTPTGPRGRGSRAKTVKQTKNGPQTPGPSGIGSPTSSAPTPTSTCRYDSSLGLLTKKFIDLIKQADDGVLDLNKAADTLHVQKRRIYDITNVLEGIGLIEKKLKNRIRWKGLGMVRNAEAKDDAAGLLAEVEDLRIKEKKLDESISEMRERLRSLSEDEHNKQWLYVTEDDIKNLHCFQNETLIAIKAPLGTTLEVPDPDEAVEYPHRRFQILLRSTLGPIDVYLVSRFEGRTEVPMETLPDSQEAGPSSSVDGMSHQENMVMVPEVGYGLSDLVPPVSHESASQAPEPTGSHPDFAGGIMRIAPAEVNTDTDYWLLSDAGVGISDMWRSDPSNAMWDEVVRLNPEFGSENIGSPRPHTPPSNNALEVDPVS

SEQ ID NO: 5401 - protein, 304 aa, Arabidopsis thaliana
TGAKFPSVGLGTWQASPGLVGDAVAAAVKIGYRHIDCAQIYGNEKEIGAVLKKLFEDRVVKREDLFITSKLWCTDHDPQDVPEALNRTLKDLQLEYVDLYLIHWPARIKKGSVGIKPENLLPVDIPSTWKAMEALYDSGKARAIGVSNFSTKKLADLLELARVPPAVNQVECHPSWRQTKLQEFCKSKGVHLSAYSPLGSPGTTWLKSDVLKNPILNMVAEKLGKSPAQVALRWGLQMGHSVLPKSTNEGRIKENFNVFDWSIPDYMFAKFAEIEQARLVTGSFLVHETLSPYKSIEELWDGEI

SEQ ID NO: 5402 - protein, 358 aa, Arabidopsis thaliana
MDKYEVVKDLGAGNFGVARLLRHKETKELVAMKYIERGRKIDENVAREIINHRSLRHPNIIRFKEVILTPTHLAIVMEYASGGELFERICNAGRFSEAEARYFFQQLICGVDYCHSLQICHRDLKLENTLLDGSPAPLLKICDFGYSKSSLLHSRPKSTVGTPAYIAPEVLSRREYDGKHADVWSCGVTLYVMLVGGYPFEDPDDPRNFRKTIQRIMAVQYKIPDYVHISQECRHLLSRIFVTNSAKRITLKEIKKHPWYLKNLPKELTEPAQAAYYKRETPSFSLQSVEDIMKIVGEARNPAPSSNAVKGFDDDEEDVEDEVEEEEEEEEEEEEEEEEDEYEKHVKEAHSCQEPPKA

SEQ ID NO: 5403 - protein, 312 aa, Bacillus cereus E33L
MCINLLCKLYICFDFLVKSCSNKVVAYKKCNNERETTVHIPTTTLHNGVKMPMIGLGVYKAKEGDEVKQAVKTALEVGYRSIDTATVYENESGVGEAVRESGIPREDIFITTKVWNDDQGYEETLEAFEKSLKKLQMDYVDLYLIHWPIRGKYVDTYRALEKLYEEGKVRAIGVSNFHKHHLELLLPNCKIKPMVNQVELHPMLTQFELRNFCQGEQIQMEAWSPLMRGGEVFQHPIIQAIATKYEKTPAQVILRWDIQSGIVTIPKSVTPSRIQENFSIFDFSLTEEEMTQINTLNRNLHVGTNPDKYDTL

SEQ ID NO: 5404 - protein, 206 aa, Triticum aestivum
MASRRRTLLKVIILGDSGVGKTSLMNQYVNKKFSNQYKATIGADFLTKEVQYEDRLFTLQIWDTAGQERFQSLGVAFYRGADCCVLVYDVNSMKSFDNLNNWREEFLIQASPSDPDNFPFVLLGNKVDIDGGNSRVVSEKKAKAWCASKGNIPYFETSAKEGTNVEDAFQCIVKDALKNEPEEELYIPDTVDVVGGNRTQRSSGCC

SEQ ID NO: 5405 - protein, 500 aa, Glycine max
  misc_feature (218)..(219): Xaa can be any naturally occurring amino acid
  misc_feature (403)..(403): Xaa can be any naturally occurring amino acid
  misc_feature (407)..(407): Xaa can be any naturally occurring amino acid
  misc_feature (409)..(410): Xaa can be any naturally occurring amino acid
  misc_feature (420)..(420): Xaa can be any naturally occurring amino acid
MGLVKKIGKYQLGRTIGEGTFSKVKLAVNGNNGQKVAIKVIDKHMVLENNLKNQAKREIRTMKLLHHPNIVRIHEVIGTKTKIYIVMEYVSGGQLLDKISYGEKLNACEARKLFQQLIDALKYCHNKGVYHRDLKPENLLLDSKGNLKVSDFGLSALQKHNDVLNTRCGSPGYVAPELLLSKGYDGAAADVWSCGVILFELLAGYLPFNDTNLMNLYXXIWKAEYRCPPWFTQNQKKLIAKILEPRPVKRITIPDIVEDEWFQTDYKPVFASEFDQNINLDDVDVAFNSIKENIRESTIPKSSSFINAFQLIAMSQDLDLSGLFEEQDEKKQRTRLGSKHTINETIEKIEAAATDVGLSIEKMNNFKIKMQPKQIMTRCSRSYLSAQVIEVAPTHCVIEISKXTGDXRXXHKFCESLSNXLKQKPDPSQSQDSVDCAAERKNKMLDATKSQKVKIANLFLAINLLEDGLNPCLFHFSEVHGSLTRMKQSTKKNHVANFLL

SEQ ID NO: 5406 - protein, 420 aa, Triticum aestivum
  misc_feature (214)..(214): Xaa can be any naturally occurring amino acid
MSNTASSAALLTPYKMGRFDLSHRVVLAPLTRERSFGNVPQPHAILYYQQRTTKGGLLIAEATGVSDTAQGYKDTPGIWTKEQVEAWKPIVNGVHAEGGIFFCQIWHVGRVSNHTFQPNGQAPISSTDKPLKPVVRANGIDVPTISTPRRLQTNEIPLVINDFRAAARNAIEAGFDGVEIHGAHGYLIDQFLKDQVNDRTDKYGGSLENRCRLXPLEVVQAVVDEVGADKVGIRLSPFANYSEASDSNPEALGLYMAHALNKFGILYCHMVEPRMVNIGEKFETPHSLRPIRDAFKGTFIVAGGYDRDDGNKAIADGYADLVAYGRLFLSNPDLPRRFEIGAPLNKYIRDTFYLSDPVIGYTDYPFLPSGCLDGPFRNESPPHQIVYLMYQYYVKGIRSLISMLMCIGAVWIKYVIIIAI

SEQ ID NO: 5407 - protein, 208 aa, Desulfovibrio desulfuricans G20
MTIRTFPIGPLETNCHILSHQGQALAVDPGGDPAQLLEYCTEKSLQLKHILLTHLHFDHLYGVAALAERTGAQVSANNADAYLMQTELGKGGMFGFPRVQPFDFTALEAGEHTFIGLSCTVLETPGHTPGSFSFYFPQAEAVFVGDLLFHRSVGRTDFPGGDSATLLNSVKKAIFSLPDTTVVYPGHGIETTVGDEKLNNPFFTEFRR

SEQ ID NO: 5408 - protein, 434 aa, Campylobacter upsaliensis RM3195
MKRKQILAALAGFTGSLILCLGLANVLYADDKTEQMQKRLEALEKLTKTLQIVEQYYVDEQNISDLVDKSLSGLLTNLDAHSSFLNEKDYNDMKMQMSGEFGGLGITVGMKDGALSVISPIEGTPADKAGIKSGDIILKINNEATLGMNLNDAVDKMRGKPSTKITLTIFREGAAKPFDVNLTREIIKVESVYSKRIEDEDILYLRVTSFNKNIVDEARKELKKYPNNKGVILDLRNNPGGILNQAIGLTNLFVDKGIIVSQKGRNESENKDYKADPKNKISNSSLVVLVNGGSASASEIVSGALQDLKRAIIVGENTFGKGSVQQTIPLNKTEALKLTIARYYLPSGRTIQAVGVKPDVEVFPGKVTAKEDGFSIKESDLKQHLEGELEKLEKKEDKKDTKENKNLITKKQINEDAQLKAAIDSIKILNIKGK

SEQ ID NO: 5409 - protein, 484 aa, Pseudomonas syringae
TDTLTRDNGAVVGDNQNSQTAGAQGPVLLQDVQLLQKLQRFDRERIPERVVHARGTGVKGEFTASADISDLSKATVFKSGEKTPVFVRFSSVVHGNHSPETLRDPHGFATKFYTADGNWDLVGNNFPTFFIRDAIKFPDMVHAFKPDPRTNLDNDSRRFDFFSHVPEATRTLTLLYSNEGTPAGYRFMDGNGVHAYKLVNAKGEVHYVKFHWKSLQGIKNLDPKEVAQVQSKDYSHLTNDLVGAIKKGDFPKWDLYVQVLKPEELAKFDFDPLDATKIWPDVPEKKIGQMVLNKNVDNFFQETEQVAMAPANLVPGIEPSEDRLLQGRVFSYADTQMYRLGANGLSLPVNQPKVAVNNGNQDGALNTGHTTSGVNYEPSRLEPRPADDKARYSELPLSGTTQQAKITREQNFKQAGDLYRSYSAKEKTDLVQKFGESLADTLTESKNIMLSYLYKEDPNYGTRVAEVAKGDLSKVKSLAASLKD

SEQ ID NO: 5410 - protein, 125 aa, Arabidopsis thaliana
MEEKKTESATKNVKKVNLLDHIAIKHLLDESVSDIVTSRGYKEDGSFTSTGLVVSSKLPRFSDQYTLTIDSADPQSISAGKSVQFTKSVTQWLTKDGVLVEGLFWKDVEALVKEYTEAGEPKKKR

SEQ ID NO: 5411 - protein, 696 aa, Penicillium janthinellum
TASGKLQRKFLDRFAISMGRGVALGKTYGTLGAASRGATLLQDLLFTEIIFAFDRERVPERAVHARGTGAHGTFLSYEDWSNLTAASFLSAEGKFTPEMTRFSTVSGARGSADTARDVHGFATRFYVDEGNFDIVGNNIPVFFIWDVIIEPTLMALHAQKPNPRFHLPRGQQDPNRISDNLTARGDSLAQGSQISSERGSPKAYSNTEPNKHRSFRLVTDNGKQFQCSNHWQPLQGFIDLGVEEAWRFPEEGEGYVAENLFESIELLTVGDEELEIQSMSFNNDLRERFNSSEVTKSSVVRLVPLITQGKLVFNKNIQMLFNEVIGAMFQPGHIVRGVDFTEDPLLQGRLFSYLDTQLNRHGPNIQQLGFNRPPRAPIHNNNRDGAGEMIDLPPFASFVETQEWGAKDIKQTAVGQNKFDQEHRFSHWKFGVNGFVHTRNDDNVTHARGFFTAPERGQQKKRVAAFDRMFTVVGLSVDGQQANSDQYADFDAAAGKKVAKAIGVEAPKPNSNYFHPTDVFGEHIAASGTKYGVPEGNTKGVLLASVNKPASIAQGAKLQVVASSGDFAEFFISAKQLNMREVTQGIIPLVPVLKLAKLDLGKTFRFQLMQVGNIEELERFGFDLPDLTDKQVDLSAMGMFETTFRPTSRAAQFEQGKTKLVKGLQGKNAFMDRALKQPSNNREKIQRFADRFAVQD

SEQ ID NO: 5412 - protein, 309 aa, Hypocrea jecorina
MVATSFKLNNGLEIPAVGLGTWQSKAGEVKAAVSYALQIGYKLIDGAYCYGNEDEVGEGLKEAFAAGVKREDIFVVTKIWATYNTRVVLGLDKSLRSLGLDYVDLLLVHWPVLLNPEGNHDKFPTLPDGKRDVIWDYNHVDGWKQMEAVLATGKTKSIGVSNYSKKYLEQLLPHATVIPAVNQIENHPSLPQQEIVDFCKEKGIHIMAYSPLGSTGSPLMSADPVVKIAEKKGISPTTVLLSYHVNRGSTVLAKSVTPARIKANLEIVDLDDEDMKLLNDYSNDLASKGELKRYVYPPFGIDFGFPDKS

SEQ ID NO: 5413 - protein, 208 aa, Saccharomyces cerevisiae
MSSRKKNILKVIILGDSGVGKTSLMHRYVNDKYSQQYKATIGADFLTKEVTVDGDKVATMQVWDTAGQERFQSLGVAFYRGADCCVLVYDVTNASSFENIKSWRDEFLVHANVNSPETFPFVILGNKIDAEESKKIVSEKSAQELAKSLGDIPLFLTSAKNAINVDTAFEEIARSALQQNQADTEAFEDDYNDAINIRLDGENNSCSC

SEQ ID NO: 5414 - protein, 492 aa, Helianthus annuus
MDPYKYRPSSAYNAPFWTTNYGAPVYNNDSSLTVGTRGPILLEDYHFVEKLANFDRERIPERVVHARGASAKGFFEVTHDISALTCADFLRAPGVQTPVIVRFSTVIHERGSPETLRDPRGFAVKFYTREGNFDLVGNNFPVFFVRDGMKFPDMVHSLKPNPKSHIQEDWRILDFFSHHPESLHMFTFLQDDVGVPQDYRHMDGSGVNTYTLINKTGKTHYVKFHWRPTCGVKCLLEDEAIKVGGMNHSHATKDLYDSIADGNYPEWKLFIQTMDPDHEDRFDFDPLDVTKTWPEDILPLQPVGRMVLNKNIDNFFAENEQLAFCPAIIVPGIYYSDDKLLQTRIFSYADTQRHRLGPNYLQLPANAPKCAHHNNHHDGFMNFMHRDEEVIYFPSRYDPVRHAEQSPIPPVMLSGKRNKCVIEKENNFKQPGERFRSWDPDRQERFIRRIVGALSDPRVTHEVCTIWVSYWSQADKSLGQKIASRLNVKPSY

SEQ ID NO: 5415 - protein, 492 aa, Helianthus annuus
MDPYKQRPSSAYNAPFWTTNAGLPVYNNTASLTVGNRGPILLEDYHLIEKLANFTRERIPERIVHARGASAKGFFEVTHDITHLTCADFLRAPGVQTPTIVRFSTVIHERGSPETIRDPRGFATKFYTREGNFDIVGNNFPVFFTRDAMAFPDVIHAFKPNPKSHIQEDWRILDFLSHHPESLNTMTFWLDDVGIPTDYRHMEGSSVNTLTLVNKEGKIHYVKFTWKPTCGVKCLMDDEAIKIGGANHSHATQDLYDSIQAGNFPEWKLYLQVIDPDHEDRLDFDPLDGTMTWPEDIIPLQPVGRMVLNKNIDNFFAENEQLAFNPGLVVPGIYYSDDKMLQGRIFAYSDTQRHRLGPNYLQLPVNAPKCAHHNNHYDGNMNFMHRDEEVDYFPSRYDRVQHAKQYPINSRQVTGTRDRTVIPKYNDFKQPGDRYRSWDPARQERFIVRMCKMLSDPRVTHELRSIWISYWTQADQSLGQKIASRLNVRPNY

SEQ ID NO: 5416 - protein, 525 aa, Arabidopsis thaliana
NDHIHRVPALTEEEIDSVAIKTFERYALPSSSSVKRKGKGVTILWFRNDLRVLDNDALYKAWSSSDTILPVYCLDPRLFHTTHFFNFPKTGALRGGFLMECLVDLRKNLMKRGLNLLIRSGKPEEILPSLAKDFGARTVFAHKETCSEEVDVERLVNQGLKRVGNSTKLELIWGSTMYHKDDLPFDVFDLPDVYTQFRKSVEAKCSIRSSTRIPLSLGPTPSVDDWGDVPTLEKLGVEPQEVTRGMRFVGGESAGVGRVFEYFWKKDLLKVYKETRNGMLGPDYSTKFSPWLAFGCISPRFIYEEVQRYEKERVANNSTYWVLFELIWRDYFRFLSIKCGNSLFHLGGPRNVQGKWSQDQKLFESWRDAKTGYPLIDANMKELSTTGFMSNRGRQIVCSFLVRDMGLDWRMGAEWFETCLLDYDPCSNYGNWTYGAGVGNDPREDRYFSIPKQAQNYDPEGEYVAFWLQQLRRLPKEKRHWPGRLMYMDTVVPLKHGNGPMAGGSKSGGGFRGSHSGRRSRHNGP

SEQ ID NO: 5417 - protein, 391 aa, Zea mays
MSNLTSSTSGGPNAAPAAAAAAPPAPAASGNNKRKRSLPGNPDPEAEVVALSPATLMATNRFVCEICGKGFQRDQNLQLTRERPQPAEAQRRKVYVCPEASCVHHDPARALGDLTGIKKHFFRKHGEKKWKCDKCSKKYAVHSDWKAHSKICGTREYKCDCGTIFSRRDSFITHRAFCDALTEESAKAIGLNAMAAVPAQHHHHPMLFSPPPTHVMQQDVALLQEHHHQEVMQQEHCNYAMKTEMPPWPGMTYDHPLLQPLCNAAAPQSSATSTPPPPTTMQLPAAYAHLSATALLQKAAQMGATVAGAGYTQMAGAATSATFGLGLPDLQNTQQQQHQDGEIMAGLARTASHGRGGEEGGGGGGDGMTRDFLGLRAFSHRDILGLAGLDS

SEQ ID NO: 5418 - protein, 492 aa, Helianthus annuus
MDPYKQRPSSAYDTPFWTTNAGAPVYNNTASLTVGNRGPILLEDYHLIEKLANFTRERIPERIVHARGASAKGFFEVTHDITHLTCADFLRAPGVQTPVIVRFSTVIHERGSPETIRDPRGFATKFYTREGNFDIVGNNFPVFFTRDAMAFPDVIHAFKPNPKSHIQEDWRILDFLSHHPESLNTMTFWLDDVGIPTDYRHMEGSSVNTLTLVNKEGKIHYVKFTWKPTCGVKCLMDDEAIKIGGANHSHATQDLYDSIQAGNFPEWKLFLQVIDPDHEDRLDFDPLDGTMTWPEDVIPLQPVGRMVLNKNIDNFFAENEQLAFNPGLVVPGIYYSDDKMLQGRIFAYSDTQRHRLGPNYLQLPVNAPKCAHHNNHYDGHMNFMHRDEEVDYFPSRYDRVQHAQKYPINPARVTGTRDRTVIPKYNDFKQPGERYRSWDPARQERFIVRMCKMLSDPRVTHELRSIWISYWTQADKSLGQKIASRLNVRPNY

SEQ ID NO: 5419 - protein, 457 aa, Salmonella enterica subsp. enterica serovar Paratyphi A str.
MRYRFPDNFWWGSACSALQTEGDSLNGGKSQTTWDVWFERQPDRFHQGVGPAETSTFYRHWKQDIALLKQLKHNSFRTSLSWARLIPDGVGEVNPQAVSFYNHVIDELLAQGITPFITLLHFDMPMVMQEKGGWENRDVVEAFGRYAQTCFTLFGDRVKHWFTFNEPIVPVEGGYLYDFHYPNVVDFKRAATVAYHTVLAHSTAVRAGRYDGEIGIVLNLTPSYPRSQHPADVQAAHHADLLFNRSFLDPVLKGEYPADLVALLKTYDQLPACQPGDRQLIADGKIDLLGINYYQPRRVKCRDTAVNPQAPFMPEWLFDYYDMPGRKMNPYRGWEIYAPGIYDIITNLRDNYGNPRCFISENGMGVENEQRFVQAGQIHDDYRIDFISEHLKWLHKGISEGCHCLGYHMWTFIDNWSWLNGYKNRYGFVQLDLATQTRTVKKSGEWFAATAEHNGFD

SEQ ID NO: 5420 - protein, 178 aa, Zea mays
MAEAPASPGGGGGSHESGSPRGGGGGGSVREQDRFLPIANISRIMKKAIPANGKIAKDAKETVQECVSEFISFITSEASDKCQREKRKTINGDDLLWAMATLGFEDYIEPLKVYLQKYREMEGDSKLTAKSSDGSIKKDALGHVGASSSAAQGMGQQGAYNQGMGYMQPQYHNGDISN

SEQ ID NO: 5421 - protein, 256 aa, Brassica oleracea var. botrytis
MGRGRVQLKRIENKINRQVTFSKRRAGLFKKAHEISVLCDAEVALVVFSHKGKLFEYSTDPCMEKILERYERYSYAERQLIAPESDVNTNWSMEYNRLKAKIELLERNQRHYLGEDLQAMSPKELQNLEQQLDTALKHIRSRKNQLMYESINELQRKEKAIQEQNSMLSKQIKERENVLRAQQEQWDEQNHGHNMPPPPPPQQHQIQHPYMLSHQPSPFLNMGGLYQEEDQMAMRRNDLDLSLEPVYNCNLGSFAA

SEQ ID NO: 5422 - protein, 473 aa, Triticum aestivum
MLLPVRRPHAAPSRPASPRHVSSSLGPRSRQVDRVLRGSTVARASPAATDASASAGLGRRAVVGMALAVSLSAPAYCRAPPPSSALTEENLLFLEAWRAVDRAYYDKSFNGQSWFRYRERALRDDPMNTRQETYAAIKKMLATLDDPFTRLLEPEKFKSLRSGTQGALTGVGLSIGYPLALKGSPAGLSVMSAAPGGPAEKAGIVSGDVILAIDDTSAQDMDIYDAADRLQGPEGSSIDLTILSGADTRHVVLKRERYTLNPVRSRMCEIPGSEDSSKIGYIKLTTFNQNAAGSVKEAIKKLREKNVKAFVLDLRNNSGGLFPEGIEIAKIWMDKGVIVYICDSRGVRDIYEADGASTIAASEPLVVLVNKGTASASEILAGALKDNKRAVVYGEPTYGKGKIQSVFALSDGSGLAVTVARYETPAHTDIDKVGVTPDRPLPASFPTDEDGFCSCLRDPASCNLNAARLFVRS

SEQ ID NO: 5423 - protein, 275 aa, Salmonella typhi
  misc_feature (175)..(175): Xaa can be any naturally occurring amino acid
MANPTIIRLQDGNVMPQLGLGVWKASNEEVIAAIHKALEVGYRSIDTATAYQNEEGVGKALKAASVAREELFITTKLWNDDQKRPREALQESLKKLQLDYLDLYLMHWPVPAIDHYVDAWKGMIALQKEGLVKSIGVCNFQIHHLQRLIDETGVPPVINQIELHPLMQQRQLHAXNATHKIQTESWSPLAQGGEGVFDQKVIRELADKYGKTPAQIVIRWHLDCGLVVIPKSVTPSRIAENFAVWDFRLDKDELGEIAKLDQGKRLGPDPDQSGG

SEQ ID NO: 5424 - protein, 159 aa, Zea mays
MSLIRRGNAFDPFSLDLWDPFEGFFPFGSGDVRSLVPSLPRTSSETAAFAGARIDWKETPEAHVFKADVPGLRKEEVKVEVEDGNVLQISGERNKEHEEKNDRWHRVERSSGKFLRRFRLPDNAKADQIKASMENGVLTVTVPKEEAKKADVKNVQITG

SEQ ID NO: 5425 - protein, 157 aa, Cuscuta japonica
MSLIPSFFEGRRSNAFDPFSLELWDPFFSNTVANLSGSSSAREASAFANARIDWKETPEAHIFKADVPGLKKEEVKVEVEEGKVLQISGERSKEKEEKNDTWHRVERSSGKFLRSFRLPENAKVDQVKAAMENGVLTVTVPKVEEKKAEVKSIQISG

SEQ ID NO: 5426 - protein, 140 aa, Oryza sativa
MVSFEMNDLKKIGLGLTGFGVFFSFLGIIFFFDKGLIAMGNILFLSGLGLTIGLKSTMQFFTKPKNYKGTISFGAGFFLVLIGWPFFGMLLEAYGFVVLFSGFWPTLVVFLQRIPIIGWIFQQPFVTSFLDRYRGKRVPV

SEQ ID NO: 5427 - protein, 461 aa, Sorghum bicolor
MDERRTILMDRYEIGRQLGQGNFAKVYFARNLTDGQSVAIKMIDKDKITRVGLIVQIKREISIMRLVKHPNVLQLFEVMASKSKIYFVLEYAKGGELFNKISKGKFSEDVARRYFHQLISAVDYCHSRGVYHRDLKPENLLLDENENLKVSDFGLSALAESKRHDGLLHTTCGTPAYVAPEVLSRRGYDGTKADIWSCGVILFVLVAGYLPFHDPNLIEMYRKISKAEYRCPRSFSGELKDLLFRMLDPDPSTRISISRIKRSTWYRKPIEVNSAKIKHDTTRDKVCNGEATTSNSIECSNSEETRGSSSLPNLNAFDIISLSTGFDLSNLFEEKYGRREERFTTRQPAGTVFAKLNELAERLKLKIKKKENGVLKLASPKEGIKGFLELDAEIFELAPSFLLVELKKTNGDTIEYQRLVKEEIRPALKDMVWAWQSDRHQQRNESVQGEQQLSSPLPPQQ

SEQ ID NO: 5428 - protein, 496 aa, Zea mays
MVLSHASSGRDDDAVASTFASRYVRERLPRYRMPERSIPREAAQQIISDELMLDGNPRLNLASFVTTWMEPECDKLIMDSINKNYVDMDEYPVTTELQNRCVNMIAHLFNAPIKEDETAIGVGTVGSSEAIMLAGLAFKRKWQNKRKEQGKPCDRPNIVTGANVQVCWEKFARYFEVELKEVKLSEGYYVMDPVKAVEMVDENTICVAAILGSTLTGEFEDVKQLNDLLTDKNKETGWDVPIHVDAASGGFIAPFLYPELEWDFRLPLVKSINVSGHKYGLVYPGVGWVIWRSKEDLPEELIFHINYLGTDQPTFTLNFSKGSSQIIAQYYQLIRLGFEGYRNIMQNCQDNAAILREGIAATGRFGVLSKDAGVPLVAFSLRDSSRFSVFDVSENLRRFGWIVPAYTMPADAEHVAVLRVVVREDFSRSLAERLVSDVRKILRELDARATHAVRVATATAEQSGDGVVAKKSVLEIEREVAARWMNAVNKKKTGVC

SEQ ID NO: 5429 - protein, 468 aa, Methanosarcina acetivorans C2A
MISRKMNLESLDESKKYRVGAYSARYVPKTKEKGIPKYEFPEEGMSPRAAYQLVHDEQSLDGNPFLNLASFVNTWMEPEADKLVMENISKNIIDIFEYPQTSRVIHHNMVNMLGRLFNGHHTDFVGTSTAGSSEAIMLGLLAHKWSWKKSGRGTDKPNIIFGNDAHVCWDKFARYFDVDTRKVPIDKDRRTITAEAVAERIDENTICVGCVLGTTFTGEIDPVKDINDLLLEYKEEKGWDIPIHIDAASGGFILPFTEPDFEWDFRLERVKSINVSGHKYGLTYPGLGWLIFRNKNALPEDLIFHVNYLGEMEDSYTLNFSGGSAMVAAQYYNFLRFGRAGYTGIMKKILAVSQDLAEKVDRLGRFEMLNKGERLPIIAFRQKEKTGYSLLQLSHKLREKGWIVPAYCLPENAADIEIMRIVVRENLTPDMASIIVEDLEKACQFLENGTEAGAEKPCPSGKDMAHIC

SEQ ID NO: 5430 - protein, 542 aa, Bacteroides fragilis NCTC 9343
MIMKRIIYLLIGLCSVLGLQAQNFGSPAMRKLQLAEFAISNLYVDTVNENKLVESAIIEMLAQLDPHSTYSDAEEVKKMNEPLQGNFEGIGVQFQMIEDTLLIVQPVSNGPSEKVGILAGDRIIAVNDTAIAGVKMGTEEIMGRLRGPKDSKVNLTIIRRGVKEPLLFNVKRDKIPILSLDAAYMIQPKIGYIRINRFGATTAEEFLKALKELQKKGMKDLILDLQGNGGGYLNAAIDLANEFLGQKELIVYTEGRSAQRSEFFAKGNGNFRNGRLVVLVDEYSASASEIVTGAIQDWDRGVVVGRRSFGKGLVQRPIDLPDGSMIRLTIARYYTPAGRCIQKPYDSSINEKPGKGKSSESSIEKYNQDLIDRYNHGEMVSADSIHFPDSLKCQTKKLGRTVYGGGGIMPDYFVPVDTTLYTDYHRNLVAKGVVIKTTMNFIEKNRKALLDKYKTFEKFNEKFEIDDQLLNYLREAADKEKIEFNEEQYNKALPLIKAQLKALIARDLWDMNEYFQVMNATNKSVERALEILNDKEYEKILK

SEQ ID NO: 5431 - protein, 254 aa, Oryza sativa
MISPDAARNVVGIIGNVISFGLFLAPVPTFWRICKRKDVEEFKADPYLATLLNCMLWVFYGIPIVHPNSILVVTINGIGLVVEGTYLFIFFLYSPNKKRLRMLAVLGVELVFMLAVILGVLLGAHTHKKRSMIVGILCVFFGSIMYFSPLTIMGKVIKTKSVEYMPFFLSLVCFLNGVCWTAYALIRFDIYVTIPNGLGAIFGAIQLILYACYYRTTPKKTKAAKDVEMPSVISGPGAAATASGGSVVSVTVER

SEQ ID NO: 5432 - protein, 320 aa, Candida albicans
MSGPVNSVSKQMNVDTDIITLTRFILQEQQTVAPTATGELSLLLNALQFAFKFIAHNIRRAELVNLIGVSGSANSTGDVQKKLDVIGDEIFINAMRSSNNVKVLVSEEQEDLIVFPGGGTYAVCTDPIDGSSNIDAGVSVGTIFGVYKLQEGSTGGISDVLRPGKEMVAAGYTMYGASAHLALTTGHGVNLFTLDTQLGEFILTHPNLKLPDTKNIYSLNEGYSNKFPEYVQDYLKDIKKEGYSLRYIGSMVADVHRTLLYGGIFAYPTLKLRVLYECFPMALLMEQAGGSAVTIKGERILDILPKGIHDKEFYCVGIQG

SEQ ID NO: 5433 - protein, 713 aa, Bdellovibrio bacteriovorus HD100
MNQKQLPWWTWVLPFIILLGGTFVSLTFKVSQGIYWIYFPINLGVIMALWWGPRVFAAVFLNALVAISLFELPRPMLYPLYALPETLEVIFSWVLVRERFKDVSAWKPSPKNISLYFVYGLLIPSLICSVAIQGLFVLTGIQDKSLFGWSTLITTVGDLTGAIFLTIPALILISPWLRKRNLSLFAVKPLPPTHWEVVTRKEKALFAVVLGGMLVLALSFHIPQTWYVYGILMLLSAAWYGMYAALVVNTWVVFLNIILPKIANLPWSNSFLEVQTPATLLTLCFCSLITGSAVTSLTGKIRELNETQGQLKSAKDQAEEASRAKSEFLARMSHEIRTPLNSVLGMLELLRETQLSKDQERYLTLFSHAGENLKALINDLLDFSKIEAKALTVENVSYNIHSTVRSVFDILQIKAEEQGLHFELHISKDVPPLQWGDPTRLRQVLFNLIGNALKFTNEGSVKVKLELTKDAPEQLLIEVQDTGIGIPRERQSKLFSSFAQGDPTIARKYGGTGLGLVISKNLVEIMGGTMEMKSLAGRGTTFKILLPHQPDFSSNIEKKAKPAMVWSQLPADKRFRLLLVDDSEDNRVLMIHYLKSLPFDCDEAVNGQEAFEKFKERKYDLVFMDMQMPIMTGYKSTELIRYYEKMNKLPHTPIIALTATAVVEDLQRAVSSGCDSYAVKPVKKAEILEILAQNLTTKSPTKEAFKEPPSPSI

SEQ ID NO: 5434 - protein, 910 aa, Legionella pneumophila subsp. pneumophila str. Philadelphia 1
MLKSIGIKYQLRITTLIPAFLVALLFAFFYNGLFGKDLKQHMSRLGEAYIRQLLPAAQYAMLRNDYRTLQGLINASTINPEVKALAFYNADGRLIAYRGGKHSIHKPFNPPDYTGDYIESKQINPFTINFIAPITIPKFNLYSSTEFKELSTPKIFQADDILGWLSIDIDTQSLLIKRYQMLIVTIFITLFGLLMGLTIHYFLSKRIYMPIARLRRSMKQILSNEFETEIRVSSPGELGIIEKGCAHLQRQYLNTVRDLNHHIEIATADLQQSLELLEEKNIELSLEKKKTEEKSRQKSEFIANMSHEIRTPMNGVIGFTNVLLESKLDPLQLDYVKTIKSSAQDLLSIINDILDFSKIDAGKLNLDCIPLDIRGCIDEVLSLASPNAHKKGIDLIPITDINVPKMVLGDPLRIKQIISNLVTNAVKFTDHGYVLIRTKIEQETDKDYTLLFAITDTGIGISPEDQTKLFTAFNQADTSITRRYGGSGLGLVICKKLCEEMHGRISLTSEINKGSTFSARIKVEKLVAYEIEKNQTHRFAHLKIICFDDNPLHLEAIGNGLGFWGIEAIRVDSFNKLSRTLTKHKDCKIAFINVNQGCERQAAELIAKHKQIPFVLISKWPINDFAALGARGFLYKPISIQKLQDLIESIANENQTEKNTNQELDTLREQLRFLHPEILIAEDNPVNKMLLTSLLNNNANITTVDDGEMAVTACEDKKFDMILLDLHMPKLNGLEAAKMIRQKSLMNKHSPIVLITASSSDLSSIDMKKYGVDFCFQKPIDEKQLLIQILRIVDKTKHAAIDWQLCVQKVSGNQALAEEFLAKFIEELYKNREEFIGLMHQKNVKGLADLAHKLHGACCFCGVPILQKRVAQLERLARRTANADNLTEAFTDLIQSIDAVISEYENQYSQ

SEQ ID NO: 5435 - protein, 245 aa, Zea mays
  misc_feature (16)..(16): Xaa can be any naturally occurring amino acid
MISPDAARNVVGIIGXNVISFGLFLSPVLPFWRIYKAKDAEEFKPDPYLATLLNCMLWVFYGIPVVHPNSILVVTINGIGLVIEAVYLTIFFLYSDSQKRKKAFAILAVEILFMVAVVLGVILGAHTHEKRSMIVGILCVIFGSMTYASPLTIMSRVIKTKSVEYMPFLLSLVSFLNGCCWTAYALIRFDLYVTIPNALGAFFGLIQLILYFCYYKSTPKKEKNVELPTVSSNVGGGNVTVSVER

SEQ ID NO: 5436 - protein, 586 aa, Pisum sativum
MCGILAVLGCSDDSQAKRVRILELSRRLKHRGPDWSGLHQHGDNYLAHQRLAIVDPASGDQPLFNEDKSIIVTVNGEIYNHEELRKQLPNHKFFTQCDCDVIAHLYEEHGENFVDMLDGIFSFVLLDTRDNSFIVARDAIGVTSLYIGWGLDGSVWIASELKGLNDECEHFEVFPPGHLYSSKEREFRRWYNPPWFNEAIIPSTPYDPLVLRNAFEKAVIKRLMTDVPFGVLLSGGLDSSLVASVTARYLAGTKAAKQWGAKLPSFCVGLKGAPDLKAGKEVADFLGTVHHEFEFTIQDGIDAIEDVIYHTETYDVTTIRAATPMFLMSRKIKSSGVKWVISGEGSDEIFGGYLYFHKAPNREEFHQETCRKIKALHRYDCLRANKSTYAWGLEARVPFLDKDFIKVAMDIDPEFKMIKHDEGRIEKWILRKAFDDEENPYLPKHILYRQKEQFSDGVGYGWIDGIKDHAAKHVTDRMMFNASHIFPFNTPNTKEAYYYRMIFERFFPQNSARLTVPGGPSVACSTEKAIEWDASWSNNLDPSGRAALGVHVSAYEHQINPVTKGVEPEKIIPKIGVSPLGVAIQT

SEQ ID NO: 5437 - protein, 215 aa, Shigella flexneri 2a str. 301
MNYRIIPVTAFSQNCSLIWCEQTRLAALVDPGGDAEKIKQEVDDSGLTLMQILLTHGHLDHVGAAAELAQHYGVPVFGPEKEDEFWLQGLPAQSRMFGLEECQPLTPDRWLNEGDTISIGNVTLQVLHCPGHTPGHVVFFDDRAKLLISGDVIFKGGVGRSDFPRGDHNQLISSIKDKLLPLGDDVTFIPGHGPLSTLGYERLHNPFLQDEMPVW

SEQ ID NO: 5438 - protein, 583 aa, Pisum sativum
MCGILAVLGCSDPSRAKRVRVLELSRRLKHRGPEWSGLHQHGDCYLAQQRLAIVDPASGDQPLFNEDNPSIVTVNGEIYNHEDLRKQLSNHTFRTGSDCDVIAHLYEEYGEDFVDMLDGIFSFVPLDTRDNSYIVARDAIGVTSLYIGWGLDGSVWISSEMKGLNDDCEHFECFPPGHLYSSKDSGFRRWYNPSWYSEAIPSAPYDPLALRHAFEKAVVKRLMTDVPFGVLLSGGLDSSLVASITSRYLATTKAAEQWGSKLHSFCVGLEGSPDLKAGKEVADYLGTVHHEFTFTVQDGIDAIEDVIYHVETYDVTSIRASTPMFLMSRKIKSLGVKWVISGEGSDEIFGGYLYFHKAPNKEEFHEETCRKIKALHQYDCQRANKSTYAWGLEARVPFLDKAFINVAMNIDPENKMIKRDEGRIEKYILRKAFDDEENPYLPKHILYRQKEQFSDGVGYSWIDGLKAHAAKHVTDKMMLNAGNIFPHNTPNTKEAYYYRMIFERFFPQNSARLTVPGGPTVACSTAKAVEWDAAWSNNLDPSGRAALGVHDSAYENHNKVNKTVEFEKIIPLEAAPVELAIQG

SEQ ID NO: 5439 - protein, 582 aa, Bifidobacterium adolescentis
MAKMIAYDDEARQGMLAGLDKLADTVKVTLGPKGRNVVLDKTYGAPTITNDGVSIAKEIDLDDPYERIGAELVKEVAKKTDDVAGDGTTTATVLAQSLVHEGLKNVTAGSNPIALRRGIEKAADAIVKELVAAAKDVETKDQIAATATISAADPEVGEKIAEALDKVGQDGVVTVEDNNRFGLDLDFTEGMRFDKGYIAPYFVTNAEDQTAVLEDPYILLTSGKLSSQQDVVHIAELVMKTGKPLLIIAEDVDGEALPTLILNNIRGTFKSCAVKAPGFGDRRKAMLQDMAILTGAQVVSDELGLKLDSVDMSVLGTAKKVIVSKDETTIVSGGGSKEDVAARVAQIRGEIANTDSDYDREKLQERLAKLAGGVAVIKVGAATEVEAKERKHRIEDAVRNAKAAIEEGLLPGGGVALIQAAAKAKDDVKLEGDEATGAAIVFRAVEAPIKQIAENAGLSGDVVIDKVRSLPDGQGLNAATNEYEDLLAAGVTDPVKVTRSALQNAASIAGLFLTTEAVVANKPEPPAAAPAAVFPLRRNAGTRRFPAPSSTTRAWLTSNGLMVATSMSTIGCVLAIMRMALK

SEQ ID NO: 5440 - protein, 548 aa, Oleispira antarctica
MAAKDVLFGDSARAKMLVGVNILADAVRVTLGPKGRNVVIEKSFGAPIITKDGVSVAREIELKDKFENMGAQMVKEVASQANDQAGDGTTTATVLAQAIISEGLKSVAAGMNPMDLKRGIDKATAAVVAAIKEQAQPCLDTKAIAQVGTISANADETVGRLIAEAMEKVGKEGVITVEEGKGLEDELDVVEGMQFDRGYLSPYFINNQEKMTVEMENPLILLVDKKIDNLQELLPILENVAKSGRPLLIVAEDVEGQALATLVVNNLRGTFKVAAVKAPGFGDRRKAMLQDLAILTGGQVISEELGMSLETADPSSLGTASKVVIDKENTVIVDGAGTEASVNTRVDQIRAEIESSTSDYDIEKLQERVAKLAGGVAVIKVGAGSEMEMKEKKDRVDDALHATRAAVEEGVVAGGGVALIRALSSVTVVGDNEDQNVGIALALRAMEAPIRQIAGNAGAEGSVVVDKVKSGTGSFGFNASTGEYGDMIAMGILDPAKVTRSSLQAAASIAGLMITTEAMVADAPVEEGAGGMPDMGGMGGMGGMPGMM

SEQ ID NO: 5441 - protein, 537 aa, Parascardovia denticolens
MAKIIKYDEEARQGMLEGLDELANTVKVTLGPKGRNVVLDKSYGAPTITNDGVSIAKEIDLEDPYQRIGAELVKEVAKKTDDVAGDGTTTATVLAQALVHEGLKNVTSGSNPIALRRGIEKASQTIVKNLLENAKPVETKDQIAATATISAGDPEVGEKIAEALDKVGQDGVVTVEDNNKFGLDLDFTEGMRFDKGYISPYFVTNADDQTAVLEDPYILLTSGKVSSQQDIVHIADLVIKSGKPLLIVAEDVDGEALPTLVLNKIRGTFNTVAVKAPGFGDRRKAMLQDMAILTGAQVVSDELGLKLDSIDDTVLGHAAKVIVSKDETTIVSGAGSKEDIAARVAQIRSEIEASDSDYDREKLQERLAKLAGGVAVIKVGAATEVEAKERKHRIEDAVRNAKAAIEEGLLPGGGVALVQAAGEAEKSVKLDGDEATGADIVFRAIEAPLKQIAENAGLSGEVVIDKVRTLPAGSGLNAATGEYEDLMKAGVTDPVKVTRSALQNAASIAGLFLTTEAVVANKPEPPAPAAAQPDMGY

SEQ ID NO: 5442 - protein, 431 aa, Thermus thermophilus
MDDHAEKFLWGVATSAYQIEGATQEDGRGPSIWDAFARRPGAIRDGSTGEPACDHYRRYEEDIALMQSLGVRAYRFSVAWPRILPEGRGRINPKGLAFYDRLVDRLLASGITPFLTLYHWDLPLALEERGGWRSRETAFAFAEYAEAVARALADRVPFFATLNEPWCSAFLGHWTGEHAPGLRNLEAALRAAHHLLLGHGLAVEALRAAGARRVGIVLNFAPAYGEDPEAVDVADRYHNRYFLDPILGKGYPESPFRDPPPVPILSRDLELVARPLDFLGVNYYAPVRVAPGTGTLPVRYLPPEGPATAMGWEVYPEGLHHLLKRLGREVPWPLYVTENGAAYPDLWTGEAVVEDPERVAYLEAHVEAALRAREEGVDLRGYFVWSLMDNFEWAFGYTRRFGLYYVDFPSQRRIPKRSALWYRERIARAQT

SEQ ID NO: 5443 - protein, 483 aa, Nicotiana tabacum
MGFISSIDNELLSKVATNNGHGENSAYFDGWKAYEIDPFHPTQNSDGVIQMGLAENQLCFDLIQEWVVKNPKASICTAEGSQDFKDIAIYQDYHGLPEFRSAVARFMGKVRGDRITFEPERIVMSGGATGAHELLAFCLADPGEAFLVPTPYYPGFDRDLRWRTGVQLFPVVCESSNNFKVTKEALEAAYQKAQESNITVKGLLLNNPSNPLGTILDRETLKDTVRFINEKNIHLVCDEIYAATIFNKPDFISISEVIMEEDVECDRDLIHIVYSLSKDLGFPGFRVGIIYSYNDVVTNCARKMSSFGLVSTQTQFLISNMLSDENFVTKFIGESSERLQKRHGMFTRGLAQVGINTLKSNAGLFIWMDLRRLLKELTFEAELELWRIIINEVKLNVSPGCSFHCSEPGWFRVCFANMDDETMRIALRRINNFVIQRKGIEGGVKKLQCRRSKLEISLSFRKLDDFMNSPHSPMSSPLVQART

SEQ ID NO: 5444 - protein, 312 aa, Saccharomyces cerevisiae
MDSQPVDVDNIIDRLLEVRGSKPGQQVDLEENEIRYLCSKARSIFIKQPILLELEAPIKICGDIHGQYYDLLRLFEYGGFPPESNYLFLGDYVDRGKQSLETICLLLAYKIKYPENFFILRGNHECASINRIYGFYDECKRRYNIKLWKTFTDCFNCLPIAAIIDEKIFCMHGGLSPDLNSMEQIRRVMRPTDIPDVGLLCDLLWSDPDKDIVGWSENDRGVSFTFGPDVVNRFLQKQDMELICRAHQVVEDGYEFFSKRQLVTLFSAPNYCGEFDNAGAMMSVDESLLCSFQILKPAQKSLPRQAGGRKKK

SEQ ID NO: 5445 - protein, 102 aa, Castanea sativa
MAALVGGVSDVKGHENSLQIDDLARFAVDDHNKKANTLLQFKKVVNAKQQVVSGTIYILTLEVEDGGKKKVYEAKIWEKPWLNFKEVQEFKLIGDAPTHHSA

SEQ ID NO: 5446 - protein, 431 aa, Thermus filiformis
MAENAEKFLWGVATSAYQIEGATQEDGRGPSIWDTFARRPGAIRDGSTGEPACDHYHRYEEDIALMQSLGVGVYRFSVAWPRILPEGRGRINPKGLAFYDRLVDRLLAAGITPFLTLYHWDLPQALEDRGGWRSRETAFAFAEYAEAVARALADRVPFFATLNEPWCSAFLGHWTGEHAPGLRNLEAALRAAHHLLLGHGLAVEALRAAGAKRVGIVLNFAPVYGEDPEAVDVADRYHNRYFLDPILGRGYPESPFQDPPPTPNLSRDLELVARPLDFLGVNYYAPVRVAPGTGPLPVRYLPPEGPVTAMGWEVYPEGLYHLLKRLGREVPWPLYITENGAAYPDLWTGEAVVEDPERVAYLEAHVEAALRAREEGVDLRGYFVWSLMDNFEWAFGYTRRFGLYYVDFPSQRRIPKRSALWYRERIARAQL

SEQ ID NO: 5447 - protein, 476 aa, Nitrosomonas europaea ATCC 19718
MHNFIKKISLVFAGVIAGIMVSLNFSAIADKEIKEELQTLPIEELRTFSQVFGRIKSDYVEPVEDKKLITEAINGMLVGLDPHSAFLDSEEYKELQIGTQGEFGGLGIQVTMEDGLVKVISPIEDTPAFRAGVKTGDLIIKIDDTAVKGMTLNDAIKRMRGKPDTPITLTVIREGEAEPLTFTLVRAIIKIDSVKSKLIEPGYAYVRITQFQERTGENLAEAITKLYSGSKVPMKGLILDLRNDPGGLLNSAVAVSAAFLPSNALVVYTEGRTNDAKMQLRANPEYYLRGSGRDFLANLPQSIKTIPMVTLVNGGSASASEIVAGALQDHKRSIVMGSQTFGKGSVQTILPLSNNTAIKLTTARYFTPNGQSIQAKGITPDILDEETDNDSRLLREADLNRHLSNGQEEKTDKAAASDKKGAQSSKRSKNKADKKQKKHEPMEFGSSDDLLLAKAVNHLKSMAQKSKHKTAKSTQS

SEQ ID NO: 5448 - protein, 436 aa, Thermus sp. IB-21
MTENAEKFLWGVATSAYQIEGATQEDGRGPSIWDAFARRPGTIRDGSTGEPACDHYHRYEEDIALMQSLGVGAYRFSVAWPRILPEGRGRINPKGLAFYDRLVDRLLAAGITPFLTLYHWDLPQALEDRGGWRSRETAFAFAEYAEAVARALADRVPFFATLNEPWCSAFLGHWTGEHAPGLRNLEAALRAAHHLLLGHGLAVEALRAAGTKRVGIVLNFAPVYGEDPEAVDVADRYHNRYFLDPILGRGYPESPFQDSPPVPILSRDLELVARPLDFLGVNYYAPVRVAPGTGPLPVRYLPPEGPVTAMGWEVYPEGLYHLLKRLGREVPWPLYITENGAAYPDLWTGEAVVEDPERVAYLEAHVEAALRAREEGVDLRGYFVWSLMDNFEWAFGYTRRFGLYYVDFPSQRRIPKRSALWYRERIARAQTGGSAR

SEQ ID NO: 5449 - protein, 382 aa, Guillardia theta
MSKNDFQITRMNDLVCIEFNSNGISRLRKISRKKIITESRTFPKNYFQKLFDLYFEYSYAKEFKKFPINLINEKDKRQIKKFLDDSIQLRDIRQVDPYFESKPTFWIRNNAILLSLEQIRAIVLFNKLFLFDPDNPKVQRAGKIISEKLEKFQEDSVEDRKTPFEFKALEGIFVNICMNLEKDFSYLEPTILENLDDLPTKLTSRMLEELRSFKQRLSQFSIRSQEVQRILQETLENENNLPNHYLSINNNNKKIKLKTTSDYYAIEIISEGFLQVVEHLTHRAELLDNAIDDTEDLVNIRLDTIRNKILFVELSLNIVSLTLSAGGLVAGLMGMNLGIPIFKEENSSTTFFILVSFLIIFSSLTLYLWLLNWCRIKGLYSI

SEQ ID NO: 5450 - protein, 908 aa, Serratia plymuthica
MTKYSLRARMMILILAPTLLIGLLLSTFFVVHRYNELQEQLVDAGASIIEPLAVASEYGMTFRSRESVRQLVSLLHRRHSDIVRSITVFDAQNNLFVTSNYHHNFAQLQLPKGVPMPTDLMLTRRGNSLILRTPILSESQYPDQNATDPVPQDNNLGYVAIELDLQSVRLRQYKEVFISTLLLLLCMCIAILFAYRLMRDVTGPIRNMVNTVDRIRRGQLDSRVEGFMLGELHMLKNGINSMAMSLTAYLEEMQQNIDQATSDLRETLEQMEIQNVELDLAKKRAQEAARIKSEFLASMSHELRTPLNGVIGFTRQMLKTEMSVTQTDYLQTIERSANNLLTIINDVLDFSKLEAGKLVLEHIPFSLRETLDEVIVLLAPSAHEKGLELTLDVHNDVPEQVIGDSLRLQQIITNLLGNAIKFTETGNIDIRVELRGQQDHQVELEVQIHDTGIGISERQQSQLFQAFRQADASISRRHGGTGLGLVITQKLVKEMGGDICFHSQLNRGSTFWFHITLELHEGMLSLPSSLPDLRGKTLGYIEANPMAAEATLNMLSVTSLVITHSPTLAQLPKKNYDFLLVGVPIPFRDNLAQHESKLKAALNIAGRVILALPCQSQINAEQLKQQGAIGCLIKPITSNRLFPLLRMEPPQRLLAAPERKRLPLTVMAVDDNPANLKLIGTLLAEQVEKTLLCESGEEALALARDNVLDLILMDIQMPNIDGIRTGELIRQLPHHNSTPIVAVTAHAVSGEREHLLQAGMDDYLAKPIDEAMLTRVLARYYSGEPAAEPLLSLDWPLALRQAANKEDLARDLLQMLLDFLPQVSERVQAVLDGTPDDSILDLIHKLHGSCSYSGVPRLKQLCFYLEQQLRKGVGNEELEPEWLELLDEIELVSQAARSHLESDRPTTS

SEQ ID NO: 5451 - protein, 404 aa, Haemophilus influenzae R2866
MRLFPKSDKLEHVCYDIRGPVHKEALRLEEEGNKILKLNIGNPAPFGFEAPDEILVDVLRNLPSAQGYCDSKGLYSARKAIVQYYQSKGILGATVNDVYIGNGVSELITMAMQALLNDGDEVLVPMPDYPLWTAAVTLSGGKAVHYLCDEDANWFPAIDDIKAKVNAKTKAIVIINPNNPTGAVYSKELLQEIVEIARQNNLIIFADEIYDKILYDGAVHHHIAALAPDLLTVTLNGLSKAYRVAGFRQGWMILNGPKHNAKGYIEGLDMLASMRLCANVPMQHAIQTALGGYQSINEFILPGGRLLEQRNKAYDLITQIPGITCVKPMGAMYMFPKIDVKKFNIHSDEKMVLDLLRQEKVLLVHGKGFNWHSPDHFRIVTLPYVNQLEEAITKLARFLSDYRQ

SEQ ID NO: 5452 - protein, 481 aa, Arabidopsis thaliana
MALKALDYDTLNENVKKCQYAVRGELYLRASELQKEGKKIIFTNVGNPHALGQKPLTFPRQVVALCQAPFLLDDPNVGMLFPADAIARAKHYLSLTSGGLGAYSDSRGLPGVRKEVAEFIQRRDGYPSDPELIFLTDGASKGVMQILNCVIRGNGDGILVPVPQYPLYSATISLLGGTLVPYYLDESENWGLDVANLRQSVAQARSQGITVRAMVIINPGNPTGQCLSEANIREILKFCYNEKLVLLGDEVYQQNIYQDERPFISSKKVLMEMGSPFSKEVQLVSFHTVSKGYWGECGQRGGYFEMTNLPPRVVEEIYKVASIALSPNVSAQIFMGLMVNPPKPGDISYDQFARESKGILESLRRRARLMTDGFNSCKNVVRNFTEGAMYSFPQIRLPTGALQAAKQAGKVPDVFYCLKLLEATGISTVPGSGFGQKEGVFHLRTTILPAEDEMPEIMDSFKKFNDEFMTQYDNNFGYSKM

SEQ ID NO: 5453 - protein, 403 aa, Streptomyces coelicolor A3(2)
MQVIQSTKLANVCYEIRGPVLEEAMRLEAAGHRILKLNTGNPAAFGFECPPEILEDILRNVSTAHGYGDAKGLLAARRAVVMHNQTLGIETDVEHVFIGNGVSELIVMAMQGLLDDGDEVLVPAPDYPLWTAAVSLSGGTAVHYRCDEQSDWMPDLADVERKITDRTKALVIINPNNPTGAVYDDAMLRGLTDIARRHNLLVCSDEIYDKILYDDATHTPTAAIAPDLLTLTFNGMSKAYRVAGYRVGWMSISGPRAHAESYIEGLTILANMRLCANMPGQHGVVAALSGRQTINELVLPGGRLREQRDAAHEALTSIPGVTCVKPKGALYLFPRLDPKVFKIKDDRRMVLDLLRQEKIMVVQGTGFNWPEPDHFRVVTLPTAADLREAVDRIGNFLDGYSQP

SEQ ID NO: 5454 - protein, 370 aa, Burkholderia fungorum LB400
MSALFSPLTLRSVTLPNRIVVSPMCQYSADRGEATAWHMIHLGSMALSGAGMLCIEATAVEPDGRITPGDLGLWDDVTEAALEPVLAAIRKHSHIKVTMQLSHAGRKASSHVPWEGGQLIPVSQGGWLPHAPSALPHKAGEEPPLALDVPALARIREAFAASARRAARLGIDGLEVHAAHGYLLHQFLSPIANQRDDEYGGSLENRMRFPLEIFDIVRAAFPADKPVGVRVSATDWVEGGWTLADTIAFAQELKKRGCDWIDVSSGGVSPLQKIPLEPGYQIPFAKAVKEATGLTTIGVGLITDPLHAEQLIEAGEADLIALARALLYNPRWPWHAAAQLGATVEAPPQYWRSQPREQKALFGDISFGQR

SEQ ID NO: 5455 - protein, 447 aa, Zea mays
  misc_feature (367)..(367): Xaa can be any naturally occurring amino acid
  misc_feature (374)..(374): Xaa can be any naturally occurring amino acid
MAAAAGDGAGEARARALLQQHRPFATPPGEYHHFGAPSAATDEMVEAVVLRTPLKRKHNDRTENEAAESNDWMSPGYANAGSSPVPTPPSGKGLKASTKPKATKGQKSGPQTPLGFGSPGNPSTPVGGCRYDSSLGLLTKKFLNLLKGAPGGIVDLNNAAETLEVQKRRIYDITNVLEGIGLIEKKLKNNIRWKGVDDSRPGEVSDDMSILQADIDALTLQERNLDERISEMRDRLRGLTEDENNQKWLYVTEEDIKSLPCFQNQTLIAIKAPHGTTLEVPDPDEVNDYPQRRYRIVLRSTMGPIDVYLVSQFEEMSGMETPPRPTQTISMDSLENPRTPLAADCNKVTGMESNIHGGLILPSDAPXSSSQDIXGMMKIVPSELDADTDYWLLSDNTGVSMTNMWETGPDEWDGIEKFNAEDFLEVGTPQQQDKPADVVDDDPSCII

SEQ ID NO: 5456 - protein, 541 aa, Gardnerella vaginalis
MAKIIAYEEDARQGMLAGLDRLANTVKVTLGPKGRNVVLDKSYGAPTITNDGVSIAKEIDLEDPYERIGAELVKEVAKKTDDVAGDGTTTATVLAQSLVHEGLKNVVAGSNPIALRRGIEKASEAIVKELLASAKDVETKDQIAATATISAADPEVGEKIAEALDKVGQDGVVTVEDNNKFGLDLDFTEGMRFDKGYISPYFVTNAEDQTAVLEDPYILLTSGKVSSQQDIVHVAELVMKSGKPLLIIAEDVDGEALPTLVLNKIRGTFNTVAVKAPGFGDRRKAMLQDMAILTGAQVVSDDLGLKLDSIDASVFGHAAKVIVSKDETTIVSGAGSKEDVEARVAQIRAEIENTDSDYDREKLQERLAKLAGGVAVIKVGAATEVEAKERKHRIEDAVRNAKAAIEEGLLPGGGVALVQAAAKVEKSADIVALSGEEATGAAIVFRAVEAPIKQIAQNSGVSGDVVLNKVRELPEGEGFNAATNTYEDLLAAGVTDPVKVTRSALQNAASIAGLFLTTEAVVANKPEKPAAAPQAGAEMGY

SEQ ID NO: 5457 - protein, 227 aa, Arabidopsis thaliana
MGRGKIVIQKIDDSTSRQVTFSKRRKGLIKKAKELAILCDAEVCLIIFSNTDKLYDFASSSVKSTIERFNTAKMEEQELMNPASEVKFWQREAETLRQELHSLQENYRQLTGVELNGLSVKELQNIESQLEMSLRGIRMKREQILTNEIKELTRKRNLVHHENLELSRKVQRIHQENVELYKKAYGTSNTNGLGHHELVDAVYESHAQVRLQLSQPEQSHYKTSSNS

SEQ ID NO: 5458 - protein, 737 aa, Mesorhizobium loti MAFF303099
MRKPRVTAATSGPDGLAPASDVAAIVAGTHGDPFAVLGVHEVGKGLFARCFVPHAETVTAYTLTGIEAGALSRRDDAGFFEGKLSIKKRQPLRYHAHNAGGDWWLTDPYSFGPVLGPMDDYYIAEGSHLRLFDKLGAHVIEHEGATGVHFAVWAPNAKRVSVVGDFNDWDGRRHTMRDRRDTGIWEVFIPDIGAGRPYKYEIIGPDGVRLPLKADPFAFKSELRPATASVVAVPPAHDWGDEAHRNYWRNADPRREAVSIYEVHAGSWQLHDDGTFLSWDELADRLIPYVVETGFTHIEFMPISEHPYDPSWGYQTTGLYAPSARFGDPDGFARFVDGAHRAGVGVILDWVPAHFPVDAHGLAHFDGTALYEHADPRKGFHPDWNTAIYNFGRREVVSFLVNNALFWAEKYHVDGLRVDAVASMLYLDYSRKAGEWIPNEKGGRENLEAVSFLQKMNKEVYGHHPGVMTIAEESTSWPKVSAPVHEGGLGFGFKWNMGFMHDTLEYFSKEPIFRKHHHNDLTFGLTYAFSENFVLPLSHDEVVHGKGTLLSKMAGDDWQKFATLRAYYGFMWGYPGKKLLFMGQEFAQRREWSEARALDWNLLDFRPHRGVWQTVRDLNYLYRSRPALHGRDCEPEGFSWLIVDDSQNSVFAWVRNAPGGSPVAVISNFTPVPRDNYRVPLPKAGKWREIINTDASEYGGSGMGNGGMVEARAEGKNISATMLLPPLSTIMLELVAD

SEQ ID NO: 5459 - protein, 169 aa, Glycine max
  misc_feature (63)..(63): Xaa can be any naturally occurring amino acid
LQVGIVSDMINVSRSMKCFFKGSNNSSLLHFSYNSADQSDSGDGGGIPAFTFYSITSHEKFAXFSMELCLKRLLVLEFMSISYDTSAVKQLHWSTQLYDDEFKDLRDCNLYCVVTHGPVPPRLRDGKSGIDALRFDNQPNPEVLQVYLTTWLAEVNMSLPSMIAMKFIL

SEQ ID NO: 5460 - protein, 497 aa, Methanosarcina acetivorans C2A
MCGIAGVFGTPDSNLKVKKMLAALGHRGPDACGIHTAGDLSIGNTLLKITGDMPQPLTGKGALVLNGEIFNFRELAAEIGIKIDSDTELLFSLIETGVKEGSTPIDAVCSALSKVNGDYALAYACGGELVLARDPSGVKPLFYCSGTEGEKPEIAFASEKKALAFISRKAKPFPQGGILGFNTESGKITEKIPEGYLEIKSPEKRIYTEHEALSQLKETLEKAVELRLTPTTGIAFSGGIDSTFLAALAKRIDPGVSLYAVGLPDSHDITQAERAAEAIGMRKNLKVHFLSPEEIEAAVPRVVYATESTDPMTVAIGIPLYIVAKTAKEDGKRVLLTGQGADELFGGYRRHEEFLKKGAEVLDREIYSDLATISKINLERDDMVTMANSVELRVPFLDKEVIKTGLAIRPELKVLKKDGYYEDGYYERKYILRKAAKGLIPPEILWKEKKAMQYGTGVQKVLDRLARDSGFSKKQESHIEKYLMQIASEKGFEFVNN

SEQ ID NO: 5461 - protein, 644 aa, Nitrosomonas europaea ATCC 19718
MCGITGVFDTRSTSEIDRNLLHRMNETLTHRGPDEGEVYVESGLGLGHRRLSIMDVSSGQQPLFNEDGSVVVVFNGEIYNFQKLVGELTALGHRFRTHCDTEVIVHAWEEWGERCVERFSGMFAFGVWDRNRQTLFMARDRLGIKPFYYTLLDNGLFLFASELKALLVHPDFDKTFDHRAIEDYFAYGYIPEPKTIFKNAFKLNPGHLLSLQRGQQTVQSREYWDIPFTPHGSLSEEEAAEELILRLRNAVDSHLMSEVPLGAFLSGGVDSSAVVAMMGGLMKEPVNTCSIAFSDPAFDESDYARLVAERYQTRHFTEQVQQDDFDLIDRLAALYDEPFADSSAIPTYRVCELARKRVTVALSGDGGDENFAGYRRYRWHMIEERLRSKLPLGLRKPLFGLLGSVYPKADWAPKFLRAKTTFESLARDSVEGYFHSVSILDNKLRMQLFTRDFYRDLQGYRAVEVLRDYADKSPTKDALSLIQYLDMKTYLVGDILTKVDRASMAHSLEVRVPLLDHELVEWVSGLPASMKLRQQEGKYILKRSLEPYLPNEVLYRNKMGFSVPLASWFRGPLRERVRTALLGNTLAGTGIFDMGFIKKMLDQHQSGRRDYSAPIWTLLMFEAFLRNILSMGNMSYTGQDKKVA

SEQ ID NO: 5462 - protein, 307 aa, Triticum aestivum
AYLGDISRTSLYKKAGWYRSGIPGISSTHASAHASEMLNDLLVKKNEETGWDTPIHVDAASGGFIAPFLYPELEWDFRLPLVKSINVSGHKYGLVYAGIGWCIWRSKEDLPDELIFHINYLGADQPTFTLNFSKGSSQVIAQYYQLIRLGFEGYRNIMDNCQENAMVLKEGLERTGRFNIVSKDQGVPLVAFSLKDSSRHDEFEISEFLRRFGWIVPAYTMPPDAQHVTVLRVVIREDFSRTFAERLVIDIEKVLHELDALPSRSSGPALQHPNGDTVSEKDLARQREVVSVWKRAVAARKKTQGVC

SEQ ID NO: 5463 - protein, 396 aa, Lycopersicon esculentum
MDGSVPQTDTMMSDVAAPPAQQPPPPSQPLAGMDNIPATLSHGGRFIQYNIFGNIFEVTAKYKPPIMPIGKGAYGIVCSALNSETNESVAIKKIANAFDNKIDAKRTLREIKLLRHMDHENIVAIRDIIPPPQREAFNDVYIAYELMDTDLHQIIRSNQGLSEEHCQYFLYQILRGLKYIHSANVLHRDLKPSNLLLNANCDLKICDFGLARVTSETDFMTEYVVTRWYRGPELLLNSSDYTAAIDVWSVGCIFMELMDRKPLFPGRDHVHQLRLIMELIGTPSEAEMEFLNENAKRYIRQLPLYRRQSFTEKFPHVNPAAIDLVEKMLTFDPRRRITVEDALAHPYLTSLHDISDEPICMTPFSFDFEQHALTEEQMKELIYRESIAFNPEYQRM

SEQ ID NO: 5464 - protein, 537 aa, Thermobifida fusca YX
MPKILEFDESARRALERGVNRLADAVKVTLGPKGRNVVIDKKWGAPTITNDGVTVAREVELEDPYENLGAQLVKEVATKTNDAAGDGTTTATVLAQALVNEGLRSVAAGASPILLKRGIDAAAQAVSETLLSRAREIDERGDIAYVATNSAQDKQIGELIAEAFDKVGKDGVITVEESQTFGMDLEFTEGLQFDKGYISPYFVTDPDRQEAVLEDALILIHQGKISNLAELLPLLEKIVQTKKPLLIIAEDVEGDALGALVLNKMRGTLSVAAVKAPGFGERRKAMLQDIAILTGGQVIAEEVGLTLENAELDVLGKARRITVTKDTTTIVDGAGDQSEVNDRINQIRKEIEATDSDWDREKLQERLAKLAGGVCVLRVGAATEVELKERKHRLEDAISATRAAVEEGIIAGGGSALVHAAKTLEGDLGRTGDEATGVAIVRRALVAPARWIANNAGAEGNVVVSRIAELEPGHGYNAATGEYGDLVAQGIIDPVKVTRSAVQNAASIAGMLLTTEALVVEKPEEEENAEGGHGHSH

SEQ ID NO: 5465 - protein, 545 aa, Exiguobacterium sp. 255-15
MAKDILFSEEARRAMLRGVDALADAVKVTIGPKGRNVVLERKFGSPLITNDGVTIAKEIELEDHFENMGAKLVAEVASKTNEIAGDGTTTATVLAQAMIREGLKNVTAGANPMVIRKGIEKAVRRAVEELHAIAKPIEGKEAIAQVAAISAADEEVGQLIAEAMERVGQDGVITIEESRGFTTELDVVEGMQFDRGYASPYMITDSDKMEAVLENPYILITDKKISNIQEILPVLEQVVQQNKPLLIIAEDVEGEALATLVVNKLRGTFNAVAVKAPGFGDRRKAMLEDISIVTGAELITEELGLDLKETQITQLGRASKVVVSKDNTTIVEGNGHSDSITARVGAIRSQIEETTSDFDREKLQERLAKLAGGVAVVKVGAATETELKERKLRIEDALNATRAAVEEGIVAGGGTAFIHVTKAVESILAVTTGDEATGVNIVLRALEAPLRQIAENAGQEGSVIVERLKHEAQGMGYNAATDEYVDMIETGIVDPAKVTRSALQNAASVSAMFLTTEAVIADKPEPAGAPAMPDMGGMGGMGGMM

SEQ ID NO: 5466 - protein, 256 aa, Agrobacterium tumefaciens str. C58
MKPLEIDVFLCRSDNFGVLLHDPESGATAAIDAPEEGPILRALDGHGWKLTHIFTTHHHQDHVEANLVLKDKFRCEVHGPYDEAIAIPGLDRSQADGDEFEFAGRRVQVIATPGHTAGHICYYLPDDGLLFAADTLFAMGCGRLFERPAADMWHSFQKLMALPDDTRVYFGHEYTLSNARFALTVDPDNAVLRERAARVETARQANEFTIPTTIGLEKQTNPYMRVADAGIRRHLGLEGAADADVFAEIRTRKDNF

SEQ ID NO: 5467 - protein, 481 aa, Arabidopsis thaliana
MSLKALDYESLNENVKNCQYAVRGELYLRASELQKEGKKIIFTNVGNPHALGQKPLTFPRQVVSLCQAPFLLDDPNVGMIFPADAIARAKHYLSLTSGGLGAYSDSRGLPGVRKEVAEFIERRDGYPSDPELIFLTDGASKGVMQILNCVIRGQKDGILVPVPQYPLYSATISLLGGTLVPYYLEESENWGLDVNNLRQSVAQARSQGITVRAMVIINPGNPTGQCLSEANIREILRFCCDERLVLLGDEVYQQNIYQDERPFISSKKVLMDMGAPISKEVQLISFHTVSKGYWGECGQRGGYFEMTNIPPRTVEEIYKVASIALSPNVSAQIFMGLMVSPPKPGDISYDQFVRESKGILESLRRRARMMTDGFNSCKNVVCNFTEGAMYSFPQIKLPSKAIQAAKQAGKVPDVFYCLKLLEATGISTVPGSGFGQKEGVFHLRTTILPAEEEMPEIMDSFKKFNDEFMSQYADNFGYSRM

SEQ ID NO: 5468 - protein, 198 aa, Zea mays
MWISDSAFVEPSSSSPSASASPPPSPPPARLLRQRNRRRRRSSRKQGSASAVDGVADPEAEDVWRGAQWEAAWPARRDSKPVVLAGGDDAVGRSRSLTDDDLEELKGCADLGFGFNYDEIPELRSTLPALELCYSMSQRLQLDDEKPQQHEGAAPDAATPSPPVTNWKISSPGDSPDEVKARLKYWAQAVACTVRLCS

SEQ ID NO: 5469 - protein, 199 aa, Ceratopteris pteridoides
RNGLLKKAHELSVLCDAEIALIIFSSTGKLFEHSSSRGIKKILERYKRCSGILQDVGGTVIRDVEYWKQEAERLKERLTYMEEIQRNMLGESLGSLQIKDLQNLEAKLDSGLYKIRGAKTQLMVRQVQELQKKEQILLQQNEALRTKLAELSRLQAPVSGLTTATTSQDVQESSSGSGSRQHETSLSAAETTLQLGFAQ

SEQ ID NO: 5470 - protein, 1135 aa, Psychrobacter arcticus 273-4
MAYKKRFDTSSAYGQLVILVFLPICLLAAVGGILVFYETMRASNSEQAVLAEAVLIRYSPTIAEIVPELLAQNDAKAQTTENNNESTTNSVLQAAMATLEGIQDKLGRMRAEQHVQRIAIVNQNNEVLATVGYGTDEAWPAVDPSERFLAQQPTPIGTAYGSILGEFDGQTLWLLVDMDSEPLYIARYRIAMALVITGLFTLLILLLSLNIYSKRWIAPIYELRLQLQRTHVDNLYQPIPVESNGELNLLQQDLVRTLRRLYVSFQELKEHAEQTEDDLRLAFDEMEMQNISIRNARDAAISTSQAKSAFLANISHELRTPLNSIDGFINLLARHGELNPEQDLYVQTIRKSSAHLLALVNDVLDFSKIEAGKLVLDRHEFDLYDTIYDVVDMLSPVSAEKGLRMAVLFYNDVPMRVNGDALRLKQVLTNIVGNAIKFTDSGDVVVRVSLDDYQDNYLMISVQDSGKGISLSDQKMLFQSFSQGDPSITRQYGGTGLGLVISKQLTRLMGGDIGFYDNMQENISNQGATFWFRMPAHVDVLEAATGQTIELPVLAPLASATDEFNVLIWINHTASIQVLKASLHHLPITLTQANSLPGLLESLKEHGNYWDWVIVDDDTQDDMMALLKQIRLHYQGKLAVFGYQVAADQALLNRYHANILYEPLDKRQLYAMLDTQKRSVPTGIAEPRWKGVTVLAVDDHLPNLLVLDALLSELGIHVITASNGFDAIEMISKQQTKNIKSAKTEKQSLSKKTQISKAVTRDDVSKSAVSALHIEDTTTEEKGKAQHKNSIDLIFMDIQMPRMSGHEAARQIRKIEAADSHIPIIALTAHGLADERDKLIASGINDYVGKPISQPQLLQVLQKWLGRSASSSPLTAENDEHSQSLSIASGAPPTYQMIRSEQVKSYKPTKMSNEKRVTRPLSLKKIRDDYLRDSQPREDYRRESRRDTQPRYESLRFQEQGQSVFGTRSIQTLDDNKDELLVNTAYLQKNSHLNASVFNTLDILNWQDALMRSANKPDLAAKLIIMMLDTINDEKQALTQAWEAHNRSMLAQIAHRILGGSRYTGVPQLRQASQDLEERCLLNIQHTTPAQFAMLEPYYEALLTALNNLQTLDLSAYPQLNYHRLSENDMTWKMI

SEQ ID NO: 5471 - protein, 359 aa, Streptomyces coelicolor A3(2)
MSALFEPFRLRDTTIPNRIWMPPMCQYSAAPEGPSAGVPGDWHFAHYGARAVGGTGLIVVEATGVSPEGRISPQDLGLWNDTQVEAFRRITGFLRSQGTVPAVQLAHAGRKASTAQPWRGGAPVGADAYGWQPLAPSALAFDERHPVPTELTVPQIQEAVGRFADAARRALAAGFEIAEIHGAHGYLIHEFLSPHSNQRTDAYGGSYANRTRFALEVVDAVREVWPDDKPLFFRVSATDWLEEGGWTPDDTVRFARDLEAHGIDLLDVSTGGNVPRVRIPTGPGYQVPFAARVKAGSTLPVAAVGLITEPGQAEKILANGEADAVLLGRELLRNPSWAQHAARELGVDARMPDQYGWGM

SEQ ID NO: 5472 - protein, 130 aa, Zea mays
  misc_feature (45)..(45): Xaa can be any naturally occurring amino acid
  misc_feature (115)..(115): Xaa can be any naturally occurring amino acid
YRRIRSDIDEHEGGLEAFSRSYEKFGFNRSAEGITYREWAPGAFXAALVGDFNNWDPNADRMSKNEFGVWEIFVPNNADGTSPIPHGSRVKVRMDTPSGIKDSIPAWIKYSVQAXGEIPYDGIYYDPPEE

SEQ ID NO: 5473 - protein, 357 aa, Brevibacterium sp. HCU
MSHLLFEPLTLRGLTFRNRIWVPPMCQYSVETLDGVPAPWHTVHYGAMARGGAGAVIVEATGVAPEARISAKDLGWNDEQRDAFVPIVDFLHTQGAAAGIQLAHAGRKASTYPEWGTDRDGSLPVDEGGWQTVAPSALAFDGLAEPRALTETEIAEVVAAFRSSARRAIEAGFDFVEIHAAHGYLLHEFLSPLSNNRTDSYGGSLENRARLLLDIVDATRTEVGEDVPVFVRLSATDWTEGGLTLDDTVEVAGWLKEHGVDLIDVSSGGNVMASIPVGPGYQTTLAAGVRQGSGLPTAAVGLISEPFQGEHILATGQADVILVGREYLRDPNFALRAADALRFDIDYRPAQYHRAYK

SEQ ID NO: 5474 - protein, 275 aa, Bifidobacterium longum NCC2705
MAIQSTIMLNNGTVIPQVGLGVFQTPDGDTTVNAVQTALENGYRHIDTAMIYHNEASVGEGIRRAGVPRSDFFLTTKLWNDDIRARRGKDAFQESLDRLGVDYVDLYLIHWPADGWQQAWDDLQEIYASGRAKAIGVSNFQKHHIDELLTHSDVVPAVDQVESSPQFTNQELIGQLRAKGIHTEAWSPLGGTGGNLLSNPVLAGIGAKYGRSAAQVVIRWHIQRGIVVLPKSTHAERIKQNFEVFDFNLSVDDMTAISAINTGKRNGADPDNFNF

SEQ ID NO: 5475 - protein, 728 aa, Shigella flexneri 2a str. 301
MSDRIDRDVINALIAGHFADPFSVLGMHKTTAGLEVRALLPDATDVWVIEPKTGRKLAKLECLDSRGFFSGVIPRRKNFFRYQLAVVWHGQQNLIDDPYRFGPLIQEMDAWLLSEGTHLRPYETLGAHADTMDGVTGTRFSVWAPNARRVSVVGQFNYWDGRRHPMRLRKESGIWELFIPGAHNGQLYKYEMIDANGNLRLKSDPYAFEAQMRPETASLICGLPEKVVQTEERKKANQFDAPISIYEVHLGSWRRHTDNNFWLSYRELADQLVPYAKWMGFTHLELLPINEHPFDGSWGYQPTGLYAPTRRFGTRDDFRYFIDAAHAAGLNVILDWVPGHFPTDDFALAEFDGTNLYEHSDPREGYHQDWNTLIYNYGRREVSNFLVGNALYWIERFGIDALRVDAVASMIYRDYSRKEGEWIPNEFGGRENLEAIEFLRNTNRILGEQVSGAVTMAEESTDFPGVSRPQDMGGLGFWYKWNLGWMHDTLDYMKLDPIYRQYHHDKLTFGMLYNYTENFVLPLSHDEVVHGKKSILDRMPGDAWQKFANLRAYYGWMWAFPGKKLLFMGNEFAQGREWNHDASLDWHLLEGGDNWHHGVQRLVRDLNLTYRHHKAMHELDFDPYGFEWLVVDDKERSVLIFVRRDKEGNEIIVASNFTPVPRHDYRFGINQPGKWREILNTDSIHYHGSNAGNGGTVHSDEIASHGRQHSLSLTLPPLATIWLVREAE

SEQ ID NO: 5476 - protein, 538 aa, Scardovia inopinata
MAKIIKYDEEARQGMLEGLDELANTVKVTLGPRGRNVVLDKTYGAPTITNDGVSIAKEIDLEDPYARIGAELVKEVAKKTDDVAGDGTTTATVLAQSLVHEGLRNVTAGSNPIALRRGIEKASDAIVERLLSNAKPVETKEQIAATATISAGDPEVGDKIAEALDKVGQDGVVTVEDNNKFGLDLEFTEGMRFDKGYISPYFVTNADEQTAVLEDPYILLTSGKVSSQQDIVHIAELVMKSGKPLLIVAEDVDGEALPTLVLNKIRGTFNTVAVKAPGFGDRRKAMLQDMAILTGAQVVSDELGLKLDSIDDTVFGHASKVIVSKDETTIVSGAGSKEDVAARVAQIRSEIEDSDSDYDREKLQERLAKLAGGVAVIKVGAATEVEAKERKHRIEDAVRNAKAAIEEGLLPGGGVALVQAAADVQKNVKLEGDEATGAGIVFRAIEAPLKQIAQNAGFSGEVVIDKVRTLPAGSGLNAATGEYEDLLSAGVTDPVKVTRSALQNAASIAGLFLTTEAVVANKPEPPAPAAAPNPDMGY

SEQ ID NO: 5477 - protein, 520 aa, Arabidopsis thaliana
RESLCLCKRYLSLRRTEETSRINQSINFSELTLDFSFEVMESVPESVPSPNSNTPSIPPPVNSVPPFLSKTYDMVDDPLTNEVVSWSSGNNSFVVWSAPEFSKVLLPKYFKHNNFSSFVRQLNTYGFRKVDPDRWEFANEGFLRGRKQLLKSIVRRKPSHVQQNQQQTQVQSSSVGACVEVGKFGIEEEVERLKRDKNVLMQELVRLRQQQQATENQLQNVGQKVQVMEQRQQQMMSFLAKAVQSPGFLNQLVQQNNNDGNRQIPGSNKKRRLPVDEQENRGDNVANGLNRQIVRYQPSINEAAQNMLRQFLNTSTSPRYESVSNNPDSFLLGDVPSSTSVDNGNPSSRVSGVTLAEFSPNTVQSATNQVPEASLAHHPQAGLVQPNIGQSPAQGAAPADSWSPEFDLVGCETDSGECFDPIMAVLDESEGDAISPEGEGKMNELLEGVPKLPGIQDPFWEQFFSVELPAIADTDDILSGSVENNDLVLEQEPNEWTRNEQQMKYLTEQMGLLSSEAQRK

SEQ ID NO: 5478 - protein, 494 aa, Pisum sativum
MDPYKHRPSSAFNSPFWTTNSGAPVWNNNSSLTVGSRGPILLEDYHLVEKLAQFDRERIPERVVHARGASAKGFFEVTHDISHLTCADFLRAPGVQTPVIVRFSTVIHERGSPETLRDPRGFAVKFYTREGNYDLVGNNFPVFFVHDGMNFPDMVHALKPNPQTHIQENWRILDFFYNFPESLHMFSFLFDDVGVPQDYRHMDGFGVNTYTLINKAGKSVYVKFHWKPTCGVKCLLEEEAIQVGGSNHSHATKDLYDSIAAGNYPEWKLYIQTIDPAHEDRFEFDPLDVTKTWPEDIIPLQPVGRMVLNKNIDNFFAENEQLAFCPAIMLPGIYYSDDKMLQTRVFSYADSQRHRLGPNYLQLPVNAPKWSHHNNHHEGFMNAIHRDEEVNYFPSRHDTVRHAERVPIPTTHLSARREKCNIPKQNHFKQAGERYRTWAPDRQERFLRRWVEALSDTDPRITHEIRSIWVSYWSQADRSLGQKLASHLNMRPSI

SEQ ID NO: 5479 - protein, 537 aa, Bifidobacterium animalis subsp. lactis
MAKIIEYDEEARQGMLAGLDKLADTVKVTLGPKGRNVVLDKTYGAPTITNDGVSIAKEIDLEDPFERIGAELVKEVAKRTDDVAGDGTTTATVLAQSLVHEGLKNVVAGSNPIALRRGIEKASDALVKQLVASAKPVETKEQIAATATISAGDPEVGEKIAEALDKVGQDGVVTVEDNNRFGLDLDFTEGMRFDKGYISPYFVTNAEDQTAVLDDPYILLTSSKVSSQQDVVHIAELVMKTGKPLLIVAEDVDGEALPTLILNNIRGTFKSCAVKAPGFGDRRKAMLQDMAILTGGQVVSEDLGLKLDSIDLSVFGTAKKVIVSKDETTIVSGGGSKEDVAARVAQIRAEIEKTDSDYDREKLQERLAKLAGGVAVIKVGAATEVEAKERKHRTEDAVRNAKAAIEEGLVPGGGVALVQAAEKVEKDFNLEGDEATGAAIVFSGIEAPIKQIAENAGLSGAVVIDKVRSLPEGEGFNAATDTYEDLMAAGVTDPVKVTRSALQNAASIAGLFLTTEAVVANKPEPAAAPAAGHNMGY

SEQ ID NO: 5480 - protein, 239 aa, Glycine max
MVQSKKFRGVRQRHWGSWVSEIRHPLLKRRVWLGTFETAEEAARAYDQAAILMSGRNAKTNFPITQTPEGDPKSTTSEDTPSTTSKDLEEILHAKLRKCGKVPSPSMTCLRLDPENSHIGVWQKRAGRRSDSNWVMTVQLGKKSVNVNNNDTHHQADSSSSSSLSSSLPSSEHHHIESPSLAVTGNLHHQEVVRGEIDEEERIALQMIEELLNDRNCPSPSFNNNIQERDGADHDHFFL

SEQ ID NO: 5481 - protein, 137 aa, Zea mays
MKMRNAPLLFPPPCTAPLTVTGPQQRSMAEVHNERPVGMVGGVRDAPVGRENDLEAIELARFAVAEHNSKTNAMLEFERLVKVRHQVVAGTLHHFTVEVKEAGGGEKKLYEAKVWEKAWENFKQLQSFELVGDAAVA

SEQ ID NO: 5482 - protein, 403 aa, Streptococcus agalactiae NEM316
MKIFDKSMKLEHVAYDIRGPVLEEADRMRANGEKILRLNTGNPAAFGFEAPDEVIRDLITNARESEGYSDSKGIFSARKAVMQYYQLQNIHVDMDDIYIVNGVSEGISMSMQALLDNDDEVLVPMPDYPLWTACVSLAGGNAVHYICDEEANWYPDIDDIKSKITSKTKAIVLINPNNPTGAVYPREILQEIVDIARQNDLIIFSDEVYDRLVMDGMEHIPIASIAEDIFTVTLSGLSKSHRICGFRVGWMVLSGPRQHVKGYIEGLNMLANMRLCSNVLAQQVIQTSLGGQQSIDSMLLPGGRIYEQRNYIHKAINEIPGLSAVKPNAGLYLFPKIDTDMYRIDNDEEFVLNFLKQEKVLLTHGRGFNMNTADHFRIVYLPRVDELTELQEKMARFLSQYKR

SEQ ID NO: 5483 - protein, 453 aa, Persea americana
MDNKGGILMQRFELGRLLGQGTFAKVYHARNLKSSQSVAIKVIDKEKVLKVGMIDQIKREISTMRLASHPNVVQLYEVMATKTKIYFVLEYVKGGELFNKVAKGKLKEDVAWKYFQQLVSAVDFCHSRGVYHRDLKPENLLVDENENLKVTDFGLGALAESKRQDGLLHTTCGTPAYVAPEVISRKGYDGAKADIWSCGVILFVLLAGYLPFHDSNLMELYRKVGKAEYKCPNWFPPEVRRLLARILDPNPNTRISIAKIKDNSWFKRGFEAKFAKGETKSKELAPLDTDAAFASSDTGVAARKPELVKPQHLNAFDIISLSAGFDLSGLFEDTNCRKEARFASKQPASAIISKLEDIAKRLRLKVKKKDEGILKLEGSKEGRKGVLSIDAEIFVVNPSFHLVEVKKSSGDTLEYQKLWNQDMRPALTDIVWAWQGDQQQQQESLVCSLGQSL

SEQ ID NO: 5484 - protein, 543 aa, Bradyrhizobium japonicum USDA 110
MAAKDVKFSGDARERMLRGVDILANAVKVTLGPKGRNVVIEKSFGAPRITKDGVTVAKEIELEDKFENMGAQMVREVASKTNDLAGDGTTTATVLAQAIVREGAKAVAAGMNPMDLKRGIDIAVAAVIKDIEKRAKPVASSSEVAQVGTISANGDAAIGKMIAQAMQKVGNEGVITVEENKSLDTEVDIVEGMKFDRGYLSPYFVTNAEKMTAELEDAYILLHEKKLSGLQAMLPVLEAVVQSGKPLVIIAEDVEGEALATLVVNRLRGGLKVAAVKAPGFGDRRKAMLEDLAILTGGQLISEELGIKLENVTVKMLGRAKKVVIDKENTTIVNGAGKKPDIEARVGQIKAQIEETTSDYDREKLQERLAKLAGGVAVIRVGGATEIEVKEKKDRVEDALNATRAAVQEGIVPGGGVALLRAKKAVGRLTNANDDVQAGINIVLKALEAPIRQISENAGVEGSIVVGKILENKSETFGFDAQNEDYVDMVEKGIIDPAKVVRTALQDASSVAGLLVTTEAMVAEAPKKDAPPAMPAGGGMGGF

SEQ ID NO: 5485 - protein, 546 aa, Azotobacter vinelandii
MAAKEVKFGDSARKKMLVGVNVLADAVKATLGPKGRNVVLDKSFGAPTITKDGVSVAKEIELKDKFENMGAQLVKDVASKANDEAGDGTTTATVLAQAIVNEGLKAVAAGMNPMDLKRGIDKATIAIVAELKSLAKPCSDSKAIAQVGTISANSDESIGNIIAEAMNKVGKEGVITVEEGSGLENELSVVEGMQFDRGYLSPYFINKPDTMVAELDNPLLLLVDKKISNIRELLPVLEAVAKSGRPLLIVAEDVEGEALATLVVNNMRGIVKVAAVKAPGFNDRRKAMLQVIAILTGATVISEKVGLSLESATLEHLGKPKALVLNKENTTIMHGAGAQADIEAAVAQIRKQIEETSSDYDREKLQERLAKLAGGVAVIKVGAATEVEMKEKKARVEAALHATRAAVEEGVVPGGGVALVRALQAIEGLKGDNEDQNVGIALLRRAVEAPLRQIVANAGDEPSVVVDKVKQGSGNFGFNAASGVYGDMIEMGILDPAKVTRSALQAASSIGGLMITTEAMVADIVEDKAAPAMPDMGGMGGMGGMM

SEQ ID NO: 5486 - protein, 392 aa, Heteropterys sincorensis
DLEPVNPADVPVTAAGALKSYKLASKAISRLQSLPSGNISLLCDVLVKEVRDLTGYDRVMVYKFHEDEHGEVVSECRRSDLESYLGLHYPATDIPQASRFLFMKNKVRMICDCLAPPVKVIQDERLPQPLSLCGSTLRSPHGCHAQYMTNMGTIASLVMSVTINEDDDMMDGDQQQMTRKLWGLVVCHHTSPRFVPFPLRYACEFLIQVFGVQINKEVELAAQVREKHILQIQTMLCDMLLRDAPVAIISQSPNVMDLVKCDGAALYFKNKAWFLGVTPTQEQIRDIAEWLLEYHSGNTGLSTDSLMEAGYPGASVLGDAVCGMAAVSITSRDFLFWFRSHTAKEIKWGGAKHDPDDKDDLRKMHPRSSFKAFLEVVKWRSMPWEDVEMDAI

SEQ ID NO: 5487 - protein, 561 aa, Sulfolobus solfataricus P2
MTFGYKLDEDGVTFNLWAPYQRKVKLKILNRGIYEMERDDKGYFTITLDNVRVGDRYKYILDDNSEVPDPASRYQPEGVHGYSEIISPDFEWDDENSVKVKREDLVIYELHIGTFTSEGTFEGVIKKLNYLKELGVTAIEIMPIAQFPGKKDWGYDGVYLYAVQNSYGGPSGFRKLVNEAHKLGLAVILDVVYNHVGPEGNYMVKLGPYFSEKYKTPWGLTFNFDDAGSDEVRKFILENVEYWINEFHVDGFRLDAVHAIIDNSPKHILEDIADVVHKYDKIVIAESDLNDPRVVNPKEKCGYNIDAQWVDDFHHAIHAFLTGERQGYYSDFGSIGDIVKSYKDVFIYDGKYSNFRRKTHGKSVGDLDGCKFVVYIQNHDQVGNRGGGERLIKLVDKESYKIAAALYILSPYIPMIFMGEEYGEENPFYYFSDFSDPKLIQGVREGRRRENGQETDPQSDCTFNDSKLSWKINDDILSFYKSLIKIRKEYGLACNRKLSVENGNYWLTVKGNGCLAVYVFSKSVIEMKYSGTLVLSSNSSFPSQITESKYELDKGFALYKL

SEQ ID NO: 5488 - protein, 392 aa, Heteropterys steyermarkii
DLEPVNPANVPVTAAGALKSYKLASKAISRLQSLPSGNISLLCDVLVKEVRDLTGYDRVMVYKFHEDEHGEAVSECRRSDLESYLGLHYPATDIPQASRFLFMKNKVRMICDCLAPPVKVIQDEKLPQPLSLCGSTLRSPHGCHAQYMTNMGTIASLVVSVTINEDDDMMDGDQQQLTRKLWGLVVCHHTSPRFVPFPLRYACEFLIQVFGVQINKEVELAAQVREKHILQIQTMLCDMLLRDAPVAIITQSPNVMDLVKCDGAALYFKNKTWLLGVTPTEEQIRDIAEWLLEYHSGNTGLSTDSLMEAGYPGASVLGDAVCGMAAVSITSRDFLFWFRSHTAKEIKWGGAKHDPDDKDDLRKMHPRSSFKVFLEVVKWRSMPWEDVEMDAI

SEQ ID NO: 5489 - protein, 392 aa, Heteropterys ternstroemiifolia
DLEPVNPADVPVTAAGALKSYKLASKAISRLQSLPSGNISLLCDVLVKEVRDLTGYDRVMVYKFHEDDHGEVVSECRRSDLESYLGLHYPATDIPQASRFLFMKNKVRMICDCLAPPVKVIQDERLPQPLSLCGSTLRSPHGCHAQYMTNMGTIASLVMSVTINEDDDMMDGDQQQMTRKLWGLVVCHHTSPRFVPFPLRYACEFLIQVFGVQINKEVELAAQVREKHILQIQTMLCDMLLRDAPVAIITQSPNVMDLVKCDGASLNFKNKTWLLGVTPTEEQIRDIAEWLLEYHSGNTGLSTDSLMEAGYPGASVLGDAVCGMAAVSITSRDSLFWFRSHTAKEIKWGGAKHNPDDKDDLRKMHPRSSFKAFLEVVKWRSMPWEDVEMDAI

SEQ ID NO: 5490 - protein, 392 aa, Heteropterys trichanthera
DLEPVNPADVPVTAAGALKSYKLASKAIARLQSLPSGNISLLCDVLVKEVRDLTGYDRVMVYKFHEDEHGEVVSECRRSDLESYLGLHYPATDIPQASRFLFMKNKVRMICDCLAPPVKVIQDERLPQPLSLCGSTLRSPHGCHAQYMTNMGTIASLVMSVTINEDDDMMDGDQQQMTRKLWGLVVCHHTSPRFVPFPLRYACEFLIQVFGVQINKEVELAAQVREKHILQIQTMLCDMLLRDAPVAIITQSPNVMDLVKCDGAALYFKNKTWLLGVTPTEEQIRDIAEWLLEYHSGNTGLSTDSLMEAGYPGASVLGDAVCGMAAVSITSRDFLFWFRSHTAKEIKWGGAKHHPDDKDDLRKMHPRSSFKAFLEVVKWRSMPWEDVEMDAI

SEQ ID NO: 5491 - protein, 220 aa, Ceratopteris richardii
MGRGKIEMKRIENRTTRQVTFCKRRAGLVKKARELSVLCDADVALIVFSSSGRLFEYAGSRSMREIIQAYVDAHEDSSSLLQLRSEEACVSQDLRAELTELRKEVESLRQEKRRKDGDIHDLKLLSADELDSLEGEVETSLCSIRKRQKQLYREKMNETFRKEEELRKENEKLRKQVEELQCARWEICCAQGFEASATSMCTSHGMTSERSDSFLDLRLN

SEQ ID NO: 5492 - protein, 445 aa, Zea mays
MAEPAAAGRKTRVGPYEVGKTIGEGSFAKVKHAHDSRTGAVRAIKVLDRNHVLRHKMVEQIKREISTLKLIKHPNVVQLHEVMASRTKIYMVLEFVDGGELFDKIVNSGRLGEDEARIYFHQLINVGDYCHSRGVYHRDLKPENLLLASHGTLKVSDFGLSAFAPQTKEDGLLHTACGTPNYVAPEVLADKGYNGMAADVWSCGIILFVLMAGYLPFDDANLMRLYKLICHATFSCPPWFSSGARKFIKRILDPNPDTRIKIAEILEDEWFKKGYKPPHFEQGEDVNLDDVDAAFNDSEDRLVAEKREKPESMNAFALISRSQGFNLGNLFEKEMMGMVKRETSFTSQCTAQEIMSKIEDACGPLGFNVRKQNYKMKLKGDKSGRKGHLSVATEVFEVAPSLHMVELRKTGGDTLEFHNFYKNFSSELKDIVWKAESDASMKQTK

SEQ ID NO: 5493 - protein, 374 aa, Pseudomonas putida KT2440
MTQSELFKTTQLGPYTLKNRIVLPPLTRSRSSQPGNIANDLMATYYRQRSGAGFMVTEGTQIEPRGQGYAWTPGIHSPEQIQGWRKVTDAVHAEGGVIFAQLWHVGRVSHTSLQPGGEAPVAPSAIRADNVKVFIETGPGTGALADPSTPRALSTKEVKELVKLYAQAARNALDAGFDGVELHCANGYLVNQFISAHTNQRDDEYGGSLQNRLRFLREITLAVAGVVGKERMGVRFAPLFATTDEDRVYLGLVEEDPHQTYIEAVKILEEVGIAYLSLAEADWENAPELPETFREDVRKSFSGKILYAGKYTAERGNRVIKAGWGDLIAFGRPFIANPDLPARIANNWPLNPVDPSSMYGGTDKGYTDYPTYKS

SEQ ID NO: 5494 - protein, 392 aa, Jubelina wilburii
DLEPVNPADVPVTAAGALKSYKLAAKAISRLQSLPSGNISLLCDVLVKEVRDLTGYDRVMVYKFHEDEHGEVVSECRRSDLEPYLGLHYPATDIPQASRFLFMKNKVRMICDCLAPPVKVIQDERLPQPLSLCGSTLRSPHGCHAQYMTNMGTIASLVMSVTINEDDDTMDGDQQQMTRKLWGLVVCHHTSPRFVPFPLRYACEFLIQVFGVQINKEVELAAQVREKHILQIQTMLCDMLLRDAPVAIITQSPNVMDLVKCDGAALYFKNKTWLLGVTPTVEQIRDIAEWLLEYHSGNTGLSTDSLMEAGYPGASVLGDAVCGVAAVSITSRDFLFWFRSHTAKEIKWGGAKHDPDDKDDGRKMHPRSSFKAFLEVVKWRSMPWEDIEMDAI

SEQ ID NO: 5495 - protein, 140 aa, Triticum aestivum
  misc_feature (8)..(8): Xaa can be any naturally occurring amino acid
SAFIQGVXFFTNEDYATNSDGLVIHDGTWTYKIPTVDTIPKQFNVELINSAHDQKRVLSSKASGEPPLLLASSVHCAMREAIRAARKEFSVCTGPANSTITFQMDVPATMPIIKELCGLDVVERYLESMSAASPTATAQA

SEQ ID NO: 5496 - protein, 239 aa, Glycine max
  misc_feature (188)..(188): Xaa can be any naturally occurring amino acid
  misc_feature (193)..(193): Xaa can be any naturally occurring amino acid
  misc_feature (207)..(207): Xaa can be any naturally occurring amino acid
  misc_feature (222)..(222): Xaa can be any naturally occurring amino acid
METIGSVDDLLDFSSDIGEEDDYDDKPRKACPSLNSKCAGPSLFNPLVQEFAEEELEWLSNKDAFPSVETFVDLSSIQPGTTKNQKSAPVLECSTGSSNSNNSTNSISLLNSCDHLKVPVRARSKSRSRHRPGLAENSSQQVWWRQPSNGTSKADEGMKISSIGRKCQHCGAEKTPQWRAGPSGPKTXCNACXVRFKSGRLVPEYRXCSSPTFHSDLHSNSXRRSRDEEAEQMGMDKCK

SEQ ID NO: 5497 - protein, 131 aa, Zea mays
  misc_feature (8)..(8): Xaa can be any naturally occurring amino acid
  misc_feature (28)..(28): Xaa can be any naturally occurring amino acid
  misc_feature (118)..(118): Xaa can be any naturally occurring amino acid
LYRRIRSXIDEHEGGLEAFSRSYEKFGXNRSAEGITYREWAPGAFSAALVGDFNNWDPNADRMSKNEFGVWEIFLPNNADGTSPIPHGSRVKVRMDTPSGIKDSIPAWIKYSVQAPGXIPYDGIYYDPPEE

SEQ ID NO: 5498 - protein, 871 aa, Rhodopirellula baltica SH 1
MPALLIRCGSTTRGIRSRWSNVAVPSEPMSSVSEFQTSSTYRALANALPLNLLIKAADGRRVFANDSYLKWRGVTWQELAGKHDEDLFPPEIARKYREDDQKVMQTGESLHSVESAKLADDSIGWIERVKTAVHDHHGNLLGVQVLFWDVTAKVEEEKATQFEQSLLKTLLANIPDSIYFKDIDSRFIRVSHAMAMKFGRASVDEVHGRTDADIFTPEHAEGARLDELRVIETGEALVDRVERETWPDREDTWCMTTKMPLRNDTGEIIGTFGISRDITDLKRSEAALHEAVRMADAANRSKSEFLANMSHEIRTPMNALIGMADLLSQTKLDPDQQDYVQIIQESSNGLLRLINDILDFSKIEARRLELESVPFSLGKTIESTLRSFSFKASEKGLELQRDISPELPDRLIGDPGRVRQVLTNLIGNAIKFTDHGGVRVRVEVLRREERADRDLAATHSGRESPERDDMVELRLSVCDSGIGIPPAQQDAVLNPFTQADASTTRRFGGTGLGLSISRQLVELMGGELHLQSEVGVGTTFSFQLKMPVCPASMPNEVDDEEEDLGGPARQRLAPLHVLVAEDGVTNQHVIAGLLRSLGHKCSIASDGRETLTKWRSESYDVVLMDMHMPVMDGLEATRAIRQEEWGTERHTPIVALTAAAMSEDAAACREAGMDSYLTKPIHSRKLRDALAPYQRELPPADDGSHEETLEQAFSPAAHLATEQDSTTINAAHAAFPSLGSTSDAISLSPENIGCLDLDSARSRIPGGTAGVLRLAFVFRTECAQLVDQLSNEIPAGLNDETRRNAHTLKGACGLLGAKQLQEAAERIEEAGRENRVQDSPELLADLQHEAQRVLRAIDELLSQSDNADQPK

SEQ ID NO: 5499 - protein, 412 aa, Debaryomyces hansenii CBS767
MPATEIIPLKHTDLFKSIKVGDHTLSNKVVHAPTTRFRALDDHTPSDLEFEYYSKRSQFPGSLLVTEATFVSEQAGLYSNVPGIWEAKHVQAWKKITDEVHKNGSFIACQFWYLGRVGDPKLLKKRGLDFVSSSDNYVDKKSKKYAESVGNPLRALTEDEVHDLVFKTYANAAKNALAAGFDYIELHGAHGYLIDQFLQPSANTRNDKYGGSIEKRAKFVLDLIDHLTSIVGAHRLAIRLSPWAKFQGIKSEEDTVHPITTFSYLLHELQNRADAGNQLAYISIVEPRVQGTISVGEDQQKGNNDFVGQIWKGIILKSGNYTYDAPNFKTMLQDISDNRTLVGFSRYYTSNPDLVKRLYEGWDLVPYDRPTFYTKNNWHYNTFANYEEEDKSIKEEEEKRFAKDIGLLKAHL

SEQ ID NO: 5500 - protein, 72 aa, Oryza sativa
ARWWLEEYKFDGFRFDGVTSMMYTHHGLQVAFTGNYGEYFGFATDVDAVVYLMLVNDLIHGLYPEAVAIGED

SEQ ID NO: 5501 - protein, 282 aa, Mesembryanthemum crystallinum
MSLIANFESDFAVLESIRRHLLEDWDPRAGAPAITTGSGPVYHRNSSFSSLYPCLTDNWGELPLKEDDSEDMVLFGVLRDAVHTGWSPQSGSESGSGSPAPVTVKPEPVDSPVSSPAPVRVAGGEAPVAAAPARGKHYRGVRRRPWGKFAAEIRDPAKNGARVWLGTFETAEDAALAYDRAAFRMRGSKALLNFPLRVNSGEPDPVRITSKRSSPERSVSSSSSESASPKRRKKEEVVVGPVAGQARPGLQQVGNVVEGMQVGVGCQVGVGTMPLGDQLLVT

SEQ ID NO: 5502 - protein, 333 aa, Zea mays
MAIAGRAPNHSPPLSSRPFNPIPSPRLSTHLLSPACARLSSFLPRPLAFAWLHRAGRAGEEKLATSYQLSAGGGSLPAAGVSCKGWELAMGRGRVELKRIENKINRQVTFAKRRNGLLKKAYELSVLCDAEVALIIFSNRGKLYEFCSGQSITKTLERYEKNSYGGPDTAVQNKENELVQSSRNEYLKLKARVDNLQRTQRNLLGEDLGSLGVKELDQLEKQIDSSLSHIRSTRTQHMLDQLTDLQRREQMMCEANKCLRRKLEETSNQVHGQVWEHGANLLLGYERHSSPQQAPSHVGNGLFFHPLEAAAEPTLQIGFAPEHMNNFMPAWLP

SEQ ID NO: 5503 - protein, 259 aa, Psychrobacter arcticus 273-4
MSIRIHPIKAFNDNYIWILINESNKQAIVIDPGQAAPVVAYLEESELELTSIWTTHHHYDHIGGVAELQESYPMTHLVAHTEHNVDEDQTIKDGSTVSAWGCSVQVWDVSGHTASHVAYILDIDGSKHCFCGDTLFSAGCGRVFTGTIEQLHDSFERLNGLPADTLLYPAHEYTASNLRFGLSIEPDNEAMQQALAQAEDITAQGIPTLPVTLEHERAINVFLRTQEASVIAGVKSEMNIEDEKSLTIFAALRELKNNF

SEQ ID NO: 5504 - protein, 487 aa, Streptomyces coelicolor A3(2)
MSQRVLTTESGAPVADNQNSASAGIGGPLLIQDQHLIEKLARFNRERIPERVVHARGSGAYGHFEVTDDVSGFTHADFLNTVGKRTEVFLRFSTVADSLGGADAVRDPRGFALKFYTEEGNYDLVGNNTPVFFIKDPIKFPDFIHSQKRDPFTGRQEPDNVFDFWAHSPEATHQITWLMGDRGIPASYRHMDGFGSHTYQWTNARGESFFVKYHFKTDQGIRCLTADEAAKLAGEDPTSHQTDLVQAIERGVYPSWTLHVQLMPVAEAANYRFNPFDVTKVWPHADYPLKRVGRLVLDRNPDNVFAEVEQAAFSPNNFVPGIGPSPDKMLQGRLFAYADAHRYRLGVNHTQLAVNAPKAVPGGAANYGRDGLMAANPQGRYAKNYEPNSYDGPAETGTPLAAPLAVSGHTGTHEAPLHTKDDHFVQAGALYRLMSEDEKQRLVANLAGGLSQVSRNDVVEKNLAHFHAADPEYGKRVEEAVRALRED

SEQ ID NO: 5505 - protein, 295 aa, Frankia sp. EAN1pec
MSTRTHITLNNGVEMPALGLGVFQTPPEETRSAVETALSAGYRHIDTAAAYGNERQVGEAVLKSGVDRTDVFLETKIWISDYGYDQTLHGFEKSARKLGVDQIDLLILHQALPSEFDRTLEAYRALEALLADGKVRAIGVSNFMVEHLTALLERASVVPAVNQIEVHPYFTQREVQAIDTKHGILTQAWSPIGGITFYRAGSHGSTLRDPAIGEIAQAHGRTPAQVMLRWHLQQGRSAIPKSTRPERIAENFDVFDFELTDKQLAVIDGLDTGRRGGPEPSDITLATFSKAIPEA

SEQ ID NO: 5506 - protein, 263 aa, Prunus ilicifolia
AHYKTEVDVGNAIAEAIRSGLVKREELFITSKASNHGHVVEACKNSLEKLQLDYLDLYLVHYPLATKHSGVGTTASLLDENKVLDIDVTVSLESTWHDMEKTVSLGLVRSIGLSNYELFLTRDCLSYAKIKPQVSQFETHPYFQRESLVRFCKKHGVTPMAHTPLGGATANVKSFGSISPLEDPVLLGLAKKYKKSVAQIALRWNIERDTPVIPKSSKVERLKENLEVLNFKLEKEDIELINTIDKKSRTTLPSKTWGLDVYA

SEQ ID NO: 5507 - protein, 392 aa, Mascagnia rigida
DLEPVNPADVPVTAAGALKSYKLAAKAISRLQSLPSGNISLLCDVLVREVRDLTGYDRVMVYKFHEDEHGEVVSECRRSDLESYLGLHYPATDIPQASRFLFMKNKVRMICDCLAPPVKVIQDERLPQPLSLCGSTLRSPHGCHAQYMTNMGTIASLVMSVTINEDDDMMDGDQPQMARKLWGLVVCHHTSPRFVPFPLRYACEFLIQVFGVQINKEVELAAQVREKHILQIQTMLCDMLLRDAPVAIITQSPNVMDLVKCDGAALYFKNRTWLLGVTPTEEQIRDIAEWLLEYHSGNTGLSTDSLMEAGYPGASALGDAVCGMASVSITSRDFLLWFRSHTAKEIKWGGAKHDPEDKDDGRKMHPRSSFKAFLEVVKWRSKPWEDIEMDAI

SEQ ID NO: 5508 - protein, 366 aa, Pseudomonas putida KT2440
MSALFEPFELKSHCLRNRIAVPPMCQYMANEGLVNEWHHIHYASIARGGAGLVIVEATAVSPEGRITPSCAGLWSDKQGEAFIPIAQAIKAAGSVAGIQLAHAGRKASANRPWEGNGHIAEDDHRGWQTIAPSAIAFGAHLSKVPRAMSLSDIAQVREEFVMAARRALSAGFEWLELHFAHGYLGQSFLSAHSNRRSDGYGGNVENRRRFLIETMSAVREVWPEHLPLTVRLGVIEYDNQDEQTLLEAIALIRQLKNAGADLVNVSTGFNIPNTDTPWAPAFLAPIAERIRHEAGIPVAAAWGIESPALADRLVRDGQADLVMVGRAHLADPHWPYAAARTLGVERPAWVLPPPYAHWLERYTPVE

SEQ ID NO: 5509 - protein, 250 aa, Prunus andersonii
LKSEADVGNAIAEAIQSGLVKREELFITSKASNHGHVVEACKNSLKKLQLDYLDLYLVHYPLATKHSGVGTTASLLDENKVLDIDVTVSLETTWHDMEKTVDLGLVRSIGLSNYELFLTRDCLSYAKIKPQVSQFETHPYFQRESLVRFCKKHGVVPMAHTPLGGATANVNAFGSISPLEDPVLIGLAKKYQKSVAQIALRWNIERGTPVIPKSSKVERLKENLEVLNFKLEKEDIELINTIDKKSRTTL

SEQ ID NO: 5510 - protein, 392 aa, Philgamia glabrifolia
DLEPVNPADVPVTAAGALKSYKLAAKAISRLQSLPSGNISVLCDVLVKEVRDLTGYDRVMVYKFHEDEHGEVVSECRRSDLESYLGLHYPATDIPQASRFLFMKNKVRMICDCLAPPVKVIQDERLPQPLSLCGSTLRSPHGCHSQYMTNMGTIASLVMSVTINEDDDTMDGDQQQMTRKLWGLVVCHHTSPRFVPFPLRYACEFLIQVFGVQINKEVELAAQVREKHILQIQTMLCDMLLRDAPVAIITQSPNVMDLVESDGTALYFKNKTWLLGVTPTEEQIRDIAEWLLQYHSGNTGLSTDSLMEAGYPGASALGDSVCGMAAVSITSRDFLFWFRSHTAKEIKWGGAKHDPDDKDDLRKMHPRSSFKAFLEVVKWRSMPWEDIEMDAI

SEQ ID NO: 5511 - protein, 392 aa, Sphedamnocarpus sp. Davis 39-01
DLEPVNPADVPVTAAGALKSYKLAAKAISRLQSLPSGNISVLCDVLVKEVRDLTGYDRVMVYKFHEDEHGEVVSECRRSDLESYLGLHYPATDIPQASRFLFMKNKVRMICDCLAPPVKVIQDERLPQPLSLCGSTLRSPHGCHSQYMTNMGTIASLVMSVTINEDDDTMDGDQQQMARKLWGLVVCHHTSPRFVPFPLRYACEFLIQVFGVQINKEVELAAQVREKHILQIQTMLCDMLLRDAPVAIITQSPNVMDLVKSDGTALYFKNKTWLLGVTPTEEQIRDIAEWLLQYHSGNTGLSTDSLMEAGYPGASALGDSVCGMAAVSITSRDFLFWFRSHTAKEIKWGGAKHDPDDKDDLRKMHPRSSFKAFLEVVKWRSMPWEDIEMDAI

SEQ ID NO: 5512 - protein, 275 aa, Escherichia coli O157:H7
MANPTVIKLQDGNVMPQLGLGVWQASNEEVITAIQKALEVGYRSFDTAAAYKNEEGVGKALKNASVNREELFITTKLWNDDHNRPREALLDSLKKLQLDYIDLYLMHWPVPAIDHYVEAWKGMIELQKEGLIKSIGVCNFQIHHLQRLIDETGVTPVINQIELHPLMQQRQLHAWNATHKIQTESWSPLAQGGKGVFDQKVIRDLADKYGKTPAQIVIRWHLDSGLVVIPKSVTPSRIAENFDVWDFRLDKDELGEIAKLDQGKRLGPDPDQFGG

SEQ ID NO: 5513 - protein, 392 aa, Tristellateia sp. Davis 19-01
DLEPVNPADVPVTAAGALKSYKLAAKAISRLQSLPSGNISLLCDVLVKEVRDLTGYDRVMVYKFHEDEHGEVVSECRRSDLESYLGLHYPATDIPQASRFLFMKNKVRMICDCLAPPVKVIQDGRLPQPLSLCGSTLRSPHGCHAQYMANMGTIASLVMSVTINEDDDTMDGDQQQMARKLWGLVVCHHTSPRFVPFPLRYACEFLIQVFGVQINKEIELAAQVREKHILRIQTMLCDMLLRDAPVGIITQSPNVMDLVKCDGAALFYKNKFWLLGITPTEAQIRDIAEWLLEYHSGNTGLSTDSLMEAGYPGASVLGDAVCGMASVSITSRDFLFWFRSHTAKEIKWGGAKHDPDDKDDGRKMHPRSSFKAFLEVVKWRSLPWEDMEMDAI

SEQ ID NO: 5514 - protein, 509 aa, Arabidopsis thaliana
MSGSVSGCGSGGCSIVWFRRDLRVEDNPALAAAVRAGPVIALFVWAPEEEGHYHPGRVSRWWLKNSLAQLDSSLRSLGTCLITKRSTDSVASLLDVVKSTGASQIFFNHLYDPLSLVRDHRAKDVLTAQGIAVRSFNADLLYEPWEVTDELGRPFSMFAAFWERCLSMPYDPESPLLPPKKIISGDVSKCVADPLVFEDDSEKGSNALLARAWSPGWSNGDKALTTFINGPLLEYSKNRRKADSATTSFLSPHLHFGEVSVRKVFHLVRIKQVAWANEGNEAGEESVNLFLKSIGLREYSRYISFNHPYSHERPLLGHLKFFPWAVDENYFKAWRQGRTGYPLVDAGMRELWATGWLHDRIRVVVSSFFVKVLQLPWRWGMKYFWDTLLDADLESDALGWQYITGTLPDSREFDRIDNPQFEGYKFDPNGEYVRRWLPELSRLPTDWIHHPWNAPESVLQAAGIELGSNYPLPIVGLDEAKARLHEALSQMWQLEAASRAAIENGSEEG

SEQ ID NO: 5515 - protein, 392 aa, Tristellateia sp. Davis 29-01
DLEPVNPADVPVTAAGALKSYKLAAKAISRLQSLPSGNISLLCDVLVKEVRDLTGYDRVMVYKFHEDEHGEVVSECRRSDLESYLGLHYPATDIPQASRFLFMKNKVRMICDCLSPPVKVIQDERLPQPLSLCGSTLRSPHGCHAQYMANMGTIASLVMSVTINEDDDTMDGDQQQMARKLWGLVVCHHTSPRFIPFPLRYACEFLLQVFGVQINKEIELAAQVREKHILRIQTMLCDMLLRDAPVGIITQSPNVMDLVKCDGAALFYKNKFWLLGITPTEAQIRDIAEWLLEYHSGNTGLSTDSLMEAGYPGASVLGDAVCGMASVSITSRDFLFWFRSHTAKEIKWGGAKHDPDDKDDGRKMHPRSSFKAFLEVVKWRSLPWEDVEMDAQ

SEQ ID NO: 5516 - protein, 131 aa, Zea mays
  misc_feature (77)..(77): Xaa can be any naturally occurring amino acid
LYRRIRSDIDEHEGGLEAFSRSYEKFGFNRSAEGITYREWAPGAFSAALVGDFNNWDPNADRMSKNEFGVWEIFLPXNADGTSPIPHGSRVKVRMDTPSGIKDSIPAWIKYSVQAPGEIPYDGIYYDPPEE

SEQ ID NO: 5517 - protein, 166 aa, Glycine max
  misc_feature (31)..(31): Xaa can be any naturally occurring amino acid
  misc_feature (70)..(70): Xaa can be any naturally occurring amino acid
  misc_feature (100)..(100): Xaa can be any naturally occurring amino acid
  misc_feature (156)..(156): Xaa can be any naturally occurring amino acid
PEGPNSSISSSIKHILLESVPEVVTIRVFVXHVILRAVMSRIVAVAPAVGLFVQLTGRIPPENRDFLIGXVASYATCPALLQLIDSTPAEETPFCSLYNXSVACLRVRGSAVSSKWLTHPDLTALAISGADSKSTAASYHIPFTDTVTPLPTKYGXLVHPLLWQDV

SEQ ID NO: 5518 - protein, 373 aa, Zea mays
  misc_feature (161)..(161): Xaa can be any naturally occurring amino acid
  misc_feature (177)..(177): Xaa can be any naturally occurring amino acid
  misc_feature (191)..(191): Xaa can be any naturally occurring amino acid
MCGILAVLGCSDWSQAKRARILACSRRLKHRGPDWSGLYQHEGNFLAQQRLAVVSPLSGDQPLFNEDRTVVVVANGEIYNHKNVRKQFTGTHNFSTGSDCEVIIPLYEKYGENFVDMLDGVFAFVLYDTRDRTYVAARDAIGVNPLYIGWGSDGSVWIASXEMKALNEDCVRFEIFXPPGHLYSSAGGGFXRWYTPHWFQEQVPRTPYQPLVLREAFEKAVIKRLMTDVPFGVLLSGGLDSSLVASVTKRHLVETEAAEKFGTELHSFVVGLEGSPDLKAAREVADYLGTIHHEFHFTVQDGIDAIEEVIYHDETYDVTTIRASTPMFLMARKIKSLGVKMVLSGEGSDELLGGYLYFHFAPNKEEFHRETCR

SEQ ID NO: 5519 - protein, 309 aa, Cryptococcus neoformans var. neoformans B-3501A
MSAPTSFKLNNGVEIPAVGLGTWQAPPGQVQAAVAHALKNGYRHLDCALIYQNEAEVGDGIKESGVPRSEIFITSKVWNTHQPNVADGLRQTLEALQTDYLDLYLIHWPVRLVPNESSGLLPVNPDGSRAVDRDWDQSETWRQMEEVYASGKVKAIGVANWSIPYLEELKKTWKIVPAVNQVELHPFLPQHKLVKYCRDLGILLEAYSPLGSTNAPLLSDPEINAIAEKYKTSPATICISYQVNRGIVVLPKSVSPKRIEDNLKTIPIEKEDMVKLDGMAAAGKAQRINTPKWGWDLGFDDWYGPVKQQ

SEQ ID NO: 5520 - protein, 389 aa, Arabidopsis thaliana
MNHNSNLVLPSHQTETQTQDETDISVWRFRGSDNAAKASSVTMRVIVYKLFDECSLDVKKPLLPLAHGDPSVYPCYRTSILVENAVVDVLRSGKGNSYGPAAGILPARQAVADYVNRDLTNKVKPNDVFITVGCNQGIEVVLQSLARPNANILLPRPSYPHYEARAVYSGLEVRKFDLLPEKEWEIDLPGIEAMADENTVAMVIINPNNPCGNVYSYDHLKKVAETAKKLGIMVITDEVYCQTIFGDKPFVPMGEFSSITPVITLGGISKGWIVPGWRIGWIALNDPRGILKSTGMVQSIQQNLDITPDATTIVQAALPEILGKANKELFAKKNSMLKQNVELVCDRLKEIPCLVCNKKPESCTYLLVPPPTSLILFHDSRSIWMILIS

SEQ ID NO: 5521 - protein, 568 aa, Oryza sativa (japonica cultivar-group)
MMAAEGIIVQSFNADLLYEPWEVVDDEGQSFTMFAPFWNRCLSMPYDPAAPLLPPKRINSGDLSMCPSDDLIFEDDSEEGSNALLARAWSPGWQNRDKALTAFLNGPLIHYSVNRKKADSASTSLLSPYLHFGELSVRKVFHLVRMKQLVWSNEGNRAAEESCTLFLRSIGLREYSRYLSFNHPCSHEKPLLAHLRFFPWVINECYFKIWRQGRTGYPLVDAGMRELWATGWLHDRIRVVVSSFFVKVLQLPWRWGMKYFWDTLLDADLESDALGWQYISGSLPDGRELDRIDNPQLEGYKFDPHGEYVRRWLPELARLPTEWIHHPWDAPASVLQAAGVELGSNYPLPIVGLDRANARLQEALSEMWQLEAASRAAMDNGMEEGLGDSSEVPPIEFPRELQMEVDREPARVTANVLTTARRREDQMVPTMTSSLNRAETEISADFMNSVDSRAEVPTRVNFEPRTEREENFRTTAGNVARTNGIHEHNNFQQPQHRMRNVLAPSVSEASSGWTGREGGVVPVWSPPAASDHSETFASDEADISSRSYLDRHPQSHRLMNWSQLSQSL

SEQ ID NO: 5522 - protein, 468 aa, Thiobacillus denitrificans ATCC 25259
MTQKSKFVLVGVAGVLAGAALTLNLSAIADKEAGAPLPIEELRAFTDVFARVKNDYVEPVEDKKLITEAINGMLTGLDPHSAYLDVEGFKDLQVGTQGEFGGLGIEVGMEEGFIKVVSPIEDTPAFKAGVKPGDLIVKLDDTPVKGMALNDAVKRMRGKPGSKIRLTVARKGVDKPIVLTLTRAIIKIRSVKSKLMESGYGYVRVTQFQEHTGELLAEALNALYKNNKAPLKGLILDLRNDPGGLLNGAVAVTAAFVKPDALVVYTEGRTPDAKMQLTARRENYLRPMQADYLKNLPQGVKQVPMVVLVNSGSASASEIVAGALQDHKRAVVMGTRTFGKGSVQTILPLGNGTAIKLTTARYFTPNGRSIQAKGIEPDIVVEDPSMPSEDDGLGIREADLAKHLANPSDKEGTSIVVPADDEAGPAEQPSRERKPLAPLEPGEIVSKNDFQVNQALNLLKGLQILQAH

SEQ ID NO: 5523 - protein, 285 aa, Saccharomyces cerevisiae
MKFLLQQIRNMHVKPIKMRWLTGGVNYSYLLSTEDRRNSWLIDPAEPLEVSPKLSAEEKKSIDAIVNTHHHYDHSGGNLALYSILCQENSGHDIKIIGGSKSSPGVTEVPDNLQQYHLGNLRVTCIRTPCHTKDSICYYIKDLETGEQCIFTGDTLFIAGCGRFFEGTGRDMDMALNQIMLRAVGETNWNKVKIYPGHEYTKGNVSFIRAKIYSDIGQNKEFDALEQYCKSNECTTGHFTLRDELGYNPFMRLDDRAVRLAVGDTAGTYPRSVVMQELRKLKNAM

SEQ ID NO: 5524 - protein, 486 aa, Burkholderia pseudomallei K96243
MSSSISIAPAVVWFRDDLRVSDHPALMRAAESGRPVIGVYVFDERAGGRPLGGAARWWLHGSLRALGAALAALGGTLALLRGDEHDTIVSFAAALGAGAVYWSRRYALAARAVDNAVQTALDAQGIAVETFNASLLFEPGDLVNADGRPYQVFSAYWRAAMRRGVPAPPLGAPRRLNGGALPAALARQCVALDALGLEPTGPDWAGGLRDAWRFGEDAAHRRLRAFVDSRLGGYAAERDRPGIASTSRLSPYVRFGNLSARQLWHAAADAYAHGAATQADLDKFLSELGWREFGWTQLHHFPDLPRRNLRHTLDGMPWRDDPAALAAWRRGATGYPFVDAGMRELWATGWMHNRVRMVCASFLVKHLLIDWRAGEAWFWDTLVDADAASNAANWQWVAGCGADAAPYFRIFNPVAQGRKFDPDGAYVRRWVPELAGLPPATIHEPWAAPGAQLAAAGVRLGETYPLPIVAHDAARRRALDAFGAIR

SEQ ID NO: 5525 - protein, 251 aa, Prunus andersonii
AHYKSEADVGNAIAEAIQRGLVKREELFITSKASNHGHVVEACKNSLKKLQLDYLDLYLVHYPLATKHSVGTTASLLDENKVLDIDVTVSLETTWHDMEKTVDLGLVRSIGLSNYELFLTRDCLSYAKIKPQVSQFETHPYFQRESLVRFCKKHGVVPMAHTPLGGATANVNAFGSISPLEDPVLIGLAKKYQKSVAQIALRWNIERGTPVIPKSSKVERLKENLEVLNFKLEKEDIELINTIDKKSRTTL

SEQ ID NO: 5526 - protein, 252 aa, Prunus mexicana
AHYKSEADVGNAIAEAIQSGLVKREELFITSKASNHGHVVEACKNSLKKLQLDYLDLYLVHYPLATKHSGVGTTASLLDENKVLDIDVTVSLETTWHDMEKTVDLGLVRSIGLSNYELFLTRDCLSYAKIKPQVSQFETHPYFQRESLVRFCKKHGVVPMAHTPLGGATANVKAFGSISPLEDPVLIGLAKKYQKSVAQIALRWNLERGTPVIPKSSKVERLKENLEILNFKLEKEDIELINTIDKKSRTTL

SEQ ID NO: 5527 - protein, 214 aa, Citrus limon
IDFRPVKPYEVPMTAAGALQSYKLAAKAITRLQSLPSGSMERLCDTMIQEVFELTGYDRVMAYKFHEDDHGEVVSEITKSGLEPYLGLHYPATDIPQAVRFLFMKNKVRMIVDCRARHVKVLQDEKLPFDLTLCGSTLRAPHSCHLQYMENMNSIASLVMAVVVNDEEEEGDNTLPQKRKRLWGLVVCHNTTPRFVPFPLRYACEFLAQVFAIH

SEQ ID NO: 5528 - protein, 251 aa, Prunus fasciculata
AHYKSEADVGNAIAEAIQSGLVKREELFITSKASNHGHVVEACKNSLKKLQLDYLDLYLVHYPLATKHSGVGTTASLLDENKVLDIDVTVSLETTWHDMEKTVSLGLVRSIGLSNYELFLTRDCLSYAKIKPQVSQFETHPYFQRESLVRFCQKHGVVPMAHTPLGGATANVKAFGSISPLEDPVLIGLAKKYQKSVAQIALRWNIERGTPVIPKSSKVERLKENLEVLNFKLEKEDIELINTTDKKSRPL

SEQ ID NO: 5529 - protein, 256 aa, Rhodospirillum rubrum
MSTLDIHQIAVLSDNYIYLVRCRATGACAVIDPSLAEPVLAAAESLGWTITHILNTHHHYDHTGGNEEIKAATGCEIIGFAGDAHRLPGIDRTVVEGDRVAIGQAEARVIETPGHTLGHIAYWFAESSALFCGDTLFSAGCGRLFEGSAGQMWDSLRKLRALPAQTLVFCGHEYTQPNITFALTIDPRNEALRARALEVDALRAAGRPTVPAFLGDEARSNPFLRADSADFQEAFGMTGADPVEVFARTRLKKDHF

SEQ ID NO: 5530 - protein, 446 aa, Xanthomonas oryzae pv. oryzae KACC10331
MPDSSDGGAAYYCAMQQSRKVRHRSRFSTNASAIAVTLPSTGWRRCVLSASLESARVRHHCYGAPRSARRRAWRVITFDWLLMSKSTQSPLFSPVRLGALDLANRVVMAPLTRNRAIAGQVPSPLAAEYYGQRATAGLIVAEGTQISPLGQGYLDTPGIYTKEQIQGWRAVTDEVHRRGGKIVLQLWHVGRVSHTSVLPPGEVPVAPSAIRAEGKTFTKNGFEDVSEPRALALDEIPGLIEDYRIAARNAIDAGFDGVEVHAANGYLLDQFLRDSSNQRTDAYGGDIENRTRLLAEVVQAIADEIAAERTGVRLSPVTPVYGAHDSNPQPLFERAVERLNLIGGLAFVHVIEGATGGPRDNIAFDYAALRAKFDGAWIANNGYDRGMSEHAISSDYADAIAYGRPFIANPDLVRRLRENAPLAELDQATMYGGGAKGYTDYPALPE

SEQ ID NO: 5531 - protein, 252 aa, Prunus fasciculata
AHYKSEADVGNAIAEAIQSGLVKREELFITSKASNHGHVVEACKNSLKKLQLDYLDLYLVHYPLATKHSGVGTTASLLDENKVLDIDVTVSLETTWHDMEKTVSLGLVRSIGLSNYELFLTRDCLSYAKIKPQVSQFETHPYFQRESLVRFCQKHGVVPMAHTPLGGATANVKAFGSISPLEDPVLIGLAKKYQKSVAQIALRWNIERGTPVIPKSSKVERLKENLEVLNFKLEKEDIELINTIDKKSRTTL

SEQ ID NO: 5532 - protein, 392 aa, Verrucularia glaucophylla
DLEPVNPADVPVTAAGALKSYKLAARAISRLQSLPSGNISLLCDVLVKEVRDLTGYDRVMVYKFHEDEHGEVVSECCRPDLDAYLGLHYPATDIPQASRFLFMKNKVRMICDCLAPPVKVIQDQRLPQPLSLCGSTLRSPHGCHAQYMANMGTIASLVMSVTINEDDNIVDDNQLRMERKLWGLVVCHHTGPRFVPFPLRYACEFLIQVFGVQINKEVELAAQVTEKHILRTQTLLCDMLLRDAPVAIITQSPNVMDLVKCDGAALYYRKKFWLLGVTPTEAQIRDIAEWLLEYHSGNTGLSTDSLMEAGYPGASVLGDAVCGMASVKISSRDFLFWFRSHTAKEIKWSGAKHDPGDKDDIRKMHPRSSFKAFLEVVKWRSLPWEDMEMDAI

SEQ ID NO: 5533 - protein, 252 aa, Prunus subcordata
AHYKSEADVGNAIAEAIHSGLVKREELFITSKASNHGHVVEACKSSLKKLQLDYLDLYLVHYPLATKHSGVGTTASLLDENKVLDIDVTVSLETTWHDMEKTVDLGLVRSIGLSNYELFLTRDCLSYAKIKPQVSQFETHPYFQRESLVRFCKKHGVVPMAHTPLGGATANVKAFGSISPLEDPVLIGLAKKYQKSVAQIALRWNIERGTPVIPKSSKVERLKENLEILNFKLEKEDIELINTIDKKSRTTL

SEQ ID NO: 5534 - protein, 556 aa, Emericella nidulans
MLEDPSYAEIVRWGDDGDSFVVLECEKFTKTILPKHFKHSNFASFVRQLNKYDFHKVRQNNEENGQSPYGQNAWEFKHPEFRANSKESLDNIRRKAPAPRKQAQAHDDSVPTQQIDLLNQQIVAQQQQIQHISDRYAQMSVDHQLMLQEVLRVQKTVVNHENVIHQLVNYLVSIDARQKRDNKAGSFQAQVGASPSQVTPMDDGVSTPLQQASKLLSDMNAEVQFNLVPVESMGEPPKTGVVSTPTMETAPRRMEPVVYPVGATNGIDPMYGEHVNNVPYTVPPKQDMDDRRQFPDNRKKSNHVDPGWMRSPRILLVEDDATCRQIGGKFLYSFSCEIDTALDGLEAVNKVQDGSKYDLILMDIIMPNLDGVSACHLIRQFDRTPIIAMTSNIRSDDIQALLPAWYAASVICSRMDDVLPKPFTRKSLLEMLEKHLVHLKTVPQGMEGHQATTPVTIAGQSSAAQSVTIKEDTSSPSQSPAAAMTAWQSPNQFQPMAAVPANLQQVQGQYVPANPATTAYAMDQEWYAISSTAYGSDGRCWARSKCDRSHVGTSLN

SEQ ID NO: 5535 - protein, 131 aa, Zea mays
  misc_feature (89)..(89): Xaa can be any naturally occurring amino acid
LYRRIRSDIDEHEGGLEAFSRSYEKFGFNRSAEGITYREWAPGAFSAALVGDFNNWDPNADRMSKNEFGVWEIFLPNNADGTSPIPHGXRVKVRMDTPSGIKDSIPAWIKYSVQAPGEIPYDGIYYDPPEE

SEQ ID NO: 5536 - protein, 428 aa, Clostridium perfringens str. 13
MSRNKDEKNKYNNIIKNLKKKKGFRALAMGVALTLIIGVSVYAGNRLTAFGILPITSVSAVQSSLEKVNDTENFKKVLEVREMLYRWYDGEIDDSKLAEGAIKGMVSSLGDQYTYYMNEKEFSDFKEKSQGNYMGIGIQVAVKDGKIVVISPIQGGPAEKAGIKTGDIILKVNGEPVSGNELDKAVSMMKGTTKENIKLTLYREGKGEFDVDVMRDVIKTFNVKSEMIDGDIGYIEVLAFDEGTAKDFETQLKALEEKGMKGLILDLRGNPGGFMKECVDLVSNFVPKDKVIVSTIDKYGNKEESVSKGGIAQGMPLVVLIDGGTASASEIVAGAIRDYDLGTLVGTTSFGKGIVQVVLDKIGQEKDGTALKVTISKYYTPNGENIHKKGIGPDVTIEYPKELKEKTYSRSTDPQFEKALEIIQEKIK

SEQ ID NO: 5537 - protein, 547 aa, Xylella fastidiosa Temecula1
MAAKEIIFSEKARSRMVHGVNLLANAVKATLGPKGRHVVLDKSFGSPIITKDGVSVAKEIELADKFENMGAQMLKEVASKTNDHAGDGTTTATVLAQALIREGCKAVAAGMNPMDLKRGIDKAVIAAVTELKKISKPTSDDKAIAQVATISANSDESIGNIIAEAMKKVGKEGVITIEEGTTLENELDVVEGMQFDRGYSSPYFINNQQSQIVELDNPYILLHDKKISSVRDLLTVLDAVAKESKPLLIVAEEVEGEALATLVVNNIRGIIKVCAVKAPGFGDRRKAMLEDMAVLTGGTVISEEVGLSLEKATTSHLGKAKKVRVSKENTTIIDGMGDNDAINGRVKQIKTQIEETTSDYDREKLQERVAKLAGGVAVIKVGAATEVEMKEKKARVDDALLATRAAVEEGVIPGGGVALIRAITAISNLKGANEDQTHGIQIALRAMEAPLREIVANAGEEPSVILNKVKEGKDNFGYNAATGEFGDMVNLGILDPTKVTRSALQNAASIAGLMITTEAMVAEAPKKDEPTPPAAGGGMGGMGGMDF

SEQ ID NO: 5538 - protein, 546 aa, Burkholderia sp. 383
MAAKEIIFSDVARAKLTEGVNILANAVKVTLGPKGRNVVLERSFGAPVVTKDGVSVAKEIELADKLQNIGAQLVKEVASRTSDAAGDGTTTATVLAQAIVREGQKYVAAGLNPLDLKRGIDKAVAAAVDELKKISRPTTTSKEIAQVATISANGEESIGQRIAEAIDRVGKEGVITVEDGKSLADELDVVEGLQFDRGYLSPYFINNPDKQIAEIESPYILLHDKKISNIRDLLPVLEQVAKSGRPLLIIAEDVEGEALATLVVNNIRGILKTVAVKAPGFGDRRKALLEDIAILTGGQVIAEETGLTLEKATLAELGQAKRIEVGKENTTVIDGAGDAKNIEARVKQIRVQIDEATSDYDREKLQERVAKLAGGVAVIKVGGATEIEVKEKKDRVDDALHATRAAVEEGIVPGGGVALIRVRQAIRELQGVNADQNAGIKIVLRALEEPLRQIVTNAGEEASVVVAKVAEGSGNFGYNAQTGVYGDLVESGVLDPTKVTRTALQNAASVAGLLLTTDATVFEAPKDAAPTAAPGGPGAGGPGFDF

SEQ ID NO: 5539 - protein, 131 aa, Zea mays
  misc_feature (9)..(9): Xaa can be any naturally occurring amino acid
LYRRIRSDXDEHEGGLEAFSRSYEKFGFNRSAEGITYREWAPGAFSAALVGDFNNWDPNADRMSKNEFGVWEIFLPNNADGTSPIPHGSRVKVRMDTPSGIKDSIPAWIKYSVQAPGEIPYDGIYYDPPEE

SEQ ID NO: 5540 - protein, 563 aa, Xylella fastidiosa Ann-1
MCSIFGIFNLQPSDNLQILRHQALECSQRQRHRGPDWSGVYVDVGAILVHERLAIVDPAGGAQPLFSEDGTLALAVNGEIYNHAVLKGTLQQPYAFQTHSDCEVINALYREETPTSFLNRLNGIFAFALWDKTTGRGLIARDPMGVVPLYWGHDQDGRLRVASEMKALVEHCPDVAQFPPGHWYDTTTGTLVKYYERPWKNYSAVEGVQVSLQELREAFERAVHRQLMTDVPYGVLLSGGLDSSLVAAVAARYARHRIETNDQSEAWWPRLHSFAIGLKDSPDLSAANVAAEALNTVHHRFEYTFQEGLDVLPEVIRHIETYDVTTIRASTPMFLLARRIKAMGVKMVLSGEGSDEIFGGYLYFHKAPNAREFHEELVRKLNALYYYDCLRANKAMMAWGVEPRVPFLDREFLDVAMRMDAQHKMVDKTSNGPQRMEKGILRAAFDGYLPPSILWRQKEQFSDGVGYGWIDGLKAHAETQVSDHALATAETRFQVNPPQTKEAYYYRSIFERFFPSPAAAETVPGGKSIACSSPAAIAWDASFATMADPSGRAVSGVHQQALL

SEQ ID NO: 5541 - protein, 254 aa, Legionella pneumophila subsp. pneumophila str. Philadelphia 1
MTILPISAFSDNYIWTFIDKIAGVLDCVDPGEAAPIIRFAQSNQLTLRTILLTHHHYDHIGGVDSLIKQWPSCKVYGPIDERINNVTHPIKQGQSVQVGSLHFHILFNPGHTSTHISYYEPQQGWLFCGDTLFSAGCGRVFDGTIEELHESLLLFKKLPRNTKVFCAHEYTFQNLKFAHTVEPCNSSVINYMQQILKQPSSCTLPSNIDLELSINPFLRTDKEQVKQYALSHGANSSDSLDVFKVLRNQKNSFK

SEQ ID NO: 5542 - protein, 122 aa, Zea mays
DEHEGGLEAFSRSYEKFGFNRSAEGITYREWAPGAFSAALVGDFNNWDPNADRMSKNEFGVWEIFLPNNADGTSPIPHGSRVKVRMDTPSGIKDSIPAWIKYSVQAPGEIPYDGIYYDPPEE

SEQ ID NO: 5543 - protein, 565 aa, Bacteroides thetaiotaomicron VPI-5482
MKKLLNRRIALVLVAVIATVAFFSFKSGDDRNFQIAKNLDTFNAIVKELDMFYVDTIDPNKTIREGIDNMLFSLDPYTEYYPEEDQSELEQMVKGSFGGIGSLITYNTKLKRSMIAEPFEGTPAAKAGLKAGDILMEIDGKDLLGKNNSEVSQMLRGQAGTSFKLKVERPNEKGGQTPMEFTIVRESIQTPAIPYATVMDNKVGYISLSTFSGNPSKDFKKALLDLKKQGATSLVIDLRNNGGGLLDEAVEIANYFLPRGKVIVTTKGKTKQASNTYKTLREPLDLDIPIAVLVNSGTASASEILSGSLQDLDRAVIVGNRTFGKGLVQVPRSLPYGGMMKVTTSKYYIPSGRCVQAIDYKHRNEDGSVGTIPDSLTNVFYTAAGREVRDGGGVMPDITVKQEKLPNILFYLVRDNLIFDYATQYCLKHPTVAAPEKFVVTDADYNDFKELVKKADFKYDQQSEKILKTLKEAAEFEGYMTDAAEEFKALEKKLNHNLDRDLDYFSKDIKRMIANEIIKRYYFQRGGIIEQLKDDDDLQEAIKVLNDPAKYKEMLSAPITKAEKK

SEQ ID NO: 5544 - protein, 374 aa, Arabidopsis thaliana
MEMVNAEAKQSVPLLTPYKMGRFNLSHRVVLAPLTRQKSYGSVPQPHAILYYSQRTSPGGFLIAEATGVSDTAQGYPDTPGIWTKEHVEAWKPIVDAVHAKGGIFFCQIWHVGRVSNRGFQPRRQAPISCTGKPIMPQMRANGIDEARFTPPRRLSIEEIPGIVNDFRLAARNTMEAGFDGVEIHGAHGYLIDQFMKDKVNDRTDEYGGSLQNRCKFALEVVDAVAKEIGPDRVGIRLSPFADYMESGDTNPEALGLYMVESLNKYGILYCHMIEPRMKTVGEIAACSHTLMPMREAFKGTFISAGGFTREDGNEAVAKGRTDLVAYGRWFLANPDLPKRFQLDAPLNKYNRSTFYTSDPVVGYTDYPSLESTA

SEQ ID NO: 5545 - protein, 512 aa, Xanthomonas oryzae pv. oryzae KACC10331
MSECFMRVAVLSVALSLALFASPGWAQKAGPAAAQATADDPEANEAAVSKVPLDEIRRFVAVYNAVKQAYVDPVEDKKLMHAAVRGLLSDLDPHSTYFDKEDAEAFDEQATGAYDGIGVELLQQQDNTLKVIAPIDDTPAARAGIRAGDVIVAIDGKPIDASKAMEPLRGASGSKVVLTIVRDKTPKPFDVTLQRETIRVASVRSKMLEPGYGYIRISTFQADTGADFQKNLKQLQAGGKLRGLVLDLRSNPGGLLTSAVQVADDLLDKGNIVSTRGRISISDAKFDATPGDLVNGAPVVVLVDAGSASASEVLAGALRDNKRARIIGSRTFGKGSVQTVLPLDNGDSVKLTTARYYTPSGKSIQASGIVPDVMLTPEPQPGDADVPASLTDYNEATLPGHLRGDDEGEEGYSAGDVLPGDGPISEALAELKQPGSAAKAQAARKAKAQAAQKAKAAKTGAEPKPAAARPATTDKPKSAEPAGKAKPATAPTAPTEPAQPTPPADKPAEPVN

SEQ ID NO: 5546 - protein, 593 aa, Schizosaccharomyces pombe
MVKRHKNTIGVWRLGKTLGTGSTSCVRLAKHAKTGDLAAIKIIPIRYASIGMEILMMRLLRHPNILRLYDVWTDHQHMYLALEYVPDGELFHYIRKHGPLSEREAAHYLSQILDAVAHCHRFRFRHRDLKLENILIKVNEQQIKIADFGMATVEPNDSCLENYCGSLHYLAPEIVSHKPYRGAPADVWSCGVILYSLLSNKLPFGGQNTDVIYNKIRHGAYDLPSSISSAAQDLLHRMLDVNPSTRITIPEFFSHPFLMGCTSLSSMDSTTPPTPSLSIDEIDPLVVDCMCVLWKKSSSKKVVRRLQQRDDNDEKYVYKVLSEILRDDMLKKQRFDENKYLSLYDLIHDNNLFTKASISTTSLVKSNVSTNSRKSSNFEDELARRVSSPLSALNQMSQSPIPIRVSSDKDYDSYACHEVVSNPSTLDDDYNYMFVCPPEEYTYSTDNVRTDSLDLQSLPTPTLEQLESVPFNRYGYVRIFPSTTLSSTASGYYTPDSLSTPEPSIDGLTNLDDVQVGGFVQGSGNQNRRPISFPVISNMQPNITNVRSASAPLCSSPVPSRRYSQYATNIRYTPRKVSSGSVLRKISSFFRKD

SEQ ID NO: 5547 - protein, 252 aa, Prunus pumila var. besseyi
AHYKSEADVGNAIAEAIQSGLVKREELFITSKASNHGHVVEACKNSLKKLQLDYLDLYLVHYPLATKHSGVGTTASLLGENKVLDIDVTVSLETTWHDMEKTVDLGLVRSIGLSNYELFLTRDCLSYAKIKPQVSQFETHPYFQRESLVRFCKKHGVVPMAHTPLGGATANVNAFGSISPLEDPVLIGLAKKYQKSVAQIALRWNIERGTPVIPKSSKVERLKGNLEILNFKLEKEDIELINSIDKKSRTTL

SEQ ID NO: 5548 - protein, 252 aa, Prunus salicina
AHYKSEADVGNAIAEAIQSGLVKREELFITSKASNHGHVVEACKNSLKKLQLDYLDLYLVHYPLATKHSGVGTTASLLDENKVLDIDVTVSLETTWHDMEKTVDLGLVRSIGLSNYELFLTRDCLSYAKIKPQVSQFETHPYFQRESLVRFCKKHGVIPMAHTPLGGATANVKAFGSISPLEDPVLIGLAKKYQKSVAQIALRWNLERGTPVIPKSSKVERLKENLEILNFKLEKEDIELINTIDKKSRTTL

SEQ ID NO: 5549 - protein, 148 aa, Arabidopsis thaliana
MASLEMNDLKKIGLGLTGFGVFFTFLGVIFVFDKGLIAMGNVGLFIPSLILFLAGVTLTIGINPAIQFFTKRQNFKGTISFGLGFLLVVFGWPIFGLLLESYGFLVLFSGFWPTLAVFLQRIPLLGWLLQQPYIRSLLDRYRGRRVPV

SEQ ID NO: 5550 - protein, 252 aa, Prunus armeniaca
AHYKSEADVGNAIAEAIQSGLVKREELFITSKASNHGHVVEACKNSLKKLQLDYLDLYLVHYPLATKHSGVGTTASLLDENKVLDIDVTVSLETTWHDMEKTVDLGLVRSIGLSNYELFLTRDCLSYAKIKPQVSQFETHPYFQRESLVRFCKKHGVVPMAHTPLGGATANVKAFGSISPLEDPVLIGLAKKYKRSVAQIALRWNLERGTPVIPKSSKVERLKENLEILNFKLEKEDIELINTIDKKSRTTL

SEQ ID NO: 5551 - protein, 728 aa, Escherichia coli
  misc_feature (490)..(490): Xaa can be any naturally occurring amino acid
MSDRIDRDVINALIAGHFADPFSVLGMHKTTAGLEVRALLPDATDVWVIEPKTGRKLAKLECLDSRGFFSGVIPRRKNFFRYQLAVVWHGQQNLIDDPYRFGPLIQEMDAWLLSEGTHLRPYETLGAHADTMDGVTGTRFSVWAPNARRVSVVGQFNYWDGRRHPMRLRKESGIWELFIPGAHNGQLYKYEMIDANGNLRLKSDPYAFEAQMRPETASLICGLPEKVVQTEERKKANQFDAPISIYEVHLGSWRRHTDNNFWLSYRELADQLVPYAKWMGFTHLELLPINEHPFDGSWGYQPTGLYAPTRRFGTRDDFRYFIDAAHAAGLNVILDWVPGHFPTDDFALAEFDGTNLYEHSDPREGYHQDWNTLIYNYGRREVSNFLVGNALYWIERFGIDALRVDAVASMIYRDYSRKEGEWIPNEFGGRENLEAIEFLRNTNRILGEQVSGAVTMAEESTDFPGVSRPQDMGGLGFWYKWNLGWMHDTXDYMKLDPVYRQYHHDKLTFGILYNYTENFVLPLSHDEVVHGKKSILDRMPGDAWQKFANLRAYYGWMWAFPGKKLLFMGNEFAQGREWNHDASLDWHLLEGGDNWHHGVQRLVRDLNLTYRHHKAMHELDFDPYGFEWLVVDDKERSVLIFVRRDKEGNEIIVASNFTPVPRHDYRFGINQPGKWREILNTDSMHYHGSNAGNGGTVHSDEIASHGRQHSLSLTLPPLATIWLVREAE

SEQ ID NO: 5552 - protein, 274 aa, Clostridium acetobutylicum ATCC 824
MLDINSFTVLNNGVKMPWLGFGTYKIEYEESSVDYIKTALKVGYRHLDTAAVYGNEPIVGKAVKESGIPRNEIFITSKVWNNKHGYDKTLKAFEDTLKRLDTDYLDLYLIHWPKTLNKETWKALEKLYKDGRVRAIGVSNFKVHHLEEILEDCEIVPMVNQVEYHPQFPQTEVHEFCKKNKIQLESWGPLMQGKIFDIPLMKELSLKYGKTISQIALRWDLQMGVVTIPKSINENRIKENCDLYDFEISKEDMKKIESLNTGVRIGHDPDTITF

SEQ ID NO: 5553 - protein, 167 aa, Pyrococcus furiosus DSM 3638
MVRRIRRWDIWDPFDLIREIQEEIDAMFDEFFSRPRLWTYRRWSEPAMYEERVGEVWREPFVDIFDNGDEFVITAELPGVRKEDIKVRVTEDTVYIEATVKREKELEREGAVRIERYFTGYRRAIRLPEEVIPEKAKAKYNNGVLEIRVPKKHPTKKESEGFEVKVE

SEQ ID NO: 5554 - protein, 134 aa, Zea mays subsp. parviglumis
MRKHRIVSLVSALLILLALAVSSTRNAQEDSMANNTGTLVGGIQDVPGSENDLHLQELARFAVDEHNKKANALLGFEKLVKAKTQVVAGTMYYLTIEVKDGEVKKLYEAKVWEKPWENFKELQEFKPVEECASA

SEQ ID NO: 5555 - protein, 364 aa, Methanosarcina barkeri str. fusaro
MAEDTDLFSQYRMGDLTLPNRIVMAPMTRNRAGDDDIPVPLTVTYYVQRASAGIIITEGSQVSPQGVGYMHTPGIYSAAQVAGWKKVTDAVHREGGRIFIQLWHVGRVSHPDLLGGALPVAPSALPVEGFTHASGGKKPIPVPRALKTEEVPDIVRQFRQAAENAKTAGFDGVEIHGANTYLLDQFLRSGSNKRTDKYGGSLENRTRLPLEVTKAVIEVWGGDRVGYRISPHNNAHSMSDENPLETFSYFARELNKTGLGYLHLIEPIGGRMGFAPPEARLGPILRRIFERTFILNGGYGLHSGNEAIANGEADLIAFGVPFLANPDLPERFRQNAPLNEPDESTFYVGGAKGYTDYPALVVHR

SEQ ID NO: 5556 - protein, 131 aa, Zea mays
LYRRIRSDIDEHEGGLEAFSRSYEKFGFNRSAEGITYREWAPGAFSAALVGDFNNWDPNADRMSKNEFGVWEIFLPNNADGTSPIPHGSRVKVRMDTPSGIKDSIPAWIKYSVQAPGEIPYDGIYYDPPEE

SEQ ID NO: 5557 - protein, 509 aa, Solanum tuberosum
MSIVTCEKAAASLSSSSNMNNDTNGAFCYTPQHQLVTPQYQNPPQQIKKKRNQPGNPDPEAEVIALSPKTLVAANRFFCEICNKGFQRDQNLQLHRRGHNLPWKLKKRENKEVVRKKVYICPESSCVHHDPSRALGDLTGIKKHFSRKHGEKKWKCEKCSKRYAVQSDCKAHFKTCGTREYKCECGTIFSRRDSFITHRAFCETLAMESARSVINGRNPTIFSPQLNLQFQQPHFFNSHEQIQATTFPMKKEQQSSDFRHIEIPPWLITTNSQPFQLGAINHGPSPRSNFSSSSIFPATTRLDQQYTQSGHKDLNLHHPNPNLRGPTLGYDSTGESGAVSPVHISATRLLQKAAQFGATISNKASAVTATAAYTGTVKIPHNTHVSVTSTDSATKQTHQKLSSREDLTSITGPANISGIMTSFSNGFDGSTMFEDAILFGGFNNLNSKKEDEEEDQQLYFNGSMNEEDHILTKDFLGLKPLSHTDDIFNIAALVNTEPHHFKNHKTWQS

SEQ ID NO: 5558 - protein, 273 aa, Panax ginseng
PYYVAPEVLLKHYGPEADVWTAGVILYILLGGVPPFWAETQQGIFDAVLKGHIDFESDPWPLISDSAKDLIRKMLCSRPSDRLTAHEVLCHPWICENGVAPDRALDPAVLSRLKQFSAMNKLKKMALRVIAESLSEEEIAGLKEMFKAMDTDNSGAITFDELKAGLRKYGSTLKDTEIRDLMDAADVDNSGTIDYGEFVAATIHLNKLEREEHLMAAFQYFDKDGSGYITVDELQQACAEHNMTDVFLEDIIREVDQDNDGRIDYGEFVAMMK

SEQ ID NO: 5559 - protein, 166 aa, Cryptococcus neoformans var. neoformans JEC21
MSTAASNPATYKFNHTMIRIKDPKVSLPFYEKVLGMKVFYESPGGDFTNYFLAFANGFDDADLNKENIRDKLFDREGVLELCHNWGTENDASFKGYASGNEEPGRGFGHICITVDNLEAACKRFDELGVKFKKRPEDGRMRHIAFIYDPDGYWVEIVARSLNASNI

SEQ ID NO: 5560 - protein, 336 aa, Caulobacter crescentus CB15
MGRSAFGSRTRMTAFVDLAARLAAEPADAALKDVVLTIAETCAQISRVVASGALSGSLGAAGSTNVQDEEQKKLDVITNDMLSDALKACGPVAGLASEELEEVEPTGRVGGYLVTFDPLDGSSNIDVNVSVGTIFSVLPAPAGHAPTEGDFLQPGRNQVAAGYAVYGPQTMLVVTLSGGVNGFTLSADGRWLLTHPDLAIKPDTAEFAINMSNQRHWAPAVRRYIDGCLQGKDGARGKNFNMRWVASMVADVHRIMMRGGVFMYPWDAREPDKPGKLRLMYEANPMSLLAERAGGKSIEGLNEILDINPAKLHQRVPVVLGSANEVEVIRAEMRAG

SEQ ID NO: 5561 - protein, 252 aa, Prunus fremontii
AHYKSEADVGNAIAEAIQSGLVKREELFITSKASNHGHVVEACKNSLKKLQLDYLDLYLVHYPLATKHSGVGTTASLLDENKVLDIDVTVSLETTWHDMEKTVDLGLVRSIGLSNYELFLTRDCLSYAKIKPQVSQFETHPYFQRESLVRFCKKHGVVPMAHTPLGGATANVNAFGSISPLEDPVLIGLAKKYQKSVAQIALRWNIERGTPVIPKSSKVERLKENLEVLNFKLEKEDIELINTIDKKSRTTL

SEQ ID NO: 5562 - protein, 297 aa, Zea mays
  misc_feature (191)..(191): Xaa can be any naturally occurring amino acid
METSAATPTRPPHQAATSPSPSPSSSLRLWRPAAQRNMRNQWSHLSAAKEQWLAAVADGRAHASALVNVHLSCRNMPTMDLGVLKDMPGIRDKANSKLALREEQYSGMLLSAYKEMVRQLSYLVEASHSMRCFSKAAPNCSITQFSDRQDNLNDSGDGGGAPVFKWFSVLEFESLAQELVQMFVSEQKLKXRLLLLEFLSIALKEGVELQTSLNWGDELYDGESNKLQSIGLQSGDAYSPPENWCAERLGSQRPGNLPLHEVLQVYLTTWHANMNINRSRIGEIFELVEEEMKIKLS

SEQ ID NO: 5563 - protein, 382 aa, Xanthomonas oryzae pv. oryzae KACC10331
MSAGGNVCAAARFIGDAKRTSPMHATIKRPGASVCRQHPYRVTITYGESRVSSTGLDPHAAAPQPTPTPPRSGLAARIGSLRRWVDSQTDEPLDEARADRIDWLRALPFIALHLACLAVFWVGASWFAVGMAVALYALRMFTLTGFYHRYFSHRAFKTSRVLQFVFAAIGATCVQRGPLWWAAHHRNHHRHTDTGRDPHSPAQHGFWWSHTGWFLTPRNFRTDWDVIPDLRRFAELRFLDRFDIVMPALLALGLYLLGDWLAVAAPALKTNGAQLLAWGFAISTVALFHATFTINSLAHRFGSQRFDTRDDSRNNWLLALLTFGEGWHNNHHFFPGSVRQGLRWWEYDVTWYGLTAMSWVGLVWDLKPMPKRLTQRAERVRQ

SEQ ID NO: 5564 - protein, 252 aa, Prunus dulcis
AHYKSEADVGNAIAEAIQSGLVKREELFITSKASNHGHVVEACKNSLKKLQLDYLDLYLVHYPLATKHSGVGTTASLLDENKVLDIDVTVSLETTWHDMEKTVSLGLVRSIGLSNYELFLTRDCLSYAKIKPQVSQFETHPYFQRESLVRFCKKHGVVPMAHTPLGGATANVKAFGSISPLEDPVLIGLAKKHQKSVAQFALRWNLERGTPVIPKSSKVERLKENLEVLNFKLEKEDIELINTIDKKFRTTL

SEQ ID NO: 5565 - protein, 252 aa, Prunus maritima
AHYTSEADVGNAIAEAIQSGLVKREELFITSKASNHGHVVEACKNSLKKLQLDYLDLYLVHYPLATKHSGVGTTASLLDENKVLDIDVTVSLETTWHDMEKTVDLGLVRSIGLSNYELFLTRDCLSYAKIKPQVSQFETHPYFQRESLVRFCKKHGVVPMAHTPLGGATANVKAFGSISPLEDPVLIGLAKKYQKSMAQIALRWNLERGTPVIPKSSKVERLKENLEILNFKLEKEDIELINTIDKKSRTTL

SEQ ID NO: 5566 - protein, 185 aa, Lycopersicon esculentum
MASESKDSPSNNPGLHATPDEATKGYFLQQTMFRIKDPKVSLEFYSKVLGMSLLKRLDFPEMKFSLYFMGYEDTASAPSDPVERTAWTFSQKSTLELTHNWGTESDPNFTGYHNGNSEPRGFGHIGVTVDDVYKACERFESLGVEFVKKPLDGKMKGIAFIKDPDGYWIEIFDTKIIKDAAGSAS

SEQ ID NO: 5567 - protein, 654 aa, Zea mays
MAGPEKTVVWFRRDLRIQDNPALAAAAKGGSVLPIFIWCPSDYGQYYPGRCSRWWLKQSLAHLGKSLELLGCPLVLIRAEDSTLAALLECVRSISATRVVYNRLYDPISLVLDNKIKNELPAHGISVQSFNGDLLYEPWDVYDENGQAFTTFNKYWEKCMNLPIEISQYLAPTRLVAAPGLANVRCCSIDDLGLESSKDVESSNALLSRAWSPGWRNAENMLEEFVSYGLPEYSEHGMKVGGSTTSLLSPYLHFGELSVRMIYQLVKMRQVKWQNEGKSEAEESVRLFLRSIGFREYSRYLCFNYPFTHERSFLGNLKHYPWLLDEGRFKSWRQGMTGYPLVDAGMRELWATGWTHNRIRVIVSSFAVKFLQIPWIWGMKYFWDVLLDADLESDILGWQYISGSLPDGHELSRLDNPEVQGQKYDPDGEYVRTWIPELARMPTEWIHSPWAAPNSILQVAGVELGFNYPKPIVELHMARECLDDAISTMWQLDTAAKLAELDGEVVDDNLNNIRNFDIPKVVLNKKLSPSTSSMEHRVLSTNGKDEKSQPTEVKALYKQIIRDDMMNDSNMDDTCSTANLKVTRKRSSSDSAFNVPSCSSSLVMESRIHHNEPSSVLYSGYFQKTADRDGTSKVEDNDSEDSGTSISRPSKKAA

SEQ ID NO: 5568 - protein, 97 aa, Glycine max
  misc_feature (24)..(24): Xaa can be any naturally occurring amino acid
  misc_feature (27)..(27): Xaa can be any naturally occurring amino acid
  misc_feature (59)..(59): Xaa can be any naturally occurring amino acid
  misc_feature (76)..(76): Xaa can be any naturally occurring amino acid
MACRKMITLCLIDCLSLFSLTKNXGLXAKVPFLDKNFIGVAMNMDPDYKMIKQEHCRIXKCVLKRPFDDEERPYLXRHGMQLMEQVSDVSGYGWMHG

SEQ ID NO: 5569 - protein, 337 aa, Methanococcus maripaludis S2
MITIDGSYLEGGGQIVRTAVSLSAITKKPVKIINIRKNRKNPGLSNQHIACVAAVSKICNAKVEGLIKGSETLVFYPGKIISKNFEIDIKTAGSISLVIQSILPISLAIDKNVEITIIGGTNVEFSPPIDYIKNITLKFLENIGINSEITILKRGFFPKGGGIVKITIKPSKINPYELIENENIEIKGIVFNQNLDENISKRIRKSASDELLNRGFCPEIKLEKINGESAGVGIFLYTNYIGSDRLGKKGLLSEAVGTTASEKLLEELNTKMAIDSHLADQIIPFMPFSDITIGVSKITNHTLTNIYVVEKFFDVKFNIEKYEEKNANGYIISTKGV

SEQ ID NO: 5570 - protein, 134 aa, Zea mays subsp. parviglumis
MRKHRIVSLVSALLILLALAVSSTRNAQEDSMANNTGTLVGGIQDVPGSENDLHLQELARFAVDEHNKKANALLGFEKLVKVKTQVVAGTMYYLTIEVKDGEVKKLYEAKVWEKPWENLKGLQEFKPVEEGASA

SEQ ID NO: 5571 - protein, 535 aa, Streptococcus salivarius
MAKDIKFSSDARAAMVRGVDTLADTVKVTLGPKGRNVVLEKAFGSPLITNDGVTIAKEIELEDHFENMGAKLVSEVASKTNDIAGDGTTTATVLTQAIVREGLKNVTAGANPIGIRRGIEAAVATAVEELKAIAQPVANKEAIAQVAAVSSRSEKVGEYISEAMERVGNDGVITIEESRGMETELEVVEGMQFDRGYLSQYMVTDNEKMVADLENPFILVTDKKISNIQDVLPLLEEVLKTSRPLLIIADDVDGEALPTLVLNKIRGTFNVVAVKAPGFGDRRKAMLEDIAVLTGATVITEDLGLELKDATMAALGQASKVTVDKDSTVIVEGAGSTEAIANRVNLIKSQLETTTSEFDREKLQERLAKLSGGVAVVKVGAATETALKEMKLRIEDALNATRAAVEEGIVAGGGTALVNVIAKVAELDLEGDDATGRNIVLRALEEPVRQIAYNAGYEGSVIIDKLKNSPVGTGFNAANGEWVDMVEAGIIDPVKVTRSALQNAASVASLILTTEAVVANKPEPEAPAAPAMDPG

SEQ ID NO: 5572 - protein, 134 aa, Zea mays subsp. parviglumis
MRKHRIVSLVFALLILLALAVSSTRNAQEDSMADNTGTLAGGIKDVPGNENDLHLQELARFAVDEHNKKANALLGFEKLVKAKTQVVAGTMYYLTIEVKDGEVKKLYEAKVWEKPWENLKGLQEFKPVEEGASA

SEQ ID NO: 5573 - protein, 652 aa, Mycobacterium bovis AF2122/97
MCGLLAFVAAPAGAAGPEGADAASAIARASHLMRHRGPDESGTWHAVDGASGGVVFGFNRLSIIDIAHSHQPLRWGPPEAPDRYVLVFNGEIYNYLELRDELRTQHGAVFATDGDGEAILAGYHHWGTEVLQRLRGMFAFALWDTVTRELFCARDPFGIKPLFIATGAGGTAVASEKKCLLDLVELVGFDTEIDHRALQHYTVLQYVPEPETLHRGVRRLESGCFARIRADQLAPVITRYFVPRFAASPITNDNDQARYDEITAVLEDSVAKHMRADVTVGAFLSGGIDSTAIAALAIRHNPRLITFTTGFEREGFSEIDVAVASAEAIGARHIAKVVSADEFVAALPEIVWYLDEPVADPALVPLFFVAREARKHVKVVLSGEGADELFGGYTIYREPLSLRPFDYLPKPLRRSMGKVSKPLPEGMRGKSLLHRGSLTLEERYYGNARSFSGAQLREVLPGFRPDWTHTDVTAPVYAESAGWDPVARMQHIDLFTWLRGDILVKADKITMANSLELRVPFLDPEVFAVASRLPAGAKITRTTTKYALRRALEPIVPAHVLHRPKLGFPVPIRHWLRAGELLEWAYATVGSSQAGHLVDIAAVYRMLDEHRCGSSDHSRRLWTMLIFMLWHAIFVEHSVVPQISEPQYPVQL

SEQ ID NO: 5574 - protein, 630 aa, Geobacter sulfurreducens PCA
MTPWCLDIGATPVTGGVHFRVWSPLADSVEVIRCARGEEASCPLSRVGEYFQGTIPGMGPGDCYWYLLDGTLRRPDPASRCQPGGVHGPSQVVAPDSFAWADGQWRGVALEELITYELHVGTFTPEGTFGAAVERLDYLQELGITALELMPVAEFPGSRNWGYDGVFPFAPHHAYGGPDGLKSLVDACHRRGLAVILDVVYNHLGPEGNYLHAFAPYFTDHYRTPWGDAVNFDGPGSDGVRHYVIGNALHWISEYHLDGLRLDAIHGIYDFSAGHILRDITRAVDSLARHLGRTVHVIAESDLNDVRTIAPPESGGHGVHTQWCDDFHHSLVTLLTGERNGYYADFGLFSHLEKAFREGFVYSGEYSRHRRRRHGSPSGDQPPRRMVVFSQNHDQIGNRALGDRPSTRLSPEQLKLAAGAVILSPYLPLIFMGEEYGETAPFPYFTSHGDPALVEAVRRGRREEFAAFGWEAEVPDPQDEATFRSALIDPELRSVGWHQQVFSFYREVIRLRRQLPSFRRPEREEIQVTGLEADRVVVVRLCRGQAELVVLFALAETSCRVRLPFRHGRYRKLLDSAEPRWGGPGALAPEALDGGDEGIGITLAPFSVVLYGRDRDDRRRNGGPMPTEEG

SEQ ID NO: 5575 - protein, 398 aa, Thermoanaerobacter tengcongensis MB4
MSKKRFYVLLAVLLIVTNVFTFFIANTVSVALPGGKVIVSREDYRLLNQYKKLFEVGKILESRYVDKVNPSTLLEGALKGMAGSLQDPYTVYMNKKEFAEFMTQTTGTYGGIGIIVAVDQEDHIVVVSPIKNTPGERAGIKSGDIILEVNGKKVSGKNLDEAVSMMRGPKGTQVTLTIMRDGKTFTKTITREIIKLETVFDYMLPDKIGYIKITLFDQSTSSDFKKALERLKKDGMKGLIIDLRDNPGGLLEECVNIADMLLPKGVIVTTKGRAESQEFYSKGTGLGMPLVVLVNKGSASASEILAGAIKDRKAGVLVGTTTFGKGLVQTVVNFGDGTGLKYTIARYYTPNGTDIQGKGIEPNYVVELPKDYTLKDTPDLKGDTQLIKAYEIIKSEIK

SEQ ID NO: 5576 - protein, 532 aa, Arabidopsis lyrata subsp. petraea
KTTLVELGRTLALEECALWMPTRTGLELQLSYTLRHQHPVEYTVPIQLPVINQVFGTSRAVKISPNSPVARLRPVSGKYMLGEVVAVRVPLLHLSNFQINDWPELSTKRYALMVLMLPSDSARQWHVHELELVEVVADQVAVALSHAAILEESMRARNLLMEQNVALDLARREAETAIRARNDFLAVMNHEMRTPMHAIIALSSLLQETELTPEQRLMVETILKSSNLLATLMNDVLDLSRLEDGSLQLELGTFNLHTLFREVLNLIKPIAVVKKLPITLNLAPDLPEFVVGDEKRLMQIILNIVGNAVKFSKQGSISVTALVTKSDTRDADFFVVPTGSHFYLRVKVKDSGAGINPQDIPKLFTKFAQTQSLATRSSGGSGLGLAISKRFVNLMEGNIWIESDGLGKGCTAIFDVKLGISERSNESKQSGIPKVPAIPRHSSFTGLKVLVMDENGVSRMVTKGLLVHLGCEVTTVSSNEECLRVVSHEHKVVFMDVCLPGVENYQIALRIHEKFTKQRHQRPLLVALTGNT

SEQ ID NO: 5577 - protein, 416 aa, Zea mays
MAAAFDAYTDKNAVFRRLKAKPENKMCFDCNAKNPTWASVTYGIFLCLDCSAAHRSLGVHITFVRSTNLDSWTPDQLKMMAFGGNNRAHAFFKQHGWTDGGKVEAKYTSRAAELYRQMLTKEVAKSATTDNALPSSPVASEASKPPSDDFPEFKLPDVPAPPAEDLNGKHEPKSPKAAPRSPKAATHPTFATSVKKPIGAKKVGGKTGGLGVRKLTTKPNESLYEQKPEEPKPAVPALAASTKKGGQALHSRFEYVENEPSADSRTGGSVSRVSGHVAPPKSSDFFQEYGMGNGFQKKSSNASKTQVEETDEARKKFSNAKAISSSQFFGTQNREEKEAQLSLQKFAGSSSISSADLFGRNDADNSNLDLSAADLINRISFQASQDLSSLKDIAGETGKKLTSLASNFISDLDRIL

SEQ ID NO: 5578 - protein, 252 aa, Prunus maritima
AHYKSEADVGNAIAEAIQSGLVKREELFITSKASNHGHVVEACKNSLKKLQLDYLDLYLVHYPLATKHSGVGTTASLLDENKVLDIGVTVSLETTWHDMEKTVDLGLVRSIGLSNYELFLTRDCLSYAKIKPQVSQFETHPYFQRESLVRFCKKHGVVPMAHTPLGGATANVKAFGSISPLEDPVLIGLAKKYQKSVAQIALRWNLERGTPVIPKSSKVERLKENLEILNFKLEKEDIELINTIDKKSRTTL

SEQ ID NO: 5579 - protein, 252 aa, Prunus maritima
AHYKSEADVGNTIAEAIQSGLVKREELFITSKASNHGHVVEACKNSLKKLQLDYLDLYLVHYPLATKHSGVGTTASLLDENKVLDIDVTVSLETTWHDMEKTVDLGLVRSIGLSNYELFLTRDCLSYAKIKPQVSQFETHPYFQRESLVRFCKKHGVVPMAHTPLGGATANVKAFGSISPLEDPVLIGLAKKYQKSVAQIALRWNLERGIPVIPKSSKVERLKENLEILNFKLEKEDIELINTIDKKSRTTL

SEQ ID NO: 5580 - protein, 99 aa, Triticum aestivum
  misc_feature (24)..(24): Xaa can be any naturally occurring amino acid
  misc_feature (69)..(69): Xaa can be any naturally occurring amino acid
  misc_feature (81)..(82): Xaa can be any naturally occurring amino acid
  misc_feature (88)..(88): Xaa can be any naturally occurring amino acid
MGSEGPSIVTVHVTGFKKFHGVAXNPTEKLVNNIKSFIEKRGLPKNLVLGSCEILETAGQGALGSLYKXLESAIADRENGXXQGQIIXVHFGVNSGASR

SEQ ID NO: 5581 - protein, 231 aa, Prunus maritima
AHYKSEADVGNAIAEAIQSGLVKREELFITSKASNHGHVVEACKNSLKKLQLDYLDLYLVHYPLATKHSGVGTTASLLDENKVLDIDVTVSLETTWHDMEKTVDLGLVRSIGLSNYELFLTRDCLSYAKIKPQVSQFETHPYFQRESLVRFCKKHGVVPMAHTPLGGATASVKAFGSISPLEDPVLIGLAKKYQKSVAQIALRWNLERGTPVIPKSSKVERLKENLEILNF

SEQ ID NO: 5582 - protein, 360 aa, Rubrivivax gelatinosus PM1
MTSLFDPIRLGDIELRNRIAMAPLTRNRAVAGRVPSPLAVEYYRQRADAGLIVTEATQISPLGQGYLDTPGIYSREQVEGWKAVTRAVHERGGKIVVQLWHVGRISHVSLLPEGEVPVAPSAITAKSKTFTRNGFEDVSAPRALALAELPGIVEQYRVAARNAIEAGFDGVEVHGANGYLLEQFLRDSTNHRTDAYGGSIENRARLLLEVMRAVTAEIGAGRTGLRLSPVTPANDAALDSDPQALFNHVAEQLAPLKLAFLHVIEGATGGPRDVAPFDYAALRARVKAPWIVNNGYDRDMAIEAVADGRADVVAFGRPFISNPDLVQRLRVGAPFAALDRDTLYGGGAKGYTDYPALQAP

SEQ ID NO: 5583 - protein, 541 aa, uncultured bacterium
MAAKQITYEMEAREAIRRGIRQLSHAVKVTLGPRGRNVILEKSFGAPTVTKDGVTVAKEVELEDTNENMGAQMVKEVASKTSKDAGDGTTTATIYAEAIFDEGLKNLAAGANAMDLKRGIDAAVDAVVDALRQMAVPVKNKEQIAQVGTCAANQDREIGNNIAQAMEKVGKDGVITVEEGKSIETTVDLVEGMQFDKGYISPHFVNKPESMEVVLDNPYVLVHEKKLASVKDLLPLLEQVAKAGKPLLVIAEDVEGEVLATLVLNKLRGIIQGCAVKAPGFGDRRKAMLEDVGTLTGGSAVFEDLGISLEKMNLSELGKAKRVIVDKETCTLIEGAGRTQDVKGRIEAIKNEIELTTSDYDREKLEERLAKLSGGVAQINVGAATEVEMKEKKARVEDALHACRAAVEEGILPGGGVAVLRCGEALDAAYKRSRGDQKTGVNLIRRALRSPIKQIAENAGLDGSIVCQKVIEGQGSFGYNALTEEYGDLVKMGVIVPLKVERIALQNAASVAGLLLTTDAIVSEIKEKDDDKKMPGGMPGM

SEQ ID NO: 5584 - protein, 494 aa, Arabidopsis thaliana
MVLTKTATNDESVCTMFGSRYVRTTLPKYEIGENSIPKDAAYQIIKDELMLDGNPRLNLASFVTTWMEPECDKLIMDSINKNYVDMDEYPVTTELQNRCVNIIARLFNAPLEESETAVGVGTVGSSEAIMLAGLAFKRKWQNKRKAEGKPYDKPNIVTGANVQVCWEKFARYFEVELKEVNLSEGYYVMDPDKAAEMVDENTICVAAILGSTLNGEFEDVKRLNDLLVKKNEETGWNTPIHVDAASGGFIAPFIYPELEWDFRLPLVKSINVSGHKYGLVYAGIGWVVWRAAEDLPEELIFHINYLGADQPTFTLNFSKGSSQIIAQYYQLIRLGFEGYKNVMENCIENMVVLKEGIEKTERFNIVSKDQGVPVVAFSLKDHSFHNEFEISEMLRRFGWIVPAYTMPADAQHITVLRVVIREDFSRTLAERLVADISKVLHELDTLPSKISKKMGIEGIAENVKEKKMEKEILMEVIVGWRKFVKERKKMNGVC

SEQ ID NO: 5585 - protein, 252 aa, Prunus takesimensis
  misc_feature (18)..(18): Xaa can be any naturally occurring amino acid
AHYKSEADVGNAIAEAIXSGLVKREELFITSKASNHGHVVEACKNSLKKLQLDYLDLYLVHYPLATKHNGVGATASLLDENKVLDIDVTVSLETTWHDMEKTVSLGLVRSIGLSNYELFLTRDCLSYAKIKPQVSQFETHPYFQRESLVRFCKKHGVIPMAHTPLGGATANVKAFGSISPLEDPVLLALAKKYQKSVAQIALRWNLERDTPVIPKSSKVERLKENLEVLNFKLEKEDIELINTIDKKSRTTL

SEQ ID NO: 5586 - protein, 492 aa, Capsicum annuum
MDLSKYRPSSAYDSPFLTTNAGGPVYNNVSSLTVGPRGPVLLEDYHLIEKLATFVRERIPERVVHARGASAKGFFEVTHDISHLTCADFLRAPGVQTPVICRFSTVVHERGSPESIRDIRGFAVKFYTREGNFDLVGNNVPVFFNRDAKSFPDTIRALKPNPKSHIQENWRILDFFSFLPESLHTFAFFYDDVCLPTDYRHMEGFGVHAYQLINKAGKAHYVKFHWKPTCGVKSMTEEEAIRVGGTNHSHATKDLYDSIAAGNYPEWKLFIQIMNPEDVDKFDFDPLDVTKTWPEDILPLMPVGRLVLNRNIDNFFAENEQLAFNPGHIVPGVYYSEDKLLQTRIFAYADTQRHRIGPNYMQLPVNAPKCAHHNNHRDGAMNFMHRDEEVDYLPSRFDPCRPAEQYPIPSCVLTGRREKCVIPKENNFKQAGERYRSWAPDRQDRYINKWVESLSDPRATHEIRSIWISYLSQADKSCGQKVASRLTVKPTM

SEQ ID NO: 5587 - protein, 188 aa, Triticum aestivum
  misc_feature (156)..(156): Xaa can be any naturally occurring amino acid
MCGILAVLGVGDVSLAKRSRIIELSRRLRHRGPDWSGIHSFEDCYLAHQRLAIVDPTSGDQPLYNEDKTVVVTVNGEIYNHEELKAKLKPHKFQTGSDCEVIAHLYEEYGEEFVDMLDGMFSFVLLDTRDKSFIAARNAIGICPLYMGWGLDGSVXFSSEMKALSDDCKRFISFPPGPLYSSKNGGPK

SEQ ID NO: 5588 - protein, 317 aa, Oryza sativa
MSKYGTIPTSSSSSSSGAAPPPLPLGGGGGASPLDFFSRAKARGATALATRRPWRELADPHALGLPPSLADAYLRVRANLAHYAMNYAIVVLAVVFLSLLWHPASLIVFLVCMVAWLVLYFLRDEPIVLFGRVVGDGAVLAALAAVTLVLLLLTGATANIVSSLLIGVLLVVLHAALHKAEENVDDEVGRCLLTQSIEALNLCVKCELDNENTDTYNELNSNVVFRRFDAICSGSECVIHAELCCHTALFIRAVSRSLGSDPAMIQGCELQRIPLVYPTFVNVMQPFPLVFMYQIGREKVKTRLDSGVENQCPVTCV

SEQ ID NO: 5589 - protein, 486 aa, Exiguobacterium sp. 255-15
MKTLPNDFLWGGALAAHQFEGGWNAGGKGPSVVDVMTAGEHGVARRITETIEEGTFYPNHEAIDFYHRYKEDIALFAEMGLKCLRTSIGWSRIFPNGDETEPNEAGLQFYDDVFDELLKHGIEPIITLSHFEMPLHLAREYGGFRNRKVAEFFERFAEVCFTRYKDKVTYWMTFNEINNKMDVENPLFLWTNSGVKVEPGENAMEVMYQTGHHELIASALVVAKGKAINPDFQIGAMISHVPIYPYSSHPEDVMLAEKSMRQRYFFPDVQARGYYPNYALKEFEREGYQIPILDGDDEILKNGTVDYIGFSYYMSTTVKHDATVNNTGNIVNGGLANGVENPYIQSSDWGWAIDPIGLRYVLNRLYDRYQLPLFIVENGFGAVDTIEDGKIHDAARIDYLKTHIEALTEAVTEDGVELMGYTPWGIIDIVSFTTGEMKKRYGMIYVDRDNEGNGSMERMKKDSFDWYKQVIATNGQDLAYDKAAQR

SEQ ID NO: 5590 - protein, 326 aa, Medicago sativa
MEQAVLDDIINRLLEVRCRPGKQVQLSETEIRQLCSTAREIFLQQPNLLELEAPIKICGDIHGQYSDLLRLFEYGGLPPQANYLFLGDYVDRGKQSLETICLLLAYKIKYPENFFLLRGNHECASINRIYGFYDECKRRFNVRIWKVFTDCFNCLPVAALIDEKILCMHGGLSPDLHNLDQIRNLQRPTDVPDTGLLCDLLWSDPSKEVQGWGMNDRGVSYTFGADKVSEFLQKHDLDLICRAHQVVEDGYEFFANRQLVTIFSAPNYCGEFDNAGAMMSVDETLMCSFQILKPADKKTKLNFGSTTTTKPGNSPAGVKSFLGTKV

SEQ ID NO: 5591 - protein, 423 aa, Xanthomonas axonopodis pv. citri str. 306
MSTAPQKPLAIRERLSEVRYEIRGELARRARELEAQGRKLIKLNIGNPGAFGFRAPEHLQRAIADDMGRTDPYTHQQGLPEAREAIATAYARRQHPDAHPDRIFVGNGVSELIDLSLRALLNPGDEVLVPSPDYPLWSAATILNDGRPVYYRCAPENGFQPDPVEIETLVSSRTRAIVLINPNNPSGASYSRELLERIVAIATKHNLLLMVDEIYDQVLYDDAAFVPVAPLAGAHPCITFSGLSKVHRACGWRVGWALLSGDQARINDLRNAMDLLGALRLCANVPGQYAIDAAVNGPDTISALCAPGGRLYETRRAVIEACAASEHLSLVAPAGALYAFPAVVGAAARNFDDHAFALDLMNEEGVLVVPGSSFNVPYRHHFRVTLMPEAGVMRDVFARIDRALARRAEAVTKVVPLKPRSVA

SEQ ID NO: 5592 - protein, 325 aa, Medicago sativa
MEQSVVDIINRLLEVRNRPGKQVQLSESEIRQLCNVSRDIFLKQPFLLQLEAPIKICGDVHGQYSDLLRLFEYGGFPPEANYLFLGDYVDRGKQSLETICLLLAYKIKYPENFFLLRGNHECASINRIYGFYDECKRRFNVRLWKTFTDCSNCLPVAALIDEKILCMHGGLSPDLHNLDQIRNLQRPTDVPDTGLLCDLLWSDPSKDVQGWGMNDRGVSYTFGADKITEFLEKHDLDLICRAHQVVEDGYEFFANRQLVTIYSAPNYCGEFDNAGAMMSVDETLMCSFQILKPADKKTKLNFGSTTTAKPENSPAGVKYLLGAKV

SEQ ID NO: 5593 - protein, 375 aa, Staphylococcus aureus subsp. aureus Mu50
MKSKYEPLFDKVELPNGVELRNRFVLAPLTHISSNDDGTISDVELPYIEKRSQDVGITINAASNVSDVGKAFPGQPSIAHDSDIEGLKRLATAMKKNGAKALVQIHHGGAQALPELIPDGDVVAPSPISLKSFGQKQEHSAREMTNEEIEQAIKDFGEATRRAIEAGFDGVEIHGANHYLIHQFVSPYYNRRNDVWANQYKFPVAVIEEVLKAKEAYGNKDFIVGYRLSPEEAESPGITMEITEELVNKISHMPIDYIHVSMMDTHATTREGKYAGQERLPLIHKWINGRMPLIGIGSIFTADEALDAVENVGVDLVAIGRELLLDYQFVEKIKDGREDEIINYFDPEREDNHHLTPNLWHQFNEGFYPLPRKDK

SEQ ID NO: 5594 - protein, 438 aa, Zea mays
MAEKENILMQRYEMGKLLGKGSFAKVYHARNVKTSESVAIKVIDKDKIKKCGLMDQIIQEISVMKLVKHPNIVQLYEVMATKTKIYFVIEYVKGGELFKKVQRGRLKEDVARTYFQQLISAVDFCHTRQVYHRDLKPENLLLDGSHNLKISDFGLSALPNCKRKDGLLHTICGTPAYVAPEVISQKGYDGAKADIWACGVILYVLLAGYLPFQDKNMMDMYKKICKAELKWPSWFSSDVRKLLRRILHPNPNRRISIEEIRTHPWFRIGLDARLFDSTTRDHVPSDMDLALNSLNSNMVECNSAAEKLTILNAFDIISLSNGFDLSGIFENSNKESKFMSTNTAMTIITKLMEVAKSLDLKVITKTGGLLNMEAAKSGIKGVMSINAEIFQITPNYHLVEIKKINGDILEYHNFMNQSMRPALEDIVWAWHGEQPDEK

SEQ ID NO: 5595 - protein, 286 aa, Synechococcus sp. WH 8102
MQAPRGPLPARQRKLKMGTTSFMVVMHVLATVALLPRFWSWQGLVAFGVLYWVTVLGVTLGLHRLVAHRSLVVPVWVERMLVIMGTLACQSGPIEWVGLHRHHHRFSDQPIDHHDAGRGLWWSHSEWMLHDIPALKELDRYAGDLQVDPFYRWLDRWFLLLQIPLGLGLYWIGEAAQVHGGGIGLVLWAIPLRLVIVYHVTWLVNSATHAFGYRNFDCPDLSRNCWWVALLSFGEGWHNNHHAHPASARHGLRWFEFDLTWQHVRLLKRLGLASRVRTARYVPGAS

SEQ ID NO: 5596 - protein, 326 aa, Medicago sativa
MERGVVDGIINRLLEVRGRPGKQVQLSEAEIKQLCLVSKDIFMNQPNLLKLEAPIKICGDIHGQYSDLLRLFEYGGFPPRSNYLFLGDYVDRGKQSLETICLLLAYKIKYPKNFFLLRGNHECASINRIYGFYDECKRRYNVKLWKMFTDCFNCLPVAALIDEKIICMHGGLSPELHDLNQIKNLRRPCEVPESGLLCDLLWSDPSSDVRGWGESERGVSYTFGADRVKEFLQKHDLDLICRAHQVVEDGYEFFANRQLVTIFSAPNYCGEFDNAGAMMTVNESLVCSFQILKPLDKKPKFSFGSTTTVKSSSPTKFKQAFFGAKE

SEQ ID NO: 5597 - protein, 248 aa, Malus x domestica
MGRGRVELKRIENKINRQVTFAKRRNGLLKKAYELSVLCDAEVALIIFSSRGKLYEFCSSFSMMKTLEKYQSCSYGSLEANLPANETQNSYQDYLMLKARVEVLQQSQRNLLGEDLSHLNTKELEHLEHQLETSLKQIRSRKTQFILDQLSDLQNREQMLVEANKALKRKLEETSVQAPEGMAWEAAGHGPNNIQQTRLPSHSEAFFHPLEGNNSSSQIGYTHMGSDNEMNVGNPGQYVNGYIPGWML

SEQ ID NO: 5598 - protein, 323 aa, Medicago sativa
MSAQGQPPQPQPAQVIDEAVLDDIIRRLTEVRLSRPGKQVQLSEAEIKQLCSASRDIFLQQPNLLELEAPIKICGDIHGQYSDLLRLFEYGGLPPQSNYLFLGDYVDRGKQSLETICLLLAYKIKYPENFFLLRGNHECASINRIYGFYDECKRRFNVRLWKAFTESFNCLPVAALIDEKILCMHGGLSPDLTNLDQIRNLPRPVPIPDTGLLRDQFWSDHGKDVKGWGMNDRGVSYTFGPDKVAEFLTRHDLDLICRAHQVVEDGYEFFADRQLVTIFSAPNYCGEFDNAGAMMSVDENLMCSFQILKPAEKKTKFVMSNKM

SEQ ID NO: 5599 - protein, 235 aa, Malus x domestica
MGRGKVELKRIENKINRQVTFAKRRNGLLKKAYELSVLCDAEVALIVFSTSGKLYEFCSGPSIAKTLERHQRCTYGELGASQSAEDEQSRYQEYLKLKTKVEALQRTQRHLLGEDLVHLGTKELQQLENQLDVSMKKIRSTKTQFMHVQISELQRKEEMLLEANTGLRRKLEEITAGHQRSWNGNHQAAQLEGFPEHLQYNNALQIGTPVVTNDEANVATSSAQNGTGFFPGWML

SEQ ID NO: 5600 - protein, 935 aa, Acinetobacter baumannii
MSNFNKTLSKRLRLNHAYGQLIALIFVPIMILTCVGAFLVLTETSRSAKQQQLHHASAILARYNQIAKDLYTLVELQPDEYDHAQHIMQSMFSEKNLKRAALIDSNGQTYLSIGYRDNRYWPNFTQNNNFFGPISYNHNNIYGVRIIDTAGKPPVWLLIEMDNQPLELARYRILIALVITGLMTLLLLLLCLNFYSRRWIAPMYEIRMQLQRLNADTLDQHIVINSSGELRLLQRDIANVVKRLHFSFLELKEHTEQTEEDLRRTLDTLEVQNITYRQARDQAISSNQAKSVFLANISHELRTPLNSIDGFIHLLLRQQNLSNEQNLYLQTIRKSSAHLLALINDVLDFSKIDAGKLELETAPFDLEEAVFDVMDMLSPLAAQKHIAMAFYYADNIPQQVIGDALRFKQILTNLISNAIKFTPDGEIIVRVRMEHDDIGQCLLHFSVQDSGIGLSGTDRKKLFESFSQGDASVTRQFGGTGLGLAISKQLVHLMHGQIGFEDNQERAPTEKGSTFWFTAQFAVDEEHEIEHPHFEHLQVVSYLAHPATASVLRYYLENYQVPHIETQSILDLFSRLKHLDQKDNTWLIVDHSGDTEALLKEIRSRYQGNLAVYGYQMTLEPNMLTEYRARPLYQPLSRSGLIQLLSDQPIFEEEQQDFNGQGLHILAVDDHLPNLIVLEALLGELNVKTTKALSGQEALNIIQERIDQKLKPFDLVFMDIQMPVMSGIDTTRAIRSLESTLDGEMQLPIIALTAHALADEKQKLLKVGMNDYVTKPIQMEQIIQILTQWTKNNFTAQNLAKDHHVVAEALDPEILNWQQSLQLAANKEDLAQDLLKMLVDSFPTELEEMQQLIELEDFPQLEHVLHRLYGATRYVGTPKLQQVTGDFEQFISTLRKERRRADDGFIEEVMRRFDELGLVIKEVESAAHQILVIPD

SEQ ID NO: 5601 - protein, 309 aa, Yarrowia lipolytica CLIB122
MTSLDFTMNNGKTIPAIGLGTWKSTTEEVAGAVECALTEGGYRHIDTAFNYRNEDAVGLGIKRAMEKGVKREDIFVTTKIWVTYHDRVEENLDLSLERLGLDYVDMLLIHWPVPLNPNGNDPVYPLREDGSRDIDESGSQPKTWKQMEAVLKTGKTKSIGVSNFSIPYLEELLKEAEVVPAVNQVELHPLLPQLELMEFCKKHNIVMTAFSPFGSVGGPLLKNELVLKLADKYKTTPGGILTSYHIGNGTVVIPKSVTNSRIIENGKSAVTLNQEDLKSLNDLHKTEGIHRTSKPKWGVDLGFPDFDFC

SEQ ID NO: 5602 - protein, 487 aa, Oryza sativa (japonica cultivar-group)
MMLKDLAEIQQQQLLAAAEENMSNLTSASGDQASVSSHPAPPPAKKKRSLPGNPDPEAEVIALSPRTLMATNRYVCEICGKGFQRDQNLQLHRRGHNLPWKLKQRNPKEVVRKKVYVCPEAGCVHHDPARALGDLTGIKKHFSRKHGEKKWKCDKCSKRYAVHSDWKAHSKVCGTREYRCDCGTLFSRRDSFITHRAFCDALAEESARAVTAAAAVAGQQQHGGGMLFSQVADVLDHQAAMAMGGHGLMQELCLKREQQQQQQQFAPSWLTAQQQQQQLEAMAGAGNPAAMYGSARLDQEFIGSSTPESGGAQQAGLSFGFSSTSSAPPHPAASSAHMSATALLQKAAQMGATLSRPSSHAHMAAAAAASTHNSSSSAATTNAPPPPPTSNVSSTCVGAGGYGLAFEASHFIAADESSRGARSDRDTGNGVAGAGNDGLTRDFLGLRAFSHGNIMSMAGFDPCMSTTSASSAAPYDHHHHSNKPWHS

SEQ ID NO: 5603 - protein, 546 aa, Cryptococcus neoformans var. neoformans JEC21
MPVFSTLINSTESYQRRFDQMARAVLVYWVLKYVLLDGFRHIKARGLCGTANEIRNKIKSLVVRIMLAFPSNRAKLNSELAKTRAELKEKLAPSQYPDGVRLTTVRTLPETGRGREWLESEWENLKKLEKADVDNGRVSGAVYHGGDELNAVINEAMAKFVVTNPLHPDVFPGVRKMESEIVSMCLNLFNGPNGAGTTTSGGTESILMSVKTHRDWARVTKGITRPEMVIPSSAHAAFWKASEYFNIKLHVIPVNQKTRKAEVAAMKRAINPNTIMIVGSAPNFPDGAIDPIPELGALAKRRNVGLHVDCCLGSFIMPFLEKAGFSEGIDPFDFRVPGVTSISCDTHKYAFCPKGTSVIMYRSSELRRFQYYVITDWAGGVYASPSMAGSRPGSVLAGAWAVLNHIGADGYTSSCRQIISAARYLTSSLRTLFPDDLYVLGDPKGPVVAFNSKTINIYAVGDVMSKKGWHLSALGGDGGLHMAFTRLSAKSVDKLIEDLGDALKEVKASPQGAGGDMVALYGLGQTSAGPHVVGKLAETFLDTLYE

SEQ ID NO: 5604 - protein, 139 aa, Glycine max
IMDNCQENAMVLKEGLEGTGRFNIVSKDQGVPLVAFSLKDSSRHDEFEISEFLRRFGWIVPAYTMPPDAQHVTVLRVVIREDFSRTFAERLVIDIEKVLHELDALPSRSSGPALQHPNGDTVSEKDLARQREVVSVWKR

SEQ ID NO: 5605 - protein, 422 aa, Glycine max
HASANESVAIKVIKKERLQKERLVKQIKREVSVMRLVRHPHIVELKEVMANKAKIFMVVEYVKGGELFAKVAKGKMKEDVARKYFQQLISAVDFCHSRGVTHRDLKPENLLLDENEDLKVSDFGLSALPDQRRSDGMLLTPCGTPAYVAPEVLKKKGYDGSKADIWSCGVILFALLSGYLPFQGENVMRIYSKSFKADYAFPEWISPAAKNLISNLLVVDPQKRYSIPDIMKDPWFQIGFLRPIAFSMKESALEDNIDFSGDDVPSPGSDDGNSSSNNEDGELTGAKPARPSYNAFEIISSLSHGFDLRNLFETRKRSPSMFISKFSASAVMAKLEGVAKKLNFRVTGKKEFMVRMQGATEGRKGKLAMTVEVFEVAPEVAVVEFSKSAGDTLEYLNFCEDQVRPSLRDIVWSWQGDANCHQ

SEQ ID NO: 5606 - protein, 520 aa, Brassica napus
  misc_feature (69)..(69): Xaa can be any naturally occurring amino acid
  misc_feature (96)..(96): Xaa can be any naturally occurring amino acid
  misc_feature (118)..(118): Xaa can be any naturally occurring amino acid
  misc_feature (140)..(140): Xaa can be any naturally occurring amino acid
  misc_feature (233)..(233): Xaa can be any naturally occurring amino acid
  misc_feature (252)..(252): Xaa can be any naturally occurring amino acid
RPVASTIPKPQTLYLGIISASSSLWILSKYRPSIPFHAPFYTTNGGAPVSYNISSLTIGQRDPVLLEDXHLNLKVDNFNRERIPERVVLARGSSAXGFFEVTHDNSKLTCADVLRAPXGFQTPFIVRFSISRSRCRACPXESMRDIRGFAVKFYTREGNFDLVGNNTPVFFIRDGIQFPDVVHALKPNPNTNIQEYWRILDYMSHLPESLLTWCWMFDDVGIPQDYRHMEGFXGVHTYTLVSKSGKVLFVKXHWKPTCGIKNLTDEEAKVVGGANHSHATKDLHDAIASGNYPEWKLFIQTMDPADEDKFDFDPLDVTKIWPEDILPLQPVGRLVLNRTIDNFFNETEQLAFNPGLVVPGIYYSDDKLLQCRIFAYGDTQRHRLGPNYLQLPVNAPKCAHHNNHHEGFMNFMHRDEEINYYPSKFDPVRCAEKVPIPNKSYTGIRTKCIIKKENNFKQPGDRYRSWAPDRQDRFVKRWVEILSEPRLTHEIRSIWISYWSQADRSLGQKLASRLNVRPSI

SEQ ID NO: 5607 - protein, 252 aa, Prunus fruticosa
VDYKSEADVGNAIAEAIQSGLVKREELFITSKASNHGHVVEACKNSLKKLQLDYLDLYLVHYPLATKHNGVGATASLLDENKVLDIDVTVSLETTWHDMEKTVSLGLVRSIGLSNYELFLTRDCLSYAKIKPQVSQFETHPYFQRESLVRFCKKHGVIPMAHTPLGGATANVKAFGSISPLEDPVLLALAKKYQKSVAQIALRWNLERDTPVIPKSSKVERLKENLEVLNFKLEKEDIELINTIDKKSRTTL

SEQ ID NO: 5608 - protein, 481 aa, Leptospira interrogans serovar Copenhageni str. Fiocruz L1-130
MSRKTLTTAGGHPVSQNQHSLTAGPRGPVLIQDTHLIEKLAHFNRERIPERVVHAKGAGAYGTLTITQDLTKYSRASIFSKKGKQTSLFLRFSTVAGEKGSADTERDPRGFAVKFYTDEGIWDLVGNNTPVFFARDPLKFPDFIHSQKRDPVTGYKNPIRMWDYWAGSPEAFHQITILFGDRGIPDGYRFMNGYGSHTFGLWNSKGERFWTKFHFKSMQGIRNLSMEKASALAGTDPDYATRDLFEAIERKEFPKWKFCVQIMPEKEATKYKFNPFDLTKVWSHKDYPLIEVGVLELNSNPKNYFEEVEQAAFSPSNMPPGIGASPDKMLQGRLFAYPDAHRYRLGIQYQQLPVNRPKNSVNVYHRDGRTRFQCDGNYDNYEPNGFEGPVQDSSYAEPPLSISGDMDRYNSHIGNDDYSQAGDLYRLMSVEERERLTSAIASTMHNLPKPLLEANLKHFHLCDPEYGEQLAAKVGLALSRV

SEQ ID NO: 5609 - protein, 148 aa, Brassica napus
YADTQRHRLGPNYLQLPVNAPKCAHHNNHHEGFMNVMHRDEEVNYFPSRYDPVRHAEKYPTPPAVCSGKRERCVIEKENNFKEPGERYLKYRSFTPERQERFIGRWIDALSDPRITHEIRSIWISYWSQADKSLGQKLASRLNVRPSI

SEQ ID NO: 5610 - protein, 403 aa, Pseudomonas putida KT2440
MQFSKSNKLANVCYDIRGPVLKHAKRLEEEGHRILKLNIGNPAPFGFEAPDEILQDVIRNLPTAQGYSDSKGLFSARKAVMQYCQQKDIEGVTIEDIYLGNGVSELIVMSMQALLNNGDEVLIPAPDYPLWTAAVSLAGGKPVHYLCDEQADWFPDLEDIKAKITPNTKALVIINPNNPTGAVYSKELLLGMLELARQHNLVVFSDEIYDKILYDEAVHISTASLAPDLLCLTFNGLSKSYRVAGFRSGWLIISGPKHHAHSYIEGIDMLANMRLCANVPAQHAIQTALGGYQSINDLVLPPGRLLEQRNRTYELLNDIPGVSCVKPMGALYAFPRIDPKVCPILNDEKFALDLLLSEKLLIVQGTAFNWPWPDHFRVVTLPRVDDLEAAIGRIGNFLKGYSQ

SEQ ID NO: 5611 - protein, 515 aa, Schizosaccharomyces pombe
MGQGSSKHADSKLDSYPSFSRSDTQGSIKSLKSLKTVLGKGKDSNHDRRTSTDTTHSRHRYPETPPSLPPPPSPGILATSPAVLQKHQQEDSGNSSQSPTSPHPSNQPAMLSPSTAASQHHHHHSSSSSYAVSPTSPTSPTSSGPIGSNFDSASEHNGPVYPQDQQGPVIIPNSAISSTDPDDPETVVSLNVDEMIQRLIHVGYSRKSSKSVCLKNAEITSICMAVREIFLSQPTLLELTPPVKIVGDVHGQYSDLIRLFEMCGFPPSSNYLFLGDYVDRGKQSLETILLLFLYKIRYPENFFLLRGNHECANITRVYGFYDECKRRCNIKIWKTFINTFNCLPIASVVAGKIFCVHGGLSPSLSHMDDIREIPRPTDVPDYGLLNDLLWSDPADTENDWEDNERGVSFVFNKNVIRQFLAKHDFDLICRAHMVVEDGYEFFNDRTLCTVFSAPNYCGEFDNWGAVMSVNSELLCSFELIKPLDQAAIRRELKKSKRSGMAIYQSPPAEQVTQSV

SEQ ID NO: 5612 - protein, 543 aa, Rhodospirillum rubrum
MAAKDVKFSSDARDRLLRGVDTLANAVKVTLGPKGRNVVIDKSFGAPRITKDGVSVAKEIELKDKFENMGAQMLREVASKSADVAGDGTTTATVLAQAIVREGSKAVAAGMNPMDLKRGIDLAVAAVVKDVKTRSRKIATNDEIAQVGTISANGDEEVGKIIARAMDKVGHEGVITVEEAKGLDTELDVVEGMQFDRGYLSPYFVTNAEKMVADLENPYILIHEKKLSGLQPLLPVLEAVVQSGRPLLIIAEDVEGEALATLVVNRLRGGLKVASVKAPGFGDRRKAMLEDIAILTGGQVISEDLGIKLETVTLDMLGTAKTVTITKDNTTIVDGAGVKADIDARCAQIRATIEDTTSDYDREKLQERLAKLSGGVAVIRVGGASEVEVKEKKDRVDDAMHATRAAVEEGIIAGGGVALLHAAKALDALSPANADQKVGIEIVRRALQAPVRQIAENAGVDGAVVAGKLLESSDADFGYNAQTGVYENLVKVGVIDPTKVVRTALQGAASVASLLITTEAMVAEIPEKKPALPAGGGMGDMDF

SEQ ID NO: 5613 - protein, 785 aa, Pseudomonas putida KT2440
MLAQRKERETGSGLMDIKFTNRLSYKQARLTVLVGFILGTLLSLIQIGIDYASEDASINREVNALLQISHNPASRIAYNIDSELALELTRGLLQSPAVIRARLIDNNETVLADVERPKLQDRYRPLSDFLFGEQRQFKERLYLTHMPEQYLGTLYLDIDTFAFGSRFLDRAGITLLNGFARSLVLTGLLLALFYMMLTKPLVTVIGALSGSDPRKPRQTRLECPHGHEHDEIGVLVKVANQQFVSMATEIEQRRTAENRLTQYLNELEDIVSARTNELKASNSSLSLSNQELEQARSRALDMAQARAAFLANMSHEIRTPLNGMLGMIALALDNPLPSEQRQQLAIAHDSGKVLVELLNDILDLSKFDAGQLELERIAFDMGSMVEDTANLLSQNTAQSVELTCLIASDFPSSVLGDPTRVRQIVSNLLSNALKFTRFGRVDVRLAAIVGGVRLEVRDTGIGIPEDAQARIFQPFTQAGAGITRQYGGTGLGLALTRNLCKAMQGHLHIRSEPGFGSCFTAELPLTVHTEAIPPAPLHGRVAALSAAGSGLNELLQHLLPAWGLTYQRHDSCATLVAAVIDLLITDDVEHLFELRPALKTPILLVTAYGNFLPNEQSLALAPLHQLARPLARNALYQTLRRTLQGHEPEHPLAIPAITQEQGRARILLVEDNPVNQLVAKGMLAKLGCQVQLATQGAEALELLAREEFDLVLMDCNMPVMDGYEASRRIRQSGRWPELPIVALTANAMPEERERCRAAGMNDYLAKPFRREELLALVDHWVPFSG

SEQ ID NO: 5614 - protein, 389 aa, Glycine max
  misc_feature (100)..(100): Xaa can be any naturally occurring amino acid
  misc_feature (289)..(289): Xaa can be any naturally occurring amino acid
  misc_feature (304)..(304): Xaa can be any naturally occurring amino acid
  misc_feature (310)..(310): Xaa can be any naturally occurring amino acid
APPPPLAHRRKKGVGSRNRDSWKEYSIGLVPRISSISYPHCGYFPSSGGFIAKRRKRNSLLRLNDCSDNIRQHASILFVRLVSGVMLVMSVSLASTEPSXNLLFLEAWRTIDRAYIDKSFNGQSWFRYREDALRNEPMNNREETYKVIRKMLATLDDPFTRFLEPEKFRSLRSGTEGALTGVGLSIGYPTKAEMQPGGLVVISASPGGPAYRVGVLSGDVILAIDCTSTENMGLYDAAERLQREKVSLDPVKSRLCKLPASGNDSPTVGYIKLTSFNQKASSNFREPTXEKSKLLLFQLKPTKXIYVVFXYELYTCWKIQSVFELSDGSGIVVTVARYETAAHTDIDKVGVIPDHPLPTPFPKDEDAFCNCLQDPASSCYVNRIKLFSK

SEQ ID NO: 5615 - protein, 486 aa, Shewanella sp. ANA-3
MSQQYLTSQSGSPIADDQNSLSAGERGPLLLQDWHLIEKLAHFNRERIPERVVHAKGTGVYGTFTLTKDLSEYTIADHFNGVGKQTETFVRFSTVGGEMGSADAERDPRGFGLRFYTARGNHDIVGNNTPTFFLRDGIKFPDFIHTQKRNPLTNLKDPQAMWDFWSLNPEAMHQVTILMSDRGIPANYRQMHGYGSHTFSFWNAKGERFWVKFHFKSQQGVVNLTNEQADKLKGIDPDSSQRDMVVAVTDGNFPRWTVNVQIMPESDANTYHINPFDLTKVWPHGDYPLIEIGVLELNRLPQNYFAEVEQVALAPSNLVPGVGASPDKMLQARLFAYADAQRYRIGANYNQLPVNCPHATKANHHQRAGAMAGTQCPYHGSQTGGDATANYGPNSTAGALVELANFAEPPLRLDGEAARYSRYNQDDYTQAGNLYRIFSEAEKARLVETISGSLRQASLDVQQRMLAHFHKADADYGQRIQTALGL

SEQ ID NO: 5616 - protein, 311 aa, Kluyveromyces lactis NRRL Y-1140
MDQQSVDVDDIIDRLLEVRGLKPGHQVDLEEHEIRYLCSKARSIFIKQPILLELEAPIKICGDIHGQYYDLLRLFEYGGFPPESNYLFLGDYVDRGKQSLETICLLLAYKIKYPENFFILRGNHECASINRIYGFYDECKRRYNIKLWKTFTDCFNCLPIAAIVDEKIFCMHGGLSPDLNTMEQIRRVMRPTDIPDVGLLCDLLWSDPDKDIVGWSENDRGVSFTFGPDVVSRFLQKQDMELICRAHQVVEDGYEFFSKRQLVTLFSAPNYCGEFDNAGAMMSVDESLLCSFQILKPASKLLERNVVRRKK

SEQ ID NO: 5617 - protein, 554 aa, Shewanella sp. ANA-3
MCSIFSILDIQSDAKELRQVALEMSKLMRHRGPDWSGIYASDKAILAHERLAIVDIEHGAQPLLTEDGSLILAVNGEIYNHKELKAQLGDKYSYQTNSDCEVILALYQEYGTEFLDKLNGIFAFVLYDKAKDAYLIGRDHMGIIPLYTGRDAAGNFYVASEMKALMPVCKTVAEFQPGQYLYSSIGEPVQYYTRDWQSFDAVKDNGASQEELRDALEAAVKRQLMSDVPYGVLLSGGLDSSVISAITQTFAKRRIEDDDQSGAWWPQLHSFAVGLKGAPDLAAAKKVADAIGTIHHEINFTFQEGLDAIKEVIYHLETYDVTTIRAATPMYLMARKIKAMGIKMVLSGEGADELFGGYLYFHKAPNAQAFHEELVRKLDKLHLFDCLRANKAMAAWGLEARVPFLDKEFMDVAMRINPEAKMSKDGRIEKHILRQAFEHKLPKEVAWRQKEQFSDGVGYSWIDGLKAHAAEQVDDLQLANAKFRFPYNTPETKEAYFYRCFFEEHYPLPSAAETVPGGKSVACSTPEALAWDESLRGIIDPSGRAVRSVHAASY

SEQ ID NO: 5618 - protein, 365 aa, Enterobacter cloacae
MSAEKLFTPLKVGAVTAPNRVFMAPLTRLRSIEPGDIPTPLMGEYYRQRASAGLIISEATQISAQAKGYAGAPGLHSPEQIAAWKKITAGVHAEDGRIAVQLWHTGRISHSSIQPGGQAPVSASALNANTRTSLRDENGNAIRVDTTTPRALELDEIPGIVNDFRQAVANAREAGFDLVELHSAHGYLLHQFLSPSSNQRTDQYGGSVENRARLVLEVVDAVCNEWSADRIGIRVSPIGTFQNVDNGPNEEADALYLIEELAKRGIAYLHMSETDLAGGKPYSEAFRQKVRERFHGVIIGAGAYTAEKAEDLIGKGLIDAVAFGRDYIANPDLVARLQKKAELNPQRPESFYGGGAEGYTDYPSL

SEQ ID NO: 5619 - protein, 487 aa, Carica papaya
MVLMLRNQELLSKIATSNGHGEDSPYFDGWKAYDSDPFHPTQNPEGVIQMGLAENQLCFNLIHEWLLKNPEASICTAQGAAEFRDIAIFQDYHGLAEFREAVAKFMGKVRRNRASFDPDRIVMSGGATGAHEMIAFCLADPGDAFLVPTPYYPGFDRDLRWRTGVKLIPVVCESSNDYQITIEALEAAYETAQEADIKVKGLLIPNPSNPLGTIITKDTLEALVTFTNHKNIHLVCDEIYAATVFSQPEFTSIAEIIEEDKICCNRDLIHIIYSLSKDMGFPGFRVGIVYSYNDAVVSCARKMSSFGLVSSQTQYLIASMLADDEFVDQFIVESRKRLAMRHSFFTQRLAQVGINCLKSNAGLFVWMDLRRLLKEQTFEAEMVLWRVIINEIKLNVSPGSSFHCSEPGWFRVCFANMDDKTMEIALSRIKTFMLQHKEAMVPKKKLCWQTSLRLSFSSRYEDIMETPGSFMSPHSPIPQSPLVRART

SEQ ID NO: 5620 - protein, 626 aa, Mycoplasma mobile 163K
MKNISSKNLSLNLEPFYGGYETALYKFLGSHLTTKNGKSGVMFRTWAPNAKKIEVLIANGEKFLLAKINEAFWEVFIPNLKKGTAYKYLVTTIDNKLLTKADPFAFYSNQYPYFDSIVYDLNNFIWSDEAFLKSRKIKNAHNSPILIYEVHLGSWKKTPDNGFLNYKDYSKELVSYLKKMNYTHVEFLPLFEHPFLGSWGYQITGFFSPTSRYGTPEELKYLINELHQNGIAVIFDFVPVHFCKDDHGLREFDGTNLFSYENEVDRENYLWGTQNFNLTKNEVKSFFTSILYYWIEEFHIDGVRFDAVSNLIYYGGLEKRGINNSGVNFIKHIISIVKKDFPNILMIAEDSSYYKKVTGDNFNNSLGFDLKWNLGFSNDLFEFIKKPYWERLGNNFHKLTFSMAYYFDERFLLAFSHDEVVHLKKSLLNKSFGLRDKQFSQIRLMLFYLITHPGKKLIFMGHDFAQFDEWNENKSLDWHLLNEDSFNLENKRVNIFSKELFSFYVNNKSLFELDFSNETFKWVHLNEEQGIWVFSRHSKNKEDFSLIVLNFSIEYFENYIIKNVPTASYYKEMINTDDLKFAGTGAINSIGKIIEVKNSEVNVKIAPLSGFVLKPFFKVQRKAKNE

SEQ ID NO: 5621 - protein, 546 aa, Wolinella succinogenes
MASKEINFSDSARNKLYEGVRQLADAVKVTMGPRGRNVLIQKSFGAPSITKDGVSVAKEIELADAISNMGAQLVKEVASKTADAAGDGTTTATVLAHGIFKEGLRNITAGANPIEVKRGMDKATAAIIDELKKLSKKVNDKKEIAQVATISANSDENIGSLIAEAMEKVGKDGVITVEEAKGINDELNVVEGMQFDRGYLSPYFVTNSDKMEAVLENPYILLTDKKITSMKDILPLLEGTMKSGRPLLIVAEDIEGEALTTLVVNKLRGVLNVAAVKAPGFGDRRKEMLKDIATLTGGSVISEEIGKTLESATIADLGQAARVVIDKDNSTIVDGKGSKDEVNARVAQIRTQIEATTSDYDREKLQERLAKLSGGVAVIKVGAASEVEMKEKKDRVDDALSATKAAVEEGIVIGGGAALIRAAAKVKLELSGDEKIGYEIIKRAISAPLKQIAQNAGFDAGVVANNVEQNGNENFGFNAANGEYVDMFAEGIIDPLKVARIALQNAVSVSSLLLTTEATISEIKEDKPAMPDMSGMGGMGGMGGMM

SEQ ID NO: 5622 - protein, 188 aa, Arabidopsis thaliana
MANNDEITTSSHASPAVNHESISRAKQRIKDGLATRRSWRVMFDLHSTGLPHGVSDVFSRIKTNLAYFRSNYAIVILNVIFFSLIWHPTSLIVFTGLVFLWIFLYFLRDVPLKVFRFQIDDRAVLIGLSVITIVLLLLTNATFNIVAALMAGAVLVLIHAVIRKTDDLFLDEEAATTETSGLTSHPSS

SEQ ID NO: 5623 - protein, 293 aa, Solibacter usitatus Ellin6076
MFDRRSHLNCVTAGALALFHAGALAALFLFTWQALWVALALLWISGGWGIGMGYHRLLTHRGYETPRWLECILTICGTLALQGGPLFWVATHRLHHQNADKQGDPHSPQDGWWWAHAGWLLRGDPMRDSALAPYVPDLRRDPFHCWLEEWHVVPLLVLSVVLAVWGAVREGWFLAASLVAWGVFLRTVVELHGTWLVNSAAHTWGSRRFQTRDDSTNNWWVALLTFGEGWHNNHHAEPRRVRHGLAWYELDINWLCIRALGRIGLARNLCLGPAVRPATVQTAVPERQAPSNR

SEQ ID NO: 5624 - protein, 130 aa, Brassica napus
MCNPTKDGGSSPTGLVRNEKRAYFQRYWTWADVARALTVTIVHFWCLLAPLNYTWEALRFGLILVTVTNLLITFSYHRNLAHRSFKLPKWLEYPIAYAAVFALQGDPLDWVSIHRFHHQFTDSDRDPHSP

SEQ ID NO: 5625 - protein, 656 aa, Burkholderia cenocepacia
MCGIDGFLNSVAFDEETARGTLARMTASLAHRGPDGQGIWVDPEAGIALGHRRLAIVDLSVHGRQPMASACGRYVLVFNGEIYNHRELRAELERAGRAPAWRGHSDSEVLIAAIVAWGVEATLRRATGMFAFALWNRASRVLTLARDRIGEKPLYYGRIGDALVFASELKALRGYPGFDGTVDRDALCLYLRQSSVPAPYTIYRGIRKLPPGTYIQFEHARDTPRLRAYWTLEQVIEAGRAQPFEGTPDEAVGQLDAILRQAVARQMEADVPLGAFLSGGVDSSAIVALMQAQSATPVDTFTIGFHEAGYDEAGYAKAVARHLGTRHTELYVTADHALGVVPKLPSIYDEPFSDASQIPTFLVSELTRRHVKVSLSGDGGDELFGGYTRYFLTPRLWRKLHRVPGAVRARIAAALHALRPDHADQLAAVAQGAWGGGVEARESTSRIGDRLHKLGHVMTAESRIGLYRLLMSSVHHPERIALSGQEPPTPLDTVSAWPAHLSFAEQAMAIDTLTYLPTDILAKVDRAAMAVSLETRMPFLDHHVVEFAWRVPASVRLPEGQSKALLRRLLDRYVPSALIDRPKQGFCAPVDHWLRGALRDWAEALLRPSRLREEGFFDAAAVERLWRQHQTGRMNWQHQLWTVLMFQAWLEAQRAA

SEQ ID NO: 5626 - protein, 602 aa, Thiomicrospira crunogena XCL-2
MCGICGEIYWDGQMASETKLVPMLAELEKRGPDDGGTWVQNHVGLGHRRLSIIDLSDGGHQPMLDDEISLVFNGCIYNYETLSAELIELGHEFRSHSDTEVILKAYRQWGMECVSRFEGMFAFAIWDDHQHQLLLARDRFGIKPLYYAPVEGGVRFASNTQALLASGGINTDIDPVGLHHQFTLHAVVPAPHTILKGIRKLEPGHWMIVNPDGQMYKKSYWHLEAKRPTADNAPQTEKEWIDAIHESLKQAVHKRLTAADVPVGVLLSGGLDSSLIVALLAEAGVEDIRTFSIGFEDVPEEKGSEFEYSDLVVEQYQTAHQKYLIPNETVLPRLTEAVDAMAEPMFGQDAIAFYLLSEKVSEDVKVVMSGQGADEVFAGYFWYPMMAKAAESLKDASRPVDAFAPYYFDRSHEEWLEMIEDEFHVYDVTSELINDRLSDKGADSYLDQVLRLDTTTLIVDDPVKRVDNMTMAWGLEARVPFLDHHLVELAMSAPTDLKLKDFKYILKKIARGIVPNEVIDRPKGYFPMPALKYVRGPFYEMMKSILTSPQAKARGIFKPAYIQKLLDHPEADESFTAIKGSKLWHAALLELWLQRHVDPYVQ

SEQ ID NO: 5627 - protein, 760 aa, Cryptococcus neoformans var. neoformans JEC21
MTSPSAQPMIPRSQPPRPSHTQSSPAINSTGIKPNGPPSVIRRAPSVPVNPSTAAASGSLSSLLKSENTAQAVSRSSPPTEPNDLPRPIEPTPMLPITGLPNSSSSSSNARHGSSSSISRGPSVTGTLTPATTALGAPIEPTPPQTGASKMAAAAKRGLDGSAGNNVKVYEEGHPLNEETLKQRGYQTLNILNHPFHLPDRWKLLRPLGQGAYGLVIQVQDAETEIPIAVKCVTRVFDKVILARRALREITLLRHFGEHDNLTGLVDMDNVWDGYNEIYLYMEPMEADLHQIIRSGQPLGNAHIQFFIYQLLRGMKYIHSANVIHRDLKPGNLLVNSGCELKICDFGLARGFNPVKGEEPQGEEGKLTEYVATRWYRAPEIMLSNRRYTTAIDVWSIGCILAELLGLKPVFKGKDYIEQMTLILETLGTPDEETMARVASEKALTFLKTLPTYEKKDLGSIFPDADPLAVDLTDKLLEFDPTRRIDVPSALTHAYVERYHDPEDEPSCDKIFDKWEEVESLSTIEELKEAITREIQGFREEVRMAAEEDDEDEEWAEGEYLDDENVFHDSPGPALASTLEKFTYPDHIAPTGSAPRTREHSPTTTFITSAEDYFTAQHGFGGPNGRASRRSSSHSTSGRRPASFLFSPFGAGMTQIVPTPNAYPRSHAQASPELTTAEKTPRDRRSSGLWRTRSRAQSQSGNLVLERLSSLEINDHKDGEKNRIDALHAVVGLGGDGEVPPMTVSPSDAPPSEVPKSFGY

SEQ ID NO: 5628 - protein, 1785 aa, Anabaena variabilis ATCC 29413
MLWLRLQAEEEIKIQQLIKQQAIATQTELVTQLKTRILALKRIGKHWEMHGSIPQAQWELEARAYLEDYGGYQAIKLVDPSWQVLRSVSVAKNKAAENLEIMPKFPQCKGATAQPSHETTLTHTVNLNQGDRVFFACVPLWMGDKFGGAVLGIFQVKQFFESVLHIAPGYKIRVFDGQELIYGQDRQSSTLPSWQQSVNINFDGMTWQLQIYPTPELLKDLYSPLPTVVLVAGIFNAGAVTLLIYFAQATKLSNHQIGRINQELADRIEKQTQVEIALRASENRLRELLETVRVIPWEVDLKTQHFTYVGPQAETLLAYPIAQWYEENFWDNHLHPHDRDWAVRFCQEAANKGQNHELEYRMLAADGRVVWLRDVVNVVEVDGTPVMLRGFMFDITDLKRVEETLRLRERALAASSNGIVISDAKLPNYPVIYVNSAFEQITGYKATEIVGRNCRFLQGNDTTQPAIEELRSALKAGKNCKVILRNYRKDGSLFWNQLSVSPIYNDNGQLSHFIGIQTDISDRQQAEASLRRQALTFENIYDGVIITNLQGQILDWNPAAERMFGYSKDHICGQSISILHKVEEDAALNSAIIAEITKQGRWSGEINFVRQDGSQGICETTIVALQDDQGQTVATISVNRDITERKHAELLLRRSEERFQAFMNHSPTPAWITDIDGTIVYLSETYRRTFQLPTQELIGTNIFDIYPPELIQTFRETIQIVARTHQVMETVESVPCSDGTVRDFLVYKFPISSKPDECLIGGIAIDITERKQAEAALRKSEERWQLVIEGNQDAIWDWNIITNETFRSARWAELIKEQNYQPIADHADCISRIHPDDYERVMAVRQDCLSRKIPNYVVEYRLRCNDDSYKWVLVHATGQWDERGNPVRMVGSIKDITERIEAQEALQRQLHRTLLLEKITQKIRQSLDSKEIFETAATQIGQALAVDRCLIHSYISHHDPHIPLVAEYNNVLDYCSMQKWEFTTTGNRHILQMMSQDKAIASANVYTDPLLQTAVPSCCEIGVKSMLAVRTSYQGEPNGAICLHQCKYFRQWTPEEIELLEAVAAQLGIALAQAQLLEQETRQREELTIKNFALEQAKRAAEAANRAKSEFLAMMSHEIRTPMNAVIGMTGLLLDTELTSQQRDFVETVLTSGDALLSIINDILDFSKIESGKLELEEQPFEVRTCVEQVIDLLAAKAAQKDIELAYLIHPQVPMQIAGDLTRLRQILTNLLNNAIKFTPEGEVVVSVRSQPSPNQKTKNCCEIIFTIKDTGIGIAPETMDLLFQPFVQADASMTRKYGGTGLGLVISKRLGEMMGGYLWVESRGCVGGNPPPGWQRKNSISSASVATGSTFYFSMTVPVVAHADLETSITSPVQLSGKRLLIVDDNPTNRQILRLQAEPWQMETYTAPSGAEALALIDQGMAFDIAILDVQMPEMDGLTLARQIRQRPSYQHLPLVILTSWGQPDTDLSDIEFAACLNKPIKQSQLFDVLAASLGNQPIRASVVPDRSAQVNSCLAQQIPLRILLAEDIVVNQKVALLILKKLGYRADVVANGLEVLEALQRQSYDVVLMDVNMPEMDGLKASQIICQTWSPRSRPYIIAMTANAMRGDREACLAAGMDHYISKPLQLEELAKALGKCHPSTSSTEKALEKTSSQNQTFTDISDLKFATIDTKILQALRDMLGGDKVAFAELINCYLTESPKLIENLNVAINTEDTQGIWKTAHKFKSSSGSVGAVFLAQLCKLLEAKGRNNNLEGCIELGSQLCQEYELVKTALYREVNKETP

SEQ ID NO: 5629 - protein, 83 aa, Triticum aestivum
GTLPALELCYSMTQRLHLVDDDKDKPPLLQQQHEGAAAAPDASAPSPPVTNWKISSAGDSPDEVKARLKYWAQAVACTVRLCS

SEQ ID NO: 5630 - protein, 1038 aa, Glycine max
  misc_feature (606)..(606): Xaa can be any naturally occurring amino acid
  misc_feature (657)..(657): Xaa can be any naturally occurring amino acid
QISPPSQQPPQSSSATHQGGHHRHTSSGHHRSSGMTASSSRAPNRTRTGDDLHIGKYKLLKTIGKGNFAKVKLAKHVPTGVEVAIKIIDKTALNQSSLQKLFREVRIMKQLDHPNIVKLYQVIESETTLFLVMEYASGGELFDYLVAHGRMKEKEARAKFRQIVSAVQYLHSKNVIHRDLKAENLLLDADMNIKIADFGFSNTFSPGNKLDTFCGSPPYAAPELFQGKKYDGPEVDVWSLGVILYTLVSGSLPFDGQNLKELRERVLRGKYRVPFYMSTDCENLLKKFLVLNPIRRGTLEMIMRDKWMNMGYEEDELKPYTEPTKDVRDERRILKLQAFGYTLQQIHESLERERFDEIFGTYLLMKEAKKHDAQGQSLGGSGPNATAESPFNQSMGPTVPQSHGPTVSNAKNSRRSSSNAEQIQPQQHAITSHSVINQQSAAPIQQISATPQAIPSRQSQTAPGQVTFRTAQFTSRQPTLSVQPQAYIHPIQSANVRNITATSSASSGGRKGSAPAGRVPLPNLGLRHGINQPGVSYRYAPPVPGSGSSEKPNGGSSSARGAPPPTFFNQQLQTPIAPNPISAKLVAKATHQMNSNLISTSSVMQXSISHAPREPSIKEEPMGGDTAKDDDNGSDKFWSMATKTTSQHGEAPAIPTXPKKRTSIELCEATQIGHREELGQLVSPKPATDRTAPTADFIRMGLHQSPSMPPMVMKALAANDNDFTISSTASDEAATTTEGKLTKSATGAHISADPTLSHIVDIGAQTSTAVQNANFPRGSRNRQTFHGKTEHTKSATDDPESDHDEGITNAQNTIPPNAQRGSFLSKLTKLTKRTGMDPASPAAQSLSGSNSQQPPLKTHGVMRAGTIGSAAGTAFTQPQQQQQQHVQQLFQQQQPPSAFSAPNTPNQQQQNISQQQLTPAAAQLGTANSPCPLGIEEVKPRSLRFTWSMKTTSSLAPDEIMKEIRKVLDSNGCEYEQRERYLLLCAHGDPSKDSLIQWEMEVCKLPRLSLNGVRFKRISGSSIGFKNIASKIAQELNL

SEQ ID NO: 5631 - protein, 1224 aa, Ustilago maydis 521
MAVVDVGFSGYFWLAIKSFAARVICLLSDSGLRSAVSDRMPTKSRKSAPSKFAFFLDQQETFSLHISIFEPLGAVGVAPFQTDNRISLHRVFDRLPDTALQGGHGRATRSQRNFLSTDKSTKSFGSPIDIRFGPLRIDWAERAQDKEMSQASQYRNASSSSTSVGPATVTASASELTKASRRRNVFHAKQPQVALPVASFEKTDSFQGDVSGSKEAESRLASCTEMFQGMTIGATEVAFGIVHLFRDKQDATSNATPTRRAASTTGQTALENQIPEQDIGAVVAVLAVPAYLTASHFLSYIEPAVEAITHLRMLRDMHPNRCMVLIRFRDAKDAEDFHKMYNGQPFNAMDPQEICQVVYITSLTVSKHSSLPFSYPTLTNSDPWPLRPPANAVNQPAYELPTCPVCLERMDSSVTGLMTISCQHTFHCSCLSKWGESRCPVCRYSQTGQPSMHQRRRTPRSSMDPSTPVRQANQVGGSDADESDAESDLDEPSCCAVCETQQDLWVCLVCASVGCGRYKHGHAHRHFSETGHLYSLELETQRVWDYAGDGYVHRLIQNKADGKLVELPSASSATATPEHSSTLPASASYASAMSMSGTKHSGPPAIHSRGDNTRPPYDAQERRRQQQQQQRDQNYAIRDQDSCRSADDQLEAIGMEYSYLLTSQLESQRHFYEDKLDQFQAQLASLTGDLEMLSRKSQLIDELSARTAELERTNEQLRRDKDKSDKKADKAIELARTLERDLHSERSMNKGLMDRLEKTKESEVGLKAQVTDLQEQVSDLMFFVQARDKLDQEGSEAQGGDVEKLDSTFGNAFVISGRNARCGTGGSSTHPPITSLKLESKLIWPVLEKKTLRVMQHGGGKSTKHNPQSTKHEAIVNLCNVLYSYHLPARQTKPREYYIMSLNKTFTLNDGNKIPLIGLGTWLSKPGEVENAVEIAVKAGYRHLDLAKIYQNQDEVGAALKKVIPSVVKREELFITSKLWNTSHQPDKVEAAYNETLKELGLDYLDLYLIHWPVAFQPGSDLVPKTEDGKFTALDLETSLVDTWKALIALQKAGKVKSIGVSNFTIAHLDAIINATGVVPAVNQIEAHPLLPQDDLVAYAQQKNIHLTAYSPLGNNLTGKTKIVDYPQVSEVAKKYNADPAQVLIAWGVKRGYSVIPKSVTETRIKSNFEQLELKDDDYETVTSLYKQLGKVRFNVPFTYSPQWDINVFGEDAEKEAKNEVKTE

SEQ ID NO: 5632 - protein, 196 aa, Glycine max
MVLSKTTSESDVSVHSTFASRYVRTSLPRFKMPEESIPKEAAYQIINDELMLDGNPRLNLASFVTTWMEPECDKLIMAAINKNYVDMDEYPVTTELQNRCVNMIAHLFNAPLEETEAAVGVGTVGSSEAIMLAGLAFKRKWQNRRKQEGKPFDKPNIVTGANVQVCWEKFARYFEVELKEVKLRDDYYVMNVCYFG

SEQ ID NO: 5633 - protein, 466 aa, Streptococcus suis 89/1591
MTKDKVFYQFPTNFLWGSSTSGPQSEGIEPGDGKGQNNWDYWYSIEPERFHNKIGPSQTSTFYKHYEKDIDLLVETGHTVFRTSIQWSRLIPTGTGEINQEAVSFYRSVFSLVRAKGIQLFVNLYHFDLPYCLQEKGGWENKEIVRAYEAYARTCFELFDDLVDRWITFNEPIVPVECGYLGNYHYPCKVDAKAAVAVAYHTQLASSLAVKACHEVNPHKKIAIVLNLTPAYPRSEQAEDIKAARIAELFQTKSFLDPSVLGEYPDELVELIDAYGLMPEVSDEELAIIKENRVDFLGVNYYQPLRVQAPTNSWKEGEPLTPEHFFAPYDMPGKKMNPHRGWEIYEKGIYDIAINIKENYHNIEWFVTENGMGVEGEGAFKDNGLIQDDYRIEFIEDHLIELHRAIQEGANCKGYMLWTFIDCWSWLNAYKNRYGLVELDLDTQERIVKKSGKWFKKLSDANGFHR

SEQ ID NO: 5634 - protein, 307 aa, Capsicum annuum
MIKGIVGNQQLGLPAGFRFHPTDEELVQHYLCRKCAGQSISVSIIAEIDLYKFDPWQLPEKALYGEKEWYFFSQEDRKYPNGSRPNRAAGTGYWKATGADKPVGKPKTLGIKKALVFYAGKAPRGIKTNWIMHEYRLANVDRSAGKSNNLRLDDWVLCRIYNKKGHTLRSITMWASKRGESFGEFEDEIKPKIFPTQLAPAPGQWPPRPQSTPASDYFNFETSESMTTTRMHTTNSSSGSEHVLSSCDKEVQSAPKWDDLGTAALDFQINYLDGLLNDPFEIQMQQQNCNIDQFNTFQDMFLYMQKP

SEQ ID NO: 5635 - protein, 444 aa, Zea mays
MGKRSGGRKLPFFTRSSSSSSKRNRSARRLPSLPKQDNATRALLASPSAASPSATPGSAAAGQTAQLPPPLSVTAGGGVAVSGKVNKKKAGTRLWMRLDRWSASEIVELDKASIIRRAGLPPRDLRILGPVFSRSSSILAREKAMVINLEFIRAIVTAEEVLLLDPLMHEVLPFVDQLRQHLPLRSRVGENGECAPDGNGEKQKGSLNEATGAEHELPFEFHVLEVALEVVCSSLDLSVSDLERHATPVLDELTKNVRDEIEHLLDDNEDMEHLYLTRKQVQNQQVEALMSSAASNSIVLAGTGVPRLNSSFRRSLSIATSMHLDNDVEDLEMLLEAYFMQLDGIRNRILSVREYIDDTEDYVNIQLDNQRNELIQLQLTLTIASFGIAANTFIAGAFAMNIPGSLFNTDGSLFWPFVGSTSSGCFVITVLLLGYAWWKKLLGP

SEQ ID NO: 5636 - protein, 349 aa, Thermus thermophilus HB8
MGLLFTPLELRGLRLKNRLAMSPMCQYSATEGGEVTDWHLLHYPTRALGGVGLVIVEATAVLPEGRISPFDLGIWSEDHLPGLRELARRIREAGAVPGIQLAHAGRKAGTARPWEGGRPLGWKVVGPSPIPFAEGYPVPEALDEAGMARVLEAFVEGAKRALRAGFLVVELHMAHGYLLSSFLSPLANRREDAYGGSRENRMRFPLEVARAVREAIPPELPLFVRVSATDWAEGGWGLEDTLAFAERLKALGVDLLDLSSGGVVPGVRVPVAPGFQVPFADAVRKRVGMPTGAVGLLTTPEQAETVLQAGSADLVLLGRVLLRDPYFPLKAAKALGAEAPVPPQYQRAF

SEQ ID NO: 5637 - protein, 933 aa, Yersinia pestis KIM
MTKYSLRARMMILILAPTLLLGLLLSTSFMVNRYNELQNQIVSAGTNIIEPLAVASEYGMSFRNRDTVRQLINLLHRRHSNIVRSISVFDVDNKLFVTSNYNYNSSQLRLPPGEPVPDSLMLSYRGDSLILRMPIVSESNLSSEQASGQGESDQILGYIAIDLDLQSVRLKQYKEIFISTLLLLFCMCVAILFAYRLMRDVTGPIRNMVNTVDRIRRGQLDSRVEGHMLGELDILKNGINSMAMSLAAYHEEMQQNIDQATSDLRETLEQMEIQNVELGLAKKRAQEASRIKSEFLANMSHELRTPLNGVIGFTRQTLKTSLTPTQTDYLQTIQRSANNLLCIINDVLDFSKLEADKLILEHIPFSLRETLDEVIILLAHTAHEKGLELTLHINNDVPDQVLGDAMRLQQIVTNLLGNAIKFTEEGNIDILVVVKAIASQQVTLMVEIHDTGIGISESQQAQLFQAFRQADASTSRRHGGTGLGLVITERLVKEMGGNISFQSQMSCGSIFRFHLTLELNESIPYRQPDMAHLEGKQLAYIERNSTAARATINILNTTPLQVTHRQSLAQLPEQHYDFLLVGVPIPFRNNMAIHQDKLLTALKIADHVILALPSQSQVEAEQLKQIGAKDCLLKPISSIRLIPLLLAEDTHSKVPSEEQPRKQPKLPFRVMAVDDNPANLKLIGTLLEEQIEETVLCDSGAMAITYAREHTLDIILMDIQMPEIDGIRASEIIHQIPHHQETPIIAVTAHAVKGQQEQLLRLGMADYLAKPIDEARLLQVLSRYQSDNPPLSTASTASTASTASTASTAESLPLPVPKGAGVIDWAQAVRQAANKEDLARDLLTMLLEFMPQITARVQAILAGADDGDILNLVHKFHGSCACSGVPRLRQLCMTIELQLRQQVNLQDLEPEWLELLDEIENVSEAAKTYLRTE

SEQ ID NO: 5638 - protein, 437 aa, Arabidopsis thaliana
  misc_feature (14)..(14): Xaa can be any naturally occurring amino acid
MGSTLKHLLLLLLXLIRHVDSAAIVKSLPGLEGRLPFELETGYIGIGEEEDIQLFYYFIKSENNPKEDPLLLWLDGGPGCSSLGGLLFENGPVALKSAVYNGSNPSLFSTTYSWTKMANIIYLDQPVGSGFSYSRTPIGKSSDTSEVKRIHEFLQKWLSKHPQFFSNPFYVTGDSYSGMIVPALVQEISKGNYICCKHLINLQGYVLGNPITYAEHEKNYRIPFSHGMSLISDELYESLKRNCKGNYENVDPRNTKCVRLVEEYHKCTDKINTQHILIPDCDKKGHGITSPDCYYYLYFLIECWANNERVREALHVTKGTKGQWQRCNWTIPYDNNIISSVPYHMDNSINGYRSLIYSGDHDITMPFQATQAWIKSLNYSIVDDWRPWMINDQIAGYTRTYSNKMTFATVKGGGHTAEYLPNESSIMFQRWISGQPL

SEQ ID NO: 5639 - protein, 613 aa, Arabidopsis thaliana
MESCDCFETHVNQDDLLVKYQYISDALIALAYFSIPLELIYFVQKSAFFPYKWVLMQFGAFIILCGATHFINLWMFFMHSKAVAIVMTIAKVSCAVVSCATALMLVHIIPDLLSVKNRELFLKKKADELDREMGLILTQEETGRHVRMLTHGIRRTLDRHTILRTTLVELGKTLCLEECALWMPSQSGLYLQLSHTLSHKIQVGSSVPINLPIINELFNSAQAMHIPHSCPLAKIGPPVGRYSPPEVVSVRVPLLHLSNFQGSDWSDLSGKGYAIMVLILPTDGARKWRDHELELVENVADQVAVALSHAAILEESMHARDQLMEQNFALDKARQEAEMAVHARNDFLAVMNHEMRTPMHAIISLSSLLLETELSPEQRVMIETILKSSNLVATLISDVLDLSRLEDGSLLLENEPFSLQAIFEEVISLIKPIASVKKLSTNLILSADLPTYAIGDEKRLMQTILNIMGNAVKFTKEGYISIIASIMKPESLQELPSPEFFPVLSDSHFYLCVQVKDTGCGIHTQDIPLLFTKFVQPRTGTQRNHSGGGLGLALCKRFVGLMGGYMWIESEGLEKGCTASFIIRLGICNGPSSSSGSMALHLAAKSQTRPWNW

SEQ ID NO: 5640 - protein, 333 aa, Pasteurella multocida subsp. multocida str. Pm70
MKTLGQFIVEKQAEYPNAKGELSGILSSIRLVAKVIHRDINKAGLTNNIIGTSGAENVQGETQMKLDLFAHNTMKQALISREEVAGFASEEEENFVAFDTERGRNAKYVILTDPLDGSSNIDVNVAVGTIFSIYRRVSPIGTPVTLADFMQPGNRQVAAGYIVYGSSTMLVYTTGNGVNGFTYDPSLGVFCLSHENIQIPANGKIYSINEGQYLKFPQGVKKYIKYCQEEDKATHRPYTSRYIGSLVSDFHRNMLKGGIYIYPSATNYPNGKLRLLYEGNPMAFLAEQAGGMASDGYQRILDIQPTELHQRVPLFLGSKEMVEKAQDFMKTFG

SEQ ID NO: 5641 - protein, 71 aa, Zea mays
  misc_feature (35)..(35): Xaa can be any naturally occurring amino acid
MNRPFTVQELVRFAVYEHNLKANALLGFEKLVKAXKTQVGAGTMYYLSLEVKDGEAKKLYEVNVWEKPWEN

SEQ ID NO: 5642 - protein, 485 aa, Candida dubliniensis
MAPTFTNSNGQPIPEPFATQRVGQHGPLLLQDFNLIDSLAHFDRERIPERVVHAKGSGAYGVFEVTDDITDVCAAKFLDTVGKKTRVFTRFSTVGGELGSADTARDPRGFATKFYTEEGNLDLVYNNTPVFFIRDPSKFPHFIHTQKRNPETHLKDANMFWDYLTSNEESIHQVMILFSDRGTPASYREMNGYSGHTYKWSNKKGEWFYVQVHFISDQGIKTLTNEEAGALAGSNPDYAQEDLFKNIAAGNYPSWTAYIQTMTEAEAKEADFSVFDLTKVWPHKKYPLRRFGKFTLNENPKNYFAEVEQAAFSPAHTVPYMEPSADPVLQSRLFSYADTHRHRLGTNYTQIPVNCPVTGAVFNPHMRDGAMTVNGNLGSHPNYLASDKPVEFKQFSLQEDQEVWNGAATPFHWKATPADFKQAQELWKVLKRYPNQQEHLAHNIAVHAAGADAAIQDRVFAYFGKVSQDLANAIKKEVLELSPRK

SEQ ID NO: 5643 - protein, 543 aa, Clostridium tetani E88
MEMAKSIMFGEDARRSMQKGVDILADTVKVTMGPKGRNVVLDKKFGAPLITNDGVTIAREIELEDAYENMGAQLVKEVATKTNDVAGDGTTTATLLAQAIIREGLKNVTGGANPMLVRRGIQMAVEEAVKGIKEISKPVEGKEDIARVAAISADDKEIGKLIADAMEKVGNEGVITVEESNTMGTELDVVEGMQFDRGYVSPYMVTDTEKMEASLDDAYILITDKKITNIQEILPVLEQIVQQGKRLLIISEDIEGEALATLVVNKLRGTFTCVAVKAPGFGDRRKEMLEDIATLTGGQVISEEIGRDLKDVTVDMLGRAESVKITKETTTIVNGKGNKKEIEDRVNQIKAQIEETTSEFDREKLQERLAKLAGGVAVIKVGAATETELKERKLRIEDALAATKAAVEEGIIPGGGTAYAMVIKEVEKLNSETHDIKLGIDIVKKSLEEPVRQIACNAGVEGSIVIEKVKHSEAGIGYDALNNEYVNMIKAGIVDPTKVSRSALQNAASVASTFLTTEAAIADIPEKNDTPMPGAPGMMDGMY

SEQ ID NO: 5644 - protein, 539 aa, Rhodopirellula baltica SH 1
MPKIIAFDQEAREAIRRGVSKLARTVKVTLGPKGRNVILQKSFGSPTVTKDGVTVAKEIELEDPYENMGASMVREVASKTSDVAGDGTTTATVMAEAIFNEGLKAVVAGVNPIQMKSGIETAVSDITEQLHSMAVKVKDQEAMANVATIASNNDREIGTLLADAMSKVGKDGVITVDEGKSLQTEQEWVEGMQFDRGYLSPYFVTDSTSMEVVLEDAYVLVFEKKISNIKDMVPLLEKVVQQGKPLLIIAEDVDGEALATLVINRLRGTFTVCAVKAPGYGDRRKAMMEDIAILTGGQAIFEALGVKLESVDLPQLGRAKKIIVDKDNTTVIEGGGKSADIKARIDQIRREIELSTSDYDREKLEERLAKLAGGVAKVNVGAATESEMKEKKARVEDALHATRAAVEEGILPGGGVALLRASGKVKAADTLTDDQLVGYNIVLRACRAPLTMISENAGQDGGIVCEKVLAMKGNEGYNALTDVYEDLVKSGVIDPTKVTRTALGNAASVATLLLTSDALVAEKPEKSGKAGHGGDHDMY

SEQ ID NO: 5645 - protein, 485 aa, Candida tropicalis
MAPTFTNSNGQPIPEPFATQRVGQHGPLLLQDFNLIDSLAHFDRERIPERVVHAKGSGAYGVFEVTDDITDICAAKFLDTVGKKTRIFTRFSTVGGEAGSADTARDPRGFATKFYTEEGNLDLVYNNTPVFFIRDPSKFPHFIHTQKRNSETHLKDANMFWDYLTSNEESNHQVMILFSDRGTPASYREMNGYSGHTYKWSNKKGEWHYVQVHFITDQGNKTLTNEEAGSLAGSNPDYAQEDLFKNMLAGNYPSWTCYIQTMTEAQAKEADFSVFDLTKVWPHGKYPLRRFGKFTLNENPKNYFAEVEQAAFSPAHTVPYMEPSADPVLQSRLFSYSDTHRHRLGTNYTQIPVNCPVTGAVFNPHMRDGAMNVNGNLGSHPNYLASDKPIEFKQFSLQEDQEVWHGAATPFHWKATPADFKQSQELWKVLKRYPNQQEHLAHNVAVHASAADAPIQDKVIAYFAKVSPELSNLIKKEILELSPRK

SEQ ID NO: 5646 - protein, 434 aa, Oryza sativa
MESRGKILMERYELGRLLGKGTFGKVHYARNLESNQSVAIKMMDKQQILKVGLSEQIRREITTMRLVAHKNIVQLHEVMATRNKIYFVMEYVKGGELFEKVAKRGKLTEVVAHKYFQQLISAVDYCHSRGVYHRDLKPENLLLDENENLKVSDFGLSALSESKRQDGLLHTTCGTPAYVAPEVISKIGYDGAKSDIWSCGVILFVLVAGYLPFQGPNLMEMYRKIQHGEFRCPGWFSRKLQKLLYKIMDPNPSTRISIQKIKESTWFRKGPEENRILKERTLNENTTKNVAPVLGVRRKKNAHEDVKPMSVTNLNAFEIISFSKGFDLSGMFIVKEWRNEARFTSDKSASTIISKLEDVAKALNLRVRKKDNGVVKMQGRKEGRNGVLQFDIEIFEVTTSYHIIEMKQTSGDSLEYRQLLEEGIRPALKDIVLA

SEQ ID NO: 5647 - protein, 362 aa, Cryptococcus neoformans var. neoformans JEC21
MAPQTVPCQYKTGKTLGSGTYAVVKECVHITTGEYYACKVLNKKFLMGREHMVRNEIAVLKRVSAGHKNIVQLHDFFETTHNLYLVFDLCTGGELFDRICAKGSYFEKDAANIVRTVTSAVKYLHDQGIVHRDLKPENILFKSKAEDADLMLADFGLSKVLDDDKFAILTTTCGTPGYMAPEIFKKAGHGKPVDIWAIGVITYFLLCGYTPFDRDSQYEEMQAICKGDYRFEPVEYWGGVSETARQFVRDCLTVDPTNRPTVDELLNHPWLRDVEASKDEPAEAKGVDLLPNVKAAFDAKKTFRKAVLGMMAVHRLQDHSATIHGQTEAEQEKLKKEVEAFKEEAAQEDVKDVIQPGAPASI

SEQ ID NO: 5648 - protein, 616 aa, Bacillus clausii KSM-K16
MCGITGWVDWQRNLRTETKQMKNMANTLNRRGPDALETWTSDHAAFGHARLVVVDPEGGKQPMTRTAKGNTCTIVYNGELYNTEELRKELLAHGHTFAGHSDTEVLLKAYMEWGAACLEKLNGIFAFAVWDEQEQTLFMARDRLGVKPLFYTEKDGMLLFGSELKALLAHSQIEAVVDRSGLADVMGLSPSRTPGHGIFKGIVELRPAHYLQFSKNGSAVKRYWQLQSNIHTETAHETAAHIRELLEDIVERQLFADVPVGMFLSGGVDSSALTAIAARIYEKQGNAPIFSYSIDYEENEKYFKASTFQPNADADWVEKVAAHCGTNHKNCIIGNDVLANLLKESVLVRDTPGMADVDSSLLWFCKQIKNDVTVGLSGECADEIFGGYPWFHKAEVMAIDGFPWMRSLDERIQLLQPDWQKRLNLQEYVYDRYKETIQETPRFDGDSPEEARRREISYLNMIWFMTNLLDRKDRMSMGASLEVRVPFSDHRLVEYVWNIPWEMKTYGGREKGILRKALQGLLPDDVLFRKKSPYPKTHHPLYTAAVTKAIQEVVRQKDAPLFTFINRDRLKEIADKGGFDTGKPYFGQLMAGPQLLAHFVQIDYWMKAYNIQIDES

SEQ ID NO: 5649 - protein, 403 aa, Arabidopsis thaliana
MATENLTDKNVVFRKLKSKSENKVCFDCSAKNPTWASVPYGIFLCIYCSAVHRSLGVHISFVRSTNLDSWSPEQLRTMMFGGNNRAQVFFKQHGWNDGGKIEAKYTSRAADMYRQTLAKEVAKAMAEETVLPSLSSVATSQPVESSENGFTSESPKESSLVKQEAAVVSSPKASQKVVASTFKKPLVSRKSGKTGGLGARKLTTKSKDNLYEQKPEEPVPVIPAASPTNDTSAAGSSFASRFEYFDDEQSGGQSGTRVLSHVAPPKSSNFFNEFGMDSAFPKKSSSSSSKAQVEETDEARKKFSNAKSISSAQFFGNQNRDADLDSKATLQKFSGSAAISSSDLFGHGPDDSNIDITASDLINRISFQAQQDMSSIANLAEETKNKLGTFASSIFSDLQDRML

SEQ ID NO: 5650 - protein, 661 aa, Bacillus cereus ATCC 14579
MEQLKHHVTDNQRKHALTTNQGVKIAEDEFSLKMGLRGPTLMEDFHFREKMTHFDHERIPERIVHARGVGVHGYFQLYESLEAYTKADFLTNPSKKTPVFVRFSTVQGSKGSNDTVRDVRGFATKFYTDEGNYDLVGNNMPVFFIQDAIKFPDFVHAVKPEPHNDIPQGASAHDTFWDFVAHNPESTHMVMWQMSDRAIPRSLRMMEGFGVHTFRLINTAGKAHFVKFHWKPTLGVHSLVWDEAQRIAGKNPDFHRQDLYEAIEKGDYPEWELGLQLIPEEDEHKFDFDILDPTKLWPEEEVPVKLVGKMTLNKNVDNFFAETEQVAFHPGHVVPGIDFSNDPLLQGRLFSYTDTQLSRLGGPNFHQIPINQPVCPFHNNQRDGMHQMQIHRGQTSYHPNGLNNNQPATVQAEQGGYEHYQEKIDGHKIRGRSKSFLNFYSQAKLFYNSMSPIEKQHIKEAFCFEVGKCKSDMVKANVIALLNHVDRQLAQEVANIVGAPLPKENHEVNSDAKSPALSMSNTIFKSDSKNVAILLNGDPSVSLLSEWIQAFAQHRMNYSIIDNKIYHFNDSIKVTDTYTTTDSSLFDAVLVFSSESVIHPPVLEFTETTFKHFKPIAHVLSNPHALDNSKIKLDGAGVYNLTNTSIESFIEGIAQGRFWNR

SEQ ID NO: 5651 - protein, 153 aa, Bacillus anthracis str. A2012
MSEEKKDSSRPPVRNYLKQIDDFFEQTPLRNVIADLNHFFQKGNRLLTFPVDLYEVGEELVVTAELPGIQKEQIQIEIQSEYLKVSVKEEILEEEEQTSHNYYRRERSISEASRLIKLPYSINKKAAKASYQNGVLEIRAPKLPQQHDILSID

SEQ ID NO: 5652 - protein, 633 aa, Bacillus anthracis str. A2012
MCGFVGCLCENPREFSETEKHQFENMNTMIFHRGPDDEGYFRDEHVQFGFRRLSIIDLEAGHQPLTYENDRYVIIFNGEIYNYVELREMLLEKGATFATQSDTEVIIALYAHMKEKCVDYLRGMFAFMIWDREEKKLFGARDHFGIKPLYIAQQGDTTFFASEKKSIMHVMEDKGVNPTSLQHYFTYQYGPEPETLTIDVNKIEPGHYFVKEIGKEMEIHRYWKPYFNASSATKEEHIQAIRDVLYDSVKVHMRSDVPVGSFLSGGIDSSIIASIAREMNPNLLTFSVGFEQRGFSEVDVAKETAEKLGVKNHNVFISAKEFMDEFPKIIWHMDDPLADPAAVPLYFVAKEARKHVTVVLSGEGADELFGGYNIYREPNSLKMFSYIPSPGKSVLKALSGALKEGFKGKSFLERGCTPIEERYYGNAKIFREEEKAELMKYYNESVNYMDITKPLYNEIKDYDDVSKMQYIDMFTWLRGDILLKADKMTMANSLELRVPFLDKEVFDVASKIPTEFKIANGTTKAILREAARGIVPDHVLDRKKLGFPVPIRHWLKDEMHDWAINIINESKTEHLIDKQYVLNLLEAHCADKGDYSRKIWTVLAFMVWHQIYVEHKYDTNKFHEETKRAYSLV

SEQ ID NO: 5653 - protein, 715 aa, Vibrio vulnificus CMCP6
MFEKLSQAACSEPFAFLGPFIDPTQGALRVWMPGATGVALVLEGQPRIALEREKESAFILKADLNLHLTHYQLAIDWNGVEQLVDDPYQYHGIYAEYDDLHTPKTMYQHMGSQFMTLERDGKSISGIRFLVYAPHATAVSLVGSFNDWDGRRHPMQRLDYGIWGLFIPDLAEGVSYKFEMKGPKGEGLPHKADPWGFYAEQYPSFASVTYDHARYQWQDAQWQTRPVTEKRKEALSFYELHAGSWKRNEQGEFLNYRELAAELVPYLVDMGYTHVELMPVSEHPFYGSWGYQPVGLFAPTSRYGSPDDFKFFVDACHQAGIGVVLDWVPAHFPSDDHGLANFDGTPLFHDPDPRRGWHQDWNSFIYDLGREQVRRFLVSNALYWFEQFHIDGIRVDAVASMLYLDYSRSHGQWIPNMDGGNENYDAIATLKWMNEEVYKYFPNAMTIAEESTAFPGVSAPTFMGGLGFGFKWNMGWMHDSLSYIKEEPVHRKYHHNTLTFPLVYAHSENYVLSLSHDEVVYGKGSIHNKMPGDEWQQTANLRAYFGYMYGQPGKKLNFMGAEIGQTAEWNHDDQLQWFLLDFPRHQGVQALTRDLNHLYRNQAALHDQDCIPAGFEWRLQDAAEQSIIAHERISEAGERILVVSNFTPVPRDEFRLGVPNKGRYQLLLNTDDSKYAGSGYEVVVDAKSEAVVSEDLAQSIVLRLPPLSTLFYKLV

SEQ ID NO: 5654 - protein, 255 aa, Xanthomonas oryzae pv. oryzae KACC10331
MRLIALPAFDDNYIWALVAADGRAIIVDPGQAAPVIATAEREGLVPSAILLTHHHGDHIDGVAELQQRWPGLELFSPADERIPTTAHHVSHGERLSLLAVDFQVIEVPGHTRTHIAFVTDRHLFSGDTLFSLGCGRMFEGTAPQMFDSLQRLACLPGETLVCCGHEYTLANAAFALHVDSTNAALQRRQQEAQAMRHAARPTLPISLKSELATNPFLRTNRPEIRAVVAARAAGALSSEVDVFAELRRWKDEFCL

SEQ ID NO: 5655 - protein, 731 aa, Bordetella parapertussis 12822
MMRDSPSIQGTLDAATQHALLAGRHADPFSVLGPHQAGAHTVVRVLAPGARTVMAVLPGGQRTPLLPMQPGLFENTVPGLQPGAPAAYRLCIEWEGGIQHTADPYAFGPVLDTAQLDHCAAGGWRYLAGLLGAHAASVDGCAGTRFALWAPNARRVAVVGDFNGWDGRRHAMRLRYPAGVWELFLPDVGPGARYKFQVLGADGHTVLKADPLARQAEAPPATASIVPDERPFAWTDEAWMEQRAARQRCDAPISIYEVHAGSWFDDAGAPRWQSLAARLPEYARSLGFTHIELLPVMAHPFGGSWGYQPLGLFAPAAAHGAPADFAHFVDRCHEAGLGVILDWVPAHFPDDAHGLARLDGTPLYEHADPHEGRHPDWNTLIYNYGRREVRAFLIASAIHWLRHYHVDGLRVDAVASMLYRDYSRPAGQWIPNRHGGRENLEAIDFLRELNAAVGVQCPGAITVAEESTAWPGVTAPVANGGLGFDYKWNMGWMHDTLRYMRRDPIHRRHHHHDLSFGMVYAYAERFVLPLSHDEVVHGKGSLLGKMPGERAAQLAQLRLYYAFMWAHPGKKLLFMGGEFGQQGEWNHDAMLQWSLLDDPAHRGLQRLVADLNHVYATLPELHCRDADPSGFAWIVGDDADNSVLAFARVDASHCLVAVCNFTPVPRPGYRFGVPHAGDWRVRVDTGATRYGGAGGGPPICLRSEPIPAHGHPQSLVLDLPGFTALYLRHSE

SEQ ID NO: 5656 - protein, 643 aa, Mycobacterium avium subsp. paratuberculosis K-10
MCGLLAFVAARAGAVGADDAIARASHLMRHRGPDEPGTWAGADGSVVFGFNRLSIIDIAHSHQPLRWGPPETPDRYELVFNGEIYNYLELRDELAARHGAVFATDGDGEAIVAGFHHWGTDVLTRLRGMFAFALWDTVTRELFCARDPFGIKPLFVATGTGGTAVASEKKCLLELAELIGFDTAIDERAVQHYTVLQYVPEPETLHRGVRRLESGCYARIRPGAAPDVTRYFVPRFAAVPITRDTEQARYDEITAVLEDSVAKHMRADVTVGAFLSGGIDSTAIAALAIRHNPRLITFTTGFEREGFSEIDVAVASAEAIGARHIAKVVHPDEFVAALPEIVWYLDEPVADPALVPLFFVAREARKHVKVVLSGEGADELFGGYTIYREPLSLRPFDYLPRPVRRSMGKVSRPLPDGMRGKSLLHRGSLTLEERYYGNARSFSDTQLRDVLPGFRAEWTHTDVTAALYAQSIGWDPVARMQHIDLFTWLRGDILVKADKMTMANSLELRVPFLDPEVFAVASRLPVEAKITRTTTKYALRRALEPIVPAHVLHRPKLGFPVPIRHWLRAGELQDWAYSMVASSQAGHLVDLGAVRRMLDEHRNGVSDHSRRLWTVLIFMLWHAIFVEHSVVPQISEPVYPVQL

SEQ ID NO: 5657 - protein, 367 aa, Rhodospirillum rubrum
MATSQLFQPITLDGLTLPNRIIIAPMCQYSAKDGRTTGWHTIHLGQLALSGAGMLIIEATAVEPAGRISPADLGLWSDETEHALAETLAQVRAYSTMPIALQIAHAGRKASTAVPWEGGAQIAPDAGGWQTRAPSALPFDPSENPPVALTVADLTELREAFADTARRAARAGIDAIEIHAAHGYLLHEFLSPLSNRRSDAYGGSLENRLRFPLEVFDAVRAAFPAGKPVGVRVSATDWVEGGWSLEETIALAEALKARGCAFIHVSSGALSLDQKIPVGPGYQVPLARAIKAATGLPTIAVGLITEPEQAETILVSGDADMIGLARGILYDPRWPWHAAARLGQKIEAAPQYLRAAPHQAADLFKVV

SEQ ID NO: 5658 - protein, 584 aa, Astragalus sinicus
MCGILAVLGCADASRAKRVRVLELSRRLKHRGPDWSGLHQHGDCYLAHQRLAIVDPASGDQPLFNEDKSVIVTVNGEIYNHEDLRKQLPNHTFRTGSDCDVIAHLYEEYGEDFVDMLDGIFSFVLLDTRDNSYIVARDAIGVTSLYIGWGLDGSVWISSEMKGLNDDCEHFECFPPGHLYSSKNGGFRRWYNPLWYSEAIPSAPYDPIVLRQAFEKAVIKRLMTDVPFGVLLSGGLDSSLVASITSRYLATTKAAEQWGSKLHSFCVGLEGSPDLKAGKEVADYLGTVHHEFTFTVQDGIDAIEDVIYHVETYDVTTIRASTPMFLMSRKIKSLGVKWVISGEGSDEIFGGYLYFHKAPNKEEFHRETCRKIKALYQYDCLRANKSTFAWGLEARVPFLDKEFINVAMNIDPANKMINLDEGRIEKYILRKAFDDEEHPYLPKHILFRQKEQFSDGVGYSWIDGLKAHAAKHVTDKMMRNAANIYPHNTPSTKEGYYYRMIFERFFPQNSARLTVPGGPTVACSTAKAVEWDAAWSKNLDPSGRAALGVHASAYENQNNSVNKSIEFEKIIPLEASSVGVAIQT

SEQ ID NO: 5659 - protein, 423 aa, Xanthomonas oryzae pv. oryzae KACC10331
MSTAPQKPLAIRERLSEVRYEIRGELARRARELEAQGRKLIKLNIGNPGAFGFRAPEHLQRAIADDMGRTDPYTHQQGLLEAREAVAKAYARRQHPDAHPDRIFIGNGVSELIDLSLRALLNPGDEVLVPSPDYPLWSAATILNDGRPVYYRCAPENGFQPDPVEIETLVSSRTRAIVLINPNNPSGASYSRALLERIVAIATKHNLLLLVDEIYDQVLYDGAAFVPVAPLAGAHPCITFSGLSKVHRACGWRVGWALLSGDQARINDLRNAMDLLGALRLCANVPGQYAIDAAVNGPDTISALCAPGGRLYETRRAVIEACAASEHLSLVAPAGALYAFPAVVGAAARNFDDHAFALDLMNKEGVLVVPGSSFNVPYRHHFRVTLMPEASVMRDVFARIDRALARRAEAVTKVVPLKSRSVA

SEQ ID NO: 5660 - protein, 469 aa, Zea mays
GRVGGTFAKVYHARHVDTGDNVAIKVLDKEKAVKSGLVPHIKREIAVLRRVRHPNIVHLFEVMATKTKIYFVMELVRGGELFSRVSKGRLREDTARRYFQQLVSAVGFCHARGVFHRDLKPENLLVDEQGNLKVSDFGLSAVAEQFRPDGLLHTFCGTPAYVAPEVLGRRGYDGAKADVWSCGVILFVLMAGYLPFHDKNIMAMYKKIYKGEFRCARWFSKDLTSLLMRILHTNPNTRITLPEIMESRWFKKGFKPVKFYIEDDQLHNVIDDEDGLLDMGPAGPVPPPLPPPPPPLPPPKVDGDESGSDSDSSISSCPASMLSDESQRPRGSLPRPASLNAFDIISFSRGFNLSGLFEEKGDEVRFISAEPMSDIITKLEDIAKLKSFKLRRKDWRICLEGTREGVKGPLTIGAEIFELTPPLVMVEVKKKAGDNEEYENFCDKELKPGMQHLVHHMVRAPSMLLTDAK

SEQ ID NO: 5661 - protein, 698 aa, Sinorhizobium meliloti 1021
MNLTFSELDFMKPELGAEYTGQGTHFAVFSAHAEKIELCLFSEDGREETARMPLPKREGDIWSGYIEGIGPGTLYGYRAHGPYDPHNGHRFNPNKLLLDPYAKLVAGDLIWDDALFGYTIGSPEGDLSFDERDSAPFMVKGVVQDPTFDWAGEEAIRRPWTETIIYESHVRGMTMTHPGVPDELRGTFLGMASDPIIEHLTKLGVSAIELMPVQYFLDDRYLVERNLRNYWGYQTLGFFAPHDRYLKGDRFTEFKTMVKRFHSVGIEVLMDVVYNHTAEGSERGPTLSFRGLDNFSYYRQSPDKPRHTYDTTGTGNTLNVAHPLVLRMVLDSLRYWVGVMHIDGFRFDLASTLGREYMEFDREGGFFDAIRQDPILAGVKLIAEPWDVGEGGYQLGGFPPPFREWNDRFRDDVRRFWKGDGGMVPVLAERILGSPVQFRHSDRAATSSINLVSAHDGFTLMDTVSYGEKHNEANGEENRDGHSDNHSDNMGAEGPTDNREIIEARKRRRAAMLATLMISQGVPMVLGGDELGNSQQGNNNAYCQDNEIGWLDWSGADDGFVDFCRKLLAFRKDRPVLRQERFLDGEPDENGRVEIAWYKADGSPMDEDAWHDAELRLICAYICRAGQGEAPPAGEIVLVLNAGGDCEIALPHGNGSRRWLRVLDTAADEPFGMRASADRDTIPAQSVVAFVPQEGSNG

SEQ ID NO: 5662 - protein, 432 aa, Oryza sativa (japonica cultivar-group)
MAAAFSSTVGAPASTPTNFLGKKLKKQVTSAVNYHGKSSNINRFKVMAKELDEGKQTDQDRWKGLAYDISDDQQDITRGKGFVDSLFQAPTGDGTHEAVLSSYEYLSQGLRTYDFDNTMGGFYIAPSFMDKLVVHISKNFMTLPNIKVPLILGIWGGKGQGKSFQCELVFAKMGINPIMMSAGELESGNGEPAKLIRQRYREAADIIKKGKMCCLFINDLDAGAGRMGGTTQYTVNNQMVNATLMNIADNPTNVQLPGMYNKEDNPRVPIIVTGNDFSTLYAPLIRDGRMEKFYWAPTRDDRVGVCKGIFRTDNVPDEDIVKIVDSFPGQSIDFFGALRARVYDDEVRKWVSDTGVENIGKRLVNSREGPPEFEQPKMTIEKLIEYGYMLVKEQENVKRVQLAEQYLSEAALGDANSDAMKTGSFYGSAPSS

SEQ ID NO: 5663 - protein, 155 aa, Glycine max
MASDGAVATPAKVTPKKANLLDPHSIKHLLDETVAEVVKGKGYVENTRLGNWKLLIGTAVIAIALLAQFYPKKFPQNREFLLGCIALYVVMNVVLLILSYTKEKDAIIFTHSPAGSFNNTGLVISSKLPRFSDMYNLSIASADPESISAHKPVHF

SEQ ID NO: 5664 - protein, 415 aa, Oryza sativa (japonica cultivar-group)
MATSEAAAISNPFAPLTNHQQEHPPPPPPPAKKKRNLPGTPDPEAEVIALSPRTLMATNRFVCEICGKGFQRDQNLQLHRRGHNLPWKLRQRSGKEPRKRVYVCPEKSCVHHNPSRALGDLTGIKKHFCRKHGEKKWKCDKCSKRYAVQSDWKAHSKTCGTREYRCDCGTLFSRRDSFITHRAFCDALAEETARLNAASGAAAAAAAATATSLCGQSYLFAGSGGPGMAGMRPNMMMPPQFDAAQLSWLYGNGKLSSSNASELTSATAAAKEAESVPSVFSNQQHAKPAAPTDMSATALLQKAAQIGAVTSTAAMPLVSPFEPTKPGGATASPADECGKFDGAALFAAASHHNANLGGAMSELTGAAGNVPYDVLSAVRHHAGLKDAGGVGREETRDFLGVGVQALCSSSIHGWI

SEQ ID NO: 5665 - protein, 404 aa, Haemophilus influenzae Rd KW20
MRLFPKSDKLEHVCYDIRGPVHKEALRLEEEGNKILKLNIGNPAPFGFEAPDEILVDVLRNLPSAQGYCDSKGLYSARKAIVQYYQSKGILGATVNDVYIGNGVSELITMAMQALLNDGDEVLVPMPDYPLWTAAVTLSGGKAVHYLCDEDANWFPTIDDIKAKVNAKTKAIVIINPNNPTGAVYSKELLQEIVEIARQNNLIIFADEIYDKILYDGAVHHHIAALAPDLLTVTLNGLSKAYRVAGFRQGWMILNGPKHNAKGYIEGLDMLASMRLCANVPMQHAIQTALGGYQSINEFILPGGRLLEQRNKAYDLITQIPGITCVKPMGAMYMFPKIDVKKFNIHSDEKMVLDLLRQEKVLLVHGKGFNWHSPDHFRIVTLPYVNQLEEAITKLARFLSDYRQ

SEQ ID NO: 5666 - protein, 601 aa, Sinorhizobium meliloti 1021
MPASSTRAHFRDSWGANFIDSDTCRFRLWAPDEREVDLVLGGAVHKMQSLDGGWFEITLAAKAGERYCFRLADGTEVADPASSAQEREASGTSIVVDHAAYEWQTSSWRGRPWEEAVISELHVGCFTPEGTFRAAIERLPHLAGAGITAIEIMPVAQFPGVRGWGYDGVLHYAPHNAYGKPDDLKALVDAAHSLGLTVLLDVVYNHFGPEGNYLSRYASRFFNKDRPTPWGASIAFEEEAVRRYFIENALYWLGHFRFDGLRLDATEQIRDTTKPHFLVALEHEVREAFAERQIHLVLEDAHRRRSLLQRDASGARMLFDAAWNDDLHNALHVVATGETKGHYRLFADEPWGKIRSALAEGFAVPAKEDNFSPEGSRARVPPQGRVNFLQNHDQIGNRAFGERLASLLQEDSLRVLAAMHMLTPQIPLLFMGEEYGETQPFYFFSDYQGEIAAAIRLGRRDEAENFGGLPEGKTMDDLPDPLDPDVFAGSKLRWNRATSPAGERHLAYVRDLAVIRQRHIVPLIAGTAVPDGRAYETKDGIIAVDWQFGEACLELRVNLLHETHAVPAIRGQPIFTSETSSVETVYGSELAGPGIVVAIAR

SEQ ID NO: 5667 - protein, 198 aa, Trillium camschatcense
QVTFSKRRNGLLKKAFELSVLCDAEVGVIVFSPRDKLYEFSSTSMQSTIDRYRMHTKCVNTNMPTEHNTQQWKYEAVSMANKIELLEASKRKLMGESLEPCTVDELQELESQIERSLSNIRGRKDYLLEQQIEELKEKERRLLEDNELLRHKSEEETELQLATPKGVQYDHGSQQMELETELHIGWPPKVATQCISHA

SEQ ID NO: 5668 - protein, 550 aa, Legionella pneumophila subsp. pneumophila str. Philadelphia 1
MIMAKELRFGDDARLQMLAGVNALADAVQVTMGPRGRNVVLEKSYGAPTVTKDGVSVAKEIEFEHRFMNMGAQMVKEVASKTSDTAGDGTTTATVLARSILVEGHKAVAAGMNPMDLKRGIDKAVLAVTKKLQAMSKPCKDSKAIAQVGTISANSDEAIGAIIAEAMEKVGKEGVITVEDGNGLENELSVVEGMQFDRGYISPYFINNQQNMSCELEHPFILLVDKKVSSIREMLSVLEGVAKSGRPLLIIAEDVEGEALATLVVNNMRGIVKVCAVKAPGFGDRRKAMLQDIAILTKGQVISEEIGKSLEGATLEDLGSAKRIVVTKENTTIIDGEGKATEINARITQIRAQMEETTSDYDREKLQERVAKLAGGVAVIKVGAATEVEMKEKKARVEDALHATRAAVEEGIVAGGGVALIRAQKALDSLKGDNDDQNMGINILRRAIESPMRQIVTNAGYEASVVVNKVAEHKDNYGFNAATGEYGDMVEMGILDPTKVTRMALQNAASVASLMLTTECMVADLPKKEEGVGAGDMGGMGGMGGMGGMM

SEQ ID NO: 5669 - protein, 576 aa, Schizosaccharomyces pombe
MQPQEVDLMENSTMRNGARVLPPEAISKRHIGPYIIRETLGEGSFGKVKLATHYKTQQKVALKFISRQLLKKSDMHMRVEREISYLKLLRHPHIIKLYDVITTPTDIVMVIEYAGGELFDYIVEKKRMTEDEGRRFFQQIICAIEYCHRHKIVHRDLKPENLLLDDNLNVKIADFGLSNIMTDGNFLKTSCGSPNYAAPEVINGKLYAGPEVDVWSCGIVLYVMLVGRLPFDDEFIPNLFKKVNSCVYVMPDFLSPGAQSLIRRMIVADPMQRITIQEIRRDPWFNVNLPDYLRPMEEVQGSYADSRIVSKLGEAMGFSEDYIVEALRSDENNEVKEAYNLLHENQVIQEKSHLSKSKRVDSFLSVSPPAFSEYTSELQKKSKQELIDPTLEGPRWTVSDPPTYAKQTIDSNICVLVPTAEKNKLEMRTLADAASAVDTSQSTRKKSRRNKWHFGVRCRGDAPEILLAVYRALQRAGAQFTVPKPVNGKYRSDMYTIKSRWEIPHCKREGKNTYAYIELQLYEVMPGCFMLDVKSNGYKDIYSHPERTADHGMDDLKSSFPFLDLCAMLVCKLFSA

SEQ ID NO: 5670 - protein, 469 aa, Streptococcus pyogenes MGAS8232
MVSVMWFRRDLRIDDQKALAHVIASQSPTLCVFQFNKEQLNLLHSRNQSSFITSVLAFRKLLKCEGIDLYLMYGDLMTCFEQLLTQLKDWTDVYFNYDESGYGRLRDQKAAQFFKKNGIAVHTYQDHYLHGSQEIINQSGQPYKVFTPYYRIWQNYPKETPIKVELSQGRWLNLETPDDVLRTVESFKDEKYQDVATFDEASKQLNRFIQDQLAAYHANRDFPAQLGTSRLSPFLRIGAIGIRTVYHAVRQAPNSLGQATFLKELAWRDFYNMVYVAYPDQKTQPIQKAFSQIEWVNNPDWFQLWKEGKTGYPIVDAAMLQLQKTGWMHNRLRMIVASFLTKDLLCDWRLGEQYFQQQLIDYDAASNIGGWQWAASTGTDAVPYFRIFNPVTQGKRFDPKGEFIKAYLPQLEHVPEKYLHEPWKMPKNLQESVSCIIGTDYPQPIVDHAKQREQAIAKYEWAKEKAKIE

SEQ ID NO: 5671 - protein, 195 aa, Thellungiella halophila
MTKMGFKPDSNPSPNPNESNAKEIRYRGVRKRPWGRYAAEIRDPGKKTRVWLGTFDTAQQAARAYDAAAREFRGAKAKTNFPTFLELNAAKDGGFARSPSQSSTVDSVSPTSARLVTPPQLELSLGGGGGGACYQIPVARRPVYFYNMTTFPAAAAATCGVQSESDSSSVVDFECGAEKKYRPLDLDLNLAPPAE

SEQ ID NO: 5672 - protein, 212 aa, Vibrio vulnificus CMCP6
MRKVLLTGFEPFGGESINPSLELVKQMASRALPQVEIIGCEVPVVRYQAIETVLQAVETHQPDLVLMIGQASGRCAITPERVAINLDDYRIEDNAGHQPVDEPIIATGPAAYFSTLPVKAITHALQQAGIPCQLSHSAGTFVCNHLFYGVQHHLHTRAIRSGFIHIPLLPEQASASNQPSMSLETLVHGLEMMMMTCLETEQDTKHTGGTIC

SEQ ID NO: 5673 - protein, 316 aa, Colletotrichum gloeosporioides f. sp. malvae
MPAPFSARPCLAPFPPKQLFGVSQVLLQIRHPGCRGPGRLWTGLIRTHRISPGPATRILMASMSSAIRIHRDLKPGNLLVNADCELKICDFGLARGFSVDPEENAGYMTEYVATRWYRAPEIMLSFQSYTKAIDVWSVGCILAELLGGRPFFKGRDYVDQLNQILHILGTPNEETLSRIGSPRAQEYIRNLPFMPKKPFPQLFAQANPDALDLLDRMLAFDPSSRFSVEQALEHPYLHIWHNASDEPDCPTTFNFDFEVVEDVGDMRKMILEEVYRFRQLVRPSRQHPTGAQAAGQAGAGQVPFLWKPRLDSSDPD

SEQ ID NO: 5674 - protein, 586 aa, Astragalus sinicus
MCGILAVLGCSDDSQAKRVRILELSRRLKHRGPDWSGLHQHGDNYLAHQRLAIVDPASGDQPLFNQEKSIIVTVNGEIYNHEELRKQLPNHKFRTDCDCDVIAHLYEEYGENFVDMLDGIFSFVVLDTRDNSFLVARDAIGVTSLYIGWGLDGSVWIASELKGLNDECEHFEVFPPGHLYSSKEREFRRWYNPKWFSETVPSSPYDPLVLRHAFEKAVIKRLMSDVPFGVLLSGGLDSSLVASVTARYLEDTKAAKQWGAKLHTFCVGLKGAPDLKAGREVADYLGTVHHEFEFTIQDGIDAIEDVIYHTETFDVTTIRASTPMFLMSRKIKSLGVKMVLSGEGSDEIFGGYLYFHKAPNKKEFHEETCRKIKALYKYDCLRANKSTYAWGLEARVPFLDKDFINVAMDIDPEEKMIKRDEGRIEKWVLRKAFDDENKPYLPRHILYRQKEQFSDGVGYGWIDGIKDHAAKHVTAKMMLNASHIFPDNTPTSKEGYYYRMIFERFFPQNSARLTVPGGASIACSTEKAIEWDASWSNNLDPSGRAALGVHVSAYENQVNSSVGKGVEPEKIIPKMKVSPLGVAILG

SEQ ID NO: 5675 - protein, 549 aa, Erwinia carotovora subsp. atroseptica SCRI1043
MAAKDVKFGNDARVKMLRGVNVLADAVKVTLGPKGRNVVLDKSFGAPTITKDGVSVAREIELEDKFENMGAQMVKEVASKANDAAGDGTTTATVLAQSIITEGLKAVAAGMNPMDLKRGIDKAVIAAVEELKKQSVPCSDFKAIAQVGTISANSDETVGKLIAEAMEKVGKEGVITVEEGTGLQDELDVVEGMQFDRGYLSPYFINKPETGSIELESPFILLADKKISNIREMLPVLEAVAKAGKPLLIIAEDVEGEALATLVVNTMRGIVKVAAVKAPGFGDRRKAMLQDIATLTAGTVISEEIGLELEKATLEDLGQAKRVVINKDTTIIIDGVGDEVAIQGRVTQIRQQIEDATSDYDKEKLQERVAKLAGGVAVIKVGAATEVEMKEKKARVEDALHATRAAVEEGVVAGGGVALIRAAASISVSGLKGDNEDQNVGIKVALRAMESPLRQIVINAGEEASVIANTVKAGEGSYGYNAYTEEYGDMIAMGILDPTKVTRSALQYAASIAGLMITTECMVTDLPKGDAPDLGAGGMGGMGGMGGMM

SEQ ID NO: 5676 - protein, 391 aa, Oryza sativa
  misc_feature (212)..(212): Xaa can be any naturally occurring amino acid
  misc_feature (229)..(229): Xaa can be any naturally occurring amino acid
  misc_feature (336)..(337): Xaa can be any naturally occurring amino acid
  misc_feature (346)..(346): Xaa can be any naturally occurring amino acid
  misc_feature (373)..(373): Xaa can be any naturally occurring amino acid
MSTTKVKRRVGKYELGRTIGEGTFAKVKFARDTETGDPVAIKILDKEKVLKHKMVEQIKREISTMKLIKHPNVVRIYEVMGSKTNIYIVLEYVTGGELFDTIVNHGRMREDEARRYFQQLINAVDYCHSRGVYHRDLKPENLLLDSYGNLKVSDFGLSALSQQIKDGGLLHTTCGTPNYVAPEVLEDQGYDGAMADLWSCGVILFVLLAGYXNAEFTFPPWTSFPAKRXVTIPEILEDEWFKKGYKRPEFDEKYDTTLDDVDAVFNDSEEHHVTEKKEEPEALNAFELISMSAGLNLGNLFDSEQEFKRETRFTSKCPPKEIVRKIEEAAKPLGLXXQKKNYKLRXEKVKAGRKGNLNVATEILQVAPSLHMXEVRKAKGDTLEFHKDHAN

SEQ ID NO: 5677 - protein, 738 aa, Arabidopsis thaliana
MEVCNCIEPQWPADELLMKYQYISDFFIAIAYFSIPLELIYFVKKSAVFPYRWVLVQFGAFIVLCGATHLINLWTFTTHSRTVALVMTTAKVLTAVVSCATALMLVHIIPDLLSVKTRELFLKNKAAELDREMGLIRTQEETGRHVRMLTHEIRSTLDRHTILKTTLVELGRTLALEECALWMPTRTGLELQLSYTLRHQHPVEYTVPIQLPVINQVFGTSRAVKISPNSPVARLRPVSGKYMLGEVVAVRVPLLHLSNFQINDWPELSTKRYALMVLMLPSDSARQWHVHELELVEVVADQVAVALSHAAILEESMRARDLLMEQNVALDLARREAETAIRARNDFLAVMNHEMRTPMHAIIALSSLLQETELTPEQRLMVETILKSSNLLATLMNDVLDLSRLEDGSLQLELGTFNLHTLFREVLNLIKPIAVVKKLPITLNLAPDLPEFVVGDEKRLMQIILNIVGNAVKFSKQGSISVTALVTKSDTRAADFFVVPTGSHFYLRVKVKDSGAGINPQDIPKIFTKFAQTQSLATRSSGGSGLGLAISKRFVNLMEGNIWIESDGLGKGCTAIFDVKLGISERSNESKQSGIPKVPAIPRHSNFTGLKVLVMDENGVSRMVTKGLLVHLGCEVTTVSSNEECLRVVSHEHKVVFMDVCMPGVENYQIALRIHEKFTKQRHQRPLLVALSGNTDKSTKEKCMSFGLDGVLLKPVSLDNIRDVLSDLLEPRVLYEGM

SEQ ID NO: 5678 - protein, 483 aa, Caulobacter crescentus CB15
MQVRNDSGDSKANLDAVIVWFRKDLRIADNPALRHAAQSGRPVIPLYILDETPGIRPMGGASLWWLDKSLKSLAASLETLGTKLVLRKGVAAEVLDQLIAQSGARSVVWNRLYDKPSTDRDAAIKAALRDRGVDCQSFNAGLLNEPWTVKNGSDQPYKVFTPYWRAAREHLTDVAVTAAPGHLVAPARFPASESLASWNLHPTKPDWSKGFDLWTPGEAGAHARLDAFLKGPIKGYGDQRDIPGVEATSKLSPHLHFGEIGPRQVWLATRSAADQGDIPLAEADKFLSEIGWREFNHSILYNWPHMPSANFKPEFDGFPWVKDEGALEAWKRGQTGYPIVDAGMRELWTTGFMHNRVRMIVASFLIKHLMIDWREGEAWFWDTLLDADLANNVGNWQWTAGSGADAAPYFRIFNPIAQGEKFDPKGDYVRRWVPELRNVSDDVIHKPWTKPLHLPAGAKRLYSRPIVDHAMARARALEAYHGL

SEQ ID NO: 5679 - protein, 94 aa, Bacillus anthracis str. A2012
  misc_feature (11)..(11): Xaa can be any naturally occurring amino acid
MKADLPGFQKXNIQVEFEQDVLTIQATNHNEVEEKNENGTYIRKERSIGSVTRRFSFKQVEEENVRANYKDGVLTIELPKLKEEKNSKTTINIE

SEQ ID NO: 5680 - protein, 255 aa, Mesorhizobium loti MAFF303099
MAVEIEQFMCRSDNFGVLVHDPKSGQTAIIDAPEEAPILAAIKRTGWTPTMILTTHHHMDHVEANLALKERFKLRIVGPEAEKAKIPGIDETVEEGSVLHLGDERIEVIATPGHTAGHVSYHLPASKVAFTADTLFALGCGRLFECKPPVMYESLRKLAALPAATTIYCGHEYTLANARFALTVDPTNSALKERATRIEALRVDNKPTLPTTIGEELSTNPFLRWHDPAIRKHLGMEKAGDAEVFAEIRKRKDNF

SEQ ID NO: 5681 - protein, 223 aa, Magnaporthe grisea 70-15
MTEEEIQQAIRDYATAAENAIEAGFDGVEIHAANGYLIDQFLQDTCNERTDAWGGSVEKRARFALEVTRAVVQAVGADRTGIRLSPYGTFQGMGMADPAPTFGYVVDQLRPLKLAFVHFVESEDGDHRSVDWLVKKVGGPVLVANGFTPESAKAAVDEKYKDSDVVVAFGRLFIPNPDLVFRIQNGVPVEPIDPTGDFYEAKTPKRFLDFPFSSEYQASIKAN

SEQ ID NO: 5682 - protein, 461 aa, Streptococcus dysgalactiae subsp. dysgalactiae
NVVLEKAFGSPLITNDGVTIAKEIELEDHFENMGAKLVSEVASKTNDIAGDGTTTATVLTQAIVREGLKNVTAGANPIGIRRGIETATATAVEALKAIAQPVSGKEAIAQVAAVSSRSEKVGEYISEAMERVGNDGVITIEESRGMETELEVVEGMQFDRGYLSQYMVTDNEKMVADLENPFILITDKKVSNIQDILPLLEEVLKTNRPLLIIADDVDGEALPTLVLNKIRGTFNVVAVKAPGFGDRRKAMLEDIAILTGGTVITEDLGLELKDATMPALGQAAKVTVDKDSTVIVEGAGSSEAIANRVGLIKSQLETTTSDFDREKLQERLAKLAGGVAVIKVGAATETALKEMKLRIEDALNATRAAVEEGIVAGGGTALITAIEKVAALELDGDDATGRNIVLRALEEPVRQIAFNAGYEGSVVIDKLKNSPVGTGFNAATGEWVDMIAAGIIDPVKV

SEQ ID NO: 5683 - protein, 473 aa, Streptococcus dysgalactiae subsp. equisimilis
VTLGPKGRNVVLEKAFGSPLITNDGVTIAKEIELEDHFENMGAKLVSEVASKTNDIAGDGTTTATVLTQAIVREGLKNVTAGANPIGIRRGIETATATAVEALKAIAQPVSGKEAIAQVAAVSSRSEKVGEYISEAMERVGNDGVITIEESRGMETELEVVEGMQFDRGYLSQYMVTDNEKMVADLENPFILITDKKVSNIQDILPLLEEVLKTNRPLLIIADDVDGEALPTLVLNKIRGTFNVVAVKAPGFGDRRKAMLEDIAILTGGTVITEDLGLELKDATMPALGQAAKVTVDKDSTVIVEGAGSSEAIANRVGLIKSQLETTTSDFDREKLQERLAKLAGGVAVIKVGAATETALKEMKLRIEDALNATRAAVEEGIVAGGGTALITVIEKVAALELDGDDATGRNIVLRALEEPVRQIAFNAGYEGSVVIDKLKNSPVGTGFNAATGEWVDMIAAGIIDPVKVTRSA

SEQ ID NO: 5684 - protein, 537 aa, Dehalococcoides sp. CBDB1
MAKQIIFGEKVRVSLKKGVDTLANTVRVTLGPKGHPVALERKWGAPTVIDDGVTIARDIELPDAFENMGAQLVKEAATRTSDAAGDGTTTSIVLAQAIINEAFKNIAAGAEPINLKRGIEKAVAALKAQLRKNSTPVKGKQQIVQVATITGKDPEIGNLIADVMDKVGKDGVITIEESRGLRYETSYVEGMQFDRGYISAYFVTDPGRMESVMEDATILMTDRKIETVAELLPALEKILQISKNLVIVAENVEAEALATLVVNKLRGNLNILAVKAPGYGDRQKAMLEDMAILTGGHVISKEAGRKLDSVTEADLGHARRIVSNKDKTTIIDGEGSAEAIKDRIKQIKAQIEETESAFDREKLQERQAALVGGVAVIAVGAATETEMKERKARVEDALAATRAAIEEGILPGGGTGLLNALPCLDALKLEGDEATGVNIVRKALIEPVRWIATNAGKDGNVIVDKVKNSPVGHGYNAENDVFGDMAEMGIIDPTMVVRSALENAASIANMVLITDSLVADIQEKAPAAPGPEAAGMY

SEQ ID NO: 5685 - protein, 458 aa, Bacillus cereus ATCC 10987
MDENYDKQRQSLLGKDFNDNEERNEQAILHSQTVGSRGPVLEQDSVLHEALQQFIHEKILERPVHVKGFGAFGYFQTIYPMSEHTKLSFLQHSNEKVPVMVRFSLAVSTKGTPDTSRNVRGFSTKFYTKEGIFDLLCNHIPVFSVRDPMRFPETIQALSPSPKNNLIDPNRFWSFVARAPESIHFVVRLYSDNGTAKSLRHIPGHSVNTYVWRNAEGNRKYVKYHWYPFEGVQFITSEEANKLAAENPDYSGKDLYDAIANGKPVEYGLYVQLMDPKDEAHLSYDPLDDTKIWDEKAYPLIPVGKMVLNKNPENFMEQIEKVAFSPSNLLDGAELSDDKMLQGRANIYSDSQRKRIGPEFRKLTINQQQNWTPANQITSGDGRYVDGKLERTSISKQDDFTQAGEFYATLKPIEKEHLAENLAGDLKVISDDIRKVVLEYFHNVSVDLVKRIETEIKK

SEQ ID NO: 5686 - protein, 636 aa, Vibrio cholerae
MCGVAGFISKRLSPVDCLTSMVGSIMHRGPNDSGLWVDDDFGVCLAHARLSIQDLSSAGHQPMHSKSERYVMIFNGEIYNHLTLREELIEIVPSYWNGHSDTETLLAGFEVWGIEQTIQKCVGMFAIVLWDKVLKQLILIRDRFGEKPLYYGWQRDTFLFASELKALKAHPSFEGSINRQALSHFFRLNYIPTPLSIYEGIFKLEPGVIAVFSHEGQLLSKQTFWDASHAVSLQNFSDHDAVDKLDDLIKQSIQDQALSDVPLGAFLSGGVDSSTVVGILQSLSTRPVKTFTIGFDHADFNEASEASDVAKHLGTDHVELIVSAEDALAIINQLPVMYDEPFADASQVPTFLVSKLAKKEVTVCLSGDGGDELFCGYNRYHYTAKVWSYLEKIPFPIRKMLSVFLLTLSPSSWDVLSKTLGLNTRLPNLGNKIQKGAQALKARDIEDLYTRVVSNWDLDEPLVKNTAVEKLPFLSDLTELSHLNDLEKMMLWDKQSYLMDDVLVKTDRATMACSLEGRVPLLDHRIAEFAASLPIHLKYRGGKGKWLLREVLYRYVPKKLIERPKKGFSLPIAEWLRGPLKDWANVLLDSDRIDKEGFLSSELVQKKWREHLAGKRDWSSQLWSVLMFQLWLEKNK

SEQ ID NO: 5687 - protein, 462 aa, Agrobacterium tumefaciens str. C58
MVCRLIPNHGGPQKIPEGRTMIRKVSLLLIGGLMGATAMSVIYSASMPAQAAGPSTYKELSIFGDVFERVRAQYVTPPDDEKLVENAINGMLSSLDPHSSFMNAKDANDMRTQTKGEFGGLGIEVTMENELVKVISPMDDTPASRAGILAGDYISEIDGTPVRGLKLEQAVEKMRGAVKTPIKLTVIRKGADKPLEFTVVRDVIAVRAVKSRVEGDNVGYLRVISFTEKTYDDLEKAIKKIKADVPADKLKGYVLDLRLNPGGLLDQAINVSDAFLERGEVVSTRGRNPDETRRFNATAGDLTDGKPVIVLVNGGSASASEIVAGALQDLRRATVVGTRSFGKGSVQTIIPLGEAGALRLTTALYYTPSGKSIQGTGIEPDIKVEQPLPAELQGRVTAEGESSLSGHIKGQSETDEGSGSSAYVPPEAKDDIQLNYALDLLRGAKTDPSFPPNPDKAVVNKQ

SEQ ID NO: 5688 - protein, 301 aa, Arabidopsis thaliana
  misc_feature (269)..(269): Xaa can be any naturally occurring amino acid
MDPYKYRPSSAYNAPFYTTNGGAPVSNNISSLTIGERGPVLLEDYHLIEKVANFTRERIPERVVHARGISAKGFFEVTHDISNLTCADFLRAPGVQTPVIVRFSTVVHERASPETMRDIRGFAVKFYTREGNFDLVGNNTPVFFIRDGIQFPDVVHALKPNPKTNIQEYWRILDYMSHLPESLLTWCWMFDDVGIPQDYRHMEGFGVHTYTLIAKSGKVLFVKFHWKPTCGIKNLTDEEAKVVGGANHSHATKDLHDAIASGNYPEWEXFFIQTMDPQARSWSHQVGQSQTYPHLQDPWSG

SEQ ID NO: 5689 - protein, 456 aa, Coxiella burnetii RSA 493
MSLKRKIIAIVVAAFISPGLTTVFAFSPPFLPKTLISTPAEDKNDELSRKDVERFVTAIALVHQYYIKNMSNKKLLDSAISGMMANLDPHSSYLDNNDLKELKTTVSGEFVGVGIELTVSKDGLLKVISPLEDSPAARAGIQPNDYIVKIDDQLVQNMSLPEAVSRIKGKKETTVKLTVLRKSANKPLIFSIQREPIHLVSVKSKTLEPGYGYVRITFFQGPVENQLRDAIDKLKKESQGPLKGLVLDLRNNPGGLLDVSAQVADSFLDASKMHRYNDLIVYTKGRVPGADIQIKATPGDLIPHTPMVVLINGGSASASEIVAGALQDYKRAIIMGTPSFGKGSVQTVLPIGKEDAIKLTTALYYTPAGREIQAKGIIPNVAVPEFSITPPKSQLSLDEADFQNHLPNDGAASTKANPTTAEEEKNLLQIQLQLAKTDYQLYQALMMLQGLQVVKH

SEQ ID NO: 5690 - protein, 190 aa, Arabidopsis thaliana
MEEKKTESATKNVKKVNLLDHIAIKHLLDESVSDIVTSRGYKEDVRLSNVKFLLGGIIIVVALVAQFYNKKCGICLLLDFGKYVVLTAVMQLILYIKEKNAILFTYPLEGSFTSTGLVVSSKLPRFSDQYTLTIDSADPQSISAGKSVQFTKSVTQWLTKDGVLVEGLFWKDVEALVKEYTEAGEPKKKR

SEQ ID NO: 5691 - protein, 735 aa, Brassica oleracea
MEVCNCIEPQWPADELLMKYQYISDFFIAVAYFSIPLELIYFVKKSAVFPYRWVLVQFGAFIVLCGATHLINLWTFTTHSRTVALVMTTAKVLTAVVSCATALMLVHIIPDLLSVKTRELFLKNKAAELDREMGLIRTQEETGRHVRMLTHEIRSTLDRHTILKTTLVELGRTLALEECALWMPTRTGLELQLSYTLRQQHPVEYTVPIQLPVINQVFGTSRAVKISPNSPVARLRPVSGKYLLGEVVAVRVPLLHLSNFQINDWPELSTKRYALMVLMLPSDSARQWHVHELELVEVVADQVAVALSHAAILEESMRARDLLMEQNVALDIARREAETAIRARNDFLAVMNHEMRTPMHAIIALSSLLQETELTPEQRLMVETVLKSSSLLATLMNDVLDLSRLEDGSLQLELGTFNLHTLFREVLNLIKPIAVVKKLPITLNLAPDLPEFVVGDEKRLMQIILNIVGNAVKFSKQGSISVTALVTKSDNRAPPDFFVVPTGSHFYLRVKVKDLGAGINPQDIPKLFTKFAQTQSLATRSSGGSGLGLAISKRFVNLMEGNIWIESEGVGKGCTAIFDVKLAISNESKQSGIPKVPANPQHVNFAGLKVLVMDENGVSRMVTKGLLVHLGCEVTTVSSNEECLRVVSHEHRVVFMDVCTPGVENYQIALRIHEKFTKRHQRPLLVALTGNTDKSTKEKCMSFGLDGVLLKPVSLDNMRNVLSDRLEHRVLYEAM

SEQ ID NO: 5692 - protein, 493 aa, Arabidopsis thaliana
MDPYKYRPSSAYNAPFYTTNGGAPVSNNISSLTIGERGPVLLEDYHLIEKVANFTRERIPERVVHARGISAKGFFEVTHDISNLTCADFLRAPGVQTPVIVRFSTVVHERASPETMRDIRGFAVKFYTREGNFDLVGNNTPVFFIRDGIQFPDVVHALKPNPKTNIQEYWRILDYMSHLPESLLTWCWMFDDVGIPQDYRHMEGFGVHTYTLIAKSGKVLFVKFHWKPTCGIKNLTDEEAKVVGGANHSHATKDLHDAIASGNYPEWKLFIQTMDPADEDKFDFDPLDVTKIWPEDILPLQPVGRLVLNRTIDNFFNETEQLAFNPGLVVPGIYYSDDKLLQCRIFAYGDTQRHRLGPNYLQLPVNAPKCAHHNNHHEGFMNFMHRDEEINYYPSKFDPVRCAEKVPTPTNSYTGIRTKCVIKKENNFKQAGDRYRSWAPDRQDRFVKRWVEILSEPRLTHEIRGIWISYWSQVRTKKHSVKFLRPFYQVSAN

SEQ ID NO: 5693 - protein, 544 aa, Treponema pallidum subsp. pallidum str. Nichols
MAKQLLFNEEARKKLLSGVEQISSAVKVTLGPKGRNVLLEKGYGAPTVTKDGVSVAKEVELEDPFENMGAQLLKEVATKTNDVAGDGTTTATVLAYSMVREGLKAVAAGMTPLELKRGMDKAVAIAVDDIKQNSKGIKSNEEVAHVASVSANNDKEIGRILASAIEKVGNDGVIDVDEAQTMETVTEFVEGMQFDRGYISSYFVTDRDRMETVYENPYILIYDKSISTMKDLLPLLEKIAQTGRPLLIIAEDVEGEALATLVVNSLRGTLKTCAVKAPGFGDRRKEMLEDIAILSGGQVISEDLGLKLESADIALLGQAKSVKVDKENTTIIDGSGKSKDIKDRIEQIKKQIEASTSDYDSEKLKERLAKLSGGVAVIKIGAVTEVEMKEKKHRVEDALNATRAAIEEGIVAGGGLALIQAAAALEKADLSGLTPDEAVGFKIVRRALEEPIRQISENAGIDGAVVAEKAKEKRGIGFDASKMEWVDMIKVGIIDPAKVTRSALQNAASVSGLLLTTECAIAAIPEKSSSTPPAPDMGGMGGMY

SEQ ID NO: 5694 - protein, 592 aa, Cryptococcus neoformans var. neoformans JEC21
MCGIFCCFNRAGDISQYRARAIACSKRQRHRGPDWSGCYMTNNTVLVHERLAIVGVDTGAQPLTNEDESLVLAVNGEIYNHVALRKSLKNKDAVFKTHSDCEVIMHLYKEHDTGLCNMLDGMFSFVLVDKSVSPPRLIAARDPIGITTLYMGWNSQSPDTLYFASELKCIHEECDNLQAFPPGHFYDSKEKKLTRYFNPSWWDSDKGVVPHNDIDYKLLRETLEAAVKKRLMSEVPYGVLLSGGLDSSLIASIAARETDKLAEEQEKLRQERKQAIASGKWVGDEQPLASWPQLHSFAIGLPGAPDLIAARKAADFLGTIHHEYNFTVQEGLDAIPEVIHHLETYDVTTVRASTPMYLLSRKIKAMGVKMVLSGEGSDEIFGGYLYFHAAPTAKDFHEECVKRVKNLHTADCLRANKSTMAWGLEARVPFLDKTFLEVSMNVDAKYKMFSKGTHQEVDEDGRPKMEKYILRKAFDCSPEGKAYLPDSILWRQKEQFSDGVGYSWIDGMKDHAAAIVSDEKFANRATRWPLDTPDTKEAYWIREIFEHHFPTEAAAKTAVRWVPKQEWGVSSDPSGRAVSIHTAAYADGEAKA

SEQ ID NO: 5695 - protein, 582 aa, Oryza sativa (japonica cultivar-group)
MLHFLSSSSPLNPQFLLLPRQSARLRVLLSIPVSAMSSSSSSSSRGALAAAAVPSLSADEAGAAADEAFLRYTSPSMRRSGGGGVAIVWFRNDLRVLDNEAVVRAWAASDAVLPVYCVDPRISAGSTHYFGFPKTGALRAQFLIECLEDLKRNLTKQGLDLLIRHGKPEDILPSIAKAVTAHTVYAHKETCSEELLVEHLVRKGLEQVVIPQGGASNQKKPRNPKLQLIWGATLYHVDDLPFSVNNLPDVYTQFRKAVESKSSVRNCSKLPPSLGPPPGSGLDEIGGWGTVPTLESLGLSMTKAEKGMHFVGGESAALGRVHEYFWKKDQLKVYKETRNGMLGPDYSTKFSPWLASGSLSPRYICEEVKRYEKQRIANDSTYWVLFELIWRDYFRFISAKYGNSIFHLGGPRNVESKWSQDQALFESWRDGRTGYPLIDANMKELLATGFMSNRGRQIVCSFLVRDMGIDWRMGAEWFETCLLDYDPASNYGNWTYGAGVGNDPREDRYFSIPKQAKTYDPDGEYVAYWLPELRSIAKERRNFPGASYIKQVVPLKFDGGHQKRDQQFNRQRRPGHMYRRQK

SEQ ID NO: 5696 - protein, 464 aa, Listeria monocytogenes str. 1/2a F6854
MLYSKENKESYLEPVFGSSAEDRDIPKYTLGKEPLEPRIAYRLVKDELLDEGSARQNLATFCQTYMEDEATKLMSETLEKNAIDKSEYPRTAELENRCVNIIADLWHAPKDQKFMGTSTIGSSEACMLGGMAMKFAWRKRAEKLGLDIYAKKPNLVISSGYQVCWEKFCVYWDIDMRVVPMDKEHMQLNTDQVLDYVDEYTIGVVGILGITYTGRYDDIYALNEKLEEYNSKTDYKVYIHVDAASGGFFTPFVEPDIIWDFRLKNVISINTSGHKYGLVYPGIGWVLWKDESYLPEELIFKVSYLGGEMPTMQINFSRSASHIIGQYYNFLRYGFEGYRTIHQKTSDVAQYLAHAVEQTGYFDIFNDGSHLPIVCYKLKNDANVKWTLYDLADRLQMRGWQVPAYPLPKSLENIIIQRYVCRADLGFNMAEEFIQDFQASIQELNNAHILFHNTQQSGVHGFTH

SEQ ID NO: 5697 - protein, 323 aa, Acinetobacter sp. ADP1
MSNLTLAQYLQQKNGNLTPELAQVIETIANSCKKIDHAIQKGALADLLGSAGNENVQGETQKKLDVLSNDFLIDALKVHPHVGGLASEELDEFTPGQQDGKYLVLFDPLDGSSNIDINMCVGTIFSILPAKNSITQTQDFMQAGTEQVAAGYVLYGPSTMMALTCGEGVAFFTFDPESQTFILTSDAIQLDADTQEFAINASNQRHWEEPVKRYIDELLAGKTSVRGKDFNMRWVACMVADIHRILCRSGIFMYPYDLKDPSKAGRLRLMYEANPMSFLIEQAGGSATTGRVRIMDIQPNDLHQRVPVIIGSKNEVDLVTSYH

SEQ ID NO: 5698 - protein, 473 aa, Streptococcus dysgalactiae subsp. equisimilis
TVKVTLGPKGRNVVLEKAFGSPLITNDGVTIAKEIELEDHFENMGAKLVSEVASKTNDIAGDGTTTATVLTQAIVREGLKNVTAGANPIGIRRGIETATATAVEALKAIAQPVSGKEAIAQVAAVSSRSEKVGEYISEAMERVGNDGVITIEESRGMETELEVVEGMQFDRGYLSQYMVTDNEKMVADLENPFILITDKKVSNIQDILPLLEEVLKTNRPLLIIADDVDGEALPTLVLNKIRGTFNVVAVKAPGFGDRRKAMLEDIAILTGGTVITEDLGLELKDATMPALGQAAKVTVDKDSTVIVEGAGSSEAIANRVGLIKSQLETTTSDFDREKLQERLAKLAGGVAVIKVGAATETALKEMKLRIEDALNATRAAVEEGIVAGGGTALITVIEKVAALELDGDDATGRNIVLRALEEPVRQIAFNAGYEGSVVIDKLKNSPVGTGFNAATGEWADMIAAGIIDPVKVT

SEQ ID NO: 5699 - protein, 397 aa, Lycopersicon esculentum
MGRGKVELKRIENKINRQVTFAKRRNGLLKKAYELSILCDAEIALIIFSSRGKLYEFCSNSSMSKTLERYHRYNYGTLEGTQTSSDSQNNYQEYLKLKTRVEMLQQSQRHLLGEDLGQLGTKDLEQLERQLDSSLRQIRSTKTQHILDQLAELQQKEQSLTEMNKSLRIKLEELGVTFQTSWHCGEQSVQYRHEQPSHHEGFFQHVNCNNTLPISMEQILERYERYSYAERRLLANNSESPVQENWSLEYTKLKARIDLLQRNHKHYMGEDLDSMSLKDLQNLEQQLDSALKLIRSRKNQLMHESISELQKKERAILEENNMLTKKIKEKDKIVEQQGEWHQQTNQVSTSTSFLLQPHQCLNMGGNYQDEVAEARRNNELDLNLDSLYPLYNMNKHL

SEQ ID NO: 5700 - protein, 266 aa, Bordetella pertussis Tohama I
MQTAPPLSAVVPLPAFSDNYIWALAHEGQAAVVDPGDAAPVLRWLRATGATLRAILLTHHHPDHVGGVLELVQATGATVYGPAGETLPHCDVRLAEGDRVTLPELALALEVLDVPGHTAGHIAYTGRAAGVERVLFCGDTLFAGGCGRLFEGTPAQMLDSLEKLSALPADTQVCCAHEYTLANLRWALAVEPANRTLQQWYQRAQELRNEGTPTLPSTIGQERETNPFLRTPHAAVAHAAAVWSGRSLATPVEVFAALRQWKNNFK

SEQ ID NO: 5701 - protein, 580 aa, Brassica rapa subsp. pekinensis
MCGILAVLGCVDNSQATRSRIIKLSRRLRHRGPDWSGLHCYEDCYLAHERLAIIDPISGDQPLYSEDKTVVVTVNGEIYNHKALRESESLKSHKYHTGSDCEVLAHLYEEHGEEFINMLDGMFAFVLLDTKDKSYIAVRDAIGVIPLYIGWGLDGSVWFASEMKALSDDCEQFMAFPPGHIYSSKQGGLRRWYNPPWFSELVPSTPYDPLVLRDTFEKAVIKRLMTDVPFGVLLSGGLDSSLVASVAIRHLEKSDARQWGSKLHTFCIGLKGSPDLKAGKEVADYLGTRHHELHFTVQEGIDAIEEVIYHVETYDVTTIRASTPMFLMSRKIKSLGVKMVLSGEGSDEIFGGYLYFHKAPNKKELHEETCRKIKALYQYDCLRANKSTSAWGVEARVPFLDKAFLDVAMGIDPEWKMIRPDLGRIEKWVLRNAFDDEKNPYLPKHILYRQKEQFSDGVGYSWIDGLKDHANKHVSDAMLTNANFVFPENTPLTKEAYYYRAIFEKFFPKSAARATVPGGPSVACSTAKAVEWDAAWKGNLDPSGRAALGVHVAAYEGDKAEAPRPEKVQKLAEKTAEAIV

SEQ ID NO: 5702 - protein, 474 aa, Streptococcus dysgalactiae subsp. equisimilis
KVTLGPKGRNVVLEKAFGSPLITNDGVTIAKEIELEDHFENMGAKLVSEVASKTNDIAGDGTTTATVLTQAIVREGLKNVTAGANPIGIRRGIETATATAVEALKAIAQPVSGKEAIAQVAAVSSRSEKVGEYISEAMERVGNDGVITIEESRGMETELEVVEGMQFDRGYLSQYMVTDNEKMVADLENPFILITDKKVSNIQDILPLLEEVLKTNRPLLIIADDVDGEALPTLVLNKIRGTFNVVAVKAPGFGDRRKAMLEDIAILTGGTVITEDLGLELKDATMPALGQAAKVTVDKDSTVIVEGAGSSEAIANRVGLIKSQLETTTSDFDREKLHERLAKLAGGVAVIKVGAATETALKEMKLRIEDALNATRAAVEEGIVAGGGTALITVIEKVAALELDGDDATGRNIVLRALEEPVRQIAFNAGYEGSVVIDKLKNSPVGTGFNAATGEWVDMIAAGIIDPVKVTRSA

SEQ ID NO: 5703 - protein, 547 aa, Rickettsia sibirica 246
MATKLIKHGSKAREQMLEGIDILADAVKVTLGPKGRNVLIEQSFGSPKITKDGVTVAKSIELKDKIRNAGAQLLKSAATKAAEVAGDGTTTATVLARALAREGNKLVAAGYNPMDLKRGMDLAVNAVVEEIKKSSKKINSQEEIAQVGTISSNGDKEIGEKIAKAMEEVGKEGVITVEEAKNFSFDVEVVKGMMFDRGYLSPYFVTNSEKMVAELENPFILIFEKKLSNLQPMLPILEAVVQSQRPLLIIAEDVEGEALATLVVNRLRGGLKVAAVKAPGFGDRRKAMMEDIAILTKGELITEDLGMKLENVSIKSLGTAKRVTISKENTVIVDGNGDKKNIEDRVLQIKSQIAETTSDYDKEKLQERLAKLSGGVAVLKVGGATEVEVKERKDRVEDALAATRAAVEEGVVAGGGVTLLHASQPLTKLKVENKDQQAGIEIVIEALKDPLKQIVENAGENGGVVVGKLLEHKDKNYGFNAQDMQYVDMIKAGIIDPAKVVRTALQDAASVASLIITTETLIVDEPSDKAEPMPMRGGMGGMGGMDF

SEQ ID NO: 5704 - protein, 471 aa, Streptococcus dysgalactiae
LGPKGRNVVLEKAFGSPLITNDGVTIAKEIELEDHFENMGAKLVSEVASKTNDIAGDGTTTATVLTQAIVREGLKNVTAGANPIGIRRGIETATATAVEALKAIAQPVSGKEAIAQVAAVSSRSEKVGEYISEAMERVGNDGVITIEESRGMETELEVVEGMQFDRGYLSQYMVTDNEKMVADLENPFILITDKKVSNIQDILPLLEEVLKTNRPLLIIADDVDGEALPTLVLNKIRGTFNVVAVKAPGFGDRRKAMLEDIAILTGGTVITEDLGLELKDATMPALGQAAKVTVDKDSTVIVEGAGSSEAIANRVGLIKSQLETTTSDFDREKLQERLAKLAGGVAVIKVGAATETALKEMKLRIEDALNATRAAVEEGIVAGGGTALITVIEKVAALELDGDDATGRNIVLRALEEPVRQIAFNAGYEGSVVIDKLKNSPVGTGFNAATGEWVDMIAAGIIDPVKVTRSA

SEQ ID NO: 5705 - protein, 415 aa, Tradescantia virginiana
TTPISIEDVRREVKILKALSGHKHLVKFYDACEESLNVYLIMELCEGGELLDRILSRGGKYTEEDAKAIVMQILNVVAYCHLQGVVHRDLKPENFLFINRDENAPMKLIDFGLSDFTRPDERLNDIVGSAYYVAPEVLHRSYSMEADIWSIGVITYILLCGSRPFWARTESGIFRSVLRADPNFDDSPWPTASPEAKDFVKRLLNKDYRKRMTAAQALSHPWLRDKEPQIPLDILIYKQTKLYLRATPLKRAALKALSKALTEDELVYLRLQFKLLEPNNDGRVSLENFHTALAQNATEAMKESRVLDILNSLESLAYRRMDFEEFCAAAISCYQLEALEHWEQIASTAFEYFEQDGNRVVSVEELAQDLNLPQNAYAILKDWIRQSDKKLSFLGYTRYTRYLHGVTPRPNTRQH

SEQ ID NO: 5706 - protein, 230 aa, Zea mays
  misc_feature (226)..(226): Xaa can be any naturally occurring amino acid
RKMARKPLDYEELNENVKRVQYAVRGELYLRASELQKEGKKIIFTNVGNPHALGQKPLTFPRQVVALCQAPFLLDDPHVGLMFPADAIARAKHYLAMAPGGLGAYSDSRGIPGIRKEVADFIHKRDGYPSDPELIYLTDGASKGVMQILNTIIRNEMDGILVPVPQYPLYSAIISLYGGSLVPYYLEEEANWNLDFSNIRQAVAEARSKGISVRATVIINPGNPTXQFLS

SEQ ID NO: 5707 - protein, 449 aa, Arabidopsis thaliana
MASWIFKLLLLLQCVLVLIQHADSSSIIRYLPGFEGPLPFELETGYIGVGQKEEDQLFYYFIKSENNPEEDPLLVWLTGGPGCSSFSGLVYENGPLAFKVETYNGSVPTLVSTTYSWTKVANIIYLDQPVGTGFSYSRNPFADIPSDTGSVKRVNEFVRKWLAKHPEYFSNPFYVTGNSYSGKVIPAIVQEISNGNYICCKPQINLQGYVIGNPVAYYDHDKDFRIPFAHGVALISDELFESLKASCGGSYSVVDPLNTECLKLIEDYDKCVSGIYEELILKSKCEHTSPDCYTYRYLLSEYWADNETVRRALKVVKGSKGTWERCDYRVLSNQDIKSSIPFHINNSIRGYRSLVISGDHDMTIPFLGTQAWIRSLNYSITEKWRPWMILDQVAGYTKTYANKMTLATVKVCSFIHIYMSNKNAKLVYTSLLIGLWVWFIIGRWAHIGI

SEQ ID NO: 5708 - protein, 465 aa, Deschampsia antarctica
  misc_feature (272)..(272): Xaa can be any naturally occurring amino acid
MAAAFSSTVGAPASTPTSFLGNKLKKQVTSAVNYHGKSFKANRFTVMAKDIDEGKQTDGDKWKGLAYDISDDQQDITRGKGIVDSLFQAPMGDGTHEAVLSSYEYVSQGLKKYDFDNTMGGFYIAPAFMDKLVVHLSKNFMTLPNIKIPLILGIWGGKGQGKSFQCELVFAKMGINPIMMSAGELESGNAGEPAKLIRQRYREAADMIKKGKMCCLFINDLDAGAGRMGGTTQYTVNNQMVNATLMNIADAPTNVQLPGMYNKEENPRVPIXVTGNDFSTLYAPLIPDGRMEKFYWAPTREDRIGVCKGIFQTDNVSDESVVKIVDTFPGQSIDFFGALRARVYDDEVRKWVSSTGIENIGKRLVNSRDGPVTFEQPKMTVEKLLEYGHMLVQEQDNVKRVQLADTYMSQAALGDANKDAMKTGSFYGKGAQQGTLPVPEGCTDRDAKNFDPTARSDDGSCLYTF

SEQ ID NO: 5709 - protein, 124 aa, Glycine max
MAAISLRKGNTRLPPEVNRVLYVRNLPFNITSEEMYDIFGKYGAIRQIRIGTNKDTRGTAFIVYEDIYDAKTAVDHLSGFNVANRYLIVLYYQQAKMSKKFDQKKKEDEIARMQEKYGVSTKDK

SEQ ID NO: 5710 - protein, 175 aa, Capsicum annuum
MGRGKVELKRIDNKINRQVTFAKRRNGLLKKAYELSVLCDAEIALIIFSSRGKLYEFCSSSSMSKTLERYHKHNYGALEGTQPSADSQNNYQEYLKLKTRVEVLQQSQRHMLGEDLGELNTKDLEQLERQLDSSLRQIRSTKTQHMFDQLAELHQKEQSLTEMNKSLKTKVSISP

SEQ ID NO: 5711 - protein, 476 aa, Larrea tridentata
MAAAYSTVGAVNRAPLSLNGSGARASLVPSTAFFGSSLKKSAAKFPKASSGNFKIVAQEISEDQQTDKDKWKGLAYDISDDQQDITRGKGMVDTLFQAPMQSGTHYAVMSSYDYISQGLRQYNLDNNMDGFYIAPAFMDKLVVHITKNFLSLPNIKIPLILGIWGGKGQGKSFQCELVFAKMGINPIMMSAGELESGNAGEPAKLIRQRYREAADIIKKGKMCCLFINDLDAGAGRMGGTTQYTVNNQMVNATLMNIADNPTNVQLPGMYNKEENPRVPIIVTGNDFSTLYAPLIRDGRMEKFYWAPTREDRIGVCKGIFRTDNVADDDIVKLVDTFPGQSIDFFGALRARVYHDEVRKWVSEVGVDTIGKKLVNSKEGPPSFEQPKMTIDKLLGYGGMLVQEQENVKRVQLADKYMSEAALGDANNDAIKRGTFYGGQAAQQVGNVPVPEGCTDPQATNYDPTARSDDGSCVYKF

SEQ ID NO: 5712 - protein, 468 aa, Oryza sativa (japonica cultivar-group)
MPTAASERDGGGRAALGKAAAGLAAAAVVSLTGLAAEPLSPPPPARAESLTVAFPVSKAREVNRVQRTLVEAWGLIRETFVDPTFNHQDWDMRLQQTMVEMFPLKSEDAAYGKISGMLSTLGDPFTKIISPKEYQSFRIGSDGSVQGVGVFINKEPSSGRLLVMDCIEGGPADRAGLHGGDELVEIDGKSVSGLDGEAAAQRLRGRVGTTVKVKVLDGTENERNGRIRQKEVQLSREVINLSPLSTAIISHRSDDGRECKTGYVRLAAFSQTAAAEMESAIKKMEDEGVQSYILDLRNNPGGLVKAGLDVAQMWLDGNETLVNTVDREGNVLPINMARGHSLTHDPLVVLVNEGSASASEILAGALHDNGRAILVGHRTFGKGKIQSVTELDDGSALFITVAKYLSPALHEIDQVGIQPDIQCTPEMLSLPRAPSLKEDDKATNLEMDSCIMVAEQALEIEKSKGSAS

SEQ ID NO: 5713 - protein, 613 aa, Brassica oleracea
MEPCDCFETNANQDDLLVKYQYISDALIALAYFSIPLELIYFVNKSAFFPYKWVLMQFGAFIILCGATHFINLWMFFNHSKVVAIVMTLAKVSCAAVSCATALMLVHIIPDLLSVKNRELFLKKKADELDREMGLILTQEETGRHVRMLTHEIRSTLDRHTILRTTLVELGKTLCLEECALWMPSQSGLYLQLSHTLSHKIQVGSSVPINLPIINQLFNSAQAMHIPHTCPLAKIGPPVGRYAPPEVVSVRVPLLHLSNFQGSDWSDLSGKGYAIMVLILPTDGARKWRDHELELVEVVADQVAVALSHAAILEESMHARDQLMEQNFALDKARQEAEMAVHARNDFLAVMNHEMRTPMHAIISLSSLLLETELSPEQRVMIETILKSSNLVATLISDVLDLSRLEDGSLLLENEPFSLQAIFEEVISLIKPIASVKKLSTNLILSADLPAYAIGDEKRLMQTILNIMGNAVKFTKEGHVSIIASIMKPESLRELPSPDFYPVPSDNHFYLCVQVKDTGCGIHTQDIPFLFTKFVQPRTGAQRNHSGAGLGLALCKRFVGLMGGCIWIESEGIEKGCTASFIIRLGICNGPGSSSGSMALRLAAKSQTRPWNW

SEQ ID NO: 5714 - protein, 435 aa, Larrea tridentata
MAAAYSTVGAVNRAPLSLNGSGARASLVPSTAFFGSSLKKSAAKFPKASSGNFKIVAQEISEDQQTDKDKWKGLAYDISDDQQDITRGKGMVDTLFQAPMQSGTHYAVMSSYDYISQGLRQYNLDNNMDGFYIAPAFMDKLVVHITKNFLSLPNIKIPLILGIWGGKGQGKSFQCELVFAKMGINPIMMSAGELESGNAGEPAKLIRQRYREAADIIKKGKMCCLFINDLDAGAGRMGGTTQYTVNNQMVNATLMNIADNPTNVQLPGMYNKEENPRVPIIVTGNDFSTLYAPLIRDGRMEKFYWAPTREDRIGVCKGIFRTDNVPEEDIVKVVDQFPGQSIDFFGALRARVYDDEVRKWVSEVGVDTIGKKLVNSKEGPPTFEQPKMTIDKLLQYGNMLVEEQENVKRVQLADKYMSEAALGDANQDAIKRGTF

SEQ ID NO: 5715 - protein, 491 aa, Staphylococcus epidermidis RP62A
MNDHQKNHATSQDDNTKSTPSKNSKHIKIKLWHFILVILGIILLTSIITVVSTILISHQKSGLNKEQRANLKKIEYVYQTLNKDYYKKQSSDKLTQSAIDGMVKELKDPYSEYMTAEETKQFNEGVSGDFVGIGAEMQKKNEQISVTSPMKDSPAEKAGIQPKDIVTQVNHHSVVGKPLDQVVKMVRGKKGTYVTLTIKRGSQEKDIKIKRDTIHVKSVEYEKKGNVGVLTINKFQSNTSGELKSAIIKAHKQGIRHIILDLRNNPGGLLDEAVKMANIFIDKGNTVVQLEKGKDKEELKTSNQALKQAKDMKVSILVNEGSASASEVFTGAMKDYHKAKVYGSKTFGKGIVQTIREFSDGSLIKYTEMKWLTPDGHYIHGKGIRPDVSISTPKYQSLNVIPDNKTYHQGEKDKNVKTMKIGLKALGYPIDNETNIFDEQLESAIKTFQQDNNLKVNGNFDKKTNDKFTEKLVEKANKKDTVLNDLLNKLK

SEQ ID NO: 5716 - protein, 486 aa, Shewanella sp. MR-7
MSQQYLTSQSGSPIADDQNSLSAGERGPLLLQDWHLIEKLAHFNRERIPERVVHAKGTGVYGTFTLTKDLSEYTIADHFNGVGKQTETFVRFSTVGGEMGSADAERDPRGFGLRFYTARGNHDIVGNNTPTFFLRDGIKFPDFIHTQKRNPLTNLKDPQAMWDFWSLNPEAMHQVTILMSDRGIPANYRQMHGYGSHTFSFWNAKGERFWVKFHFKSQQGVVNLTNEQADKLKGIDPDSSQRDMVVAVTDGNFPRWTVNVQIMPEADANTYHINPFDLTKVWPHGDYPLIEIGVLELNRLPQNYFAEVEQVALAPSNLVPGVGASPDKMLQARLFAYADAQRYRIGANYNQLPVNCPHATKANHHQRAGAMAGTQCPYHGSQTGGDAAANYGPNSTVGALVEPANFAEPPLRLDGEAARYSRYNQDDYTQAGNLYRIFSEAEKARLVETISGSLRQASVEVQQRMLAHFHKADADYGQRIQTALGL

SEQ ID NO: 5717 - protein, 833 aa, Triticum aestivum
MLCLTASSSPSPSPSLPPRPSRPAADRPGPGISGGGNVRLSAVPAPSSLRWSWPRKAKSKFSVPVSAPREYTMATAEDGFGDLPIYDLDPKFAGFKDHFSYRMKKYLEQKHSIEKYEGGLEEFSKGYLKFGINTENDATVYREWAPAAKDAQLIGDFNNWNGSGHRMTKDNFGVWSIRISHVNGKPAIPHNSKVKFRFHRGDGLWVDRVPAWIRYATFDASKFGAPYDGVHWDPPTGERYVFKHPRPRKPDAPRIYEAHVGMSGEKPEVSTYREFADNVLPRIKANNYNTVQLMAIMEHSYYASFGYHVTNFFAVSSRSGTPEDLKYLVDKAHSLGLRVLMDVVHSHASSNMTDGLNGYDVGQNTQESYFHTGERGYHKLWDSRLFNYANWEVLRYLLSNLRYWMDEFMFDGFRFDGVTSMLYNHHGINMSFAGNYKEYFGLDTDVDAVVYIMLANHLMHKILPEATVVAEDVSGMPVLCRSVDEGGVGFDYRLAMAIPDRWIDYLKNKDDLEWSMSAIAHTLTNRRYTEKCIAYAESHDQSIVGDKTMAFLLMDKEMYTGMSDLQPASPTIDRGIALQKMIHFITMALGGDGYLNFMGNEFGHPEWIDFPREGNNWSYDKCRRQWSLSDIDHLRYKYMNAFDQAMNALDDKFSFLSSSKQIVSDMNEEKKIIVFERGDLVFVFNFHPSKTYDGYKVGCDLPGKYKVALDSDALMFGGHGRVAHDNDHFTSPEGVPGVPETNFNNRPNSFKVLSPPRTCVAYYRVEEKAEKPKDEGAASWGKAAPGYIDVEATRVKDAADGEATSGSKKASTGGDSSKKGINFVFGSPDKDNK

SEQ ID NO: 5718 - protein, 156 aa, Arabidopsis thaliana
MSLVPSFFGGRRTNVFDPFSLDVWDPFEGFLTPGLTNAPAKDVAAFTNAKVDWRETPEAHVFKADVPGLKKEEVKVEVEDGNILQISGERSSENEEKSDTWHRVERSSGKFMRRFRLPENAKVEEVKASMENGVLSVTVPKVQESKPEVKSVDISG

SEQ ID NO: 5719 - protein, 621 aa, Solibacter usitatus Ellin6076
MLGRQSIGAEPLPGGGVSFRVWAPKRTRVEVVLDSGDSMNMERRAGGYFACVAPHAGHGTRYRYRLDEGDAFPDPASRFQPEGPHGPSQVVDATRFHWTDAAWGGAGIHRQVVYEMHTGTFTREGTWDAARRELQELAETGITIIELMPVSEFPGRFGWGYDGVSWFAPFHHYGEPDDLRRFVDHAHRLGLGVVLDVVYNHLGPDGNYLKQFSDAYFTDRYENEWGEALNFDGPDSAPVRDFVCANAAYWADEFHLDGLRLDATQQIFDASPENIMAALATAFRAAAGARKTFIVGENEPQHTRLARPLEQGGYGLDGLWNDDFHHAARVAATGHNEAYYSDYRGSPQELISALKYGYLFQGQRYEWQGKTRGTPAWGMHPAQFVIYIQNHDQLANSAAGARLHEIASPGRYRALTALLLLAPATPMLFQGQEFGASNPFLFFADFDSELRKLVAAGRRKFLSQFRSVADPEITSRLPDPADPSTFERCKLDFRERQTHEPLYRLHKDLLRMRKQDPVFSDPRPGGLDGAVLSEGAFVLRFFEGPAGSGGHDRLLLVNLGRDLILNNGSEPLLAPPQDMCWRLHWSSEDPRYGGSGTVPFDESAPWRVPGEAAVAMIPCRK

SEQ ID NO: 5720 - protein, 465 aa, Arabidopsis thaliana
MRNLSFIVLFLLTLFFIHHLVDASLLVKSLPGFEGPLPFELETGYVSIGESGDVELFYYFVKSERNPENDPLMIWLTGGPGCSSICGLLFANGPLAFKGDEYNGTVPPLELTSFSWTKVANILYLEAPAGSGYSYAKTRRAFESSDTKQMHQIDQFLRSWFVKHPEFISNPFYVGGDSYSGKIVPGAVQQISLGNEKGLTPLINIQGYVLGNPVTDKNIETNYRVPFAHGMGLISDELFESLERSCGGKFFNVDPSNARCSNNLQAYDHCMSEIYSEHILLRNCKVDYVLADTPNIRTDRRRVMKEFSVNDSSSLPPPSCFTYRYFLSAFWANDENVRRALGVKKEVGKWNRCNSQNIPYTFEIFNAVPYHVNNSLKGFRSLIYSGDHDSMVPFSSTQAWIRALNYSIVDDWRPWMMSSNQVAGYTRTYANKMTFATIKGGGHTAEYTPDQCSLMFRRWIDGEPL

SEQ ID NO: 5721 - protein, 477 aa, Synechococcus sp. CC9605
MPTSRVLFWHRRDLRLADNLGLVVAAQISPAVTGVYVLDPAVINPPPELPPMAPARLWFLIESLVELQQRWREAGSRLLVVEGDPVAVLPQVAQQISAEAVVWNRDVEPYARKRDRQVAKTLQADGRRVVADWDQLLIAPELLKTGAGDPYRVYGPFLRNWRGQVLAQKPATVAAPTGLVDLPPELMPAGDPLPALRESHGFQGSEICPCRPGEAAALEQLTTFCNGPLLGYEPDRNFPGTAGTSYLSAALSVGTLSPRQAWCAAQDSREQARSEEQLQAIAVWEQELGWREFYQQALFYFPELADGPYREQWRRFPWENNEDWFDFWKEGQTGMPIIDAAMRQLNQTGWMHNRCRMIVASYLVKDLICDWRWGERAFMELEVDGDLAANNGGWQWSASSGMDTKPLRIFNPATQASKFDSAGDYIRRWVPELRHVNTKDLLSGEIGALERRDYPEPLVDHKNQQARFKALYATIRS

SEQ ID NO: 5722 - protein, 252 aa, Triticum aestivum
MGRGRVELKRIENKINRQVTFAKRRNGLLKKAYELSVLCDAEVALIIFSNRGKLYEFCSGQSMPKTLERYQKCSYGGPDTAIQNKENELVQSSRNEYLKLKARVENLQRTQRNLLGEDLGSLGIKDLEQLEKQLDSSLRHIRSTRTQHMLDQLTDLQRKEQMLCEANKCLRRKLEESSQQMQGQMWEQHAANLLGYDQLRQSPHQQQAPHHGGNGFFHPLDPTTEPTLQIGYTQEQINNACVAASFMPTWLP

SEQ ID NO: 5723 - protein, 707 aa, Zea mays
MSASQSSMSGAGEPGARAVVWFRRDLRVEDNPALAAAARAAGEVVPAYVWAPEEDGAYYPGRVSRWWLSQSLKHLDASLRRLGAARLVTRRSNDAVAALLDLVRCTGATHLLFDHLYDPLSLVRDYRVKEQLAAEGIDVQSFNADLLYEPWEVLDEDRRPFTMFAPFWNRCLCMPDPAAPLLPPKRINSGDLSRCPWDELVFEDESERGSNALLARAWSPGWQNADKALTAFLNGPLVDYSVNHKKADSASTSLLSPYLHFGELSVRKVFHLVRMKQLMWSNDGDRAGEESCTLFLRAIGLREYSRYLTFNHPCSLEKPLLSHLRFFPWVVDEVHFKVWRQGRTGYPLVDAGMRELWATGWVHDRIRVVVSSFFVKVLQLPWRWGMKYFWDTLLDADLESDALGWQYISGSLPDGRELDRIDNPQFEGYKFDPHGEYVRRWLPELARLPTEWIHHPWDAPESVLQAAGVELGSNYPRPIVELDAANSRLQGALSEMWELEAASRAAIENGMEEGLGDSTDEPPIDFPQELRMEVDRQPAQPAIIHTPVVAGWRREDQRVPSMTSSLIRAETELTADFGNTSEDSRPEVPSNIHLQARPEREETVDGGTGNAVRVHGNHHQQNLQNNMHRVLGIAPSISEASSSWTGRDGGVVPVWSPPAASGHSDPYAADEADISSRGYLDRHPQSHTMMNWSQLSQSLTTGWEVDN

SEQ ID NO: 5724 - protein, 427 aa, Cryptococcus neoformans var. neoformans JEC21
MPIAEATDILFSPITLGAMKLQHRVALAPMTRNRAVPSNLNPGTYVPCPLMAEYYTQRTTEGGLVISEALPISLQAADARAVPGIFTEEQIEAWKPIVDAVHQAGGIFVAQLWHQGRTRMVENEYAIISSSAVPIVKSFTGLPGLKPRPMTLEDIERVKKEYAQAAVNCIKAGFDGVEIHGANGYLPEQFLHSNINRRDDKYGGSPENRNRFVLEICQAVTRVIGPDRFGLRLSPYGFFNEARGDNRVEQWTMLCRDIKGLGWAYVHFMEPRYDEIRSGADKLAELGENNEDVTLDPFVNALENCIPVIVAGGYDADNVRKSRVLEDKKADVVAFGRYFTSNPDLVYRLKHDKPFVQYIRPRFYGPFPDPEVGYTDFPFCHELSGTPERKALLSSGTAKVLKVAEPGWQLSKSGIQLGGLFAAVTQD

SEQ ID NO: 5725 - protein, 220 aa, Oryza sativa
MTAALQALLDPTALSLGLPTPAINKEEYLAICLAALACTRAGKALVGVGGQQQVQACNKWLCPAPAAPEELRFRCTVCGKAFASYQALGGHKSSHRKPPSPGDHYGAAAAAQQLASAGDSKEDSASSAAGSTGPHRCTICRRSFATGQALGGHKRCHYWDGTSVSVSVSASASAASSAVRNFDLNLMPLPESTAAAGIKRWAEEEEVQSPLPVKKLRMSN

SEQ ID NO: 5726 - protein, 486 aa, Candida glabrata CBS138
MDDGEVFVEDSVRQQVFTKLGSRLENRVCFDCGNKNPTWTSVPFGVLLCIQCSAVHRNLGVHITFVKSSTLDKWTVNNLRRFKYGGNHKAKEYFMKNNGKQYLNSSNVNAQAKYTSLVAKKYKAHLDSKVEKDMQQYPGELVLTEMDNQGDETSSDSNSVASTPKEGSVDDFFSNWEKPKVDNGSVTPTLSPRPTGGLNANSSNNNSSTSLGRKTGSSILNSRRKTSTPQATQGAKKHSILSSSRKPTRLGAKKVDKSKAEDLFDQFEKEAEEEKELELHNSSTTSSFPNKYQAPSFGSTEKDDEDSFAKKEDVFNGEEESFVDPAPVEDLKPKFAKLGFGMTNNEANELAQQHKEAKRAASGPKYTGSIAAKYGGQKAISSDMMFGRGTYDEAASREAREKLKTFDNATSISSSSYFGEEQSEEDLLEGGNGAYNPQRNYGGAAGSNGAFIDFNSSTDDELQMLKDMVETGAEKLGNYLRDYLRK

SEQ ID NO: 5727 - protein, 208 aa, Pyrococcus furiosus DSM 3638
MKVLVTGFEPFGGEKINPTERIAKDLDGIKIGDAQVFGRVLPVVFGKAKEVLEKTLEEIKPDIAIHVGLAPGRSAISIERIAVNAIDARIPDNEGKKIEDEPIVPGAPTAYFSTLPIKKIMKKLHERGIPAYISNSAGLYLCNYVMYLSLHHSATKGYPKMSGFIHVPYIPEQIIDKIGKGQVPPSMCYEMELEAVKVAIEVALEELL

SEQ ID NO: 5728 - protein, 138 aa, Glycine max
  misc_feature (110)..(110): Xaa can be any naturally occurring amino acid
  misc_feature (112)..(113): Xaa can be any naturally occurring amino acid
  misc_feature (117)..(117): Xaa can be any naturally occurring amino acid
MVSFEMNDQKKIGLGLTGFGIFFSFLGIIFFFDKGLLVMGNILFVSGVSITIGLKSTMQFFVKRSNFKGTISFGVGFFILIMGWPILGMIVEAYGFIVLFSGFWPTLAVXLXXIPVXGWLFQQPFIRSLFDRYGRMPV

SEQ ID NO: 5729 - protein, 228 aa, Pyrococcus furiosus DSM 3638
MVPIIIKPDILMLKGEYLDSNIYFLKSGKELLIVDSGTGVFWNRYLSIAQQEGWFKNISRVVIFNTHEHFDHVGGNHIFMKFFKEKGIEVEFASHKDTARTLEEGDDSIILSYHYGRKYEPHPVDIKLKDGDLLSIGDVNLTVIHTPGHTQGSACLYYEDERIMFSGDTVFLNAYGRTDLPTGDEEELIRSLERLARYEVRLGLPGHGKLIDDWKSNIYRILDHLEGL

SEQ ID NO: 5730 - protein, 487 aa, Malus x domestica
MGFTLSNQQQLLSKIATGNGHGENSPYFDGWKAYDSDPFHPTKNPNGVIQMGLAENQMCFDLIQEWILNNPEASICTAAGVNEFKDIAIFQDYHGLPEFRNAVANFMGKVRGNRVTFDADRIVMSGGATGAHEMIAFCLADPGDAFLVPVPYYPGFDRDLGWRTGVQLIPVACDSSNNFKVTRAALEAAYEKAQKANIRVKGLLITNPSNPLGTVLDRDTLISLVTFINEKKIHLVCDEIYAATVFSQPSFISIAEIIEENIGCNRNLIHIVYSLSKDMGFPGFRVGIVYSYNDAVVNCARKMSSFGLVSTQTQHLIASMLSDNEFVKRFIAQSAKRLKTRHMRFTMGLAQVSTNCLKSNGGLFVWMDLRRLLKEQTFEAEMVLWRTIIHEVKLNVSPGSSFHCPEPGWFRVCFANMDDKTMEVALTRIRTFVLQNKEAIVPRKSNRLWHSNLRLSFQSRRMDDTMMSPCMMSPHTPIPQSPLVRAT

SEQ ID NO: 5731 - protein, 250 aa, Oryza sativa (japonica cultivar-group)
MAVEAVLEASRSSSEEEAEVIVTHGGGGGGGGGGGQVEGWGKRKRSRRRRPQLPPSEEEYLALCLLMLARGRRDGDDVAASASAAAAAVEHRCSVCGKAFASYQALGGHKASHRKPPPPPPPAMVDDDEVVVETKPAAIATPSSSASGVSGGGGGRAHECNVCGKAFPTGQALGGHKRCHYDGTIGSAAGAGASKPAAKTTVAVAASRGFDLNLPALPDVAAAADQRCAAEDDEVLSPLAFKKPRLMIPA

SEQ ID NO: 5732 - protein, 275 aa, Lycopersicon esculentum
FQDYHGLPEFRKAIAKFMEKTRGGRVRFDPERVVMAGGATGANETIIFCLADPGDAFLVPSPYYPVFNRDLRWRTGVQLIPIHCESSNNFKITSKAVKEAYENAQKSNIKVKGLILTNPSNPLGTTLDKDTLKSVLSFTNQHNIHLVCDEIYAATVFDTPQFVSIAEILDEQEITYCNKDLVHIVYSLSKDMGLPGFRVGIIYSFNDDVVNCARKMSSFGLVSTQTQYFLAAMLSDEKFVDNFLRESAMRLGKRHKGLEVVGIKCLKNNAGLFCW

SEQ ID NO: 5733 - protein, 365 aa, Salmonella typhimurium LT2
MSSAKLFTPLKVGAITATNRVFMAPLTRLRSIEPGDIPTPLMAEYYRQRASAGLIISEATQISAQAKGYAGAPGLHSDEQIAAWKKITQGVHAQGGHMAVQLWHTGRISHASLQPGGQAPVAPSAINAGTRTSLRDENGQAIRVETSTPRALDTHEIPGIVNDFRQAIANAREAGFDLVELHSAHGYLLHQFLSPSSNHRTDRYGGGVENRARLVLEVVDAGIKEWGADRIGIRLSPVGTFQNVDNGPNEEADALYLIEALGKRGIAYLHMSEPDWAGGEPYSDAFREKVRARFHGPIIGAGAYTPEKAEDLIEKGLIDAVAFGRDYIANPDLVARLQRKAELNPQRPESFYGGGAEGYTDYPTL

SEQ ID NO: 5734 - protein, 680 aa, Shigella flexneri 2a str. 2457T
MFFRLTALAGLLAIAGQTFAVEDITRADQIPVLKEETQHATVSERVTSRFTRSHYRQFDLDQAFSAKIFDRYLNLLDYSHNVLLASDVEQFAKKKTELGDELRSGKLDVFYDLYNLAQKRRFERYQYALSVLEKPMDFTGNDTYNLDRSKAPWPKNEAELNAQWDSKVKFDELSLKLTGKTDKEIRETLTRRYKFAIRRLAQTNSEDVFSLAMTAFAREIDPHTNYLSPRNTEQFNTEMSLSLEGIGAVLQMDDDYTVINSMVAGGPAAKSKAISVGDKIVGVGQTGKPMVDVIGWRLDDVVALIKGPKGSKVRLEILPAGKGTKTRTVTLTRERIRLEDRAVKMSVKTVGKEKVGVLDIPGFYVGLTDDVKVQLQKLEKQNVSSVIIDLRSNGGGALTEAVSLSGLFIPAGPIVQVRDNNGKVREDSDTDGQVFYKGPLVVLVDRFSASASEIFAAAMQDYGRALVVGEPTFGKGTVQQYRSLNRIYDQMLRPEWPALGSVQYTIQKFYRVNGGSTQRKGVTPDIIMPTGNEETETGEKFEDNALPWDSIDAATYVKSGDLTAFEPELLKEHNARIAKDPEFQNIMKDIARFNAMKDKRNIVSLNYAVREKENNEDDATRLARLNERFKREGKPELKKLDDLSKDYQEPDPYLDETVNIALDLAKLEKARPAEQPAPVK

SEQ ID NO: 5735 - protein, 754 aa, Lycopersicon esculentum
MGSLLRMNRLLSSIVESCNCIIDPQLPADDLLMKYQYISDFFIALAYFSIPVELIYFVKKSAVFPYRWVLVQFGAFIVLCGATHLINLWTFNMHTRNVAIVMTTAKALTALVSCITALMLVHIIPDLLSVKTRELFLKKKAAQLDREMGIIRTQEETGRHVRMLTHEIRSTLDRHTILKTTLVELGRTLALEECALWMPTRTGLELQLSYTLRHQNPVGLTVPIQLPVINQVFGTNHVVKISPNSPVARLRPAGKYMPGEVVAVRVPLLHLSNFQINDWPELSTKRYALMVLMLPSDSARQWHVHELELVEVVADQVAVALSHAAILEESMRARDLLMEQNVALDLARREAEMAVRARNDFLAVMNHEMRTPMHAIIALSSLLQETDLTPEQRLMVETILKSSNLLATLINDVLDLSRLEDGSLQLDIGTFNLHALFREVHSLIKPIASVKKLFVTLSLSSDLPEYVIGDEKRLMQILLNVVGNAVKFSKEGNVSISAFVAKSDSLRDPRAPEFFAVPSENHFYLRVQIKDTGIGITPQDIPNLFSKFTQSQALATTNSGGTGLGLAICKRFVNLMEGHIWIESEGLGKGSTAIFIIKLGIPGRANESKLPFVTKLPANHTQMSFQGLKVLVMDENGVSRMVTKGLLTHLGCDVTTVGSRDECLRVVTHEHKVVIMDVSMQGIDCYEVAVVIHERFGKRHGRPLIVALTGNTDRVTKENCMRVGMDGVILKPVSVYKMRSVLSELLEHGVVLES

SEQ ID NO: 5736 - protein, 492 aa, Oryza sativa (japonica cultivar-group)
MVLSKAVSESDMSVHSTFASRYVRASLPRYRMPENSIPKEAAYQIINDELMLDGNPRLNLASFVTTWMEPECDKLIMAAINKNYVDMDEYPVTTELQNRCVNMIAHLFHAPLGEDETAVGVGTVGSSEAIMLAGLAFKRRWQNKRKAEGKPFDKPNIITGANVQVCWEKFARYFEVELKEVKLRDGYYVMDPEKAVDMVNENTICVAAILGSTLNGEFEDVKLLNDLLDKKNKETGWETPIHVDAASGGFIAPFLYPELEWDFRLPWVKSINVSGHKYGLVYAGIGWCIWRNKEDLPEELIFHINYLGTDQPTFTLNFSKGSSQVIAQYYQLIRHGFEGYRNIMENCHENAMVLKEGLVKTGRFDIVSKDEGVPLVAFSLKDRSRHDEFEISDMLRRFGWIVPAYTMPPDAQHVTVLRVVIREEFSRTLAERLVLDIEKVMYQLDALPSRLMPPVPPAPLLVVAKKSELETQRSVTEAWKKFVLAKRTNGVC

SEQ ID NO: 5737 - protein, 651 aa, Oryza sativa (indica cultivar-group)
MAGSERTVVWFRRDLRIDDNPALAAAARDGVVLPVFIWCPADEGQFYPGRCSRWWLKQSLPHLSQSLESLGCPLVLIRAESTLEALLRCIDSVGATRLVYNHLYDPVSLVRDDKIKKELSALGISIQSFNGDLLYEPWEIYDDSGLAFTTFNMYWEKCMELPIDISPSLAPWKLVPAPGLESVRSCSVDDLGLESSKDEESSNALLRRAWSPGWRNAEKMLEEFVSHGLLEYSKHGMKVEGATTSLLSPYLHFGEVSVRKVYQLVRMQQIKWENEGTSEAEESIHFFMRSIGLREYSRYLCFNFPFTREKSLLGNLKHYPWKVDEERFKSWRQGMTGYPLVDAGMRELWATGWTHNRIRVIISSFAVKFLLIPWTWGMKYFWDVLLDADLESDILGWQYISGSLPDGHELSRLDNPEVQGQKYDPDGVYVRTWIPELARMPTEWIHHPWDAPSCILEVAGVELGFNYPKPIVDLHIARECLDDSISTMWQLDTAEKLAELDGEVVEDNLSNIKTFDIPKVVLRETSPCALPIDQRVPHASSKDHNLKSKVLKASNRSSICVDMIRSSKMEATSSVANSPVSRKRSFCETAFHVPSYSSSAEVHSHIQDHGGSLVGPSRYLLQEAGRNCVDEVEDSSTADSGSSISRQRKAA

SEQ ID NO: 5738 - protein, 736 aa, Lycopersicon esculentum
MDCNCFDPLLPADELLMKYQYISDFFIAVAYFSIPIELVYFVQKSAVFPYRWVLVQFGAFIVLCGATHLINLWTSTPHTRTVAMVMTTAKFSTAAVSCATAVMLVHIIPDLLSVKTRELFLKNKAAELDREMGLIRTQEETGRYVRMLTHEIRSTLDRHTILKTTLVELGRALQLEECALWMPTRTGVELQLSYTLHHQNPVGFTVPIQLPVINQVFSANCAVKISPNSAVARLRPTRKYIPGEVVAVRVPLLHLSNFQTNDWPELSPKSYALMVLMLPSNSARQWHVHELELVDVVADQVAVALSHAAILEESMRARDLLIEQNVALDLARREAETAVRARNDFLGVMNHEMRTPMHAVVALSSLLQESELIPEQRLMVETILKSSNLLATLINDVLDLSRLEDGSLQLDVGTFNLHALFREVLNLIKPVAAVKKLFVTLSLSSDFPEVAIGDEKRLMQILLNVVGNAVKFSKEGSVSVSAVNAKSESLIDPRAPEFFPVQSENHFYLRVQVKDTGSGINPQDFPKLFCKFAQNQEPATKNSAGTGLGLAICKRFVNLMEGHIWIESEGVGKGSTAIFIVKLGIPGRLNESKLPFTAGLPANHMQMTFQGLKVLVMDDNGFSRMVTKSLLVHLGCDVTTIGSGDECLRILTREHKVLIMDASITGMNCYDVAVSVHEKFGKRLERPLIVALTGNTDQVTKENCLRVGMDGVILKPVSIDKMRSVLSGLLEHGTVL

SEQ ID NO: 5739 - protein, 217 aa, Arabidopsis thaliana
  misc_feature (150)..(150): Xaa can be any naturally occurring amino acid
  misc_feature (160)..(160): Xaa can be any naturally occurring amino acid
  misc_feature (172)..(172): Xaa can be any naturally occurring amino acid
  misc_feature (182)..(183): Xaa can be any naturally occurring amino acid
  misc_feature (186)..(186): Xaa can be any naturally occurring amino acid
MAQQSLIYSFVARGTVILVEFTDFKGNFTSIAAQCLQKLPSSNNKFTYNCDGHTFNYLVEDGFTYCVVAVDSAGRQIPMSFLERVKEDFNKRYGGGKAATAQANSLNKEFGSKLKEHMQYCMDHPDEISKLAKVKAQVSEVKGVMMENIXKVLARGVICXMLGSSKSQPQAXYIKRTQMKRXXWFXNMKIKLIVLAIIIALILIIILSVCGGFNCGK

SEQ ID NO: 5740 - protein, 513 aa, Arabidopsis thaliana
MMNKDMLLHQHQQPQQDENMSNLTSASGDQASVSSGNITEASGSNYFPHHQQQQEQQQQQLVVPDSQTQKKRRNQPGNPDPESEVIALSPKTLMATNRFVCEICNKGFQRDQNLQLHRRGHNLPWKLKQRSNKEVIRKKVYVCPEASCVHHDPSRALGDLTGIKKHFCRKHGEKKWKCDKCSKKYAVQSDCKAHSKTCGTKEYRCDCGTLFSRRDSFITHRAFCEALAEETAREVVIPQNQNNNQPNPLLIHQSASHPHHHHQTQPTINVSSSSSSSHNHNIINSLHFDTNNGNTNNSNNSNNHLHTFPMKKEQQSNDHIMNYHHSIIPPWLAPQPHALTSSNPNPSNGGGGGGSLFSLASPAMSATALLQKAAQMGSTKTPPLPPTTAYERSTHNNNLTTTMAAMMTSPSGFISSNNNNHVLFQDYNASGFDNHGREEAFDDTFGGFLRTNEVTAAAGSEKSTKSGGGEGLTRDFLGLRPLMSHNEILSFAGLGSCINSSASDQLHPKPWQG

SEQ ID NO: 5741 - protein, 303 aa, Synechococcus sp. CC9605
MPSAASPPINGDLPRQFASREALNTLLAQEFPGAEGELSPIRGGRVPAEEKLRRIDARRYAKSRNHLRGAVTGLSPYIRHGVLTLAEVRDSVFERIRNRDEGGKLINELGWRDFWQRMWLDLGDGIHDDQEPFKTGHDAGAYAQELPADVRAGTTGLACMDGFRDQLVSTGWLHNHARMWMAAWLVHWRRVHWKAGADWFLEHLLDGDPASNHLSWQWVASTFSHKPYFFNRGNLERYSEGQYCNSCPSANSCPFEGSYDQLENQLFAPMPAIRETGNNRNQQRNRQRRSSGGASAALARPKR

SEQ ID NO: 5742 - protein, 603 aa, Yarrowia lipolytica CLIB122
MMDVERVEHMPPKPMYSLMTQPVVLKEEPVAPSPPTTQAAQQQQQQAPTQTQTPAQPPQAQQPTHNQTHTQPPQQQPTSAQQPTSSNATASNSTDNKKPGTTPKVSQAAFIHKLYSMLEDSSIEHLISWSASNDSFIVSPGEEFSKVLRQYFKHTNVSSFVRQLNMYGFHKVNDTFTFHTGDSSQWEFKHGGGSFKRGDVESLRGIKRRASRQSASQRDSVPLRPVGLVSDYGVAPSGGAPPGMNGSVDVGTAAAAAAAQHGHMMLHPSQHPHHPHPADDAAAAAATAATWHLHDSVSRMAATQAALIDAVRSLQSDVISLLDVLPRITEGRAAVESAHTECQRVAHAMGHRNAFLASLDGRRESQPQPQQQQPYFYQQSAAASAASATAPGGSQWRQPEPQYPVPPTDPFHRGSRGRAVSVYFDPLAKEPAAGPDGQAPPTHTSAPPPPPQQQQQQQQQPPHSQGAAPPPPFGSSPGPTGPPGGVPRSQRPGSFPLLHRQDKTEFVGGGFAEALKYRTDAPARRHTASGAETMPLPQYTAPTSTPHPHEPSTPPPHSSPHTPYRSPHPSGGSTRSNSSSSTRGASVAALLNPEGGDKKRKIE

SEQ ID NO: 5743 - protein, 443 aa, Geobacter sulfurreducens PCA
MFKTIKGKRVALLLASLCVVAVLGAGAVQKRCAAEGGNDYESIELFTDVLAIVKKSYVEEVDTKKLIYGAINGMLASLDPHSSFMPPDMYKEMKIDTKGSFGGLGIEITIKDGLLTVISPIEDTPAFKAGIKAGDQILKIEDRFTKDMTIMDAVKRMRGPKGTKVTLTIMREGFDKPKEFTLVRDTIQVKSVRFKSMDQGYGYIRIAQFQEKTDDDLVKALKALKEENGGDLRGLVLDLRNDPGGLLDQAVKVADHFVEDGLIVYTEGREKESRMQFTARKSGTEPNYPMVVLINSGSASASEIVAGALQDHKRAVVMGTQSFGKGSVQTIIPLSDESGLRLTTARYFTPSGRSIQAKGITPDIVVERAEIQSTEKMEGHIREKDLENHFDSDSKDGSDNKQKGTDKGASAASKVDEQLKSDYQVMRALDLLKGWEILKTISK

SEQ ID NO: 5744 - protein, 485 aa, Arabidopsis thaliana
MDPYKYRPSSAYNAPFYTTNGGAPVSNNISSLTIGERGPVLLEDYHLIEKVANFTRERIPERVVHARGISAKGFFEVTHDISNLTCADFLRAPGVQTPVIVRFSTVVHERASPETMRDIRGFAVKFYTREGNFDLVGNNTPVFFIRDGIQFPDVVHALKPNPKTNIQEYWRILDYMSHLPESLLTWCWMFDDVGIPQDYRHMEGFGVHTYTLIAKSGKVLFVKFHWKPTCGIKNLTDEEAKVVGGANHSHATKDLHDAIASGNYPEWKLFIQTMDPADEDKFDFDPLDVTKIWPEDILPLQPVGRLVLNRTIDNFFNETEQLAFNPGLVVPGIYYSDDKLLQCRIFAYGDTQRHRLGPNYLQLPVNAPKCAHHNNHHEGFMNFMHRDEEINYYPSKFDPVRCAEKVPTPTNSYTGIRTKCVIKKENNFKQAGDRYRSWAPDRQDRFVKRWVEILSEPRLTHEIRGIWISYWSQKLASRLNVRPSI

SEQ ID NO: 5745 - protein, 1124 aa, Nicotiana tabacum
MSSSRPSQSSTTSARSKHSARIIAQTTIDAKLHADFEESGDSFDYSSSVRVTSVAGDERKPKSDRVTTAYLNQIQKGKFIQPFGCLLALDEKTFKVIAFSENAPEMLTMVSHAVPSVGELPALGIGTDIRTIFTGPSAAALQKALGFGEVSLLNPVLVHCKTSGKPYYAIVHRVTGSLIIDFEPVKPYEVPMTAAGALQSYKLAAKAITRLQALPSGSMERLCDTMVQEVFELTGYDRVMTYKFHDDDHGEVVAEITKPGLDPYLGLHYPATDIPQAARFLFMKNKVRMICDCRAKHVKVVQDEKLPFDLTLCGSTLRAPHYCHLQYMENMSSIASLVMAVVVNDGDEEGESSDSTQSQKRKRLWGLVVCHNTTPRFVPFPLRYACEFLAQVFAIHVNKELELESQILEKNILRTQTLLCDMLMRVAPLGIVSQSPNIMDLVKCDGAALLYKNKIHRLGMTPSDFQLHDIVSWLSEYHTDSTGLSTDSLYDAGFPGALALGDVVCGMAAVRISDKGWLFWYRSHTAAEVRWGGAKHEPGEKDDGRKMHPRSSFKAFLEVVKTRSVPWKDYEMDAIHSLQLILRNASKDADAMDSNTNIIHTKLNDLKIDGLQELEAVTAEMVRLIETASVPIFAVDVDGQLNGWNTKIAELTGLPVDEAIGNHLLTLVEDSSVDTVSKMLELALQGKEERNVEFEIKTHGPSGDSSPISLIVNACASRDVGDSVVGVCFIAQDITGQKNIMDKFTRIEGDYRAIIQNPHPLIPPIFGTDQFGWCSEWNSAMTKLTGWRRDDVIDKMLLGEVFGTQAACCRLKNQEAFVNFGVVLNNAMTGQECAKISFGFFARNGKYVECLLCVSKRLDREGAVTGLFCFLQLASHELQQALHIQRLSEQTALKRLKVLAYIRRQIRNPLSGIIFSRKMLEGTNLGEEQKNILRTSSQCQRQLNKILDDTDLDSIIDGYLDLEMLEFKLHEVLVASISQIMMKSNGKNIMIVNDMVEDLLNETLYGDSPRLQQVLANFLLVCVNSTPSGGQLSISGTLTKDRIGESVQLALLEVRISHTGGGVPEELLSQMFGTEAEASEEGISLLISRKLVKLMNGEVQYLREAGRSTFIISVELAVATKSSC

SEQ ID NO: 5746 - protein, 449 aa, Vibrio vulnificus CMCP6
MNKYQLPQDSQLRQADFLFGVATSSYQIEGGAQLGGRTPSIWDTFCNQPGAVDNMDNGDVACDHFHLWQQDIALIQGLGVDAYRLSMAWPRILPKDGQVNQQGLEFYERIIDECHARGLKVFVTLYHWDLPQYLEDKGGWLNRETAYKFAEYAKVVSGYFGNKIDSYATLNEPFCSAYLGYRWGIHAPGKKGEREGFLSAHHLMLAHGLAMPIMRKNAPQSMHGCVFNATPAYPYREQDVAAAEYSDAEGFHWFIDPVLKGEYPQSVLERQAHNMPMILDGDLDIIRGDLDFIGINFYTRCVVRFDANGDLESMPQPDAEHTYIGWEIYPQALTDLLLRLKQRYPNLPPVYITENGAAGEDACINGEVNDEQRVRYFQSHLLALDEAIRAGVNVQGYFAWSLMDNFEWAYGYKQRFGIVHVDYATQKRTLKQSAIAYRNTLLARAEEKQ

SEQ ID NO: 5747 - protein, 480 aa, Listeria monocytogenes str. 1/2a F6854
MKELLTFPKDFWWGSAWSAEQAEGRGDTGKAKTVWEHWFETEPNRFYEGVGSEITTDHFNRYKEDVQWMKKTGQNSFRISISWARMFPNDGVGEVNQKAIAFYRDLLTEMNENGVKPFANLYHFDMPVALQDAGGWESREVVDAYVHFADTCFKEFGDLVYHWFTFNEPLGPILGGYLEDFHYPNQIDFKRGAQAGFNTILAHALAIKAFKKLNLSSKIGVILNLSPTYPRSQNEYDLEAAEICDAFYTRSFLDPMVKGSFPEKLVEIMREYDQMPEYTEEDLTIIKENTAQILGLNYYEPRRVKARLTAINEKSPFLPDWFFEPHNMPGKRMNIYRGWEIYERGIYDLCIDIRDNYGNIESFISENGMGVANEERFLNEEGQIQDDYRIQFVKDHLAYVHQAIAEGCDIKGYHLWTFIDCWSWINAYKNRYGLVSLDVETGKRTMKKSGEFYKKMSDMNGFEYETSKLVGTKREETTNG

SEQ ID NO: 5748 - protein, 368 aa, Pseudomonas aeruginosa PAO1
MSLLFEPLSLRQITLPNRIAVSPMCQYSAQEGLANDWHLVHLGSRAVGGAGLVIVEATAVLPEGRITADDLGIWSDAHVEPLHRITRFIESQGAVAGVQLAHAGRKASTWRPWLGKHGSVPIGDGGWIPVAPSAIPFDPQHTTPEALSEAQIEALVQAFVRAAERSLAAGFKVAEVHAAHGYLLHQFLSPLSNQRRDQYGGCFENRIRLLLQVTAAVRKAWPQELPLFVRLSATDWVEDGWNPDETVELARHLKDLGVDLIDVSSGGTAANAEIPVGPGYQTEFAERVKKEAGIASGTVGMITEPVQAEHILRTGQADLILLARELLRDPYWPLHAADELRNEQMPWPPQYLRAAHRSTPPRKSLEMQ

SEQ ID NO: 5749 - protein, 250 aa, Arabidopsis thaliana
MGRGRVELKRIENKINRQVTFAKRRNGLLKKAYELSVLCDAEVALIIFSNRGKLYEFCSSSSMLRTLERYQKCNYGAPEPNVPSREALAELSSQQEYLKLKERYDALQRTQRNLLGEDLGPLSTKELESLERQLDSSLKQIRALRTQFMLDQLNDLQSKERMLTETNKTLRLRLADGYQMPLQLNPNQEEVDHYGRHHHQQQQHSQAFFQPLECEPILQIGYQGQQDGMGAGPSVNNYMLGWLPYDTNSI

SEQ ID NO: 5750 - protein, 285 aa, Zea mays
MREKRVYVPDSVRGQDLTEPSYAPVRGDRLTHDIPTVDVLQFYPLTHAWSTALGPSTPALQSVYAAFYQGGLVTENLHSRKMVQPKKFRGVRQRHWGSWVSEIRHPLLKRRVWLGTFETAEEAARAYDEAAVLMSGRNAKTNFPIQRSSTGEPTPAAGRDARSNFSSGSSTTNLSQILSAKLRKCCKAPSPSLTCLRLDPEKSHIGVWQKRAGARADSNWVMTVELNKDAASTDAASQSTSATTAPPATPMDEEERIALQMIEELLSSSSPASPSNGDDQGRFII

SEQ ID NO: 5751 - protein, 467 aa, Erwinia carotovora subsp. atroseptica SCRI1043
MRRNTMKAFPDGFLWGGSVAANQVEGAWNEDGKGVSTSDLQLKGVHGPVTERDESISCIKDRAIDFYHQYPQDIQLFAEMGFKVLRTSIAWTRIYPEGNEAEPCEAGLAFYDHLFDEMAKHHIQPLITLSHYEMPYGLVKKLGGWGNRAVIDHFEKYARTVFSRYKDKVKHWLTFNEINMALHSPFTGIGLSGEPSKQDIYQAIHHQLVASARVVKACHDIIPDAKIGNMLLGAVRYPMTCHPKDVLEAQNKNREWLFFGDVQVRGTYPAWIQRYFRENDVELTITAQDKDDLSHTVDFVSFSYYMSGCATFEPEKYQSSRGNIIRLIPNPHLEASEWGWQIDPEGLRFLLNELYDRYQKPLFIVENGLGARDVVEEDGSIHDSYRIDYLRRHLIQVREAIDDGVELLGYTSWGPIDLVSAGTAQMSKRYGFIHVDRDDEGKGTLERRRKDSFYWYQDVISSNGKSL

SEQ ID NO: 5752 - protein, 636 aa, Vibrio cholerae O139
MCGVAGFISKRLSPVDCLTSMVESIMHRGPNDSGLWVDDDFGVCLAHARLSIQDLSSAGHQPMHSKSERYVMIFNGEIYNHLTLREELIEIVPSYWNGHSDTETLLAGFEVWGIEQTIQKCVGMFAIVLWDKVLKQLILIRDRFGEKPLYYGWQRDTFLFASELKALKAHPSFEGSINRQALSHFFRLNYIPTPLSIYEGIFKLEPGVIAVFSHEGQLLSKQTFWDASHAVSLQNFSDHDAVDKLDDLIKQSIQDQALSDVPLGAFLSGGVDSSTVVGILQSLSTRPVKTFTIGFDHADFNEASEASDVAKHLGTDHVELIVSAEDALAIINQLPVMYDEPFADASQVPTFLVSKLAKKEVTVCLSGDGGDELFCGYNRYHYTAKVWSYLEKIPFPIRKMLSVFLLTLSPSSWDVLSKTLGLNTRLPNLGNKTQKGAQALKARDIEDLYTRVVSNWDLDEPLVKNTAVEKLPFLSDLTELSHLNDLEKMMLWDKQSYLMDDVLVKTDRATMACSLEGRVPLLDHRIAEFAASLPIHLKYRGGKGKWLLREVLYRYVPKKLIERPKKGFSLPIAEWLRGPLKDWANVLLDSDRFDKEGFLSSELVQKKWGEHLAGKRDWSSQLWSVLMFQLWLEKNK

SEQ ID NO: 5753 - protein, 388 aa, Candida glabrata CBS138
MGVSVKGAPNLDYFTPEQPILGKFIKYKEDEDGSSERDPPKLFKPLKIRALEIPNRIGVSPMCTYSTNNYMPTDFHLMHYGSLATRGPGIIIVECSAVSEGTAVTVNDMGIWNKEQASEHFSKIVKFAHSQNVIVGCQLGQFMRKVVQNVDEDNKAHNVEVGKEAHDLSTEEIKTIVEQWGTAAKLAVEVAKYDFIEIQAGKGHITNEFFSRLTNKRKDEYGGSFENRIRILLEIIDNVRKNIPEDTPLFIRLKACDNLDHPDAWSTDETIKLSFELAKHGVDVLDIAGRGLRIGPKSEKENKIIFLQQLKEAHKGKTNLLIASSGVISTADYASELLDKEAQDIILVGRPFLKNPNLVSFWADDVNITVTNAVQYSWGFYPTKSHLS

SEQ ID NO: 5754 - protein, 1103 aa, Candida glabrata CBS138
MSAISSNTVSVIKNNQIGPWKLGETLGSGSTGKVLLASNETTKQQAAVKVISKAVFEAMNNSESNGDATNALPYNIEQEIIIMKLLNHPNVLRLFDVWETNSDLYLVLEYAEKGELFNMLVERGPLPENEAVRAFRQIIIGISYCHSLGVVHRDLKPENLLLDNKLNIKIADFGMAALESEDKLLETSCGSPHYAAPEIISGLPYEGFSSDVWSCGVILFALLTGRLPFDEEDGNIRNLLLKVQKGEFEMPDDDEITKEAQDLLARLLTVDPSKRITIREILKHPLLQKYPSIKDSRSIRNLPREDTYLSPLADTNSKIDDAILQNLVILWHGKDAREIAAKLREPGANTEKTLYALLYRFKCDTQREANRARRQSKIVQRNSTIRSTAPESPSKKKTYTPQKKNKRASIIASSSKRPVSVTKTATNITVNSSITGTPKSAKRMSMNNSARKRMSALYGTRDSPTKTSRSRRSSIITKDFLGNRPRDSVISMSHNKRASKSSKRISLVPNLKRQSVTTKLMATYAKLSEDDDWEYIERETKRTSSDFATLIDEIFEYEKYEQIRKEKAELERKVRETKEREERERKERQEKELQERLERERIEKQKEDIARQMDEEISNLKKELVGDQDNEDKFRSVSEPLESKSKKIEDIEEDIDGILRNRKYSLQTRPVSRLDPGIGFIDKPRQSEQHVPETVNLEPELEETEQKILETIRRSKFLGSSFDIKKELENVKRHRQTSQPIEKEMAPPALPETLPKAVEKKNVSMDPSLRKISDIKVPQFTRKSRHFSTSNRRLSVLSMYSTKESYSNLADILKNGPGEKEMIQTAPTPKSADDSDQLFDTIDEADTPASVSREERLYEVAEESENELANKKIDIADLLNSEGSNLKSVEEQEDSMKLPKLPPLFEDGSTKETKEQSKSMIPENMQSSESQKQIEKNNSDEGGSLNPFMTKHRDVSDKGVTKEKPTVTMKTTSEQVSADKKRNMSFLRKLSKGSSSSKDNVDVTLSTSVSSKQLFSGLVNLLKGWTKYGLKGIAIDSTSQTITGKLANDNILSFRSTAFSILIFSQEKGSAVTFRKVSGSGKAVRRLSDEVKKVLSKEGVLRD

SEQ ID NO: 5755 - protein, 545 aa, Shewanella sp. ANA-3
MAAKEVVFGNDARVKMLAGVNILANAVKVTLGPKGRNVVLDKSFGSPLITKDGVSVAKEIELEDKFENMGAQMVKEVASKANDAAGDGTTTATVLAQAIVTEGLKAVAAGMNPMDLKRGIDKAVAAAVIELKNLSQDCADSKAIAQVGTISANSDESIGQIIATAMEKVGKEGVITVEEGQALENELDVVEGMQFDRGYLSPYFINKPETGSVELDHPFVLLVDKKISNIRELLPILEGLAKTGKPLLIVAEDVEGEALATLVVNNMRGIVKVAAVKAPGFGDRRKAMLQDVAILTGGTVIAEEIGLELEKATLEDLGTAKRVVITKDNTTIIDGNGEQAQIEARVSQIKQQIEESTSDYDKEKLQERMAKLAGGVAVIKVGAATEVEMKEKKARVEDALHATRAAVEEGVVPGGGVALVRVASKIADVEVANEDQKHGVVIALRAMEAPLRQIATNAGEEASVVANTVKNGSGNYGYNAGNDTYGDMLEMGILDPTKVTRSALQFAASIAGLMITTEAMVAELPKADAPDMGGMGGMGGMGGMM

SEQ ID NO: 5756 - protein, 159 aa, Capsicum frutescens
MSMIPSFFGGRRSNIFDPVSLDLWDPFEGFPISSTIANTPSSARETSAFPNARIDWKETPQAHIFKVDVPGIKREEVKVQVEEGRILQITGERSREQEEKNDQWHRMERSSGKFLRRFRLPENTKMGEIKAAMENGVLTVTVPKEEEKRSEVKAIDISG

SEQ ID NO: 5757 - protein, 489 aa, Halobacterium sp. NRC-1
MPAAQPPGMQLFWHRRDLRTTDNRGLAAAAPGVTAVDGGHDQGPVAAVFCFDDEVLAHAAPPRVAFMLDALAALRERYRDLGSDLIVRHGDPAAVLPAVANDLDATRVVWNHDYSGLATDRDAGVRDALDAAGVAHAQFHDAVHHRPGEIRTNAGDPYSVYTYFWRKWQDREKNPPAPEPEPADLAADTALADTSPLPSVQELGFAEPEAAVPDAGTAAARSLLDAFRESGDIYRYEDRRDYPHEEPTSRLSPHLKFGTIGIRTVYEAARAAKSDADTDDERENVAAFIGQLAWREFYAQVLYFNQNVVSENFKAYEHPIEWRDDPAALQAWKDGETGYPIVDAGMRQLRAEAYMHNRVRMIVAAFLTKDLLVDWRAGYDWFREKLADHDTANDNGGWQWAASTGTDAQPYFRVFNPMTQGERYDPDADYITEFVPELRDVPADAIHSWHELSLSERRRHAPEYPDPIVDHSQRREDAIAMFERARGDE

SEQ ID NO: 5758 - protein, 192 aa, Ephedra foeminea
DDHGEVISEIRRSDLEPYLGLHYPATDVPQASRFLFMKNRVRMICDCYSPPVRVIHDKRLKKELSFCGSTLRAPHGCHAQYMANMGSVASLVMAVIVNEKEDEEAENEGQSQPKGRKLWGLVVCHHTSPRFVPFPLRYACEFMMQVFSIQLNKEVELACQMREKQILRTQTLLCDMLLRDTPLGIISQKPSI

SEQ ID NO: 5759 - protein, 491 aa, Streptococcus sinensis
RGVDILADTVKVTLGPKGRNVVLEKSFGSPLITNDGVTIAKEIELEDHFENMGAKLVSEVASKTNDIAGDGTTTATVLTQAIVREGIKNVTAGANPIGIRRGIEAAVATAVSALKETAIPVSNKEAIAQVAAVSSRSEKVGEYISEAMEKVGNDGVITIEESKGMETELDVVEGMQFDRGYLSQYMVTDSEKMVADLDNPYILITDKKISNIQEILPLLESILKTNRPLLIIADDVDGEALPTLVLNKIRGTFNVVAVKAPGFGDRRKAMLEDIAILTGGTVITEDLGLELKDATIEALGQASKVTVDKDSTVIVEGSGNPEAIANRVVVIKSQIESTTSEFDKEKLQERLAKLSGGVAVIKVGAATETELKEMKLRIEDALNATRAAVEEGIVSGGGTAFVSVLGAVAALELTGDEATGRNIVLRALEEPVRQIALNAGFEGSIVIDRLKNSEAGTGFNAATGEWVNMIEAGIIDPVKVTRSALQNAASV

SEQ ID NO: 5760 - protein, 459 aa, Citrus sinensis
MGILSKIATNNGHGEDSAYFDGWKAFDRNPFHPTQNPGGVIQLGLAENQLCFDLIKDWITKNPYASICTAEGVEVFKDIAIFQDYHGLPEFRQAVAKFMGKGRGGRVTFDPDRIVMGGGATGANELIMFCLANPGDAFLVPSPYYAAFDRDLSWRTGVQIVPVHCDISNNFKITREALEAAYERAQEASINIKGLIITNPSNPLGTTLDRDTLKSLVSFINDKNIHLVCDEIYAATVFSSPKFTSVAEVIQEMDCNRDLIHIIYSLSKDMGLPGFRVGIVYSFNDTVVNCGRKMSSFGLVSSQTQYLLASMLSDDEFVDNFLVETSKRLAKRHHNFTKGLEQVGINCLKSNAGLFFWMDLRHLLKEKTLEGEIALWRTIVNDVKLNVSPGSSFQCTEPGWFRVCFANMDDDTLQVALNRIAAFVQQDKESEKPTKKRCSRIFASASHRGSTNKVSCRRT

SEQ ID NO: 5761 - protein, 137 aa, Kluyveromyces lactis NRRL Y-1140
MCLCCICCTVSDLILYIVAIIFPPIAVGLRSGLCSSDLLLNVLLTMFGFLPGMIHAFYYITVTSPLRTDTETRYYYEQGWNDGQRYGSPSAVTTVSHQPTGVEDPLLPRTQIPLRYEPNNYAQDVPKGSPPPYTESV

SEQ ID NO: 5762 - protein, 515 aa, Edwardsiella tarda
MHIVNGINGLIAKKNVLFFLTSLAISPSVLADTLTRDNGAPVGDNQNSQTAGPIGPVMLQDVQLLQKLQRFDRERVPERVVHARGTGAHGVFTPTADISDLTVAKVFTPGSTTPVFVRFSSVVHGTHSPETLRDPRGFATKFYTAEGNWDLVGNNFPTFFIRDAIKFPDMVHAFKPDPRTNLDNDARRFDFFSHLPESTRTLTLLYSNEGTPLSYRNMDGNSVHAYKLINDKGEVHYVKFHWKTRQGIKNLDPQQVEQIQGKDYSHMTQDLVTAINRGDYPKWDLYIQVLKPADLKNFDFDPLDATKVWPDVPERKIGEMVLNKNPDNVFQETEQVAMAPSNLIPGIEPSEDKLLQGRLFAYADTQFYRIGANGLSLPINKPHSAVNNGNQDGQLNSGHTLDKGVNYQPSRIYPREELVSSRYSQTPLSGTTQQSKIQREQNFKQAGELYRSYSKKEQNDLINSLGTSLASADTVSKNIMLSYFYKADKDYGTRLTSVANGDLPTVKNLADKLQD

SEQ ID NO: 5763 - protein, 587 aa, Magnetospirillum magnetotacticum MS-1
MEGAVALGMRRLSVIDLAGGNQPIHNENGSISVVFNGEIYNFRELRRELEEEGHIFSSHTDTEVLVHLYESHGRGMLDRLNGMFAFCLLDRRAGRLFLARDRVGKKPLYYAHGDGAFAFASEIKSLLCHPAVRREADPAAAALYFTHGYVPAPFTPFMGIRKLPAGHWLELDLASGEIQVGRYWDLDYSQVDEDLCEEEAVAGLESALLAAVERRLISDVPLGVFLSGGVDSSLVVAMMARFREGRDIHAFSIGFHEKAFDESGYAESVARAWGVDHHVTRFSDAEMFSVIDEILPRMDEPLSDPSLIPTYLLSKVTQDSGIVVALSGDGADEMFGGYPKYYIHRYAAWLDRLPGILGRDVPAWLFSQVPLKAENNIFNYKVERFVSGLRLAPRHRNQFWVAPFMPDELTRLLPEQEVPRAVWEVTDQYDSRFNGRGVVDRMMYFDAKMMLQDMYLAKVDRASMAVSLEVRSPFLDLEVMDAAVHLPWQLKVRGRETKYLLKKLASRYLPHDVVYRFKRGFGLPLAVWMRTLAPRISETLTQGDCGGIDAAYVQSLLREHLDGTRDHAVKLWAVYAYLTWLRNWGGS

SEQ ID NO: 5764 - protein, 633 aa, Rhodopirellula baltica SH 1
MSFAMVDSLRRTVAQRLIVIEGREMEQTALLDGMEENATEQSSVTKSGMGAIVHDDGVAFRVWAPNADSVSVLGTFNQWKEDATPLKREEHGTWYVDVADAKAGDEYKYRIIRGDKSYDRIDPYAREVTNSIGNAVVYADTFDWKHPTFDRPAQNELVIYEMHIGTFHRDDPDQPGTFSDAVAKFKHLKELGVNAIQIMPVAEFAGDLSWGYNPAHIFAVEQAYGGPDALKAFVDAAHEAGFAVIIDVVYNHFGPSDLDLWQFDGWSENDKGGIYFYQDHRSNTPWGDTRPDYGRGEVRQFIHDNAMMWMREYHADGLRYDMTAYIRTISGIGDDDIAEGWGLMQWINRDLRNEFPGCYLIAEDLQTNNWLTKTEDQGGAGFTTQWDAAFVHPIRSAVQEIDDAHRDMWAVRDALCHRYNGDAFQRVIYSESHDEVANGKSRVPSEIDAEDPESRFAKKRTILAAALALTAPGVPMLFQGQEMLEDDWFEDTDPLEWERTRRLKGIKRLFRDLIHLRLNNDGLSKGLTGQHIVMHHVNENDKVVAFVRRAEDPQDDVVVLANFANRSWDQYEIGFPDSGDWQLKLNTDWSGYDQDFDDHPVEHVDATEQPYDGLAARAEVSFGAYAVLVYTRK

SEQ ID NO: 5765 - protein, 394 aa, Pseudomonas fluorescens PfO-1
MWYEGFLGLSAWSLVAVTLVMTHVTIVAVTVYLHRYSAHRSLELNAGLKHFFRFWLWLTTAQNTREWTAIHRKHHAKCETEDDPHSPVVKGLSTVLCKGAELYREEAQNPETLRIYGKNCPEDWIERNLYSRYRLLGVAIMAVVDLLLFGTIGITIWAIQMMWIPVWAAGVVNGLGHAVGYRNFECRDAATNLVPWGILIGGEELHNNHHTYPNSAKLSVKKWEFDLGWAWIQVFSFLRLAKVQRVAPIAHRVEGKGSLDMDTAMAILNNRFQIMAQYRKLVIGPLVKQELAKVDHSVRHQFHRAKRLLSRETSLLEDRHHARIQSMLEHSQALKVIYEKRLALQQIWVKTSANGHDMLAAIKEWVHEAEASGIQSLREFADQLKTYSLRPAAV

SEQ ID NO: 5766 - protein, 146 aa, Clostridium tetani E88
MFDMIPFKRNNSMKRDSYFDEFFDNFFNNDFLVPIKFPKNNFRADLKETNNEYIIEADLPGISKDAVKVNYSNNNLVISAKREDIIENKDENYIRRERSYGEFKRAFYVDNVDENNIKASFKNGVLRINLTKLEDTTKARKQIEIE

SEQ ID NO: 5767 - protein, 529 aa, Pleurotus sajor-caju
MPTQEVFDKKDGAVYTTSNGAPVAEPYAAQRAGLHGPLLLQDFHHIDLLAHFDRERIPERVVHANAAGAHGYFEVTHSCADITSNKLLCSVGKKVRLTARFSTVGGESGSADTARDPRGFALKLRTEEGNWDWVFNNTPIFFIRDPAKFSHFIHTQKRDPQTHLKDADMFWDYLGQNPESIHQMMILFSDRGTPDGVHQMHGYSGHTFKWLKDDGSFTYVQVHCRADSGFKTLDGETAHRLTADNPDYSTEMLFRTIEAGKFPSWTVYIQTMTPEQAENFRYNILDLTKVWPHKEFPLRPIGRFVLDENPKNYFAEIEQAAFAPSHLVPYIEPSADPVLQSRLFSYLDTHRHRLGANYHQIPVNAPIVPVANFQRDGPMTVNNNQGNRPNYQSSIQPLTYISNKETLEAGCRNQERMARHENFIGGAYRDLGEITELDFEQPRALWQKVWNDQQREAYVKNVAGHFGGVKSPVVRDRQLSVWAAVDQDLSDRIAKAVGAKPVAPLKVKPAAEALRFRCNIGGPPGPSRL

SEQ ID NO: 5768 - protein, 165 aa, Glycine max
MENRTSSVLPPGFRFHPTDEELIVYYLCNQASSRPCPASIIPEVDIYKFDPWELPDKTDFGEKEWYFFSPRERKYPNGVRPNRATVSGYWKATGTDKAIYSGSKHVGVKKALVFYKGKPPKGLKTDWIMHEYRLIGSRRQANRQVGSMRVSLCLINCYILLAYSS

SEQ ID NO: 5769 - protein, 510 aa, Pseudomonas syringae pv. phaseolicola 1448A
MPLLNWSRHMVCLTAVGLVTVPTAYAADTLTRDNGAVVGDNQNSQTAGAQGPVLLQDVQLLQKLQRFDRERIPERVVHARGTGVKGEFTASADISDLSKATVFKSGEKTPVFVRFSSVVHGNHSPEALRDPHGFATKFYTADGNWDLVGNNFPTFFIRDAIKFPDMVHAFKPDPRTNLDNDSRRFDFFSHVPEATRTLTLLYSNEGTPAGYRFMDGNGVHAYKLVNAKGEVHYVKFHWKTLQGIKNLDPKEVAQVQSKDYSHLTNDLVGAIKKGDFPKWDLYVQVLKPEELSKFDFDPLDATKIWPDVPEKKIGQMVLNKNVDNFFQETEQVAMAPANLVPGIEPSEDRLLQGRVFSYADTQMYRLGANGLSLPVNQPKVAVNNGNQDGALNTGHTTSGVNYEPSRLEPRPADEKARYSELPISGTTQQAKITREQNFKQAGDLYRSYSPKEKTDLVQSFGESLADTDTESKNIMLSFLYKADPDYGTRVTEVAKGDLSKVKSLAASLKD

SEQ ID NO: 5770 - protein, 160 aa, Glycine max
MSLIPNIFGGRRSNVFDPFSLDMWDPFKDFPFPNSVSTSFPEFSRENSAFVSTRVDWKETPEAHVFKADIPGLKKEEVKVQIEDDKVLQISGERNVENEDKNDTWHRVERSSGKFMRRFRLPENAKVNEVKASMENGVLTVTVPKKEVKNHDVKAIEISG

SEQ ID NO: 5771 - protein, 263 aa, Triticum aestivum
  misc_feature (105)..(105): Xaa can be any naturally occurring amino acid
MRNSGATAASAPPAATMHGSYAAPPASSAGYAKIPTYPPPPSSSYPSPSPSPVPPAASASAPAPIQDPTAPPSSLAKAAELVTRFREQGQALIAARRPWGEVFRXPAFSKPPNVGEAVSRMRRNTAYFRANYALAVLAVVAASLLWHPGTLFALLALCAAWFFLYFARPAEGAQPLRVFGTEFDDGTVLALLSGVTVIAMLFTDVGWNVVGSVMIGLALAGAHAALRSTDDLFLTEQEAAGNGLVAAGFSAAGPILPTYVRIG

SEQ ID NO: 5772 - protein, 262 aa, Triticum aestivum
  misc_feature (234)..(235): Xaa can be any naturally occurring amino acid
  misc_feature (241)..(242): Xaa can be any naturally occurring amino acid
  misc_feature (248)..(249): Xaa can be any naturally occurring amino acid
  misc_feature (253)..(255): Xaa can be any naturally occurring amino acid
MERKSAILMNRYELGRMLGQGTFAKVYHARSLATNQSVAIKVIDKDKVLRVGMIDQIKREISIMRLVRHPNIVQLHEVMASKSKIYFAMEYVRGGELFARVAKGRLKEDAARKYFQQLIGAVDFCHSRDVYHRDLKPENLLVDEHGNLKGSDFGLSALKECQKQDGLLHTTCGTPAYVAPEIINKKGYDGEKADIWSCGVILFVLLAGYLPFQDSNLMEMYRKISKGDVRYPQXXSSDARXXLSRLLXXNPNXXXTMDKLIE

SEQ ID NO: 5773 - protein, 109 aa, Triticum aestivum
NKFVQKSRLRTGSGVPGISVDPRDPRAGARAPCPRLELCYSMSQRFLDEHQPPSKVEDSAPEPPAVVPPPPAQPIPNWKCSCPGDSPDEVKARLKYWAQAVACTVKLCS

SEQ ID NO: 5774 - protein, 334 aa, Haemophilus ducreyi 35000HP
MKTLGEFIIEKQAEYPEAKGELSGILASIRLAAKIIHREINRAGLSQDILGFAGSENVQGETQMKLDIFANETMKKALLAREDVAGFASEEDDNFIAFDSERNRNAKYILMTDPLDGSSNIDVNVSVGTIFSIYKRISPIGSPVTIEDFLQEGRKQVAAGYVTYGSSTMLVYTTGNGVNGFTYDPSLGLFILSHPDMKMPAEGKYYSINEGQYVTFPLGVKKFIKYCQENDEASKRPYSSRYIGSLVSDFHRNLLKGGIYIYPTSTVYPQGKLRLLYEGNPMAFLAEQADGMATDGFQPILDIKPTELHQRVPFFIGSKTMVKQANTFMQTFTE

SEQ ID NO: 5775 - protein, 198 aa, Pyrococcus horikoshii OT3
MIHRIKDEFVNVYIIDRGDHLVLIDTGIESTCEKILKKIEELGKPLKTVIITHYHLDHTGSLKCVKDGTGAKVVAHEEEVKAIEEKTGVRVDVPVKDGDVVEGLKVFHMPGHTRGSICLLDEESGALFVGDLMVERDGKLYEVPQQYSEDPMMNRERIKELLNIEFKAIYPAHGEPVLENAKEKVKELVESFSKGETN

SEQ ID NO: 5776 - protein, 655 aa, Burkholderia multivorans
MCGIDGFLNSVAFDEETARGTLARMTASLAHRGPDAQGLWVDPAAGIALGHRRLAIVDLSVHGRQPMASACGRYVMVFNGEIYNHRELRAQLERVGRAPAWRGHSDTEVLLAAFAAWGVDATLRRATGMFALALWNRESRVLTLARDRIGEKPLYYGRIGDALVFASELKALRAYPGFGGEIDRDALCLYLRHSAVPAPHTIYRGIRKLPPGSWIQFEHAQDTPRIRTYWALEHAIDAGHHEPFAGTAAEAVDRLDTVLRQAVARQMEADVPLGAFLSGGVDSSAIVALMQAQSAAPVDTFTIGFHEAGYDEAGYAKAVARHLGTRHTELYVTADHALDVVPKLPAIYDEPFSDASQIPTFLVAELTRRHVKVSLSGDGGDELFGGYTRYFLTPRLWRKLHRVPAAVRTRIAGALHALRPDHADQLAAVAQGAWGAGELRDSPTRIGDRLHKLGHVMTADSRIGLYRLLMSSVHHPERIALAGHEPPTPLDTVSAWPAHLSFAEQAMAIDTLTYLPTDILTKVDRAAMAVSLETRMPFLDHHVVEFAWRLPASLRLPEGQSKALLRRLLDRYVPTELIDRPKQGFCAPIDHWLRGALRDWADALLQPSRLRDEGFFDAAAVERLWRQHQTGRMNWQHQLWTVLMFQAWLDAQRAA

SEQ ID NO: 5777 - protein, 251 aa, Escherichia coli K12
MNLNSIPAFDDNYIWVLNDEAGRCLIVDPGDAEPVLNAIAANNWQPEAIFLTHHHHDHVGGVKELVEKFPQIVVYGPQETQDKGTTQVVKDGETAFVLGHEFSVIATPGHTLGHICYFSKPYLFCGDTLFSGGCGRLFEGTASQMYQSLKKLSALPDDTLVCCAHEYTLSNMKFALSILPHDLSINDYYRKVKELRAKNQITLPVILKNERQINVFLRTEDIDLINVINEETLLQQPEERFAWLRSKKDRF

SEQ ID NO: 5778 - protein, 496 aa, Kluyveromyces lactis NRRL Y-1140
MGNSPSKNQYGIQGTIKNSGGSQQQQGLSLSDESGNEPNDPDDSRSLPTTTNNNNYNNLVSAKSRQISSSTPNNYGLDIDMSLARDLSKYPISISNTSSVSTTGSESSFSMKSVPQIVGSGGGGGSLPTTTSSPFLSDSHFDHSPMSLPPIKEENDTAPSSVSSSFRKGSKIPNQRSSKPIILRRSSHDLSCTDHVNIDDMIDKLLYLGESRIYHSEDFPFRSWEIQLVCTMAREIFLNQPSLLKLQAPIKVVGDVHGQFTDLLRILRLSGVPPDTNYLFLGDYVDRGKQSLETIMLLLCYKIKYPDNFFMLRGNHESANVTKMYGFYDECKRRLSTKAWKMFVDVFNSLPFAAIIQDKIFCVHGGISPQLSNLKQVSKIQRPTDIPDDGLLTDLLWSDPDSSINDWSLNDRGVSYTFSKKNIADFCSKFNFDLIIRGHMVVEDGYEFFARKKLVTIFSAPNYCGEFENWGAVMSVTTGLMCSFELLKPHGIKRKR

SEQ ID NO: 5779 - protein, 437 aa, Glycine max
MKVAKGRILVGKYELGKTIGEGSFAKVKFARNVQNGNYVAIKILDRKHVLRLNMMEQLMKEISTMKLINHPNVVRILEVLASKTKIYIVLEFVDGGELFDKIAANGRLKEDEARNYFQQLINAVDYCHSRGVYHRDLKPENLLDSNGVLKVSDFGLSTYSQKEDELLHTACGTPNYVAPEVLNDRGYVGSTSDIWSCGVILFVLMAGYLPFDEPTHMALYKKIGRAEFSCPSWFSPQAKKLLKHILDPNPLTRIKIPELLEDEWFKKGYKPTSFTEEEDLNVDDVVVAFNESNENLVTERKEKPVSMNAFELICRSQSFNLDSLFEKQTGQVKQETSFTSQCPANEIMFKIEEAAKPLGFNVYKRNYKMKLQGDKSGRKGHLSVATEVFEVAPSVHMVELRKTGGDTLEFHKFYKIFSSGLQDIVWHDTEGKKNMKN

SEQ ID NO: 5780 - protein, 674 aa, Synechococcus sp. WH 8102
MCGIGGVFLADRHQTLDRQLLVNMAAIQSHRGPDGFGVECLDAAGVGFCHARLSIIDLNESRARQPFLSNDRQVLMAHNGEFYDFQRIRADLTAQGVRFSSKSDSEILLRLYQRQGLESTLPLLRGEFAFALFDAADDCLYLVRDRFGIKPQYWTMTPEGLVFGSELKVLFAHQAVERRFTSEGLFHQLMQTMVPGTTAFAGVHQVQPGHVLKVQRRSDRLEVSESTYWDVDFPRLDQRDSTLTEADHIANVRAALLEAVEMRMVADVPVGCYLSGGIDSCSILGLASAVSQGPVKAFTIGFDDARYDETPIAAEMAEATGAEQDVMRLSGRELYGHMEQTLWHTERTIYNTLAVAKYLMSRHVNSVDYKVVMTGEGSDELFGGYPAFRRDMFLHGLEDLPQSDRQDWESLLQTNNSLVQGAMLAADQVDDPDLDAVVGFTPSCLQPWLACAPLVPDLLADEHRQALVEYSPGKAIAEQLNPQQLDGRHALDKAQYVWIKTMLEGQILTWGGDRVDMANSMEARPAFLDHHLAAAAVQVPPELRIKGKTEKYVLREAMAGLLPEVLYKREKFAFMAPPAHTEPEKWAQMKQLADDYLSDEAIDAAGLLSKEGVRALFARHDDPATTDAERVQMDAVINHLLGVQMLHRMFVAADVPAQAREQADRLGWRVLMPV

SEQ ID NO: 5781 - protein, 583 aa, Lycopersicon esculentum
MSSGGCSIVWFRRDLRLEDNPALAAAVRAGSVIAVFIWAPEEEGYYCPGRVSRWWIKKSLAHLDSSLKKLGTSLITKRSNDSVSSLLQVVKSTGATRVFFNHLYDPISLVRDNCAKETLSAEGVSVCSFNADLLYEPWEVVDDESRPFSTFSDFWEKCLTMPYDPEAPLLPPKRIISGDASRCPSDNLVFESELEKGSNALLARAWSPGWSNADKALTTFINGPLIEYSKNRSKADSATTSFLSPCLHFGEVSVRKVFHRIRTKQTLWANEGNKAGEESVNLFLKSIGLREFSRYMSFYHPYSHERPLLGQLKYFPWLVDEGYFKAWRQGRTGYPLVDAGMRELWATGWLHDRIRVVVSSFSVKVLQLPWTWGMKYFWDTLLDADLESDALGWQFITGTLPDGCEFLGIDNPQFEGYKFDPNGEYVRRWLPELARLPTEWIHHPWDAPESVLQAAGIELGSNYPFPIVEIVAAKERLEEALSQMWQLEAAARSAIENGMEEGHGDSTDEFVPIAFPQAMQIEMEANNVPVRNNNPTITALRRYGDQIVPSMSSSFFRNEDEETSVDIRNSVVDSRAEVPIISM

SEQ ID NO: 5782 - protein, 388 aa, Vigna radiata var. radiata
YFDGWKAYDENPYDELTNSSGVIQMGLAENQVSFDLLEKYLEEHPEASTWGSGFRENALFQDYHGLRSFRTAMASFMEQIRGGRAKFDPDRVVLTAGATAANELLTFILANPGDALLVPTPYYPGFDRDLRWRTGVNIVPIHCDSSNNFQITPQALEAAYNEAEDDNTKVRGVLITNPSNPLGATVQRSILEYLLDFVTEKNIHLVSDEIYSGSVFSSSEFVSVAEILEARQYKEAERVHIVYSLSKDLGLPGFRVGTIYSYNDSVVTTARRMSSFTLISSQTQHLLACMLSDKKFTENYIGTNRERLRKRYQMIIEGLRSVGIECLKGNAGLFCWMNLSPLLEKPNKEGELELWNAFLHEVKLNISPGSSCRCSEPGWFRVCFANMD

SEQ ID NO: 5783 - protein, 649 aa, Arabidopsis thaliana
MANKYVSSVLKSLLVLLHLVFLSKQHVDSASIVKSLPGFEGQLPFELETGYIGVGEEEEVQLFYYFIKSERNPKEDPLILWLTGGPGCSAISGLLFENGPLTMKLDVYNGTLPSLVSTTYSWTKTSSIIFLDQPVGTGFSYSRTQQFNKPSDSGEAKRIHEFLQKWLGKHQVFSSNPFYVAGDSYSGLVVPATVQEISKGNYECCNPPINLQGYVLGNPLTDYTTGSNSRIPFAHGMALISDELYESLKKTCKGEYTNVHPRNTQCLKFVEEFNKCTNRIFQQLILDPLCETETPDCYIYRYLLTTYWANDATVREALQINKESIGEWVRCYYSIPYNNDIKSSMPYHVNNSISGYRSLIYSGDHDFEVPYLGTQAWIRSLNYSIIDDWRPWMVKNQIAGYTRTYANKMTFATIKGGGHTAESKPEEASIMFQRSFVEAPLGQWLTKGSLMLLQQDVWGSSPNYCDLLVDLQINGGKCAGDLQRCTIMDLIRKKKTKRSFSSILDWIKGMANNYVSSVLKSLLLLLHLVFLILYIGANEEEEVQLFYYFIKSDRNPKEDPLILWLTGGPGCSAISGLLFENGPLAMKLDVYNGTLPFLVSTTYSWTKTSSIIFLDQPVGTDQPVSIPLERHAKVSKRDIPVGSEVKNLP

SEQ ID NO: 5784 - protein, 395 aa, Anabaena variabilis ATCC 29413
MTTQNITTLSSSPAQTELKTPGYQGCQSRSLHDSEIPEVDLFTPLIIRDITLPSRVAMSPMCQYSAENGFANDWHFVHLGSRAVGGTGLIMVEATAVTPQGRITPGDLGLWDDKQIEPLTRIVRFLRQQGSVTGIQLAHAGRKASCNVPWLGGTPLTPEQGGWQPVAPSPIPFQENAPVPISLDERGIQETIFAFVAAAQRALQVGFQMIEIHAAHGYLLHSFLSPLSNRRTDRYGGSLENRMRLLLEVVRRVRDVLPNGMPLFVRISATDWVEGGWDLQQSIILSRELKTLGVDLIDVSTGGLVPHARIPVEKGYQVPFAAKIREEAGIMTGAVGLINEAEYADQIITRGCADLVLIGRELLRNPYWSIYARCSLDEEPNWPVPYGYAVKRQRR

SEQ ID NO: 5785 - protein, 439 aa, Saccharophagus degradans 2-40
MQAQTPSNEPEDADTISVLPLEDLRVFTKAYEHIRSSYIEEIDDRTLLEYAIRGMLDELDPHSAFLDASSFDDLQVHTSGEFGGLGIEVGIEDGFVKVISPIDDTPAQKAGVEAGDLIIKINGTSVKGITLSDAVEKMRGAPGTDITLTIMRKDVEQPFDLVLTRDKIKVRSVRSDIVEHDFAYLRVAQFQLRTGQDLANEIKKLQKINSDLKGVILDLRNNPGGVLTASVEVADLFLNDGLIVYTEGRMHDANSQYSATPGDAVDGLPMVVLINGGSASASEIVAGALQDQNRALVLGTRSFGKGSVQTVISITEDRAIKITTALYFTPNGRSIQAQGIEPDIEVERVKITAVQPQADITEADLSGHLKNAKGGAEVKASDRGKRKNELHERDSQLYEAVNILRGLHLFQKAQQAKAEKELEKSQAAEQAAAETTETP

SEQ ID NO: 5786 - protein, 535 aa, Tetragenococcus halophilus
MAKDIKFSEDARRSMLNGVSKLADTVKVTLGPRGRNVVLEKSYGSPLITNDGVTIAKEIELENRFENMGAQLVSEVASKTNDIAGDGTTTATVLAQSIVKNVTSGANPLGIRRGIEQATQKAVEELQNISTPVESKEAIVQVGEVSSGSKQVGQYIADAMDKVGNDGVITIEDSQGIDTELDVVEGMQFDRGYLSQYMVTDNEKMEADLDSPYILITDKKISNIQDILPLLEQVVQESKPLLIIADDIDGEALPTLVLNKIRGTFNVVATKAPGFGGRRKAMLEDIAVLTGATVITEDLGLELKDATMDSLGKANKVTVDKDNTTIVEGAGDSTAIEDRVQLIKNQVAETTSDFDREKLQERLAKLAGGVAVIKVGAATETEVPKLKLRIEDALNAARAGVEEGMVSGGGTALVNVINKVAELDADDDAITGVNIVLRALEEPVRQISENAGFEGSVIIEKLKSEKLGIGFNAATGQWVNMVDAGIVDPTKVVRSALQNAASISALLLSTEAVIADRPDESGNDAGVALKEWIHQ

SEQ ID NO: 5787 - protein, 364 aa, Bacillus licheniformis ATCC 14580
MKKQYESLFTPFTFKNGIQLKNRIIMPPMGHSSSLPGGFISDDELVYYAARATEVGMVITSATTVQPGTGFPGIPGAENDDQIPGLTRLAATLKKHGAKAILQLFHPGAKGIERTVSASAVAPNQPNAPVPRALSEQEIQDLIHSFGQTARRAIEAGFDGVEIHGANGFLIHQFFSPYYNRRNDGWGGTLEKRMRFPLQIIEEIRRVADSCHKPSFIIGYKFSPEEPETPGITMDETLSFVNVLREQGLDYLHVSLVDFRSLPRRGADRSRARMELIKEAVQDRLPLIGAGQVHTPEDALQALETGADLIGIGRGLLMDPEWLQKVRAGKEDDIQTTLSRHDQRKLAIPDAFWESIPMYIDFSD

SEQ ID NO: 5788 - protein, 368 aa, Pseudomonas syringae pv. syringae B728a
MSLLLEPYTLRQLTLRNRIAVSPMCQYSSVDGLANDWHLVHLGSRAVGGAGLVITEAMAVTPDGRITPEDLGLWNDEQIEPLQRITRFINAQGAVAGVQLAHAGRKASTWRPWLGKHGSISLNEGGWTPVGPSAIAFDPQHTAPVQLSETQIQELIKAFVDSARRALEAGFKVVEIHAAHGYLLHQFLSPLSNQRTDEYGGSFENRIRFTLQVTEAVRAVWPAELPVFVRVSATDWVEDGWNADETVELARRLKAIGTDLIDVSSGGTSAKAEIPVGPGYQTRFAERVRKESEIATGTVGMITDPAQAEHILRTGQADIILLARELLRDPYWPLRADEDLGGRLATWPAQYQRATHRDQPIHESDLRD

SEQ ID NO: 5789 - protein, 777 aa, Neurospora crassa
MAQAYDDEELSISLSPSQIRSRNKRSGDGASGFGPSTGNLHEYGQHGQQLHPNINAVMADAPLRDKMRTEQRIGAYNIVKTLGEGSFGKVKLAVHRMTGQQVALKIIARKKLISRDMQGRVEREIEYLQLLRHPHIIKLYTVIKTPTEIIMVLEYAGGELFDYIVQHGKMKEDEARRFFQQMLCAVEYCHRHKIVHRDLKPENLLLDDNLNVKIADFGLSNIMTDGNFLKTSCGSPNYAAPEVIGGKLYAGPEVDVWSCGVILYVLLVGRLPFDDEHIPSLFAKIARGSYMVPTWMSPGAASLIKKMLVVNPVQRATIDEIRQDPWFLKDLPAYLHPPVEEFLNTGVDPNKAIKVSDIAPNAPPQEQEKLHNEVTEKISKTMGYGKRDVEEALEADEPSAIKDAYMIVRENKLMQSNLDFATSHPPSASILHLPSGEHRLTQKKSKSLSLRPSSFWSNTNEEYQDTLLKTDEEIPGLTTEESVPSPLHDPNMSSARSIASVSTATSPRPYVSKIGILPSSLPTYHRVFMEREKAKAEGLEPPDAIPTIVEPANQPRSQAEQEETIRRLKPHSRSQLRLDEANKRPQGLTPVHPPKKNKPARWQFGIRSRNAPWEALVCIYKALNKLGAGWIVDEDYERAHRDDDDTDDYDGPSIGSRKKSSSSMDPTKTYRLPADPWHIKIRWTTDKLKKHSVASGLSEAGENTHVSRDGSDSKYQVVAMRMEIQIYEMEHGVYLVDFKVDGYETPDGKLLEDKEVTSPFPFLDMAAKLIMQLADAD

SEQ ID NO: 5790 - protein, 151 aa, Wolbachia endosymbiont of Drosophila ananassae
MSNIVHSNKNNKCDNFSVRGLQRAVDNIFDSFFTGWDSELSRRGSSLLPACDFYETKESYCLSLELPGISKESIDISISSDSLIVKGEKTCNNESKDKQFYHRERYYGSFYRSIQLPVNVEQDKVSANFSDGILHVTIPKSEKHIKRIDVK

SEQ ID NO: 5791 - protein, 468 aa, Lactococcus lactis
MTKTLPKDFIFGGATAAYQAEGATHTDGKGPVAWDKYLEDNYWYTAEPASDFYHKYPVDLELAEEYGVNGIRISIAWSRIFPTGYGEVNEKGVEFYHKLFAECHKRHVEPFVTLHHFDTPEALHSNGDFLNRENIEHFIDYAAFCFEEFPEVNYWTTFNEIGPIGDGQYLVGKFPPGIKYDLAKVFQSHHNMMVSHARAVKLYKDKGYKGEIGVVHALPTKYPYDPENPADVRAAELEDIIHNKFILDATYLGHYSDKTMEGVNHILAENGGELDLRDEDFQALDAAKDLNDFLGINYYMSDWMQAFDGETEIIHNGKGEKGSSKYQIKGVGRRVAPDYVPRTDWDWIIYPEGLYDQIMRVKNDYPNYKKIYITENGLGYKDQFVDKTVYDDGRIDYVKQHLEVLSDAIADGANVKGYFIWSLMDVFSWSNGYEKRYGLFYVDFDTQERYPKKSAHWYKKLAETQVIE

SEQ ID NO: 5792 - protein, 655 aa, Burkholderia cepacia
MCGIDGFLNSVACDEETARGTLARMTASLAHRGPDGQGIWVDPEAGIALGHRRLAIVDLSVHGRQPMASACGRYVMVFNGEIYNHRELRAELERAGRAPAWRGHSDSEVLIAAIVAWGVDATLRRATGMFAFALWNRASRVLTLARDRIGEKPLYYGRIGDALVFASELKALRGYPGFDGAIDRDALCLYLRQSSVPAPHTIYRGIHKLPPGTYIQFEHARDTPRLRAYWTLEQVIEDGRAQPFEGSADDAVGQLDAVLRQAVARQMEADVPLGAFLSGGIDSSTIVALMQAQSSTPVDTFTIGFHEAGYDEAGYAKAVARHLGTRHTELYVTADHALGVVPKLPSIYDEPFSDASQIPTFLVSELTRRHVKVSLSGDGGDELFGGYTRYFLTPRLWRKLHRVPGAVRARIAAALHALRPDHADQLAAVAQGAWGGVEARESAARIGDRLHKLGHVMTAESRIGLYRLLMSSVHHPERLALSGQEPATPLDTVSAWPAHLSFAEQAMAIDTLTYLPTDILAKVDRAAMAVSLETRMPFLDHHVVEFAWRVPAHVRLPEGQSKALLRRLLDRYVPSALIDRPKQGFCAPVDHWLRGALRDWAEALLRPSRLREEGYFDADAVERLWRQHVTGRMNWQHQLWTVLMFQAWLEAQRAA

SEQ ID NO: 5793 - protein, 731 aa, Crocosphaera watsonii WH 8501
MFVMFRREVQLPLGKLVRQTQSLLPEEKRPKLVQWDEMYQLEKLIISLGDYFQELQYLQEEIAEQKASEKALEELNLAKSEFLSMMGHEIRTPLNAVTGMTGLLLDTELSDQQKEFVNIIRNSGENLLTMINNILDFSKIEANKLELEEAPFELGLCIEEVLRLFVSQASQKKLELAYLLEPNTPSGIVGDSTRLKQILANLIGNAVKFTPEGEVVIYVSSTVIEGGEGEVNPNYELRFAVKDTGIGIPKERCHRLFQPFSQVDASTTRQYGGTGLGLVISKRLSELMGGKMWVHSEEGKGSTFNFTLRAKAATSSSPVTSQEGESELMGKRVLIIDDNLTSQKILINQAQSWGMFTCAVDSGEKALEWLKRGITFDVAILDMNLPDMNGLELVREIRKQPNCTRLPLIMLSAITETEKTFQSSEEEFVAVLCKPVQRSQLYNVLMEIFSEIPRAPIRVTQSQSVQCSEKSLMGQTHPLKILVAEDVVVNQQVIHLLLEKLGYCADIVSDGQEVLEALKNFAYDVVLMDIRMPEMDGLTATDHICQNYAPDKRPRIIAMTAESMEGDRERFIAGGMDDYICKPVRIKELQEALSRCQPRSESLAIEPKMFNQLRNIAGKRTNEIIKGYLQDTALRIETMNKAIEKRDTEQLYQAAHALRSPSGNLGATNLYYLCKEMETIAREGSLEEASERILGITIEYDRVYYALKKELMREPIPEPIPEPMVKFGGIS

SEQ ID NO: 5794 - protein, 151 aa, Triticum aestivum
ARGKAGEVVPAYVWAPEEDGPYYPGRVSRWWLSQSLKHLDASLRRLGATHLFFNHLYDPLSLVRDHRVKQVLGAEGITVQSFNSDLLYEPWEVLDDHGCPFTMFTPFWNKCLCMVDPPAPMLPPKRINSGLCTAFFFFFFFLFSRKRNNNY

SEQ ID NO: 5795 - protein, 512 aa, Oryza sativa (japonica cultivar-group)
MATFFRSANLASRVFDRQFLSPRPGATVNTVRQFYENLVPSYTICDIDCPDYSFRKFTDDGNYLVAFSRNHQDLIVYRPIWPTFSCNEPCDSHDLPPKAKKFDSFFKQLYSISLASSNEYICKDFFLYMECHQFGLFATSTAQSNDSSATEGAIHGVPSIEKITFYLVRLDDGAILDEKAFRNDFINLAHSIGAYLYEDLLCIVSLRYQTIHVLQIRDSGNLVEVRKIGAFCQEDDELFLHSHGQAARGVSFLPGIKQRLLSFIFRKTWNEESDQTLRVQHLKKKFYFHFQDYVDLIIWKVQFLDRHHLFIKFGSVDGGVSRSTEQNSAFFAVYNMETTDIVSLYQNSSEELYSLFEYFYDHFHTNPQNSSHGNFISSHSNNVHALDQLRTIKNKANSTSQQFVKKMMASLPYTCQSQSPSPYFDLSLFRYDEKLISAIDRHRHCTEHPIKFISVKQPNVVKFKIKPGSDSGASDSRAKRISSFLFHPFFPLALSIQQTYMQPTVVNLHFRR

SEQ ID NO: 5796 - protein, 484 aa, Proteus mirabilis
MEKKKLTTAAGAPVVDNNNVITAGPRGPMLLQDVWFLEKLAHFDREVIPERRMHAKGSGAFGTFTVTHDITKYTRAKIFSEVGKKTEMFARFSTVAGERGAADAERDIRGFALKFYTEEGNWDMVGNNTPVFYLRDPLKFPDLNHIVKRDPRTNMRNMAYKWDFFSHLPESLHQLTIDMSDRGLPLSYRFVHGFGSHTYSFINKDNERFWVKFHFRCQQGIKNLMDDEAEALVGKDRESSQRDLFEAIERGDYPRWKLQIQIMPEKEASTVPYNPFDLTKVWPHADYPLMDVGYFELNRNPDNYFSDVEQAAFSPANIVPGISFSPDKMLQGRLFSYGDAHRYRLGVNHHQIPVNAPKCPFHNYHRDGAMRVDGNSGNGITYEPNSGGVFQEQPDFKEPPLSIEGAADHWNHREDEDYFSQPRALYELLSDDEHQRMFARIAGELSQASKETQQRQIDLFTKVHPEYGAGVEKAIKVLEGKDAK

SEQ ID NO: 5797 - protein, 536 aa, Onion yellows phytoplasma OY-M
MSKKILYGKEARKALLQGVDAIANTVKVTLGPKGRNVILEKAYDSPAIVNDGVSIAKEIELKNPYQNMGAKLVYEVASKTNDKAGDGTTTATVLAQSMIHRGFDAIDAGANPVLVKEGIELAALTVAKKLLAKSKKVDAQEDIQNVAAVSSGSQEIGKIIAQAMQKVGKDGVINVDESKGFETELEVVEGLQYDKGYASPYFVSDRESMTVQLENALVLVTDHKISTVQEIVPILEEVVKASRPLLIVAEAVENEVLGVLVANKLRGTFNVVVTNAPGFGDNQKEMLQDIAVLTKANFVSKELNMKLADLKMDDLGNINKAIIKKDNTTLISNSKSPELEKRIQVLKTQIKNATSDYETKNLQERLAKLSGGVALIKVGAATDTELKDKKLRIEDALNATKAAITEGIVVGGGKALVEVYQELKDTLVSDNKEVQQGIDVVVQSLLVPTYQIAYNAGFSGKDVVKQQLLQPLNFGFNAKEGKYVCLLKEGIIDPTKVTRQAVLNAASISALMITTEAAVVSLKENKDNNFDLGTQE

SEQ ID NO: 5798 - protein, 365 aa, Yarrowia lipolytica CLIB122
MSTAKKQTIHFSGHNNFRRRLVLATLSGMPVRIDKIRSDDVEPGVKDYEVSFLRLLESITNGSVFEISYTGTTVVFKPGIIVGGSVTHNCPLSRGVGYFIEPLLLLAPFGKKALTATLRGITSHSLDPSPDSIRTSVFPVMQKFGIERQELKIIQRGATPLGGGEVMLHLPHLVLHPKTLHATTTPTISKIRGIAYSCRVSPASVNRLIDGAREELRATGCETFIFSDVARGDESGKSPGFGIVLVGETRPGFCISAESVAVAGSIPEDLGRETAKKLIEEISRAGVFGRNQLDMAIIFMILGSGDVGRLVIGKQNIDERFVTLARDIKKFWGVEMRLKEDDENENEMICTVKGVGFVSASKKIA

SEQ ID NO: 5799 - protein, 191 aa, Oryza sativa
MATDGGGATPSPAAKKANLLDPYSIKHLLDETVSEVAKSKGYPEDARLSNRRLAVGAAVIAVALLAQFYPRKFPENRDVLLACIALYAALNVALQIVTYTKEKNAILFTYPPAGSFNRTGLVISSKLPRLSDMYTLTIASADPHSKSSSEPVHFTKSVTKWFTKDGVLVEGLFWKDVEKLIDDYNSDHRSK

SEQ ID NO: 5800 - protein, 336 aa, Pseudomonas syringae pv. phaseolicola 1448A
MSRVTLSRYLIEQTRSNNTPADLRFLIEVVARACKEISHAVSKGALGGVLGSMGTENVQGEVQKKLDVISNEILLEANEWGGHLAGMASEEMDNAYQIPGKYPKGAYLLVFDPLDGSSNIDINAPVGTIFSVLRCPNEYLSQNEALNEKAFLQPGTEQVAAGYAIYGPQTMLVLTLGDGVKGFTLDREMGSFVLTHEDIKIPESTQEFAINMSNQRHWEAPVQRYVNELLAGEEGPLKKNYNMRWVAAMVADVHRILTRGGLFMYPRDSREPSKPGKLRLMYEANPMSFLVEQAGGASTDGHQRILDIQPEGLHQRVAVYLGSKEEVERATAYHKE

SEQ ID NO: 5801 - protein, 520 aa, Neurospora crassa
MVHLTIIPKEDEIRDGLDIPLTGALKAVHLQLANDEDRFTTSVYGSKFAAADLPRHEMPDEEMPKEVAYRMIKDELSLDGNPLLNLASFVTTYMEEEAEKLMTESLPKNFIDYEEYPQTADIQNRCVSMIGRLFNAPVKDAEASSAVGTSSVGSSEAIMLGVLAMKKRWKNKRIAEGKPADKPNLIMSSAVQVCWEKATRYFEVEEKFVYCTPDRYVIDPKETVDLVDENTIGICCILGTTYTGEYEDVKAVNDLLVERGLDTPIHVDAASGGFVAPFVVPDLEWDFRLKNVVSINVSGHKYGLVYPGVGWVVWRSAEYLPQELVFNINYLGADQASFTLNFSKGASQVIGQYYQLIRLGKHGYRAIMSNLTRTADYLAESLAALGFIIMSQKSGQGLPLVAFRLKEDPDRTYDEFALAHQLRVRGWIVPAYTMAPKTEGLKMLRIVVREDFSRNRCDGLISDIRSCQGILEQMDKETVKKQQEFIHKHHVVSGKASHNHPKYHILWSESNSSRNQATPE

SEQ ID NO: 5802 - protein, 406 aa, Neurospora crassa
MSGEKTDFIRFTGHRAFTHRIVLSTLTGRPVHISKIRSSSATHPGLAPHEVSFLRLIEAITNGSVIDVSYSGTTITYQPGLITGTVAGVNAGAVGDVVEHTLPANNTRGITYFLLPLALLAPFSKAHMNVRFTGPGVITSATHLTGDISVDSFRTAVLPLYGMFGIPPARIELRVLSRSCSGPGGRGGGGVVELRFASQVRLPKTLHLNRRPGRIRRIRGVAYCTGVSASHNNRMITAARGVLNQLVSDVHVAAQYDPAPLVGDKSGAKKKIGIGFGLSLVAESSADGVLYSADVVAPPEGGVVPEDIGARCAYQLLEVIAQGGCVSNVSAPTLLTLMAMGSEDVGRLRLGREVLAREETIGLARDLKKFGAASWGIRDVDDDGETTDLVVSVKGTGVGNVGRKVA

SEQ ID NO: 5803 - protein, 338 aa, Desulfovibrio desulfuricans G20
MRQVTVTEHLLLHQTKSPAATGQFTALLYDLILAAKIISKSVNKAGLLDVLGGTGQVNVQGEHVQKLDEYANRVLIHRMERTGVLCAMASEENADLIRVPERFEAGDYILIFDPLDGSSNIDVNINVGTIFSILKRKPGASGSKDVTLGDVLQSGVEQVAAGYFLYGPSTMLVYSSGQGVHGFTLDPSVGEFLLSHPDIRYPEQGRIYSVNESYWHYWDEPTREVVSYFKGPDNPLGKPYSLRYVGSLVADFHRNLFYGGIFMYPMDYRLPEKPQGKLRLMCEASPLAFLAEQAGGRATDGTKRILDIVPGELHQRVPLFIGSAGDVDAVEAIYRRHS

SEQ ID NO: 5804 - protein, 935 aa, Leptospira interrogans serovar Lai str. 56601
MEVKIVSLENDHILFLFFTNFESYFSETPSIFLQDSELRSTIFQKSANAILLLDPDKDLILEINQTASRYFEIQNQSEILNLPFSNLLAQDFTHFEYTSRKKKILSGETPSWDLEFKTLRGKKFWGNTSCRMISTHLNKIILVQIKDITEKVNTRKSLLEQAGTIAEHEANLNAIIENSEAMIWSIDKNYKLLIFNSQFQNVMQNFYHSEISTGFNLFQKELPPEIAKYWKEFYDRALSGEKVSVARKRPNQDGTFIFSELSFQPIRNTEYEITGVSAISVDITDKKLAEEKFRLLFERSSEPHVLYDDFGILECNPATLKMLRCSDKKLVLGKHPIHFSVETEKEKTNELESIALEKGSYTFEWVYKRFNDEEFSVEVTLIPIIIHQKRVFLSVWHEITERKVYEDSLKRAKEIAEAASKAKTDFLAMMSHEIRTPLNGVIGTVSLLEGTFLNTEQKEYLDIIKSSGQNLLILLNDILDLSRIESGQLKLEIQPVSPEKLTNEVVNLFRPMAEEKGLVVESEVSFNVPNWIISDPYRLRQVLTNLIGNSIKFTEKGKIHLSVEAEKFPNDKLRLIFHVKDTGIGIAEEKLELLFRAFSQVDSSTTRKYGGSGLGLTISKKLAELMKGEITVKSQVNSGSEFSLSILTEKLEYEIPAGVQELHSKNLATSAVISIQEFQFKEQIKKFCERNGFLVKMARTAKETIRIIGEEERIGVFLTDLNFPDMNLSEMLNELKKQNPSLKLTVILFMEKELKDSYYLVTNSLFNRPGFQIFMMFKPILLEELSKNFEKAFPIKVLKKEKQNENKKLLSEKIPLQILLVEDNVINQKIALRLLTKLGYNADSALNGLEGIEKLKTKNYDLIFMDIQMPEIDGYETTFQIRKDFGKSKPVIVAMTANAMEGDREKCLEAGMNAYISKPIQIQDIESTIVLLFQS

SEQ ID NO: 5805 - protein, 158 aa, Sorghum bicolor
LPPYDPCAVFNSINYLNLPEVQTALHANVSGIVEYPWTVCSNTIFDQWGQAADDLLPVYRELIQAGLRVWVYSGDTDSVVPVSSTRRSLAALELPVKTSWYPWYMAPTEREVGGWSVQYEGLTYVTVRGAGHLVPVHRPAQAFLLFKQFLKGEPMPAE

SEQ ID NO: 5806 - protein, 434 aa, Trichodesmium erythraeum IMS101
MNIASIHSLFKNILYSGAIATTAAISLLAPSLSKPAEANLENSPKVVLDEAWQIVNREYVDGSFNHTDWKATRKSLLEKNYTSQEKAYEALRQALDQLNDPYTRFLDPEQFKALTSQTSGEMSGVGMQLKQEELTKTIVVVDVVENSPAMKGGLLPGDQIQEIDGKSTSDLSVSAAAKLIRGDVGTKVMLGVIRPGDREFEVTLTRARIELQAVRYDLKQEKNQRIGYIRLQEFSAHAGEQMQRAIEKLNNQNPDGYVLDLRGNPGGLLRISIDIARMWMDKGAIVSTVDRDGDRQEVLADRSALTDKPIVVLVDGDSASASEILAGALKDNGRATIIGDQTFGKALVQSVHSLSDGSGLAVTIAHYYTPKGTDISKKGVTPDVVLNLTDSQKRRLYRRPEAIATSSDPYYARAINLLRNEVLLSPLILGEQEN

SEQ ID NO: 5807 - protein, 355 aa, Shewanella sp. MR-7
MTIENTVNSVSNLFDTYKLNDTITLKNRILMAPLTRCMADADLVPTDDMVAYYARRAEAGLIISEATIIRPDGQGYPNTPGIFNQAQIAGWRKVTDAVHANGGKIFVQLWHTGRVAHPHFFGGGDVLAPSAEKVEGSVPRMRELTYVTPKAATLEDIQGLVRDYAKAAENAIEAGFDGVEIHGANGYLIDAFLHHDSNRRTDEYGGTPANMSRFALEVVDAIAARIGKDRTGLRISPGAYFNMAVDNRDRAVFDYLLPELEKRELAFVHIGIFDDSMEFDYLDGRVSSYVRANYGKTLVGVGGYSAQSASEAIAADKFDLIAIGRPFIANPDYVARVRQGHELVTYSDEMLASLV

SEQ ID NO: 5808 - protein, 468 aa, Lactococcus lactis
MTKTLPKDFIFGGATAAYQAEGATHTDGKGPVAWDKYLEDNYWYTAEPASDFYHKYPVDLELAEEYGVNGIRISIAWSRIFPTGYGEVNEKGVEFYHKLFAECHKRHVEPFVTLHHFDTPEALHSNGDFLNRENIEHFIDYAAFCFEEFPEVNYWTTFNEIGPIGDGQYLVGKFPPGIKYDLAKVFQSHHNMMVSHARAVKLYKDKGYKGEIGVVHALPTKYPYDPENPADVRAAELEDIIHNKFILDATYLGHYSDKTMEGVNHILAENGGELDLRDEDFQALDAAKDLNDFLGINYYMSDWMQAFDGETEIIHNGKGEKGSSKYQIKGVGRRVAPDYVPRTDWDWIIYPEGLYDQIMRVKNDYPNYKKIYITENGLGYKDEFVDNTVYDDGRIDYVKQHLEVLSDAIADGANVKGYFIWSLMDVFSWSNGYEKRYGLFYVDFDTQERYPKKSAHWYKKLAETQVIE

SEQ ID NO: 5809 - protein, 651 aa, Thermoanaerobacter brockii
MTHFPNLFSEGRIGNLVIRNRIVMPPMATNLANEDGSVSQRLIDYYVARARGGVGLIILENVQVDYPQGKNVACQLRLDDDKYMAGFFELAEAVHSYGAKIFMQIHHAGRQTTPGITEGLQPVAPSPVPCSFLGTQPRELTINEIEEIIQKFVDAAVRAKGAMFDGIELHGAHGYLIGQFMSPRTNRRVDKYGGSFERRMRFPLEIIRRIKEAVGEDYPISFRFSADEFVEGGNTLEEGKQIAKMLEEAGVHVLHVSAGIYESMPTLLEPSRFEQGWRVYLAEEIKKVVNIPVITVGVIREPEFAEKIIAEGRADFVAVGRGLIADPEWPKKAKEGRQNEIRKCISCNIGCIGGRVFQNLRLRCTVNPVAGREGVYSEIKQAPVKKKVVVVGGGPAGMQAAITAAKRGHQVILYEKKQHLGGQLEIASASPGKAKIKWFRDWLEAELSRAGVEVRSGVTADAETIAALSPDYVILATGSEPVTPRIKGAEKENTFVFQAWDVLAGKVSFDKDEEVVVIGGGLVGCETAHYLAEKGAKVTIVEMLSDIAIDMEPISRFDMMQQFTKLGISARTGKVVTEILPRGVAAVGKEGKQDFIRAHKVVLAIGQSPVGNELKKTLEDKGIDVRVIGDAYNVGKIIDAVSSGFQVAWQI

SEQ ID NO: 5810 - protein, 315 aa, Triticum aestivum
  misc_feature (169)..(169): Xaa can be any naturally occurring amino acid
MAAAEVYSPTAAAAAQHQQRGKAATQAWQAVVGWIGFLLQVLLQILRGTPSCAQLLSFVGFRYPLLSSASAAPDQPSPEVAFMPLRSEIPADAAPVPAPPSEPLQRLTVVLDLDETLVSAYESSGLPPIVRTQAVEAGLHCFDMECISTDKDVEGKQKVNHVTVFERPXGLHEFLQKTSEFADLILFTAGLEGYARPLVDIIDAHNRFKLRLYRPSTVTTEYREHVKDLSCLSKDFSRIVIVDNNPFSFIVQPLNGIPCVPFSAGQHSDDQLMEVIFPLLKHLSVQRDVRPALYERFHMPEWFQKHGIPRTDQAL

SEQ ID NO: 5811 - protein, 590 aa, Pseudomonas fluorescens PfO-1
MCGLAGELRFDQQPADLAAIERITHHLAPRGPDAWGFHAQGPIALGHRRLKIMDLSDGSAQPMIDSQLGLSLAFNGAIYNFPELRAELEALGYAFYSGGDTEVLLKGYHAWGEALLPKLNGMFAFAIWERDAQRLFIARDRLGVKPLYLSRTGQRLRFASALPALLKGGDINPILDPVALNHYLNFHAVVPAPRTLLAGIEKLPPASWMRIEADGTTEQKTWWTLPYGPHADEKNLTLEDWRDRVLDSTREAVAIRQRAAVDVGVLLSGGVDSSMLVGLLREVGVENLSTFSIGFQDAGGERGDEFQYSDLIAKHYGTQHHQLRIDEKEIIEQLPAAFRAMSEPMVSHDCIAFYLLSREVAKHCKVVQSGQGADELFAGYHWYPQVDGAADPYAAYREAFFDRSYDDYAATVQPKWLTANDAAGDFVKEHFAQPGADAAVDKALRLDSTVMLVDDPVKRVDNMTMAWGLEARTPFLDYRLVELSARIPGQFKLPDGGKQVLKEAARRVIPSEVIDRKKGYFPVPGLKHLQGETLSWVRELLLDPSQDRGLFNPAMLDQLLTDPQGQLTPLRGSKLWQLAALNLWLSEQGI

SEQ ID NO: 5812 - protein, 412 aa, Glycine max
LFYLDPEAEVVALSPKTLLATNRFICEICNKGFQRDQNLQLHRRGHNLPWKLKQRSSKDIIRKKVYVCPEPSCVHHEPSRALGDLTGIKKHFCRKHGEKKWKCDKCSKKYAVQSDWKAHSKTCGTREYRCDCGTLFSRRDSFITHRAFCDALAEESARSVTGIVANSTTQPTEAAGVVISSSSLHQDMIHASNNNFPLKKEQQGCIPHWLGQPSPSSASSSFLFSHQDHHLHENPNPRGGPTLLPPPYHQTAPHMSATALLQKAAQMGATMSKTGSMIRTHQQQAHVSANAALNLSSRDHQMNPTPHDLLPFGNNKAVDNGVGVSPSLLHHVINSFSSSPFEGTFEDTFGGGDAMTADEGGGGGAGGNNNEGLTRDFLGLRHLSHTDILNIAGVGNCMNSSQHNQTRNPWQG

SEQ ID NO: 5813 - protein, 240 aa, Oryza sativa
MGRGKIVIRRIDNSTSRQVTFSKRRNGIFKKAKELAILCDAEVGLMIFSSTGRLYEYSSTSMKSVIDRYGKSKDEQQAVANPNSELKFWQREAASLRQQLHNLQENHRQLMGEDLSGLNVKELQSLENQLEISLRSVRTKKDHVLIDEIHELNRKGSLVHQENMELYKKISLIRQENAELYKKIYETEGPSEVNRDSPTPYNFAVIEKTNVPVQLGLSTLPQHSDAEQSTAPKLGLQLNP

SEQ ID NO: 5814 - protein, 276 aa, Mesorhizobium loti MAFF303099
MPELITLNDGAAIPQLGLGVWQVDHGITADVVGWAIKAGYRLIDTAQGYQNEEGVGEAIRAADVARSELYITSKLRNGAHERDAALRAFDDTMEKLGIEQIDLFLIHWPVPSRDKYVEAWKTLIELKQAGRIKSIGVSNFNRDHLERIIGETGVVPVANQIELHPRFQQRELREFHAGHNIQTESWSPLGSGRLLGDPTIAGIAKKHGKSAAQTIIRWHLQQGLIVIPKSVRQDRIAANFDVFDFELDAQDLKTIAGMDSADGRDGPNPATAAFLF

SEQ ID NO: 5815 - protein, 372 aa, Neisseria gonorrhoeae FA 1090
MEEQLAQNDQPSEKLVRLYGAWAEGGAGVLVTGNVMVAESGKGSINDVLISDDRALEMLKKWAKARTQNDTLLIMQINHAGKQSPAVVNKTPLAPSAVPLVGMNGFINPPRELSADEINGLIQQFVQTAKIAEQAGFSGVQIYAVHGYLISQFLSPHHNRRQDQWGGSLENRMRFLLETYTAIRAAAGKDFLVGVKLNSADFQKGGFDESESVQVVQKLSEMGIDFIEVSGGNYESPQMLAAKDSTRKREAFFIDYAEKARAASQAPLIITGGFRSQTAMEDALSSGHLDLVGIARPFALVPDLANKMQNRTYQTVQADRIQTGVAFVDKKAGAMLEMNWYMTQMDLIGQGKQSNPKIVGVESIAENFAGKR

SEQ ID NO: 5816 - protein, 265 aa, Yarrowia lipolytica CLIB122
MAMHRVAPDIPLWVGSIYSLSAHISFEKYNINHIISMVRGELPGNQIQGYTHLHVEMDDDEEENIMQYFPETNKFIEDACGEWMTKVAESGKYKNYPENVESVHLEYPHNPDPPGVLVHCMAGISRSSTIVIAYLMKKLGLTAEQGLALVKKGRKIANPNPSFVEQLKIYEQCGYEIDDSKPLYRQWILKKDSEGIPNIGSTPKFKYRSETEGLTSRGQGFSADFRRQIRPKMNQSGAVEDATEATPEQTAPSMKTSLLRCRMCR

SEQ ID NO: 5817 - protein, 250 aa, Neisseria gonorrhoeae FA 1090
MKITPVKALTDNYIWMIQHGNHAVCVDPSEPSPVLEFLVRNRLMLAQTWVTHPHPDHEGGAAALWRGYMESPVYGESDIEAATHTVTAGTRFTFGNGQVTVWATPGHTDRHTSYLLETSDGIHVFCGDTLFSAGCGRVFTGTVEQLYDNFQRFNQLPEGTLFYPAHEYTAANLRFAAHIEPDNADIQTALKAAEHTPTLPVTLAHERRVNPFLRTEIPAVRQRAEALVGKTLNSGLEVFAALRELKNAYR

SEQ ID NO: 5818 - protein, 399 aa, Clostridium tetani E88
MNKKKWIGWTIAIVLLTNTLTYIGSNIIPLAMPNGNVVVRKEDYNNLVQFNKLFQIKDLIHERYDGEINEKDLEEGAIKGLANSLKDPYTVFMTKKEYDDFNTQTEGNYSGVGIQLQAKDNKIVIVDIFEESPARKAGILPKDEIEKVNDIPVDGSQLEKAVSLMKGVEGSEVKLTLFRKDKGNFDVNLKRSKINLKTVAGQMLDEDVALVQVTMFDENTAKNFKSELDKLKSQGMKGLVLDLRGNPGGVLDECVDMVSNFVPKGKTIVSTMDKYKSERKYKSKGGNYVGLPLVVLTNEGSASASEIFAGAIRDYKIGTLVGEKTFGKGLVQTLYETGEGTALKITISKYYTPNGENINKIGIKPDVEVKYPEELLKKPYNRNEDPQFKKALEVVKEKI

SEQ ID NO: 5819 - protein, 448 aa, Francisella tularensis subsp. tularensis SCHU S4
MALHGKKDTIDNLDFFEQSLPKFKLPLNSQDPLEVYQEIKDELMLDGNSKQNLATFCQTEVDDFIHKLMDDCIDKNMIDKDEYPQTAEIESRCVNILANLWNSSAENAIGCSTTGSSEAAMLGGMAMKWRWRDKMKAQGKDYTKPNLVTGPVQVCWHKFARYWDIELREIPMSNESLIMTPEAVLERCDENTIGVVPTLGVTFTGQYEPVEQVCKALDDFERQTGVDIPVHVDAASGGFLAPFVEPELKWDFRLPRVKSINSSGHKFGLSPLGVGWVIWADKKYLPDDLIFNVNYLGGNMPAFALNFSRLGGQIVAQYYNFVRLGFEGYKKVHQLCYDVAEYIAKELRKMEIFEIIHAGEGGIPAVSWSLKATKEYSLFDISEKVRAKGWQIAAYTMPNNREDLVVMRVLVRRGFSYDLAQLMIRDLVAVIDSLEGKLKILKRSSFAH

SEQ ID NO: 5820 - protein, 493 aa, Shewanella sp. MR-7
MSDNQPQAAKHALMWFRQDLRLTDNQALTAACDWVRQAPGAKLRAIYIATPSQWLSHDMAPIQIDFIQRHVNLLAQGLASLGIEFELIQLDSFKEVPAFLASYCEKLGVERVFAGREPEINEQKRDQACLDAGIPLVLSDEHCLLPPGTVLNLSGDMYKVFTPFSRKWREVAAKRAILPLAVPAPLGPMLPEPKPISFKERFPFTSKLTSSEQWAAGEGQAKRILTAFIQQKAQDYKQDRDFPALEGTSVISPYLALGVLSPRQCIAALLGRFPEVIVDDTSPGRTWLNELIWREFYRHLLVAFPDLSKGHNFNRQADHVQWRNNQAEFLAWCEGKTGYPIVDAAMRQLNQTGWMHNRLRMVVASFLTKHLLIDWRWGERYFRQHLIDGDLAANNGGWQWSAGCGCDAQPYFRIFNPISQSEKFDPDGSFIRKYLPELASWGIKRLHQPNMQKTPSLFEVQMLESDSAYPCAIVEHNAARARALAVLGVLKKA

SEQ ID NO: 5821 - protein, 338 aa, Kluyveromyces lactis NRRL Y-1140
MFKERLLNILKHIRPMSTETTAKYYPKIVESAQADQSLKLNHTCFRVKDPKVTVAFYQEQFGMKLLDHKKFPDMKFDLYFLSFPNKQFSNNSQGAIDVFRENGILELTHNYGTESDPAYKVNNGNEEPHRGFGHICFSVSNLEAECERLESNGVKFKKRLTDGSQRNIAFALDPNGYWIELIQNNESGEGNNYKFNHTMVRVKDPIKSLEFYQNVLGMKILDVSDHSNAKFTLYFLGYENDQKGIARGSRESILELTHNWGTENDPDFAYHTGNTEPQGYGHICISNKDPATLCAEIEKLYPDIQWSPKFNQGKMKNLAFIKDPDGYSIEVVPYGLGV

SEQ ID NO: 5822 - protein, 567 aa, Aspergillus nidulans FGSC A4
MRQKRKLSNGADERYHPNAQQTADFGIVLRDFYPPEMSNARCEAYNSGILERPIESWQKAYTETSAQQNAMTANAAVVHWFKSDLRLHDNRALQMAYRVAREHKIPLIGLYILSPEDLTAHLSSPARVDLTLRTLEQLKRDLGELDVPLYMETQACRKDIPRRIINLCQEWGANHLFANLEYEVDELRREAKLIRLCAENGIRFETAHDMCVVPPGVLSSQQGRQYAVYSPWFRSWLAFLNENPEYLEVSEDPTSNPGDARRYFKELFECPVPATPENKRFDDVEKADRVRRAFPAGEHEGLRRLEEFLEKATAYDDERNFLSGETTSKLSPYFASGSLSARTAVAKAREANAGKISRGEAGYISWISEVAWRDFYKHVLVHWPFICMNKCFKFEFTNIDWSYNNTHFEAWAAGKTGYPLVDAAMRQLHATAWMHNRCRMVVSSFLCKDLLIDWRRGERYFMEHLIDGDFASNHGGWGFGSSTGVDPQPYFRIFNPIRQSERFDPDGEFIRRWVPELRGVEGNAIHAPYERGAGDIARANGYPEPIVDHARQRGVALRKYKDAARGA

SEQ ID NO: 5823 - protein, 363 aa, Methanothermobacter thermautotrophicus str. Delta H
MTYTSGRILGSMCTSSHPLARRVYCDFLESNLGDPGLFRGTRELESGVIGMLGELLSEPDAAGHIITGGTEANLMAMRAARNMAGAEKPEIIVPKSAHFSFRKAADILGLRLREAELDQDYRVDVESVRKLISENTVAVVGVAGTTELGRIDPVEELSEICLDEDIHLHIDAAFGGFIIPFLRETGAELPEFDFKLQGVSSITVDPHKMGLAPIPSGCILFRDASYLDAMSIETPYLTEKQQSTIVGTRTGASAAATWAIMKHMGREGYRKLALRVMGVTRRLRDGLVELDYQLVVEPELNIVAFNHPAMGPHELADRLEELGWAVSVSSCPPAIRVVLMPHIMEEHIELLLRDLEGIRLREE

SEQ ID NO: 5824 - protein, 376 aa, Lycopersicon esculentum
MENKVVEEKQVDKIPLMSPCKMGKFELCHRVVLAPLTRQRSYGYIPQPHAILHYSQRSTNGGLLIGEATVISETGIGYKDVPGIWTKEQVEAWKPIVDAVHAKGGIFFCQIWHVGRVSNKDFQPNGEDPISCTDRGLTPQIRSNGIDIAHFTRPRRLTTDEIPQIVNEFRVAARNAIEAGFDGVEIHGAHGYLIDQFMKDQVNDRSDKYGGSLENRCRFALEIVEAVANEIGSDRVGIRISPFAHYNEAGDTNPTALGLYMVESLNKYDLAYCHVVEPRMKTAWEKIECTESLVPMRKAYKGTFIVAGGYDREDGNRALIEDRADLVAYGRLFISNPDLPKRFELNAPLNKYNRDTFYTSDPIVGYTDYPFLETMT

SEQ ID NO: 5825 - protein, 740 aa, Catharanthus roseus
MESCNCIEPQWPADELLMRYQYISDFFIALAYFSIPLELIYFVKKSAVFPYRWVLVQFGAFIVLCGATHLINLWTFTMHSRTVAVVMTTAKVLTAVVSCATALMLVHIIPDSLSVKTRELFLKNKAAELDREMGLIRTQEETGRHVRMLTHEIRSTLDRHTILKTTLAELSRTLALEECALWMPTRSGVELQLSYTLRLPNPVGFTVPILLPVINQVFSTNRAVKISPNSPVARLRPTGKYMPGEVVAVRVPLLHLSNFQINDWPELSTKRYALMVLMLPSDSARQRHVHELELVEVVADQVAVALSHAAILEESMRARDLLMDQNVALDLARREAETAIRARNDFLAVMNHEMRTPTHAIIALSSLLQETELTPEQRLMVETILKSSNLLATLINDVLDLSRLEDGSLQLDIATFNLHSLFREVLNLIKPITSVKRLFATLSLAPDIPEYAISDEKRLMQIMLNVVGNAVKFTKEGGISITAFVAKSDSLRDPRAPEFFPVPSDSHFYLRVQVKDSGSGINPQDIPQLFTKFAQSQTLATRNSGGGGLGLAICKRFVNLMEGQIWLESDGLGKGCTAIFMIKLGIPGRSSEAKLPLVSRVPADHVQTTFPGLKVLLMDDNGVSRMVTKGLLLQLGCEVTTVSAGDECLRVISNEHRVAFMDVSIPGKDIYEVAVRIHEKFSKRLDRPLIIALTANADRVMKENCLRVGMDGVVQKPISVDKMRSVLSELLDHGVLLEAQ

SEQ ID NO: 5826 - protein, 157 aa, Arabidopsis thaliana
MSLIPSFFGNNRRSNSIFDPFSLDVWDPFKELQFPSSLSGETSAITNARVDWKETAEAHVFKADLPGMKKEEVKVEIEDDSVLKISGERHVEKEEKQDTWHRVERSSGQFSRKFKLPENVKMDQVKASMENGVLTVTVPKVEEAKKKAQVKSIDISG

SEQ ID NO: 5827 - protein, 1406 aa, Frankia sp. CcI3
MSPAYDPQPSARHDLDAPGGDATATIVPHASLPVDDTRASRAAADELIADLLHGLTRLCEGDFSTRLAARDGYAGDVVRKFDELAAIQERHARELARVSKVIRRDGRLTLRMEDLGNPGGWSDMTQAVNSLIDDLARPTHEVARVIAAVAEGDLSQHMALEIAGQPVRGEFLRIGTTVNTMVDQLSSFADEVTRVAREVGTEGNLGGQAKVKGVSGVWRDLTESVNSMAGNLTSQVRNIAQVTTAVAQGDLSQKITVDARGEIHELKSTVNTMVDQLSAFADEVTRMAKEVGTEGKLGGQAQVKGVSGVWRDLTDSVNVMAGNLTTQVRSIAEVAAAVARGDLTRQITVDARGEVAGLAHTLNTMVDQLSSFADEVTRVAWEVGTEGNLGGQAHVRAVSGVWRDLTESVNSMAGNLTSQVRNIALVATAVARGDLSQKITVAAQGEILELKDTLNTMVDQLSSFADEVTRVAREVGTEGNLGGQAHVRGVSGVWRDLTESVNSMAGNLTSQVRNIALVTTAVARGDLSQKITVTAQGEIAELKDTVNTMVDQLSSFAAEITRVGREVGVEGKLGGQATVAGVAGTWKDLTDNVNQLASTLTIQLRAIGDVSTAVTRGDLTRSISVEAEGEVAELKDNINQMIARLRETTEVNAQQDWLKSNLARIGSKMQGQRDLYAVCQMIISEMTPAVNAQQGTVYLLDFIEGDKLRYVAGYGSVPRRRSDGTFLFGEGLIGQAALERDRIRVEHVPAGYLNIRSGLGEAPPCDLVVVPVVFENQVLGVIELASFSPFSELHLTLVDQLVDTIGVVLNTIMANARTEELLAQSQRLTQELRSQSVELQRTNNELEEKAALLEEKNHEIELARIGLEEKAEQLALSSQYKSEFLANMSHELRTPLNSLLILAKLLADNPDRNLSRKQIDFAETIHSAGSELLELINDILDLSKVEAGKMNVDATTVRTAALCDAVAGVFGPVAEEKGLSFQVNLAPDVPAEFVTDEQRLQQVLKNLLSNAVKFTDTGTVRLDVTVARPDLPFLSPSLCSAGTVLSFAVTDTGIGVAVEKLRMIFEAFQQADGTTSRRYGGTGLGLSISKEIARLLGGAIAVSSVVGRGSTFTLYLPSAPPAQTPPFGVTPGEPDNVLMIVDPSGQYLGRRSGEGVDAEPGGGPAPSAGRDAGPANGWQNPDADRFGTAALAPSSPSSSSSLSPTRSGPGAGGTAGHGDAGGIGGAHWSAAASGPAEGSAAFTSGWRPSEPVTVGTPFLTESTESTESASRPLTEGSEGSDPLVGTTVLVVDDDVRNVFALTSALEMYGMRVLYADNGHDAIRMLQQDTPPVHLVLMDVMLPGMDGNETTSMIRDMPAFADLPILVLTAKAMPGDREKSITAGATDYITKPVDLEHLLGVMRSYLY

SEQ ID NO: 5828 - protein, 1124 aa, Lathyrus sativus
MSTTRPSQSSNNSGRSRNSARIIAQTTVDAKLHATFEESGSSFDYSSWVRVSGSVDGDQQPRSNKVTTAYLNHIQRGKQIQPFGCLLALDEKTCKVVAYSENAPEMLTMVSHAVPSVGDHPALGIGTDIRTVFTAPSASALQKALGFAEVSLLNPILVHCKTSGKPFYAIIHRVTGSLIIDFEPVKPYEVPMTAAGALQSYKLAAKAITRLQSLASGSMERLCDTMVQEVFELTGYDRVMAYKFHEDDHGEVIAEIAKPGLEPYLGLHYPATDIPQAARFLFMKNKVRMIVDCNAKHVKVLQDEKLPFDLTLCGSTLRAPHSCHLQYMANMDSIASLVMAVVVNDSDEDGDSADAVLPQKKKRLWGLVVCHNTTPRFVPFPLRYACEFLAQVFAIHVNKEIELEYQILEKNILRTQTLLCDMLMRDAPLGIVSQSPNIMDLVKCDGAALFYRNKLWLLGATPTEYQIREIALWMSEYHTDSTGLSTDSLLDAGFPGALSLSDTVCGMAAVRITSKDIVFWFRSHTAAEIRWGGAKHEPGEQDDGRKMHPRSSFKAFLEVVKARSVPWKDFEMDAIHSLQLILRNASKDTDIIDLNTKAINTRLNDLKIEGMQELEAVTSEMVRLIETATVPILAVDVDGTVNGWNIKIAELTGLPVGEAIGKHLLTLVEDSSTDIVKKMLNLALQGEEEKNVQFEIKTHGDQVEFGPISLIVNACASRDLRENVVGVCFVAQDITAQKTVMDKFTRIEGDYKAIVQNPNQLIPPIFGTDEFGWCCEWNAAMIKLTGWKREEVMDKMLLGEVFGTQMSCCRLKNQEAFVNFGIVLNKAMTGLETEKVAFGFFSRKGKYVECLLSVSKKIDAEGLVTGVFCFLQLASPELQQALHIQRLSEQTALKRLKVLTYMKRQIRNPLAGIVFSSKMLEGTDLETEQKQIVNTSSQCQRQLSKILDDSDLDGIIDGYLDLEMAEFTLHEVLVTSLSQVMNRSNTKGIRIANDVAEHIAKESLYGDSLRLQQVLADFLLISINSTPNGGQVVIASSLTKEQLGKSVHLVNLELSITHGGSGVPEAALNQMFGNNVLESEEGISLHISRKLLKLMNGDVRYLKEAGKSSFILSVELAAAHKLKG

SEQ ID NO: 5829 - protein, 352 aa, Staphylococcus xylosus
YSTNDITQYTSASIFSEVGKQTEMFARFSTVAGERGAADAERDIRGFALKFYTDEGNWDLVGNNTPVFFFRDPKLFASLNHAVKRDPRTNMRSAQNNWDFWTSLPEALHQVTILMSDRGIPKGFRNMHGFGSHTYSMYNDKGERVWVKFHHRTQQGIENLQPDEAAKIIADDRESSQRDLFEAIENKDYPKWKTYIQVMTEEQARNHKDNPFDLTKVWYKGDYPLIEVGEWELNRNPDNYFQDVEQAAFAPTNIVPGLDFSPDKMLQGRLFSYGDAQRYRLGVNHWQIPVNQPKGVGVENICPFSRDGQMRILDNNQGGGTHYYPNSDGSFEDQPEFKKPGLKVEGEAYEYD

SEQ ID NO: 5830 - protein, 697 aa, Desulfovibrio vulgaris subsp. vulgaris str. Hildenborough
MCGIAGIVSPGAPVASATLAAMTESLAHRGPDACGLFIRPSGAGSPHVGLGHRRLSILDLSDAGAQPMQSEDGAFTLVFNGEIYNYPDLRRDLEAAGHIFRSTSDTEAILRGYMAWGEGVVARLKGMFAFALWDERKRSLLLARDRFGKKPLHYAVTRQGTLLFASEPKALLAHPEFRPEPDAASLLHFLRYDYVPAPRSIYAGAAKLPPSHLMVWRDGRLEVRRYASLAFSGATGDRGVPLREAEAAVDALLDAAVQRRLASDVPLGVFLSGGLDSSTVLAYMTRHIPAHDIRTFAIGFDEASYDESAHAEAMARHAGSHHTMMRLPAARMLDLLDMVWTTQDEPMADASIIPTLLLCRFAREHITVALGGDGGDELFAGYDPVLADLPARCLDWLPPAALRLLQGIALRLPTGDANMSLGFKVQRFLSGLGAREVAARHQTWLGAFDDEGARAMLHPDLRAATRDVSPLDALDMLREECRDASRFDAMLHFYQRFYMCGSILTKVDSASMAVSLEVRSPFLDQDLADYVNRLPREHKLRGLTRKVLLRRLMRSRMPDALLKRPKKGFGLPLARWFRHELRPLVTAMLDPGRVAQGGLLDPVTVERMVRDHLSGRRDHRKEIWSALCVEAWRERYLHHSRATASDTIEFGTTPHGDGHLITAQAVPARSSAAINDSTNDSPSWAASPSRHRCNDSI

SEQ ID NO: 5831 - protein, 354 aa, Staphylococcus xylosus
VTNDITQYTSASIFSEVGKQTEMFARFSTVAGERGAADAERDIRGFALKFYTDEGNWDLVGNNTPVFFFRDPKLFASLNHAVKRDPRTNMRSAQNNWDFWTSLPEALHQVTILMSDRGIPKGFRNMHGFGSHTYSMYNDKGERVWVKFHHRTQQGIENLQPDEAAKIIADDRESSQRDLFEAIENKDYPKWKTYIQVMTEEQARNHKDNPFDLTKVWYKGDYPLIEVGEWELNRNPDNYFQDVEQAAFAPTNIVPGLDFSPDKMLQGRLFSYGDAQRYRLGVNHWQIPVNQPKGVGVENICPFSRDGQMRILDNNQGGGTHYYPNSDGSFEDQPEFKKPGLKVEGEAYEYDSDL

SEQ ID NO: 5832 - protein, 360 aa, Dechloromonas aromatica RCB
MTTLFDPIQMGDIALANRIVMAPLTRNRAIEGNKPGPLTVEYYRQRATAGLIVAEASPISPTAQGYLDTPGIWSAEQVVAWQAVTKAVHAEGGKIVLQLWHVGRISHISLLPAGEVPVSSTDKVADASTFTSEGFIPVSKPRALHDDEIPALIEDYRKAARNAIAAGFDGVEIHAANTYLIEQFLRDSVNDRSGPYGGSIENRTRLLLEVTRAVAGEIGAGRTGIRLSPMTTFTAPLDSNPQALYGYVVEQLAPLGLAYLHVIEGETGGTRTPEGKPFDYAALHRAYPGVWMLNNGYDRDLALQTVADGKADLIAFGRPFISTPDLVRRLRDGAPLNELRADKLYGGGAEGYTDYPTLAG

SEQ ID NO: 5833 - protein, 277 aa, Bacillus cereus ATCC 14579
MILTNLKDYTTLHNGVKMPWFGLGVFKVEDGSEVIDSVKAAIKNGYRSIDTAAIYQNEEGVGQAIRESGVSREELFITSKVWNSDQGYETTLQAFETTLEKLGLEYLDLYLVHWPVKGKYTESWKALETLYKDGRVRAIGVSNFHIHHLQDVFEIAEIKPMVNQVEYHPRLAQEELHAFCKEHNIQLEAWSPLMQGQLLDNPTLQEIATKYNKSTAQIILRWDLQNEVVTIPKSIKEHRIIENANIFDFELSADDMKAIQALNEDRRVGPDPDNFNF

SEQ ID NO: 5834 - protein, 348 aa, Ustilago maydis 521
MGAEDYSPPATDIITLTRHVLTEGFKLRTESAASGDLTILLSSLQTTCKFIESNVRKASLINLIGAAGNTNVQGEDQKKLDVLSNEIMINALRASGKTAVLVSEEDDEAIFVGEKEEGGTFESTKGKYCVVFDPLDGSSNIDAGVNIGTIFGIYLVKEGSKGTLEDVLRPGREMVAAGYCMYGSSANLVLTTGNGVNGYTLDNQIGEFILTHPNIRLPSRGKIYSVNEGNSMYYYEPVLKYLDSIKYPKGEGAKPYSARYIGSMVADVHRTLLYGGIFIYASDKKSKDGKLRMLYEAFPMAFITEQAGGLATTGTQRILDIQPTSIHQRCPVFLGSKDDVEDLMKCFQ

SEQ ID NO: 5835 - protein, 449 aa, Triticum aestivum
MYRAKRAALSPKVKRRVGKYELGRTIGEGTFAKVRFAKNTETMEPVAIKILDKEKVQKLRLVEQIRREICTMKLIKHPNVVRLHEVMGSKARIFIVLEYITGGELFDTIYTNGRLKEEEARKYFQQLINAVDYCHSRGVYHRDLKLENLLLDAAGNLKVSDFGLSALTEQVKADGLLHTTCGTPNYVAPEVIEDRGYDGAAADIWSCGVILFILLAGFLPFEDENIIALYKKISEAQFTCPSWFSTGAKKLITRILDPNPATRITIPQILEDPWFKKGFKPPVFDDKYETSFDDVYAAFGDSEDQHVKEETEHKPTSMNAFELISLNQGLNLDNLFEAKEEHKRETRFTSQCPPKEIISKIAEAARPLGFDIQKKNYKMRMENPKAGRKGNLNVATEVFQVAPSLHVVELKKAKGDTLEFQMFYRSLSTQLKDVVWKCGGEVEDNGTAA

SEQ ID NO: 5836 - protein, 622 aa, Ralstonia solanacearum
MTDTTSAPPVRHAHDLPFGAACLGPDRTRFRLWAPDAVEAWVDIDQGEAVRMAPEPGGWHAATVPVGAGTCYRYRVTNREGITLTVPDPAARAQWQDVHGPSLVVDPLRYAWQHPGWMGRPWHETVLYELHVGALGGFDGVRARLPELARLGITAIELMPVAEFPGARNWGYDGVLPFAPEAGYGPPDALKALIDSAHGLGLMVFLDVVYNHFGPEGNYLHHYARRVFRDDVHTPWGAAIDFRQPEVRAFFLHNALMWLMEYRFDGLRLDAVHAIGARDWLEELAARVRQAVEPGRHVHLVLENEHNTASLLRGAPPGTLGTGAFEAQWNDDGHNALHVLLTGEHEAYYAAYADAPAQRLARVLQDGFCYQGEPSVIHDGAPRGEPSGWLPPTAFVLFLQNHDQIGNRAFGERLTRLAHPDALRAAQALLLLSPQIPLLFMGEEWGCLRPFLYFTSHHGALAEAVREGRRREFARFAAFADPHQRERIPDPNDERTFLDSQPGSTDPTLPEQLDWLNRTQGLLALRHARIVPRLPGTRALDAVPLGATGALARWRLGDGSVLTLAINLGTQPVAVPTALAGNPADLLHESRDGVAAALAAHRVPPRACIALLHAASPPDLQR

SEQ ID NO: 5837 - protein, 775 aa, Ralstonia solanacearum
MTSVHDFATATRPATPSAAAQEPAPALPPGLDRNTLDALTHGRLGDPFAVLGPHRLETAEGERPHRVVRAFHPGARRVQAIDPRGQVMAELAPVGRTGLFHGRLPDDAPDADGHPGAYRLRVVWPAGAGHEAVQEAEDPYAFGLLLGDLDLHLIAEGRHWELARCLGAQAMRQDDVAGVRFAVWAPNARRVSVVGDFNQWDGRRHPMRLRHGTGVWELFVPAGLGAGPGSRYKFELVGADGHLLVKADPVARRTEAPPATASVVADPLPFRWSDAAWMETRAARQRPDAPIAIYEVHAGSWLRDVEDGGRSLDWDALGERLIPYVAGLGFTHVELLPVAEHPFGGSWGYQPLGLFAPSARFGPPEAFARFVERCHQAALGVIVDWVPAHFPSDPHGLARFDGTALYEHADPREGFHQDWNTLIYNFGRHEVRGFLIASALEWLEHFHIDGLRVDAVASMLYRDYSRPADAWVPNRYGGRENLEAVAFLQQMNAVVHARCPGAITIAEESTAWPGVTAAVEFNGLGFDYKWNMGWMHDTLHYMQRDPIYRQHHHDGLTFGLVYAFSERFILPLSHDEVVHGKGSLLGKMPGDDWQRLANLRAYLAFMWTHPGKKLLFMGGEFGQLGEWNHDAAPEWHLLDDPRHRGVQRLVHDLNALYRSEPALHARDCAPEGFSWVIGDDRANSVFAYLRLDTAGTPMLIVANMTPVPRDGYRIGVPDVDGAVRWREMLNTDSAVYGGTNLGNGGVVDVEDVESHGWRRSVVVRLPPLAVVVLKV

SEQ ID NO: 5838 - protein, 240 aa, Triticum aestivum
  misc_feature (168)..(168): Xaa can be any naturally occurring amino acid
  misc_feature (184)..(184): Xaa can be any naturally occurring amino acid
  misc_feature (194)..(194): Xaa can be any naturally occurring amino acid
  misc_feature (204)..(204): Xaa can be any naturally occurring amino acid
HGNGFRVLFELIWRDYFRFLSAKYGNSIFHLGGPRKVASKWSQDEALFESWKDGRTGYPLIDANMKELLATGFMSNRGRQIVCSFLVRDMGIDWRMGAEWFETCLLDYDPASNYGNWTYGAAGPLTGVGNDPREDRYFSIPKQAKTYDPDGKYVAYWLPELRSLAKEXRRNFPGASYIKQVVPXLKFDGGLQKXDPQFHRQTRXPKNIYRRTKMDGRWWIKYHHPFKEARGEFKANGYRQ

SEQ ID NO: 5839 - protein, 607 aa, Bacillus cereus G9241
MCGITGWVDWKEDLSNQHVILEKMANRIQHRGPDAEGFWFSPRAAFAHRRLIVIDPEGGTQPKTFRAGDYTYALTYNGEIYNFRELREQLRKCGHAFETHSDTEVLLHAYLEWKEDCVQHLNGIFAFALWDDQKQQLFLARDHLGVKPLFYTERNDSIIFGSEIKALLAHPSVPAEIDADGINEIFGLGLFRTPGCGVFKHIQEVRAGHSITFTRDKKVVQKYWNLESKVHTDSIEDTSSHILSILQDTVKRQLIADVPLVCMLSGGLDSSGITALAGKEFAAENKTLHTYSVDFVNSAKDFELTFARTGLDAPWVKRVSEHVGTSHHDIIVNAEELANHLFVPLHAKDLPSAGEMETSLYLLFCEMKKDATVALSGESADEVFGGYPWFHQEELLYVDKFPWLTNWKNTSPLLLNEVSNQCNLENYIDTRFQEAILEVPTLEGESKKSAKQRQMFYLFLTRFLPFLLDRKDRMSMAVGFEVRVPFCDYRLVEYLWNVPFNIKSIDNIEKGILRRALKPALPDDIRNRRKSAYPTSQDPHYLQTIRHLSLDMCSNKNNPIFSLINHSTLLAIANQSNKEINNFEARSAMEYMLQVNEWLKTYHIHIA

SEQ ID NO: 5840 - protein, 550 aa, Ehrlichia chaffeensis
MANVVVTGEQLDKSIREVVRILEDAVGCTAGPKGLTVAIGKSYGAPEVTKDGYKVIKSIKPEDPLALAIANIITQSASQCNDKVGDGTTTCSILTAKVIEEVSKAKAAGADIVCIKEGVLKAKEAVLEALMSMKREVLSEEEIAQVATISANGDKNIGSKIAQCVQEVGKDGVITVEESKGFKELDVEKTDGMQFDRGYLSPYFVTNSEKMLVEFENPYILLTEKKLNIIQPILPILENVARSGRPLLIIAEDVEGEALSTLVLNKLRGGLHVAAVKAPGFGDRRKDMLGDIAILTGAKHVISDDLAIKMEDLTLAELGTAKNIRITKDTTTIIGSVDNSSANVQSRINQIKMQIEASTSDYDKEKLRERLAKLSGGVAVLKVGGSSEVEVKERKDRVEDALHATRAAVEEGVVPGGGAALLYTLSVLENLKSKNDDEQLGINIVKRALQAPIKRIIKNSGSENAPCVIAHLLKQNDKELIFNVDTMNFANAFTSGVIDPLKVVRIAFDFAVSLAAVFMTLNAIVVDVPSKDDANAGAGGMGGMGGMGGF

SEQ ID NO: 5841 - protein, 505 aa, Staphylococcus aureus subsp. aureus MRSA252
MSRQDKKLTGVFGHPVSDRENSMTAGPRGPLLMQDIYFLEQMSQFDREVIPERRMHAKGSGAFGTFTVTKDITKYTNAKIFSEIGKQTEMFARFSTVAGERGAADAERDIRGFALKFYTEEGNWDLVGNNTPVFFFRDPKLFVSLNRAVKRDPRTNMRDAQNNWDFWTGLPEALHQVTILMSDRGIPKDLRHMHGFGSHTYSMYNDSGERVWVKFHFRTQQGIENLTDEVAAEIIATDRDSSQRDLFEAIEKGDYPKWTMYIQVMTEEQAKNHKDNPFDLTKVWYHDEYPLIEVGEFELNRNPDNYFMDVEQAAFAPTNIIPGLDFSPDKMLQGRLFSYGDAQRYRLGVNHWQIPVNQPKGVGIENICPFSRDGQMRVVDNNQGGGTHYYPNNHGKFDSQPEYKKPPFPTDGYGYEYNQRQDDDNYFEQPGKLFRLQSEDAKERIFTNTANAMEGVTDDVKRRHIRHCYKADPEYGKGVAKALGIDINSIDLETENDETYENFEK

SEQ ID NO: 5842 - protein, 545 aa, Campylobacter coli RM2228
MAKEIIFSDEARNKLYEGVKKLNDAVKVTMGPRGRNVLIQKSFGAPSITKDGVSVAKEVELKDSLENMGASLVREVASKTADQAGDGTTTATVLAHAIFKEGLRNITAGANPIEVKRGMDKACEAIVAELKKLSREVKDKKEIAQVATISANSDEKIGNLIADAMEKVGKDGVITVEEAKSINDELNVVEGMQFDRGYLSPYFITNAEKMTVELSNPYILLFDKKIANLKDLLPVLEQIQKTGKPLLIIAEDIEGEALATLVVNKLRGVLNISAVKAPGFGDRRKAMLEDIAILTGGEVISEELGRTLESATIQDLGQASSVIIDKDNTTIVNGAGEKANIDARVNQIKAQIAETSSDYDREKLQERLAKLSGGVAVIKVGAATETEMKEKKDRVDDALSATKAAVEEGIVIGGGAALIKAKAKINLDLKGDEAIGAAIVERALRAPLRQIAENAGFDAGVVVNSVENAKDENTGFDAAKGEYVNMLESGIIDPVKVERVALLNAVSVASMLLTTEATISEIKEDKPAMPDMSGMGGMGGMGGMM

SEQ ID NO: 5843 - protein, 387 aa, Streptomyces coelicolor A3(2)
MHVPSTAPPPATAAPLFGPFTVGSLALENRIVMAPMTRELSPGGVPGPEVAAYYARRARNGVGLIITEGAAIGHPSSERRAAVPRIHSADALAGWTRVTQAVHAAGGRIAAQLMHVGLDPLLWGMTPAEMDAASPAGFELLSPSGVDPSQPAAATVGREMSDVDISSVIEAYARAAAEARQAGFDAIELHAAHGYLIDQFFWAVTNRRKDRYGGDLSARTRFGADVVRACRHAVGEDFPIFLRFSQWKVGHYAARLADSPDELAAVLGPLVQAGVDAFHCSTRRFWQPEFEGSDLNLAGWTKKVTGRPVIAVGSVGLKDSDFLSYLDGKGADVGDVSVVADRLAQGEFDLVAVGRALIADPAWPAKVRGGRSADLIPFDARMLTSLH

SEQ ID NO: 5844 - protein, 866 aa, Idiomarina loihiensis L2TR
MNSFWTFLQLIFVILQVTSLALYALLPAPWSDTVLVAMILFSLIIGIVIWWWSRRNALTAPFRQPFLSSDSLQLFEQVFNDLPTRVYWRDPELKLLGGNRAFANDFGIDPESLAGKTDAEIDSLASNDVLLERDRKTFSQQAPSVNAEIELKVSGKSQWVEHSSVPLYDDDHNIIGILGSYYDISGIKSVAEEMEKAKETAERANQSKGEFLANMSHEIRTPINAIVGMANLCLKTELTQKQKRYIKVIDSSSQALLGVINDILDFSKIDAGKLTVERIPFDLQDVLTSLADMFAYRAYDKDLEFIINLPANIPTRLIGDPLRLNQVLVNLISNAIKFTEDGEINVAVNLLDSSRDNVLLRISVTDTGIGMDEEQRANLFKAFTQADTSTTRKYGGTGLGLAISRRLILLMGGDIGVTSAAGQGSTFYIEVELPLQTEQDNSHHQYLLQKLKGVRILAIDDNLSTREMLYEMLRSYQVDVKVCRTAEQALQVFQLSVEDNNPYQLVLVDWRLPGMDGLEFCQKITERYAEDIRPKMTLATGYYAEELSEKAKQAGVNDIISKPFTASTLGRSLTSTLFQRELSDADDADSGDGIPESILRAPILVVEDNEINQQVAREILSSHKFKVDIVENGQLAVEAVHNKNYSLVLMDIQMPVMDGLKAAQTIRADFNYQQLPILAMTANAMSGDEERSLAAGMQGHIAKPIDEQQLIKAIIKWAVPGDYTNNQQPEVPPESKQDEVNKPPVRIPQVKGIEFETALKRLQYNVELYLKLVEQLYETYQGSATKVSDFITRGQHESARRYFHSLKGAAANLGFTQLQSKAADLEQFMAEGNIDKVADQITELEKRLRYAHQAAVDLEAIQQHQS

SEQ ID NO: 5845 - protein, 470 aa, Streptomyces avermitilis MA-4680
MPLHKGPVKSDERPMSFNPFFGEANPVSGMTEAPPKHRLADGPLPPSTAYQLVHDELMLDGNARLNLATFVTTWMEPQAGVLMAECQDKNMIDKDEYPRTAELEKRCVAMLADLWNAPDAGAAVGCSTTGSSEACMLAGLALKRRWARRNADRYPARDVRPNLVMGINVQVCWEKFCNFWEVEMRQVPLEGERYHLDPGAAAELCDENTIGVVGILGSTFDGSYEPIAELCAALDALQERTGLDIPVHVDGASGAMIAPFLDEDLVWDFRLPRVASINTSGHKYGLVSPGVGWALWRDSEALPEELVFRVNYLGGNMPTFALNFSRPGAQVVAQYYTFLRLGREGFRAVQQTTRNVARSLAERVAALGDFHLLTRGDELPVFAFTTAPEVASYDVFDVSRRMREHGWLVPAYTFPPNREDLSVLRVVCRNGFSTDLAELFVEDLSRLLPDLRRQARPQTHDKDAATGFHH

SEQ ID NO: 5846 - protein, 285 aa, Glycine max
  misc_feature (69)..(70): Xaa can be any naturally occurring amino acid
  misc_feature (161)..(161): Xaa can be any naturally occurring amino acid
MPPKPLDYGSINENVKKSQYAVRGELYLRASELQKEGKKIIFTNVGNPHALGQKPLSFRSPGLLLCAKXXFLLDDPNVGLLFPADAIARAKHYLSLTSGGLGAYSDSRGLPGVRKEVAEFILRRDGYPTDPELIYLTDGASKGVMQILNTIIRGQDDGVIXFFLVSTAVFYIQCPLKELPTTSYCQILVPVPQYPLYSATIALLGGTLVPYYLEETANWGLDVNELRQSVEQARFKGITVCVLSLQCYVSTLFLHQTHKTKHLHVWKMLNQCEGSESCHIESICC

SEQ ID NO: 5847 - protein, 676 aa, Magnetospirillum magnetotacticum MS-1
MVPQCHYEVAMPHRHLLSPITLRAIHLPNRMIMGSMHLGFEGLPDAWPRLAAFYAERARGGIGLIVTGGVAPNEQGNFGPDGTVLTSEAELPGHQLITQAVHREGGRIIMQILHCGRYSRMKDIVAPSAIRAPINSATPRELTDAEIVQTVADYANCARLALLAGYDGVEVMASEGYLINEFLAPRTNKRTDRWGGDLHGRMRFLVEIVRAVRQALGEAKMMSVRLSMVDLVEDGLSADEVVAVAQAIEIEGCDLINSGIGWHEARVPTIAHTVPQGVWSWATARVKAAVKIPVAASNRIKTPDLAESLIAEGQCDLVSMARPLLADPAFAAKVARGEASTINACIGCNQGCLDPIFSGGAATCLVNPRAGREGEFMARPPCETKRIAVVGGGPAGLACALEAAKRGHAVTLFDAAPQLGGQFILAQTVPGKEEYAATPAYYAQALTQAGVTLRLGRAAAASDLTGFERIVLATGIRPRKLDLPGADHPKVVGYEDILSGAKRAGARVAIMGAGGIGFDVALTLVGEDHEADFNAQWGIDRAFTHRGALAEPSAPPPPKRAITMLQRKPDRPGASLGKTTGWIHKAHLQRHHVDMLAGVTYRRIDDAGLHVTLNGEDRLIEADTIVVCIGQEPRRDLADELKALGRDVQLIGGARDASKLDALAAFEEGTRLGLAL

SEQ ID NO: 5848 - protein, 384 aa, Methanococcus maripaludis S2
MDEQDILNELREYRNQDLKYEEGYILGSMCTKPHPMARKISEMFFETNLGDPGLFKGTSKLEKEVVSMIGGILHNKNAFGYLISGGTEANLTAMRAFKNISKSKGKPQNIIIPETAHFSFDKAKDMMDLNVVRPPLTKYFTMDVKFIKDYIEDSKNEVSGIVGIAGCTELGSIDNICELSKIAVENDILLHVDAAFGGFVIPFLDDKYKLDGYNYDFDFSLNGVSSITIDPHKMGLAPISAGGILFRDNMFKKYLDVDAPYLTEKQQATIIGTRSGVGVASTWGIMKLLGIDGYETLVNESMEKTMYLVKKAREYGFETAIDPVMNIVALNDENKHDTCMKLRDENWYVSVCRCVDALRIVVMPHLEIEHIDGFLESLSNTKKY

SEQ ID NO: 5849 - protein, 403 aa, Nocardia farcinica IFM 10152
MTEIFHPAALGPITLRNRVIKAATFEGRTPDAIASEDLIAFHREVAAGGVGMTTVAYCAVAPEGRTERRQIWLRPEAVPSLRKLTDAVHAEGAAACAQIGHAGPVADASSTRLPALAPSPMFSPLGMRRMKVPAEHEIADLVAAHARAALLAEEAGFDAVEIHFGHNYLASSFLSPLLNRRTDGYGGTLANRARFAREIARAVRAAVGGRLAVLAKLNMEDGVPGGLTLPESLQVAAWLEQDGSLDALELTAGSSLLNPMLLFHGTPPRKSFANVLPVPARWGFRVVGKKFLREYPYQPAYLLERARQFRRELSLPLVLLGGVTDLDSMRLAMAEGFDFVAMGRALLREPDLLQRIQADAGTRSACTHCNECMPTIYSGTRCVLRLDSPGTVRHAAASQIEPA

SEQ ID NO: 5850 - protein, 220 aa, Zea mays
MAEPAAAGRKTRVGPYEVGKTIGEGSFAKVKHAHDSRTGAVRAIKVLDRNHVLRHKMVEQIKREISTLKLIKHPNVVQLHEVMASRTKIYMVLEFVDGGELFDKIVNSGRLGEDEARIYFHQLINAVDYCHSRGVYHRDLKPENLLLDSHGTLKVSDFGLSAFAPQTNEDGLLHTTCGTPNYVAPEVLADKGYDGMAADVWSCGIILFVLMAGYLPFDDA

SEQ ID NO: 5851 - protein, 730 aa, Haemophilus influenzae 86-028NP
MTTAVTQATIDGFFDASNGDPFATLGMHETEQGIEIRTLLPDANRMVVIERESGKEITELDCVDERGFFVGVIPNCRQFFAYQLQVFWGNEAQIIEDPYRFHPMIDDLEQWLLSEGSMLRPYEVLGAHFMECDGVSGVNFRLWAPNARRVSIVGDFNYWDGRRHPMRFHPKSGVWELFLPKASLGQLYKFELIDCYGNLRLKADPYAFSSQLRPDTASQISALPNVVEMTEQRRQANQANQPISIYEVHLGSWRRNLENNFWLDYDQIADELIPYVKEMGFTHIEFLPLSEFPFDGSWGYQPLGLYSPTSRFGSPEAFRRLVKRAHEAGINVILDWVPGHFPSDTHGLVAFDGTALYEHEDPREGYHQDWNTLIYNYGRNEVKNFLSSNALYWLERFGVDGIRMDAVASMIYRDYSRAEGEWIPNQYGGRENLEAIEFLKHTNWKIHSEMAGAISIAEESTSFAGVTHPSEDGGLGFNFKWNMGWMNDTLAYMKLDPIYRQYHHNKMTFGMVYQYSENFVLPLSHDEVVHGKYSLLGKMPGDTWQKFANLRAYYGYMWGYPGKKLLFMGNEFAQGREWNYEESLDWFLLDENIGGGWHKGVLKLVKDLNQIYQKNRPLFELDNSPEGFDWLVVDDAANSVFAFERRSSNGERIIVVSNFTPVPRHNYRIGVNVAGKYEEILNTDSMYYEGSNVGNFGCVASEKIESHGRENSISVSIPPLATVYLRLKAK

SEQ ID NO: 5852 - protein, 291 aa, Arabidopsis thaliana
MDGSSEKTTNKLVSILPNYRIGKTLGHGSFAKVKLALHVATGHKVAIKILNRSKIKNMGIEIKVQREIKILRFLMHPHIIRQYEVIETPNDIYVVMEYVKSGELFDYIVEKGKLQEDEARHLFQQIISGVEYCHRNMIVHRDLKPENVLLDSQCNIKIVDFGLSNVMHDGHFLKTSCGSPNYAAPEVISGKPYGPDVDIWSCGVILYALLCGTLPFDDENIPNVFEKIKRGMYTLPNHLSHFARDLIPRMLMVDPTMRISITEIRQHPWFNNHLPLYLSIPPLDTIDQAKK

SEQ ID NO: 5853 - protein, 209 aa, Bacillus cereus ATCC 14579
MKWIQMPLGPLQTNAYILMNDQKECIIFDPGHEGEKLVTYLQEKQLKPLAVLLTHAHFDHIGAVDAVRDAFHIPVYVHKEEADWLGDATVNGSQIFMMNRSITAKPADHIIDAEGTLTIGSFNFEIFETPGHSPGSISYYTKEANAVFSGDVLFQMSIGRTDLPGGSFAELIGSIEEKLFVLPDETAVLCGHGPETSIGFEKENNPFLQ

SEQ ID NO: 5854 - protein, 468 aa, Methanosarcina barkeri str. fusaro
MISKKVNLETLDESKKYRVGAYSARYIPQVKEKGIPKYEFPEEGMSPRAAYQLVHDEQSLDGNPFLNLASFVNTWMEPEADKLVMENINKNIIDIFEYPQTDKVIQSNIVNMLGRLFNGHHTKFMGTATAGSSEAIMLGLLAHKWSWKNSGRGTGKPNIIFGNDAHVCWDKFAKYFDVEARKIPIDKDERKISAAAVSEQIDENTICVGCVLGTTFTGEIDPVKDINDLLLRYKKEKGWDIPIHIDAASGGFILPFTEPDFEWDFRLESVKSINVSGHKYGLTYPGLGWLIFRDENDLPEDLIFHVNYLGEMEDSYTLNFSGGSAMVVAQYYNILRFGRAGYTRIMKNILEVSQDLAEKVDRLGRFEMLNKGERLPIIAFKQKEETDYSLQQLSYKLRERGWIIPAYCLPENAADIEIMRIVVRENFTSDMAAILVNDIENACQFFENGRKSETKKPCPPDDGMVHIC

SEQ ID NO: 5855 - protein, 253 aa, Bartonella henselae str. Houston-1
MLIEQFICREDNFGVLIHDETSGYTAAIDAPESNAIQNALKRRNWTLQTIFLTHHHHDHVEALAELKQIYKAIVIGPEAEKEKISHIDQTLKPDESFLFGTHTILALSTPGHTLGALSYYFPQENLLFAGDTLFSLGCGRLFEGTPAQMLNSLKKLRQLPDETLLYCGHEYTKSNALFALTLDPYNQKLQQRAEDVFLLRAKNAMTLPVTLGQEKKNNPFLRWDNRTLRKTLRMEKETDEEVFAEIRKRKDNF

SEQ ID NO: 5856 - protein, 1331 aa, Streptomyces coelicolor A3(2)
MTSDSAGPVDAVPGDQELRRLLAGLTAVRDGDFGTRLPDDADGLMGDIAKVFNGMVDQLSVFTSEVTRVSREVGTEGALGGQARVPGVSGTWADLTDSVNAMAGNLTSQVRDIAQVATAVARGDLSQKIDVDARGEILELKNTINTMVDQLSAFADEVTRVAREVGTDGRLGGQADVQGVRGTWRDLTDSVNFMAGNLTNQVRNVAQVATAVAKGDLSQKITVDARGEILELKNTINTMVDQLSAFADEVTRVAREVGTAGNLGGQARVRGVSGTWKDLTDNVNVMASNLTGQVRSIAQVATAVARGDLSQRITVDAEGEVAALADVINTMVDTLSAFADEVTRVAREVGTDGRLGGQANVPNVAGTWKDLTDNVNSMANNLTNQVRNIALVTTAVARGDLSKKIDVDARGEILELKTTINTMVDQLSAFADEVTRVAREVGTEGRLGGQAEVEGVSGTWKRLTENVNELAGNLTRQVRAIAEVTSAVAEGDLTRSVTVEASGEVAELGDNINAMVESLRETTRANQEQDWLKTNLARISGLMQGHRDLPVVAELIMDELVPLVSAQYGAFYLAEDGDDGPELRLVGSYGYPEDTARPNRIAFGRTLVGQAARSRRTIMVNELPPGYLTISSGLGEVVPAALVLLPIVVEGQVLGVIELASVAAFSQINRDFLEMLMETIGVNVNTIVANARTDELLAESQRLTGELQARSAELQTQQEELQHSNAELEDKASLLAAQNRDIEAKNLQIEQARQELEARAQQLSLASKYKSEFLANMSHELRTPLNSLLILAQLLAQNPSRNLTPKQVEYAGIIHSAGSDLLQLINDILDLSKVEAGKMDVSPERVTLRQLIEYVEATFRPMTSQKGLEFTVVTAPGAPADLLTDDSRLRQVLRNLLSNAVKFTERGGVELAVEPAPDDEVPGGVVRGGPVVAFRVKDTGIGIPEQNLESIFGAFQQADGTTSRKYGGTGLGLSITREIAQLLGGAVTVDSTPDRGSTFTLYLPVARPDFEDLLARAPEHLAADASSDVLDRPAPVAELTGGHRRRPRRLLVVEERPRGLLTLVAESVVADLTHGRDDAGDRPPLDVITAVGAEEAAGALAAEPCHCVVLELGMPDGEASRFLRALRGDSALASVPVLVHSGHRADAAVAEDLRSRAAGGTLEFLAGLDELRERIALHLAAEEPGDVLSLVRPEEPPRPDPRAGQGPPAGRTVLVVDDDARNLFALSGILELHGFRVLHAENGRRGIEALVDHPEVALVLMDVMMPEMDGYTATAEIRRIPRYAELPIIAVTAKAMPGDREKSLASGASDYVTKPVDTQDLIACVRRWLPA

SEQ ID NO: 5857 - protein, 651 aa, Agrobacterium tumefaciens str. C58
MVDDFHFREKIFHFDHERIPERVVHARGYGAHGYFETYDSLATHTKADLFQRAGERTPAFVRFSTVAGNKGSADLARDVRGFAVKLYTKEGNWDLVGNNIPVFFIQDAIKFPDLVHAAKQEPDRAFPQAQTAHDTFWDFISLTPESMNMVMWIMSDRTIPRSFRFMEGFGVHTFRFINAKEQSTFVKFHWKPKLGLQSVAWNEAVKINGADPDFHRRDLWTAIQSGNFPEWELQVQLFDQDFADSFDFDVLDPTKIIPEEILAPKPVGRLVLDRMPDNFFAETEQVAFMTQNVPPGIDFSNDPLLQGRNFSYLDTQLKRLGGPNFTHLPINAPKCPFAHFQQDGHMAMRNPTGRANYQPNSFGEGQRESPTRGFQHFAAEEQGVKARLRPESFADHYSQARQFYISQTPPEQRHIASALTFELSKVETVEIRERMVSHLLNIDETLATTVAQKLGLQTMPEPANTAIPTRQDLEPSPALSIVERGPKRFEGRKLGILITDGVDAKLLKGLTQAVTAEKAVFEFIAPKVGGVTASNGTLIEAHHMIDGGPSVLFDAVALLTSEAAIAELTEEATARDFVADAFQHCKFIGYDRSALPLLEIAGIADAMDEGVLPLPGEEGLAAFVAELGKLRVWAREPSLKLGKASVPVNKE

SEQ ID NO: 5858 - protein, 404 aa, Streptococcus pneumoniae R6
MKEYNKSSKLEHVAYDIRGPVLEEAMRMRANGEKILRLNTGNPAEFGFTAPDEVIHDLIMNARDSEGYSDSKGIFSARKAIMQYCQLKKFPNVDIDDIYLGNGVSELIVMSMQGLLDNGDEVLVPMPDYPLWTAAVSLAGGNAVHYICDEAVEWYPDIDDIKSKITSNTKAIVLINPNNPTGALYPKELLLEIIEIARQNDLIIFADEIYDRMVMDGHVHTPVASLAPDVFCVSMNGLSKSHRIAGFRVGWMVLSGPKTHVKGYIEGLNMLSNMRLCSNVLAQQVVQTSLGGHQSVDELLLPGGRIYEQRNFIYNAIQDIPGLSAVKPKAGLYIFPKIDRNMYRIDDDEQFVLDFLKQEKVLLVHGRGFNWQEPDHFRIVYLPRVDELAQIQEKMTRFLKQYRR

SEQ ID NO: 5859 - protein, 607 aa, Bacillus cereus ATCC 10987
MCGITGWVNWNKDLSNEHVILEKMAHSIQHRGPDAEGFWFSPRAAFAHRRLIVIDPEGGAQPKTFRAGDYTYALTYNGEIYNFRELREQLRKCGHTFETHSDTEVLLHAYLEWKEDCVQHLNGIFAFALWDDQKQQLFLARDHLGVKPLFYTERNDSIIFGSEIKALLAHPSVPTEIDADGINEIFGLGLFRTPGCGVFKHIEEVRAGHSITFTRDKKVVTKYWNLESKAHTDSTEDTASHILSILQDTVKRQLIADVPLVCMLSGGLDSSGITALAGKEFAAENKTLHTYSIDFVNSAKDFELTFARTGLDAPWVKRVSEHVGTSHHDIIVNAEELANHLFVPLRAKDLPSAGEMETSLYLLFCEMKKDATVALSGESADEVFGGYPWFHQEELLYVDKFPWLTNWKNTSPLLLHEVSNQCNLEEYIDTRFQEAILEVPTLKGESKKSAKQRQMFYLFLTRFLPFLLDRKDRMSMAVGFEVRVPLCDYRLVEYLWNVPFNIKSIDNIEKGILRRALKPALPDDVRNRRKSAYPTSQDPHYLQTIRHLSLDMCSNKNNPIFSLINHSTLLAIADQSNKDINNFEARSAMEYMLQVNEWLKTYHIHIA

SEQ ID NO: 5860 - protein, 479 aa, Bacillus licheniformis ATCC 14580
MNQKIVRLIIALSLLCGLVTGAGPIPLHDVVSKASAAEEAAAKSTARNELEKIEKAYDLISNEYVEQVDREKLLEGAIQGMLSTLNDPYSVYMDKQTAKRFSDSLDSSFEGIGAEIGMEDRKIIIVSPFKQSPAEKAGLKPNDEIISIDGDSMSGMDLNDAVLKIRGKKGSTVTLKVHRPGMKDQLTFTIKRDEIPLETVFASIKKVQDKPVGYIAISSFSEHTAKDFTAELKKLEKKGIKGLVLDVRGNPGGYLQSVEDILKHFVTKDHPYIQIAERNGNKKQYFSKLKEKKPYPVSVITDKGSASASEILAGALKEAEGYDVVGDPSFGKGTVQQAVPMGDGSNIKLTLYKWLTPKGNWIHKQGIQPTVPVTQPAYFSAGPLQLKEPLKPDMNNNEIKRAQFLLKGLGFVPGREDGYYNESTKKAVMAFQAANKLKQTGIIDQKTANTMNLRIEEKKMDEKNDLQLQAALKVLFNKK

SEQ ID NO: 5861 - protein, 362 aa, Leptospirillum ferrooxidans
MSELFSPLQLASVTFPHRIFLSPMCQYQAREGYVTPWHFVHLGARAQGGASLVMMEASSVSPEGRLSHGDVGLWEDGQGKALAPLVDLVHSLGSRIGIQLAHGGRKASCHRPWEEGGRPLSESSGAWPVVGPSPMAFSEGYPIPKEMDSPEMERVAESFVRSAIRAKASGFDVLELHLAHGYLLHEFLSPLTNMRLDQWGGSIEGRMRYPLEVVRRVRQVWPQELPLFVRISATDWVPGGWSIEDSVVLARQLKLLGVDLIDVSSGGIVPHAAIPVAPLYQVALSERIRSEAKIPTGAVGLVTAPEEAESIVRSGKGDAVLIGRAMLRNPNWPLEAALKLGGFLSPPDSYLRAWPPVGCPAG

SEQ ID NO: 5862 - protein, 223 aa, Aspergillus fumigatus
MFYSYFGPHRTTILAEHLSPGTSSTAASSLASIILPKITHDKPQKLTYTHERLFIHYIADSPSGSSDDAGRRIPFAFLLEMKRKFLSTYPPSSTDFSSLPAYGCAAFNSELRSLLQTYNTAPPSDSLASARREIDSVRDIMTENIERVLERGERIDLLVDKTDRLGGSAHDFRVRSRGLRRRMWWKNIKLMVLLAVVVVFLIYLFVGMGCGLPAWGKCVGHSA

SEQ ID NO: 5863 - protein, 339 aa, Brassica napus
MDHEADAFRDLMTITRFVLNEQSKYPESRGDFTILLSNIVLGCKFVCSAVNKAGLAKLIGLAGDTNIQGEEQKKLDVLSNDVFVKALVSSGRTSVLVSEEDEEATFVESSKCGKYCVVFDPLDGSSNIDCGVSIGTIFGIYTMEHSDEPTTKDVLKPGNEMVAAGYCMYGSSCMLVLSTGTGVHGFTLDPSLGEFILTHPDIKIPKKGNIYSVNEGNAQNWDGPTTKYVERCKYPKDGSPAKSLRYVGSMVADVHRTLLYGGIFLYPADKKSPNGKLRVLYEVFPMAFLMEQAGGQAFTGKKRALDLVPKKIHERSPIFLGSYDDVEEIKALYAEEEKN

SEQ ID NO: 5864 - protein, 206 aa, Anemia phyllitidis
VMVYKFHEDEHGEVVAEIRRSDLEPYLGLHYPATDIPQASRFLFMKNRVRMICNCAATPVRVIQDKGLRQPLSLAGSTLRAPHGCHSQYMANMGTIASLVMAVIVNDNDEEVEQQNTSPKQEKLWGLVVCHHTTPRAVPFPLRSACEFLMQVFGLQLNMEMELAAQMREKHILRTQTLLCDMLLRDAPIGIVSESPNIMDLVKGSI

SEQ ID NO: 5865 - protein, 741 aa, Streptomyces coelicolor A3(2)
MALRDTSIPEPSGPVPPAPGACATAPPLDPTDRGRLLAGAHHDPHSLLGAHPVPGGIAFRVLRPFAREVGVVVDGERHTLASEEDGLFSGVLPLAGIPSYTLVVAYEQGETQETHDPYRFLPALGELDLHLIGEGRHEQLWQALGAEPMTHEGVTGTRFTVWAPNAQGVRVATDFTHWDGTAFPMRSLGSSGVWELFLPGVGEGTRYKFEIHSRYGHRFLKADPMARAAEEPPNTASVVTASRYEWGDAQWMRTRADTPVHEAPFSVYEVHLPSWRPGLTYRELAEELPAYVKDLGFTHVELMPVAEHPYGPSWGYQVTGFYAPTARLGSPDDFRFLVDALHRAGIGVIMDWVPAHFPKDDWALGRFDGDPLYEPGDSRRAEHPDWGTYTFDFARTEVRNFLVANAVYWCEEFHIDGLRVDAVASMLYLDYSRDSGQWEPNQYGGREDLAAMAFLQEMNATVYRRCPGVVTIAEESTAWGGVTRPTDTGGLGFGLKWNMGWMHDSLEYVAHEPVHRRYHHHEMTFSMVYAYSENYVLPISHDEVVHGKQALVSKMPGDWWQRRANVRAYLGFMWAHPGKQLLFMGQEFAQGAEWSEKQGPEWWLLDEGYHSAGDHRGVQDLVRELNTRYTRTPALWQRDTDPAGFRWVSVDAAEDNVFAFLRYGTDGTPLLAVSNFSPVVRHEYGLAVGDEAVAWQEVLNTDAEEYGGGGVGNPDPVKPEDGSIRITLPPLATVWLMPYAL

SEQ ID NO: 5866 - protein, 204 aa, Anemia phyllitidis
VMAYKFHDDEHGEVVAEIRRSDLEPYMGLHYPATDIPQAARFLFMKNRVRLIYDCRLPPVKVIQDKNLVQPLSLAGSTLRAPHRCHAEYMGNMGSIASLGMAVIVNDDDSSDAGNMQQRTRLWGLVVCHHTSTRYVPFPLRSACEFLMQVFSLELNMEVELAAQRREKHILQTQTLLCDMLLRDAPIGIVSQSPNIMDLVKGSI

SEQ ID NO: 5867 - protein, 206 aa, Dryopteris filix-mas
VMAYKFHEDEHGEVLAEIRRSDLEPYLGLHYPATDIPQASRFLFMKNRVRMICDCRAIPVRVIQDKELRQPLSLAGSTLRAPHGCHGQYMANMGSIASLVMAVVVNDNDEDLSNRPHQPKMRRLWGLVVCHHTTPRAVPFALRSACEFLMQVFGLQINMELELAAQMREKHILRTQTLLCDMLLRDAPIGIVSESPNIMDFVKGSI

SEQ ID NO: 5868 - protein, 215 aa, Photorhabdus luminescens subsp. laumondii TTO1
MKYQIIPVTAFMQNCTLIWNEDSKEAAIVDPGGEAEKLIAEIERRGLKLTQILLTHGHFDHVGATAEVAKHFNAPVYGPQQEDAFWIEGLQAQSRMFGIEECPSFEPDRWLNEGDELRVGGVDLSVLHCPGHTPGHVVFVNHVDKLIYMGDVLFKGGVGRSDFPRGNHRQLINSIKDKLLPLGDDYEFIPGHGPMSTLGHERQTNPFLQDEVPSW

SEQ ID NO: 5869 - protein, 639 aa, Chrysanthemum x morifolium
MDSCDCFETQWPADELLVKYQYISDFFIAFAYFSIPLELIYFVQKSAFFPYRWVLMQFGAFIVLCGATHFINLWTFSSHSKTVAIVMTVAKLSTAFVSCVTALMLVHIIPDLLSVKTRELFLKQRAEDLDREMGLIIKQEETGRHVRMLTHEIRSTLDRHTILKTTLIELGRTLDLEECVLWMPSTKGMILEVSHSLHNLIPFRSTVPINLPIITEVFNSAEAIRIPHNCPLARIRTPVGSYIPPEVVAVRVPLLHLSNFEIDNWPDNSAKSYAVMVLILPMNGVRKWRDHEMELVTVVADQVAVALSHAAILEESMRARDQLMEQNFALNLARQEAEMAIHARNDFLAVMNHEMRTPMHAIIALSSLLLETELTPDQRAMIETILKSSNLLAALVNDVLDLSRLEDGSLELESEVFNLHGLFKEVVTLINPIASVKNTSMALNCDLDLPAFGIGDEKRLMQIILNVVGNAVKFTKGGHVSIQASILSPEYLQEWRTPEFCPTLTEGLFYLLAQVKDSGSGIKQQDIPHIFTKFSEPRSASNRSGGAGLGLAICKRFVNLMGGHIWIESGGLGKGTTVAFLVKLGLCNYPNDPTMQRLVPRTVPKARPHQGSGELIQHRQLDREGYQGAASFPLYNRSM

SEQ ID NO: 5870 - protein, 639 aa, Chrysanthemum x morifolium
MDSCDCFETQWPADELLVKYQYISDFFIAFAYFSIPLELIYFVQKSAFFPYRWVLMQFGAFIVLCGATHFINLWTFSSHSKTVAIVMTVAKLSTAFVSCVTALMLVHIIPDLLSVKTRELFLKQRAEDLDREMGLIIKQEETGRHVRMLTHEIRSTLDRHTILKTTLIELGRTLDLEECVLWMPSTKGMILEVSHSLHNLIPFRSTVPINLPIITEVFNSAEAIRIPHNCPLARIRTPVGSYIPPEVVAVRVPLLHLSNFEIDNWPDNSAKSYAVMVLILPMNGVRKWRDHEMELVTVVADQVAVALSHAAILEESMRARDQLMEQNFALNLARQEAEMAIHARNDFLAVMNHEMRTPMHAIIALSSLLLETELTPDQRAMIETILKSSNLLAALVNDVLDLSRLEDGSLELESEVFNLHGLFKEVVTLINPIASVKNTSMALNCDLDLPAFGIGDEKRLMQIILNVVGNAVKFTKGGHVSIQASILSPEYLQEWRTPEFCPTLTEGLFYLLVQVKDSGSGIKQQDIPHIFTKFSEPRSASNRSGGAGLGLAICKRFVNLMGGHIWIESGGLGKGTTVAFLVKLGLCNYPNDPTMQQLVPRTVPKARPHQGSGELIQHRQLDREGYQGAASFPLYNRSM

SEQ ID NO: 5871 - protein, 645 aa, Chlamydophila pneumoniae TW-183
MKKLVRLCVVLLSLLPNVLFSSDLLREEGIKKMMDKLIEYHVDAQEVSTDILSRSLSSYIQSFDPHKSYLSNQEVAVFLQSPETKKRLLKNYKAGNFAIYRNINQLIHESILRARQWRNEWVKNPKELVLEASSYQISKQPMQWSKSLDEVKQRQRALLLSYLSLHLAGASSSRYEGKEEQLAALCLRQIENHENVYLGINDHGVAMDRDEEAYQFHIRVVKALAHSLDAHTAYFSKDEALAMRIQLEKGMCGIGVVLKEDIDGVVVREIIPGGPAAKSGDLQLGDIIYRVDGKDIEHLSFRGVLDCLRGGHGSTVVLDIHRGESDHTITLRREKILLEDRRVDVSYEPYGDGVIGKVTLHSFYEGENQVSSEQDLRRAIQGLKEKNLLGLVLDIRENTGGFLSQAIKVSGLFMTNGVVVVSRYADGTMKCYRTVSPKKFYDGPLAILVSKSSASAAEIVAQTLQDYGVALVVGDEQTYGKGTIQHQTITGDASQDDCFKVTVGKYYSPSGKSTQLQGVKSDILIPSLYAEDRLGERFLEHPLPADCCDNVLHDPLTDLDTQTRPWFQKYYLPNLQKQETLWREMLPQLTKNSEQRLSENSNFQAFLSQIKSSEKTDLSYGSNDLQLEESINILKDMILLQQCRK

SEQ ID NO: 5872 - protein, 190 aa, Oryza sativa
  misc_feature (37)..(37): Xaa can be any naturally occurring amino acid
KNEGLVLLADEVYQENIYVDNKKFNSFKKIARSMGYXSVNLCSNITGQILASLVMNPPKAGDASYASYKAEKDGIPQSLARRAKALENAFNSLEGITCNKTEGAMYLFPQLSLPQKAIDAAKAANKAPDAFYALRLLEATGIVVVPGSGFGQVPGTWHIRCTILPQEEKIPAIISRFKAFHEGFMAAYRD

SEQ ID NO: 5873 - protein, 486 aa, Triticum aestivum
MSPASARALTVDSLNPKVLALADHLRGAVAGRAQRMQKELETNPGLYPFDEIIYCNLSNPHYLGQQPIKFFREVLALCDYPHLLNCSVTSSIFSSDAITRAREILDLIPGRAMGGYSHCQGTEGLRNAIAAGIATRDAFPCNAEDIFLTDGAAAPVHMVMHLLIRDEKDGILCPIPSHFLYTSSMALCGATLVPYYLDESGGWAVSISNLKKQLDGARSEGITVRGLVVVNPGNPTGQVLVKENQCEIVEFCRNENLVLLADEVYQENVYTDEKKFISFKKIARSMGFGEEDISLISFHSVSNGYYGECGRRGGYMEVTGFNSEVRKQVYKVASLSSCSNLAGQVLVSLVMNPPKVGDESYTSYREERDRIMLSLSRCAEAMVQAFNSLEGLTCSKAEGAMFVFPSVRLPKRAIAAAEAMNAKPDVFYALRLLENTGIVVLPGSVFGQVPGAWHFRCTILQQEEKVQLIIYRFKAFHKAFMEEFRD

SEQ ID NO: 5874 - protein, 546 aa, Burkholderia fungorum LB400
MAAKEIIFSDVARSKLVEGVNILANAVKVTLGPKGRNVVLERSFGSPVVTKDGVSVAKEIELPDRVQNIGAQLVKEVASRTSDAAGDGTTTATVLAQAIVREGQKYVAAGLNPLDLKRGIDKAVVAAIDELKKISKPTTTSKEIAQVATISANGEESIGQRIAEAIDRVGKEGVITVEDGKSLDDELDVVEGLQFDRGYLSPYFINDQDKQVAVLDNPYVLLHDKKVSNIRDLLPVLEQVAKASRPLLIIAEDVEGEALATLVVNNIRGILKTVAVKAPGFGDRRKALLEDIAILTGGQVIAEETGLTLEKATLAELGQAKRIEVGKENTTVIDGAGEHKNIEARVKQIRAQIDEASSDYDREKLQERVAKLAGGVAVIKVGGATEIEVKEKKDRVDDALHATRAAVEEGIVPGGGVALIRVRNAISGLKGANADQDAGIKIVLRALEEPLRQIVTNAGEEASVVVAKVAEGSGNFGYNAQTGEYGDLVESGVLDPTKVTRTALQNAASVAALLLTTDATVYEAPKDPAPATSAAGPGAPGAGYDF

SEQ ID NO: 5875 - protein, 470 aa, Staphylococcus aureus
MTKTLPEDFIFGGATAAYQAEGATNTDGKGRVAWDTYLEENYWYTAEPASDFYNRYPVDLELSEKFGVNGIRISIAWSRIFPNGYGEVNPKGVEYYHKLFAECHKRHVEPFVTLHHFDTPEVLHKDGDFLNRKTIDYFVDYAEYCFKEFPEVKYWTTFNEIGPIGDGQYLVGKFPPGIKYDFEKVFQSHHNMMVAHARAVKLFKDGGYKGEIGVVHALPTKYPFDPSNPEDVRAAELEDIIHNKFILDATYLGKYSRETMEGVQHILSVNGGKLNITDEDYAILDAAKDLNDFLGINYYMSDWMRGYDGESEITHNATGDKGGSKYQLKGVGQREFDVDVPRTDWDWMIYPQGLYDQIMRVVKDYPNYHKIYITENGLGYKDEFIESEKTVHDDARIDYVRQHLNVIADAIIDGANVKGYFIWSLMDVFSWSNGYEKRYGLFYVDFETQERYPKKSAYWYKELAETKEIK

SEQ ID NO: 5876 - protein, 185 aa, Xanthomonas oryzae pv. oryzae KACC10331
MLRPYSTQETAMALNDLQHVPGAIAAPAETHGFVFNHTMLRVKDAKQSLDFYTRVLGFRLLDARDFADATFSLYFLALLPEGTAIPDDDAQRRLWMAGIPGVLELTHNHGTDTQDGPVYHDGNSDPRGFGHICVSVPDIHAACARFDSLNVPYQKRLEDGRMKHLAFIKDPDGYWVEIISNTPLA

SEQ ID NO: 5877 - protein, 715 aa, Streptomyces coelicolor A3(2)
MTRARPNWKGSPVWSGHPYPLGAAYDGQGTNFALFSEVAERVDLVLVDDDGNHSTVPLPDVDGFVWHCYLPGVGPGQRYGYRVHGPWAPAVGHRCNPAKLLLDPYTRAVDGLVDNHASLFERARGKADPGDSAGHTMLGVVTDPFFDWGDDRPPRRPYSESVIYEAHVRGLSRTHPDVPEELRGTYAGLAHPAVVDHLTSLGVTAVELMPVHQFVHDGVLLDRGLSNYWGYNTIGFFAPHNGYAALGTRGQQVSEFKSMVKTLHEAGLEVILDVVYNHTAEGNERGPTLSFRGIDNASYYRLVDGDWQHYYDTTGTGNSLLMRHPYVLQLIMDSLRYWVTEMHVDGFRFDLAATLARQFHEVDRLSAFFDLIQQDPVISRVKLIAEPWDVGEGGYQVGNFPQLWSEWNGKYRDAVRDFWRAEDHSLGEFASRLTGSSDLYQHSRRRPRASVNFVTAHDGFTLRDLVSYNDKHNEANGEDNRDGESHNRSWNCGAEGGTKDPAVRELRGRQQRNFLATLLLSQGIPMICHGDELGRTQRGNNNAYCQDNEISWIDWRLDGEQRALLDFARRLIALRADHPVLRRRRFFHGETLTHADQPLPDLVWLLPDAREMTDDDWQRSDAHTVGVFLNGDAIAEPDPRGRPVVDDSFLLLLNSHWEPADFRLPDAGYGERWTALVDTADPDGVPDEAEHKAGTRLTVEQRSLVLLSRPSRTGR

SEQ ID NO: 5878 - protein, 394 aa, Zea mays
MASFVVHHHGSPLDREGKVKMSALALRSSLRPCEAAEEVGAGQAWCRGADMGVAAFVDEFSVEDLLDLEDLCEVDKDCAELGDTVPAAESVQEGDKVSSDSHGSSVLSYELMTLPVPHPMIDLPLPAHDAEELEWVSRIMDDSLAELPPPPKLPAAPLGAARRPLEGAVAGPMRSPTTTICALSTEALVPVTRAKRSKRSRGSVWSLSGGAPLSESTSSSSTATTSSCSSSASFSPLLLLPADPSLVLSSHLLDETPRPKKKSKHGKHGKSGKPKKRGRKPKHHPKPPQFSGGAAYAPAQGDRRCSHCGVQKTPQWRAGPEGAKTLCNACGVRYKSGRLLPEYRPACSPTFVSSIHSNSHRKVLEMRRKKDGDLGQLPLPVPAALLLGPAVESF

SEQ ID NO: 5879 - protein, 337 aa, Magnetospirillum magnetotacticum MS-1
MPYKRITLTHFLLQEQRRLGGSGSFTALMTDIIFACKMISHEVNRGALAGNLGVAGSENVQGEEQKKLDVLANDIFLHMNALGGSYAGMASEELEDVHAVHGAADGKYLLLFDPLDGSSNIDVNISVGSIFSILKLPEGADAGSKDAFLQPGVKQVAAGYALYGSSTMMVLTTGNGVNGFTLDNNVGMFLLTHPNMTIPADTKEFAINASRERFWEPPVKRYIDECRQGKEGPRGKDFNMRWVASMVAEVHRILCRGGVFLYPADTENMKKGGKLRLMYEANPMAFIVEQAGGAATTGRGRMMEVQPTGLHQRVPVILGSKTEVERIGAYHTEYDAK

SEQ ID NO: 5880 - protein, 73 aa, Quercus suber
SLDVWDPFEGFPPLSSHSNFPSETSSFAAAKLDWKETPNAHVFADVPGQKKEEVKVEIEDRRVLQISGERSQD

SEQ ID NO: 5881 - protein, 312 aa, Saccharomyces cerevisiae
MDSQPVDVDNIIDRLLEVRGSKPGQQVDLEENEIRYLCSKARSIFIKQPILLELEAPIKICGDIHGQYYDLLRLFEYGGFPPESNYLFLGDYVDRGKQSLETICLLLAYKIKYPENFFILRGNHECASINRIYGFYHECKRRYNIKLWKTFTDCFNCLPIAAIIDEKIFCMHGGLSPDLNSMEQIRRVMRPTDIPDVGLLCDLLWSDPDKDIVGWSENDRGVSFTFGPDVVNRFLQKQDMELICRAHQVVEDGYEFFSKRQLVTLFSAPNYCVEFDNAGAMMSVDESLLCSFQILKPAQKSLPRQAGGRKKK

SEQ ID NO: 5882 - protein, 336 aa, Streptomyces avermitilis MA-4680
MTRNRASADGVPQPLMATYYAQRASAGLIIAEAATPNAVGQTYPNITAIHDATHVAGWRGVTDAVHAAGGRMFLQLQHGGRVGHPATSGLTPVAPSPVPLPETIFTPSGHRPSVVPREMTAADIRTTVADFAAAARNAIDAGFAGVEVHSANGHLLHQFLATNTNRRTDAYGGSVAARIRFAVEVTEAVADAIGAERVGVRISPGTTVNGVEEDDTELLYPAFVEALAALGPAYLHLVHADPDQPLFRHIRENWPTTLMANPVLGPELPADGGAHAAGRLLTAGADLIALGRPFLANPDLVTRLRTGAPVNPVRDRFMMYVGGERGYTDYPTLTVA

SEQ ID NO: 5883 - protein, 955 aa, Desulfovibrio vulgaris subsp. vulgaris str. Hildenborough
MEMRTPKNPGEGLAHQSLLRLAPGGPILGPVLSAIRIPAFTLDSDGLVVFMNDPFLDLVLRPAADLLGKPLSVVVPAIHAPLVARAAADILAGTCDDLLLPVSGQGGTALPVRFRTVHAVDAEGAPVCHAFATHALPRRHDESLRYAELFHLCPVPLWQQDVTEAQQAIDTLRTSGVHDLRAYFEAHPHVLAEFARRIRIVDANETASGLFAGCREDLLDPDLFMRLGMRQFVMELLVMLASGADRLSVEAACRALDGGERALQIEARLMPGFGLTGMRVIACGTDITERNRSQAALADFRNLVEAMSDNMIDMLWAKDTECRYIFANRAIRENLLHSDDERVLGRTDLHFAERQRHLGHEHTFGELCIDSDRVVLQTRTSGRFREDGKVQGRYLMLDVQKSPLYDRQGKLLGTVGTGRDITLLKAQEDALLRSQQLLKWTVEASTDTIWQYDVVHDRFLCNNRCPGLLALSDAEDECHCRHRADPADAELLLHNLRNGQGGDKGFSMELRLRDDEGVWHWMYCRGKVVEYDEEGRPTLVVGANTDITERKRFETELRQARDDAEAANKAKSIFLANMSHEIRTPLNGVLGMLQLLEDAPLTSDQQELLHVASQSSRNLLTVINDILDFTRLGSVAPSFASDPFDAAGALYTVRDTLATGAKDKDIRIETDISPNVPPLLIGDVTRFRQILFNLVGNAVKFTQQGTVRISLHGLERHSPAGALRMLLMVEDSGIGIPQDMLGNVFEPFFQVDGSYRRRYPGTGLGLGIVRSLVHGMGGTIAIDSEEGAGTTIACTLMFGRIEKTPEGVTEGFETGAGLKVLVVEDDHISRVAASRMLERLGHYPVVASSAVEGIAMLRQQTFDCVLMDIQMPEMDGLELTEALRSGLVPGVEDIPVLALTAHVLTEERRDFMSRGISGYLAKPLEMDILAKALTQIPPGGKGHAAIIARADTSPI

SEQ ID NO: 5884 - protein, 377 aa, Vibrio sp. Ex25
MEEEGHKILKLNIGNPAPFGFDAPDEILVDVIRNLPTSQGYCDSKGIYSARKAVVQHYQRKGIRSLDVEDVYVGNGVSELIVMAMQALLNNGDEMLIPAPDYPLWTASVALSGGKPVHYLCDEGADWYPDLEDIKKKITPKTRGIVLINPNNPTGAVYSRDFLLEVIEIARQHKLIIFADEIYDKVLYDGATHTSVATLTEDVLVMTFNGLSKAYRVCGFRGGWMFLTGPKHLAQGYVNGLELLSSMRLCANVPMQHAIQTALGGYQSINELILPGGRLLEQRNRAYELINQIPGVSCVKPKGAMYLFPKIDTKMYNIKNDQQMVLDFLKQEKVLLVQGSGFNWPKPDHFRIVTLPHVEDLEIAIGRFERFLSTYSQ

SEQ ID NO: 5885 - protein, 402 aa, Bartonella sp. SV12uk
TTTATVLGQAIVQEGVKAVAAGMNPMDLKRGIDAAVEEVVASLFKKAKKIQTSAEIAQVGTISANGAAEIGKMIADAMEKVGNEGVITVEEAKTAETELEVVEGMQFDRGYLSPYFVTNAEKMVADLDDPYILIHEKKLSNLQSLLPVLEAVVQSGKPLLIIAEDVEGEALATLVVNKLRGGLKIAAVKAPGFGDRRKAMLEDIAILTSGQVISEDVGIKLENVTLDMLGRAKKVNISKENTTIIDGAGQKAEISARVNQIKAQIEETTSDYDREKLQERLAKLAGGVAVIRVGGATEVEVKEKKDRVDDALNATRAAVEEGIVAGGGTALLRAANALTVKGSNPDQEAGINIVRRALQAPARQIATNAGEEAAIIVGKVLENNADTFGYNTATGEFGDLIS

SEQ ID NO: 5886 - protein, 323 aa, Aspergillus nidulans FGSC A4
MADQDVDLDSIIDRLLEVRGSRPGKQVQLLESEIRYLCTKAREIFISQPILLELEAPIKICGDIHGQYYDLLRLFEYGGFPPEANYLFLGDYVDRGKQSLETICLLLAYKIKYPENFFVLRGNHECASINRIYGFYDECKRRYNIKLWKTFTDCFNCLPIAAIIDEKIFTMHGGLSPDLNSMEQIRRVMRPTDIPDCGLLCDLLWSDPDKDITGWSENDRGVSFTFGPDVVSRFLQKHDMDLICRAHQVVEDGYEFFSKRQLVTLFSAPNYCGEFDNAGAMMSVDESLLCSFQILKPAEKKQKYVYGAMSSGRPITPPRKQKK

SEQ ID NO: 5887 - protein, 402 aa, Bartonella sp. SV06uk
TTTATVLGQAIVQEGVKAVAAGMNPMDLKRGIDAAVDEVVANLFKKAKKIQTSAEIAQVGTISANGAAEIGKMIADAMEKVGNEGVITVEEAKTAETELEVVEGMQFDRGYLSPYFVTNAEKMVADLDDPYILIHEKKLSNLQSLLPVLEAVVQSGKPLLIIAEDVEGEALATLVVNKLRGGLKIAAVKAPGFGDRRKAMLEDIAILTSGQVISEDVGIKLENVTLDMLGRAKKVNISKENTTIIDGAGQKAEINARVNQIKAQIEETTSDYDREKLQERLAKLAGGVAVIRVGGATEVEVKEKKDRVDDALNATRAAVEEGIVAGGGTALLRAANALTVKGKNPDQEAGINIVRRALQAPARQIATNAGEEAAIIVGKVLENNADTYGYNTATGEFGDLIA

SEQ ID NO: 5888 - protein, 274 aa, Exiguobacterium sp. 255-15
MEFVTLNNGLVMPQLGYGVFKVPEQEVYEAVREALRVGYRSIDTAMIYENEAGVGRALKDSGIPREDIFLTTKVWNKDQGYERTLAAFETSLQKLGVDYVDLYLIHWPMPDEDLYMDTWRALEQLYRDGKAKAIGVSNFHIPHLTRVLEEGTVVPAVNQIELHPFLSQEAIRAFCQKNGIVVEAWSPLMKGRDALTDPVITDIAARHGKTPAQVVLRWHLQHDIIAIPKSVTPSRIQENLDIFDFVLSPDDMRQIDQLNRNERTGSNPDEMHKK

SEQ ID NO: 5889 - protein, 902 aa, Cryptococcus neoformans var. neoformans JEC21
MSNFLPIPTKAATPLPSFAKHLLDYISAHFRDTHSEAFRKDVDVLVGMRKDWVEAKLEAHPEIIRAFMRYHAQLAFLSTKFPSDINLPFAYYLPFPATFSLSPDAPISLSSLTFERACVLFNMTALYASMAAAERRAEAEGIKRALGYLTAAAGVLEYLITSVLPTLRSELSSPQAAGYDMTESFLGTLKEFVLAEAQECYWQQAVLQGTYKNGLIGKLSMKVSEYYKAALASMNGTDYPSSSYFPLNWTAHMNVKQMHFEAAAQFRLSQEDLEKSRYGEEIGRLKVAESLAKKGLDAARKGVADSVVSDLKQLHAAIKSSLERAVRDNDLVYVQPIPPANQLAPIVGVGMVKVNVPAEVAEPVAWLMGGKAGMEPLFSGLVPYGVHLALSIYDDRKDTLVRDLDGKREELDGLAASTLQSLNLPGSIQALDRPVGLPPSLLKKSEEVASSGGIERIRSLLDEVNRLAHANVQSLNEAMDILDQEATENESLIARQPELQQTRQPSHVANQPLIQMAEQYEATIKQAGGSDATVRAKWEEWARLVGILAAGEMEMEDYVPGTTSPSGSLPPSVRPLRASLEELDDRIAHRARLVREARQISAADDIRPEVLKEAAKLAHGGSGDVKTEWFEDLFEKGLEKYMGVKREMDEEVAKHDELLEQIRTQNESFLSERKDDPIIKERERRLQDMDLAYWKWREIVDNAEEGIKFYNSFAEMLHGFKAACGQFLNTRRIDVGQMTTQFQQQMNVSEPQQQPEPRYQSPSPQSFQPSFSPSPSHFQPSAPSSFSSSPVRSPAPSAPARRESPPKTLSFLPHPSSSAWQPASVDFLPPPPPPPILRSGGIQSQPKVAPPVTPSITAIRDQTQGTPRRMTRAAAAAAERDEATERNKYSSGGPRRKGGGVV

SEQ ID NO: 5890 - protein, 820 aa, Oryza sativa (japonica cultivar-group)
MLCLTSSSSSAPAPLLPSLADRPSPGIAGGGGNVRLSVVSSPRRSWPGKVKTNFSVPATARKNKTMVTVVEEVDHLPIYDLDPKLEEFKDHFNYRIKRYLDQKCLIEKHEGGLEEFSKGYLKFGINTVDGATIYREWAPAAQEAQLIGEFNNWNGAKHKMEKDKFGIWSIKISHVNGKPAIPHNSKVKFRFRHGGGAWVDRIPAWIRYATFDASKFGAPYDGVHWDPPACERYVFKHPRPPKPDAPRIYEAHVGMSGEEPEVSTYREFADNVLPRIRANNYNTVQLMAIMEHSYYASFGYHVTNFFAVSSRSGTPEDLKYLVDKAHSLGLRVLMDVVHSHASNNVTDGLNGYDVGQNTHESYFHTGDRGYHKLWDSRLFNYANWEVLRFLLSNLRYWMDEFMFDGFRFDGVTSMLYHHHGINKGFTGNYKEYFSLDTDVDAIVYMMLANHLMHKLLPEATIVAEDVSGMPVLCRPVDEGGVGFDFRLAMAIPDRWIDYLKNKEDRKWSMSEIVQTLTNRRYTEKCIAYAESHDQSIVGDKTIAFLLMDKEMYTGMSDLQPASPTINRGIALQKMIHFITMALGGDGYLNFMGNEFGHPEWIDFPREGNNWSYDKCRRQWSLVDTDHLRYKYMNAFDQAMNALEEEFSFLSSSKQIVSDMNEKDKVIVFERGDLVFVFNFHPNKTYKGYKVGCDLPGKYRVALDSDALVFGGHGRVGHDVDHFTSPEGMPGVPETNFNSRPNSFKVLSPPRTCVAYYRVDEDREELRRGGAVASGKIVTEYIDVEATSGGTISGGWKGSEKDDCGKKGMKFVFRSSDEDCK

SEQ ID NO: 5891 - protein, 108 aa, Candida glabrata CBS138
MASNDNYDPYLLSEDGGQSKAAALKSEIDDTVDIMRNNINKVAERGEMLTSIDDKADNLAMSAQGFKRGANRVRRQMWYKDLKMRMCLFLVIVILLVVIIVPIVVHFS

SEQ ID NO: 5892 - protein, 505 aa, Burkholderia vietnamiensis G4
MTRSDLPHEARPVVVWFRDDQRLADNPALTHALDTGHPVVCVYVHDAAPKHGRAMGGAQRWWLHESLSKLDDALAAHGGSLILLRGNEHEAITGFAAAIGAAMVVWNRRYAKAQTGTDASIKRDLIDRGIAVSTFNGHLLREPWTVTTREGLPFQVFSAYWRAARRDDFFPPVPLPAPSHIRFFPVPAHATPHVCTLRELELQPSAPDWAGGLRETWQCGEQAASDQLEAFLENSLSDYPTLRDFPAARATSRLSPYLRFGNISVRQVWYATLSAADAMRSARIVRGVDSKDGPLSKFLSEIGWREFSYHLLYHFAPLHQVNFRRQFDSMPWRDDAKSLRKWQTGRTGYPLVDAGMRELWHTGWMHNRVRMVAASFLSKHLLIDWRQGEAWFWDTLVDADEASNPASWQWVSGSGADAAPYFRIFNPVLQAQKFDPHGDYTRRWVPELAQLSADTVHAPWAASREQLQRASVTLGRSYPMPIVDHQCARARALESVKRLDSESHA

SEQ ID NO: 5893 - protein, 384 aa, Pyrococcus abyssi GE5
MSKFPEKGLPREEVLNLLEDKTKVDLTFSSGKILGSMCTMPHELAIEVFARYIDRNLGDPGLHPGTRKIEEEVIEMLSDLLHLEKGYGHIVSGGTEANILAVRAFRNISDAERPELILPKSAHFSFIKAGEMLGVKLVWAELKQDYAVDVKDVEAKISDNTIGIVGIAGTTGLGVVDDIPALSDLAREYGIPLHVDAAFGGFVIPFAKSLGYDLPDFDFKLKGVESITIDPHKMGMAPIPAGGIIFRRKKYLKAISVLAPYLAGGKVWQATITGTRPGASVLAVWALIKHLGFEGYREIVRKAMELSRWFAEEIKKLNNAWLVREPMLNIVSFQTKNLRKVERELKRRGWGISAHRGYIRIVFMPHVTKEMVEEFLRDLREVLK

SEQ ID NO: 5894 - protein, 492 aa, Helianthus annuus
MDPYKYRSSSAYNAPFWTTNSGAPVYNNNNSLTVGSRGPILLEDYHLVEKLANFDRERIPERVVHARGASAKGFFEVTHDITALTCADFLRAPGVQTPVIVRLSTVIHERGSPETLRDPRGFAVKFYTREGNFDLVGNNFPVFFIRDGMKFPDMVHSLKPNPKSHIQEDWRIMDFFSHHPESLHMFTFLLDDIGVPQDYRHMDGSGVNTYTLINKAGKAYYVKFHWKPTCGVKSLLEEEAIKIGGANHSHATQDLYDSIAAGNYPEWKLFIQTIDPDHEDRLDFDPLDVTKTWPEDIFPLQPVGRLVLNKNIDNFFAENEQLAFCPAIIVPGIYYSDDKLLQTRIFSYSDTQRHRLGPNYLQLPANAPKCAHHNNHYDGFMNFMHRDEEIDYFPSRYDPARHAEQYPIPPVRLSGKRDKCVIEKENNFKQPGERYRSFSPDRQERFINRVVGGLSDPRVTHEVRSIWVSYWSQADKSLGQKIASRLNVKPNY

SEQ ID NO: 5895 - protein, 147 aa, Brassica napus
MDFGRFPIISILEDMLEVPEEHSEKGRSNPWRAYVRDQKAMAATPADVIEHPDAYAFVVDMPGIKGDEIKVQVESDNLLVVSGERKRENKEKEGVKYVRMERRMGKFMRKFQLPENADLEKISASCNDGVLKVTVGKLPPPEPKKPK

SEQ ID NO: 5896 - protein, 469 aa, Mesoplasma florum L1
MEIKKLKKFDDDFLWGASISAFQAEGASTKDGKGLSIQDVKKISEKYSDFSVAADFYNNYKEDIALLKEMGLSSFRFSISWTRIIPDGDGEINKKGIIFYHNLIDELKKNGIEPIVTIYHFDLPFSLQQKGGWSNRDMIVKAFLKYSKVLFNEYAKKVKYWLTINEQNVMIMIGSKMKFLNGGDKKFNQNELYNQSHNMFIAQALVMEEMHNNFPNCLIAPALNIVSIYPNSNKPQDYLAAMNASVMRNWYYLDAIVRGEYNPIMYKYLEDNNFLPDFRKGDYEILKKAKPDFIAFNYYTSATVKSEINNFIEVEELIDQQRLFDVPGMFSYCENPNLEKTEYGWDIDSTGFRVTMREMYERYRLPLMITENGLGHSEQLNENNTVDDDYRIQYYEKHLNELRKCISEGIKIISYNAWTAIDIVSSHQGFSKRYGFIYVDRTEKDLKEMKRYPKKSFYWYKEYIKKIKY

SEQ ID NO: 5897 - protein, 492 aa, Brassica napus
MDPYKYRPSSAYNAPFYTTNGGAPVSNNISSLTIGERGPVLLEDYHLIEKVANFTRERIPERVVHARGISAKGFFEVTHDISNLTCADFLRAPGVQTPVIVRFSTVVHERASPETMRDIRGFAVKFYTREGNFDLVGNNTPVFFIRDGIQFPDVVHALKPNPKTNIQEYWRILDYMSHLPESLLTWCWMFDDVGIPQDYRHMEGFGVHTYTLVSKSGKVLFVKFHWKPTCGIKNLTDEEAKVVGGANHSHATKDLHDAIASGNYPEWKLFIQTMDPAAEDKFDFDPLDVTKIWPEDILPLQPVGRLVLNRTIDNSFNETEQLAFNPGLVVPGIYYSDDKLLQCRIFAYGDTQRHRLGPNYLQLPVNAPKCAHHNNHHEGFMNFMHRDEEINYYPSKFDPVRCAEKVPIPNKSYTGIRTKCIIKKENNFKQPGDRYRSWAPDRQDRFVKRWVEILSEPRLTHEIRSIWISYWSQADRSLGQKLASRLNVRPSI

SEQ ID NO: 5898 - protein, 579 aa, Gibberella zeae PH-1
MCGIFACHRHPDVEKFKPTALKLAKQIRHRGPDWSGSVISNHTILCHERLSIVGVESGAQPLTNADDSIILAVNGEIYNHRHIRKHLKERYHFKTTSDCEVIIPLYTEFDTDAPNHLDGMFSFVLYDKKQDRTIAARDPIGITTFYQGWSSTEPGTIYFASELKCLHSVCDKIVAFPPGHVYDSKTGETTRYFNPSWWDPKKVPSTPVDYKVLRQALEKSVRKRLMAEVPFGVLLSGGLDSSLTASIAQREVTRLRKQALEANGNVLPVEDPDTGEGLVGVDDDDHLDTLTYLPQLNSFSIGLPGSPDNKAALEVAKFLGTKHHVMTFTIEDGLNALSDVIFHLETYDVTTIRASTPMYLLSRKIKAMGIKMVLSGEGSDEIFGGYLYFHAAPDKDSFHEETVRRVKNLHLSDCLRANKSTSAWGLEARVPFLDKEFLEYSMNIDPQDKMITKEKLEKYILRKAFDTSDEPGEQPYLPDNILWRQKEQFSDGVGYGWIDALKDTAEKQVTDEMMKNPKPEWGNDIPDTKEAYWYRCMFDEHFPPHCASTVMRWTPTWSKQTDPSGRAIATHNAKYDSAA

SEQ ID NO: 5899 - protein, 465 aa, Bacillus subtilis subsp. subtilis str. 168
MAHTEQYRFPKDFWWGSSASATQMEGAADRDGKGQNIWDYWFEKEPHRFFDHVGPADTSQFYDNYKEDIRLMKELGHNSFRMSISWSRLIPNGTGEINDKAADFYNNVIDELIANGIEPFVNLFHFDMPMALQKIGGWVNRETVDAYENYARTCFRLFGGRVKKWFTHNEPIVPVEGGYLYDFHYPNKVDFKEAVQVGFHTMLSSARAIQAYREMKQDGKIGIILNLTPSYPRSSHPADVKAGEIADAFFNRSFLDPSVKGEFPKELVDILKHEGFMPDYNAEDLDIIKKNTVDLLGVNYYQPRRVKAKEHLPNPDAPFLPDRYFDPYVMPGRKMNPHRGWEIYEKGVYDILINLKENYGNIECFISENGMGVEGEERFRDEQGIIQDDYRIEFIKEHLKWIHRAIQEGSNVKGYHLWTFMDNWSWTNAYKNRYGFVSVNLEKDGERTVKKSGKWFKEVAEHSGF

SEQ ID NO: 5900 - protein, 147 aa, Geobacter metallireducens GS-15
MAIVKYTPFGDLRNLQEQMNRLLDMAWSRESGEELREGVWQPPVDIFEDENGVVIKAELPGIDQKDIEVKIEDNTLTIRGERKHDQEVKKENYHRVERYYGSFMRSFSLPTTIDRDTVKAVCDKGILTITLPRREETKPKQINVEVK

SEQ ID NO: 5901 - protein, 408 aa, Gibberella zeae PH-1
MGDIFDAGSNSKLFTPLDIANGKIHLKHRIVHAPLTRNRGTPLNPESTPENPNRVWIPNDLITEYYSQRATNGGLIISEGLPPSLEGNGMPGVPGIFLPEQVQGWKKVVDAVHAKGGYIYAQLWHSGRANIPQLTGTPILAPSATPWDDPNETFAYPPPHTSTPVKLADYPPVEMTVEKIKSTIADYVNAAKNALEAGFDGVEVHGGNGYLPEQFLSSNINKRTDHYGGSEEKRCNFVLELMDELAKAVGQDNLAIRLTPFGLFNQARGEKRVETWGHLCRELKSKFPQLSYVSFVEPRFEQIFSEAEKQQFLGSWGLPTVDLSLFRNIFAGTPFFSAGGFNDVNSWGVVESGKCDGVLYGRYFISNPDLVERLRNGWPLQPYDRSTFYGPFKDNAAGYTDYPFYNGE

SEQ ID NO: 5902 - protein, 145 aa, Bacillus anthracis str. 'Ames Ancestor'
MRNLFPEITKRQNGIFDFGPSLLEGMTDAFFKPMNMDIFKVDVHEQSDKYTVKADLPGFQKENIQVEFEQDVLTIQATNHNEVEEKNENGTYIRKERSIGSVTRRFSFKQVEEENVRANYKDGVLTIELPKLKEEKNSKTTINIE

SEQ ID NO: 5903 - protein, 447 aa, Arabidopsis thaliana
  misc_feature (344)..(344): Xaa can be any naturally occurring amino acid
  misc_feature (346)..(346): Xaa can be any naturally occurring amino acid
MDSSNVEENLNPETKSAEEQNPLAIFHSSLPIASLSLTLFPSSTQFLKLFAHHPNKVKIPTQASSLTHLSLSSVSPFPSSRISFKSTIAANPLQSPLSIVPRRPVDPSSAAALRRAAVVWFRNDLRVHDNECLNSANDECVSVLPVYCFDPRDYGKSSSGFDKTGPFRAQFLIESVSELRKNLQARGSNLVVRVGKPEAVLVELAKEIGADAVYAHREVSHDEVKAEGKIETAMKEEGVEVKYFWGSTLYHLDDLPFKIEDLPSNYGAFKDKVQKLEIRKTIAALDQLKSLPSRGDVELGDIPSLLDLGISPTPRTSQEGKPTMVGGETEALTRLKSFAADCQXRXSKGNQKGGNNSVFGANFSCKISPWLAMGSISPRSMFDELKKTISASTTSTTPRNGPGDTGLNWLMYELLWRDFFRFITKKYSSAKTQVEAGPATACTGAFA

SEQ ID NO: 5904 - protein, 548 aa, Xenorhabdus nematophila
MAAKDVKFVNDARSKMLRGVNVLADAVKVTLGPKGRNVVLDKSFGAPVITKDGVSVAREIELEDKFENMGAQMVKEVRSKANDAAGDGTTTATVLAQAIVIEGLKAVAAGMNPMDLKRGIDKAVVSAVEELKKLSVPCSDSTAIAQVGTISANSDETVGKLIAEAMDKVGKEGVITVEEGTGLEDELAVVEGMQFDRGYLSPYFINKPESGSVELENPYILLVDKKISNIRELLPVLEGVAKASKPLVIIAEDVEGEALATLVVNNMRGIVKVASVKAPGFGDRRKAMLQDIATLTNGTVISEEIGLELEKATLEDLGQAKRVVINKDTTTIIDGVGEEGAIAARVTQIRQQIEESTSDYDREKLQERVAKLAGGVAVIKVGAATEVEMKEKRARVDDALHATRAAVEEGVVAGGGVALVRVASAISGLTGENEDQNVGIRVAMRAMEAPMRQIVDNSGEEPSVVVNNVKAGENNYGYNATTEQYGDMIEMGILDPTKVTRSALQFAASIAGLMITTEAMVTDLPKDDKADLGAAGGMGGMGGMGGMM

SEQ ID NO: 5905 - protein, 590 aa, Pseudomonas syringae pv. tomato str. DC3000
MCGLAGELRFDHQPADLAAVERITHELAPRGPDAWGFHSQGPIALGHRRLKIMDLSDGSAQPMIDSNLGLSMAFNGAIYNFPELRAELESLGYQFHSGGDTEVLLKGYHAWGAEMLPKLNGMFAFAIWERDSKQLFIARDRLGVKPLYLSKTDKRLRFASSLPALLKGGDISGMLDPVALNHYLNFHAVVPAPRTLLAGVEKLPPASWMRIDASGKVEQKVWWTLPYGPHEDEKNLTLEDWRDRVLDSTREAVAIRQRAAVDVGVLLSGGVDSSMLVGLLREVGVEDLSTFSIGFQDAGGERGDEFQYSDLIAKHYGTRHHQLRIQESEIIEQLPAAFRAMSEPMVSHDCIAFYLLSREVAKHCKVVQSGQGADELFAGYHWYPQVDGASDPVAAYRYAFVDRSYAEYADTVQPKWRTANDAAGDFVRDHFAQPGASAAVDKALRLDSTVMLVDDPVKRVDNMTMAWGLEARTPFLDYRLVELSARIPGKFKLPDGGKQVLKEAARLVIPSEVIDRKKGYFPVPGLKHLQGDTLNWVRELLTDPSQDRGLFNPTMVDKLLTNPEGQLTPLRGSKLWQLAALNLWLSEQGL

SEQ ID NO: 5906 - protein, 336 aa, Pseudomonas aeruginosa UCBPP-PA14
MSRVTLSRYLIEQTRSHNTPADLRFLIEVVARACKEISHAVSKGALGGVLGSMGTENVQGEVQKKLDVMSNEILLEANEWAGNLAGMASEEMDHPYQIPGRYPKGAYLLVFDPLDGSSNIDVNVSVGTIFSVLRCPSEYLNQNDTLREEAFLQPGTTQVAAGYAIYGPQTMLMLTLGNGVKGFTLDRELGSFVLTHDNISVPESTAEFAINMSNQRHWEAPVKRYVEELLAGKEGPLGKNYNMRWIASMVADVHRILTRGGVFMYPRDAREPEKPGKLRLMYEANPMSFIIEQAGGAATNGTQRILDIKPENLHQRVAVFLGSKQEVERITGYHAE

SEQ ID NO: 5907 - protein, 176 aa, Pseudomonas aeruginosa UCBPP-PA14
MSFNTEVQPGICMEPDAITQEYVFNHTMLRVKDPKRSLDFYSRVLGMRLLRRLDFEEGRFSLYFLAMTRGEEVPDALDERQRYTFGRQSVLELTHNWGSESDDSQYHNGNQDPRGFGHICFSVPDLVAACERFETLGVNFVKPLDRGMKNVAFISDPDGYWVEIVQASLNGEMGRG

SEQ ID NO: 5908 - protein, 142 aa, Francisella tularensis subsp. tularensis SCHU S4
MSKEIRYNPFELKHSINDLFDNFFSFPKSYQEEKYLENIHLDITEDEAAYNISADLAGIEEKDIDIELDKNKLSIKAKREHLDKDKKHHIQERYYGEFQRSITLPDNIDSDKIEAKYSNGVLSLNIPKKEKDNTTKKISIKS

SEQ ID NO: 5909 - protein, 283 aa, Listeria monocytogenes str. 4b F2365
MKTVKLNNGVEVPILGFGTYQITDAAEAEQAVKDAIKTGYRHIDTAQSYMNEEAVGRGIAASGVDRKELFITTKIWVENVSYKGVMSSFDRSLKRLGLDYIDLLLIHQPFNDVYGAWIAMEELQASGKIRAIGVSNFSPDRVIDLAAFNEVTPQVNQIEVNPFQQQAANLAVLRKEGVTIEAWAPFAEGKNDIFNNPVLTKIGAKYGKSAAQVILRWLVEQDIIVLAKSVKPERMAQNLAIFDFELTEADKGEIASLDQGESQFFSHADPEMVKWMASRKLNV

SEQ ID NO: 5910 - protein, 635 aa, Solanum tuberosum
MESCDCIEALLPTGDLLVKYQYLSDFFIAVAYFSIPLELIYFVHKSACFPYRWVLMQFGAFIVLCGATHFISLWTFFMHSKTVAVVMTISKMLTAAVSCITALMLVHIIPDLLSVKTRELFLKTRAEELDKEMGLIIRQEETGRHVRMLTHEIRSTLDRHTILKTTLVELGRTLDLAECALWMPCQGGLTLQLSHNLNNLIPLGSTVPIIFLLSMRFLVALKQYRFHIPNPLARMRNTVGRYIPPEVVAVRVPLLHLSSFTNDWAELSTRSYAVMVLVLPMNGLRKWREHELELVQVVADQVAVALSHAAILEDSMRAHDQLMEQNNALDDARQEAEMAIRARNDFLAVMNHEMRTPMHAVIALCSLLLETDLTPEQRVMIETILKSSNLLATLINDVLDLSRLEDGILELENGTFNLHGILREAVNLIKPIASLKKLSITLALALDLPILAVGDAKRLIQILLNVAGNAVKFTKEGHISIEASVAKPEYARDCHPPEMFPMPSDGQFYLRVQVRDTGCGISPQDIPLVFTKFAEARPTSNRSTGGEGLGLAICRRFIQLMKGNIWIESEGSGKGTTVTFVVKLGICNHPNALPLLPMPPRGRLNKGSDDLFRYKQFRGDDGGISVNAQRYQRSL

SEQ ID NO: 5911 - protein, 124 aa, Brassica napus
  misc_feature (99)..(99): Xaa can be any naturally occurring amino acid
  misc_feature (115)..(115): Xaa can be any naturally occurring amino acid
  misc_feature (122)..(122): Xaa can be any naturally occurring amino acid
MEPQAEPKPIPLMTPYKMGASLDLAHRVVLAPLTRQRSYGNVPQPHAAVYYGQRATPGGMLITEATGVSDTAQGYTDTPGVWTAEQAEAWRPVVDAVHXKGALFFCLWHVGRVSXYGSQPGXAA

SEQ ID NO: 5912 - protein, 190 aa, Prunus armeniaca
GFFEVTQDVPQLTCADFLRAPGVQTPVIVRFSTVIHERGSPETLRDPRGSAVKFYTREGNFDLVGNNFPVFFVRDAMKFPDAIRAFKPNPKSHIQETWRILDFFSHLPESLHTFAFFYDDLGIPQDYRHMEGSSVHAYTLVSKAGKVHYVKFHWKPTCGVKCLLEDEAIKVGGANHSHATKDLYDSIAAG

SEQ ID NO: 5913 - protein, 201 aa, Aspergillus nidulans FGSC A4
MSSRKKVMLKVIILGDSGVGKTSLMNQYVNKKFSGSYKATIGADFLTKEVLVDDRLIWDTAGQERFQSLGVAFYRGADCCVLVYDVNNSKSFEALDSWRDEFLIQASPRDPESFPFVVIGNKIDMEESKRMISSKRAMTFCQSKGNIPYFETSAKEAVNVEQAFEVIARSALAQEEAEEYGGDYTDPINIHDTTERDGCAC

SEQ ID NO: 5914 - protein, 1080 aa, Desulfovibrio vulgaris subsp. vulgaris str. Hildenborough
MPHSSRSAIGLQVRVSLLVLMVTMVLLAGFAFWEHTLLREAEEMQLRQETRLLADRAARLLALPLWNLDGPSARAIIQAEMDDPRVYGIAVFEQGRQLFEGMQRDASWRVVPWVGSAPPDVVEERRDLVVEGTQVGSLSIMVSPRFLAARLAERFQQAVWRYTLLAGILAVGLMLLVRSVLIAPLGRLGGVARRVTSEENFALRAPKGADDEIGELVDSFNAMLERIEQRNRLLGEQRRRLEMEVSERTAEFVGARERAERESKAMADFLAAITHEVRTPMTGIIGLLDISLRGQLEPRLREHLEIVRSSSHALLDVINGVLDFSRIEAGKLRIERIPFALRESVEDVLDLFRAHLAERDVALVLDMASDLPCKVAGDPTRLRQVLVNIVGNAFKFTEQGEIVVRISHERQGDGSVLLRFAVRDTGVGIPAEARKRLFEMFSQADASVARRFGGSGLGLAIARELVRLMGGSIEVDSTPGRGTVFRFTVHCGFVEGPSDPLPLPQGVRVVLGESHASLQRVLSGLLRRWGAEVVAVSGAAALKDAAADADVCVLSSHLQGGLAALSRPGQPGPPVLLLVPYGEEPEPSLCAGAGVVAFVGRPVRAATLRAALDAVFAPGMPDGAQATAMKGDMRAGLHIPSSRDGSGGASSAARVVEGQAVTGPMTQPGAMPSVGASGDGHDADQSVHEGGSGLEGMRVLVAEDDDVSRLVLREMLTGFGVQVNETADGATMLAHFAAAPYDVVLIDVQMPVLDGFATLERLRALPDGDTVPVALFTAQKLSVAELAERGIRVAGVVEKPLEMETLVAFLRGLRAVKGQGRHDVAGADAAPRMAGQEHGESAVTDATLSPNAATLISGETLVLGGTADGAATRGVGVPGMAAVAEVIASGGHETETSSSTSDANASSFESGAATPSSIPGDGASSHMPDAEASSVPAGVADVSAVAATTTSRSRAPRRLAGPPLPTALEGVDIGEVLTRVGGKEWLLLKVLRSFVTAYADAADGLAAMVEAGDDEAVKLRGHTLAGAAGNISAHELRAICLALEMGGDKSTQQSLVAAFRGELDRVVTSIREMLARYEEP

SEQ ID NO: 5915 - protein, 995 aa, Gibberella zeae PH-1
MAQSPMISVPLKATNEIDWVEPLKRYIRDTYGDDPERYAEECATLNRLRQDVRGAGKDSTSGRDMLYRYYGQLELLDLRFPVDEQHIKISFTWFDAFTHKSTAQYSLAFEKASIIFNISAVLSCHAAAQDRGEESALKTAYHNFQASAGMFTYINENFLHAPSSDLSRETVKALIHVMLAQAQEVFLEKQVADKKKPALLAKLASQAGYLYSQALEGVQENVTKAIFEKVWLLMTQIKSNLLNSMAQYYQALADEEQDKHGIAVGRLQTAETQAKEAERVARSFPNSVPMSSNLSADCGGFLQELTKRHLSTVQSQLQSALKDNDYIYHKEVPAEASLEAVAKLPAAKPIPVSELYAGQDIQRITGPDLFAKIVPFAVTESASLYDEEKAKLVRAEAERVDTANGEMAASLDYLRLPGALQVLKGGFDQDILPDEDFRQWCEDVSDQENPVTLFDSLRTEKDSILSILDKSTKQLDMEEGVCEKMRSKYENEWTQQPSSRLTTTLRGDIRHYREALDEASRSDNQLAGKLRQNEMDFDEMRRAAKSGEADQLFQRAVAQARARGSNATSPAGLEPNLLDDDFDEGPSVIDQINRVEDILKKLNSIKRERNQVLKDLKEKAHNDDISQILILNKKSISNYEAQLFEQELEKFRPHQNRLLQANHKQSALMKELTSAFNRLLQDKRVQSEQSKYETIQRQRSSVINRYKRAYQEFLDLVAGLQSAKNWYAEMRETVESLEKNVDSFVNNRRSEGAQLLNQIEQERSSNKNSQAEMERERLRGLMDRMSMDPNKSSPQPQQNRPTPPSQYQQSQAPRYPQTNYQGQYQQPNSPPPQQAQQQAYQNFSPPPTTTTTQSFGPPPINTFVQPTYNPSQYGRTPGPTSPPPNQTSFNIGGYRGPASPPPNQSTFGQSQSFGGYGASSTPQTQGGYVPPGFVPPPPPPGPPPLGPQQTFHYGNQPNSAHPNSAYPQSAMPPQQQQQQQQQQQNDPWAGLNAWK

SEQ ID NO: 5916 - protein, 280 aa, Listeria monocytogenes EGD-e
MTLSFSDTYRLNNGIEMPRHGFGVYKLTDEARMRTALETAVDVGYRLFDTASFYHNEKELGDFFASSGLKRDEFFVTTKMWNTEQGYDETLRAFEKSQKKLQLDQIDLYLVHWPKQDTFFDTWRAVEKLYDEGLVRAIGVSNFEAHHLDRLRTSANVLPVVDQLETHPHFPNHLLHRYLEELHIVHQAWSPLGRGGVLQEQILIDLAEKHGKSPAQIVLRWHLQNNISIIPKSETPSRIRENAAIYDFELSEADMRQVERLNTGERVSHAPDVMYVRSEI

SEQ ID NO: 5917 - protein, 210 aa, Brownea sp. Lavin 6225
YDRVMAYKFHEDDHGEVIAEITKPDMEPYLGLHYPATDIPQAARFLFMKNKVRIIVDCRAKHVKVLQDEKLPFDLTLCGSTLRDPHSCHLQYMENMNSVASLVMAVVVNDNDEDGDSSDSVQPQKRKRLWGLVVCHNTTPRFVPFPLRYACEFLVQVFAIHVNKELELEYQIVEKNILRTQTLLCDMLMRDAPLGIVSQGPNIMDLVKCD

SEQ ID NO: 5918 - protein, 508 aa, Haemophilus influenzae R2866
MSSQCPFSHLAATNLTMGNGAPVADNQNSLTAGPRGPLLAQDLWLNEKLADFVREVIPERRMHAKGSGAFGTFTVTHDITKYTRAKIFSEVGKKTEMFARFTTVAGERGAADAERDIRGFALKFYTEEGNWDLVGNNTPVFFLRDPRKFPDLNKAVKRDPRTNMRSATNNWDFWTLLPEALHQVTVVMSDRGIPASYRHMHGFGSHTYSFWNEAGERFWVKFHFRTQQGIKNLTDAEAAEIIANDRESHQRDLYEAIERGDFPKWTLFVQIMPEADAEKVPYHPFDLTKVWPKKDYPLIEVGEFELNRNPENFFADVEQSAFAPSNLVPGIGASPDRMLQARLFNYADAQRYRLGVNYRQIPVNRPRCPVHSNQRDGQGRVDGNYGSLPHYEPNSFSQWQQQPDFAEPPLRINGDAAHWDYRNDDKDYFSQPRALFNLMNAEQKQSLFNNTAAAMGDAPDFIKYRHIRNCHWCDAAYGEGVAKALGLTVEDALKARDTDPALGQGGLL

SEQ ID NO: 5919 - protein, 480 aa, Arabidopsis thaliana
MASRTTPSRSTPSRSTPSGSSSGGRTRVGKYELGRTLGEGTFAKVKFARNVENGDNVAIKVIDKEKVLKNKMIAQIKREISTMKLIKHPNVIRMFEVMASKTKIYFVLEFVTGGELFDKISSNGRLKEDEARKYFQQLINAVDYCHSRGVYHRDLKPENLLLDANGALKVSDFGLSALPQQEDGLLHTTCGTPNYVAPEVINNKGYDGAKADLWSCGVILFVLMAGYLPFEDSNLTSLYKKIFKAEFTCPPWFSASAKKLIKRILDPNPATRITFAEVIENEWFKKGYKAPKFENADVSLDDVDAIFDDSGESKNLVVERREEGLKTPVTMNAFELISTSQGLNLGSLFEKQMGLVKRKTRFTSKSSANEIVTKIEAAAAPMGFDVKTNNYKMKLTGEKSGRKGQLAVATEVFQVAPSLYMVEMRKSGGDTLEFHKFYKNLTTGLKDIVWKTIDEEKEEGTDGGGTNGAMANRTIAKQST

SEQ ID NO: 5920 - protein, 450 aa, Zea mays
MDIKDMKTRGKTLTERYEMGKLLGKGAFGKVHYARDLESNQGVAIKIMDKDRVLKAGLSEQVKREITTMRLVEHKNIVRLHEVMATRNKIYIIMEYAKGGELLDKVKRSGRLTEADTHRYFQQLIGALDHCHSRGVYHRDLKPENLLLDENGDLKVSDFGLSAFSESRRTDGLLHTVCGTPVYIAPEVIKKTGYDGAKSDIWSCGVVLFVLAAGYLPFQGPNLMEIYRKIHDRDFRCPSWFSHKLKRLLYKILNPNPSMRPSIQEIKESTWFRKGPREISAVNEKVLSENATTTNAAPVLASRRKEIAHEDMKSLVATNLNAFEIIALSAGLDLSGLFIKECRKETRFTSDKPALAIIAKLEDVAKALNLRIRKKDNNTVSIQGRKEGGNGVLKFDTQIFEITPSCHLVQIKQTSGDLLEYEKLLEEGIRPGLKDVVSAWHGDDLQQKQK

SEQ ID NO: 5921 - protein, 368 aa, Bdellovibrio bacteriovorus HD100
MTNKRIEWPVALFLVLNPLITLILAPIYFYNFGFQWDILLFALVFAAATNLGITAGYHRLFSHKSYDAHPIVKALFLLIGASAFQGSALKWSSDHRRHHTHIDGEKDPYNINEGFWYAHMGWMFFKDSVDQKIHAPDLEKDWMVKFQNDHYVPIAILTGFIFPMLVGWAMGSWLGGLVIAGGLRIALTQQSTFFINSLCHTLGKQTYSKEISARDSWFVAILTHGEGYHNFHHKFQIDYRNGIKWYHWDPTKWVIRTLSAMGLATKLRQISNVEILKARLQAEAAELTKHGFAEEKLAQMKEKILEAQNRMKKLREDYEQFKVDAVRKREELKEAYDHKLEELRRDMEIARLEFQMGMKQWRVYLRSV

SEQ ID NO: 5922 - protein, 150 aa, Betula pendula
GVKCLLDDEAIRVGGANHSHATKDLYDSIGAGNYPEWKLYIQIIDPDHEDKFDFDPLDVTKIWPEDILPLQPVGRLVLNKNIDNFFAENEQLAFCPSIVVPGVYYSDDKLLQTRIFSYSDTQRHRLGPNYLQLPANAPKCAHHNNHHEGF

SEQ ID NO: 5923 - protein, 565 aa, Sorghum bicolor
MALLLASAINHTAHPAGLRSHPNNESFSRHHLCSSPQNISKRRSNLSFRPRAQTISSESAGIHRLSPWEIPRRDWFPPSFLFGAATSAYQIEGAWNEDGKGPSTWDHFCHNFPEWIVDRSNGDVAADSYHMYAEDVRLLKEMGMDAYRFSISWPRILPKGTLAGGINEKRVEYYNKLIDLLLENGIEPYITIFHWDTPQALVDAYGGFLDERIIKDYTDFAKVCFEKFGKKVKNWLTFNEPETFCSVSYGTGVLAPGRCSPGVSCAVPTGNSLSEPYIVAHNLLRAHAETVDIYNKYHKGADGRIGLALNVFGRVPYTNTFLDQQAQERSMDKCLGWFLEPVVRGDYPFSMRVSARDRVPYFKEKEQEKLVGSYDMIGINYYTSTFSKHIDLSPNNSPVLNTDDAYASQETKGPDGNAIGPPTGNAWINMYPKGLHDILMTMKNKYGNPPMYITENGMGDIDKGDLPKPVALEDHTRLDYIQRHLSVLKQSIDLGADVRGYFAWSLLDNFEWSSGYTERFGIVYVDRENGCERTMKRSARWLQEFNGAAKKVENNKILTPAGQLN

SEQ ID NO: 5924 - protein, 734 aa, Agrobacterium tumefaciens
MKKPLNSAEEKKTGDITKAEIEAIKSGLHSNPFQIIPLHETPEGFSARCFIPGAEEVSVLTLDGNFVGELKQIDPDGFFEGRIDLSKRQPVRYRACRDDAEWAVTDPYSFGPVLGPMDDYFVREGSICGYSTGWARIPLKLEGVEGFHFAVWAPNGRRVSVVGDFNNWDGRRHVMRFRKDTGIWEIFAPDVYACAYKFEILGANGELLPLKADPYARRGELRPKNASVTAPELTQKWEDQAHREHWAQVDQRRQPISIYEVHAGSWQRSEDGTFLSWDELEAQLIPYCTDMGFTHIEFLPITEHPYDPSWGYQTTGLYAPTARFGDPEGFARFVNGAHKVGIGVLLDWVPAHFPTDEHGLRWFDGTALYEHADPRQGFHPDWNTAIYNFGRIEVMSYLINNALYWAEKFHLDGLRVDAVASMLYLDYSRKEGEWIPNEYGGRENLESVRFLQKMNSLVYGTHPGVMTIAEESTSWPKVSQPVHEGGLGFGFKWNMGFMHDTLSYFSREPVHRKFHHQELTFGLLYAFTENFVLPLSHDEVVHGKGSLIAKMSGDDWQKFANLRSYYGFMWGYPGKKLLFMGQEFAQWSEWSEKGSLDWNLRQYPMHEGMRRLVRDLNLTYRSKAALHARDCEPDGFRWLVVDDHENSVFAWLRTAPGEKPVAVICNLTPVYRENYYVPLGVAGRWREILNTDAEIYGGSGKGNGGRVQAVDAGGEIGAMLVLPPLATIMLEPEN

SEQ ID NO: 5925 - protein, 738 aa, Zea mays
MVPEGENDGLASRADSAQFQSDELEVPDISEETTCGAGVADAQALNRVRVVPPPSDGQKIFQIDPMLQGYKYHLEYRYSLYRRIRSDIDEHEGGLEAFSRSYEKFGFNRSAEGITYREWAPGAFSAALVGDFNNWDPNADRMSKNEFGVWEIFLPNNADGTSPIPHGSRVKVRMDTPSGIKDSIPAWIKYSVQAPGEIPYDGIYYDPPEEVKYVFRHAQPKRPKSLRIYETHVGMSSPEPKINTYVNFRDEVLPRIKKLGYNAVQIMAIQEHSYYGSFGYHVTNFFAPSSRFGTPEELKSLIDRAHELGLLVLMDVVHSHASSNTLDGLNGFDGTDTHYFHSGPRGHHWMWDSRLFNYGNWEVLRFLLSNARWWLEEYKFDGFRFDGVTSMMYTHHGLQVTFTGNFNEYFGFATDVDAVVYLMLVNDLIHGLYPEAVTIGEDVSGMPTFALPVHDGGVGFDYRMHMAVADKWIDLLKQSDETWKMGDIVHTLTNRRWLEKCVTYAESHDQALVGDKTIAFWLMDKDMYDFMALDRPSTPTIDRGIALHKMIRLITMGLGGEGYLNFMGNEFGHPEWIDFPRGPQRLPSGKFIPGNNNSYDKCRRRFDLGDADYLRYHGMQEFDQAMQHLEQKYEFMTSDHQYISRKHEEDKVIVFEKGDLVFVFNFHCNNSYFDYRIGCRKPGVYKVVLDSDAGLFGGFSRIHHAAEHFTADCSHDNRPYSFSVYTPSRTCVVYAPVE

SEQ ID NO: 5926 - protein, 470 aa, Streptococcus pneumoniae TIGR4
MENLQVKALPKEFLLGTATAAYQVEGATRVDGKGINMWDVYLQENSPFLPDPASDFYYRYEEDIALAAEHGLQALRLSISWVRIFPDIDGDANVLAVHYYHRVFQSCLKHNVIPFVSLHHFDSPQKMLETGDWLNRENIDRFIRYARFCFQEFTEVKHWFTINELMSLAAGQYIGGQFPPNHHFQLSEAIQANHNMLLAHALAVLEFHQLGIEGKVGCIHALKPGYPIDGQKENILAAKRYDVYNNKFLLDGTFLGYYSEDTLFHLNQILEANNSSFIIEDGDLEIMKRAAPLNTMFGMNYYRSEFIREYKGENRQEFNSTGIKGQSSFKLNALGEFVKKPGIPTTDWDWNIYPQGLFDMLLRIKEEYPQHPVIYLTENGTALKEVKPEGENDIIDDSKRIRYIEQHLHKVLEARDRGVNIQGYFIWSLQDQFSWANGYNKRYGLFFVDYETQKRYIKKSALWVKGLKRN

SEQ ID NO: 5927 - protein, 271 aa, Oryza sativa
MEAATPTRPPHAAPSSSPSPSPASLRQWRPAAQRNLRNQWSRLLAAKARYMPGMDLGVLKDMPGIREKASGKLARREEQCQSMLLSAYREMVLATAELVRASHSMRCFSKVAANSPLIRFTERQDDMNDSGDGGGSPVFKWFSVLEFENLAQELVDMFISELQLKRLLVLELLSVTFKEGVQHDASLEWSNELFDGEFNEFQSIGLLSGDSYALPKNWSAGVSKAWQPDQTPSHEVLQVYLTSWLANVNIKTSRIDEIFELVGEEMQIKLS

SEQ ID NO: 5928 - protein, 186 aa, Triticum aestivum
IRGVTFSTNVSPQIENRILYAARGLFNKFIPDVHIFTDHRAGLSGGLSAGYGVSVVAETTTGCLISADATVSYPNVDEMSEQSKKPELMSPEDLGEQVASMLLHAAAQGGVVDSTHQGLLFMLCALCPPDVSKVRVGQLTPHAIESLRNIKEFLDVKFIIKPDPNSNTVSLKCVGAGVKNLARKIS

SEQ ID NO: 5929 - protein, 948 aa, Colwellia psychrerythraea 34H
MHKISLKDWVIILTIIPTTLIGFGLASYFSYSRSVELNDFLEQRAKSIIEPIAIASKDPLLSKNRDKLRQLIGFTHRNQSSIVKSIVIFTEDNQVFVTSAYHGDTNLMRLKAGVELPHHTNTETLSDYIIFRTPIIDENYNNQSNANITAMASSEYNYATNNSKPVIIGYIAMQIDKSHLNFQQQSQFIVAFAFALLGSLLSAIFAIRLIKKVTKPINSMVQAIERIREGKLESRVSGQLIGELNFLKNGINAMAQSLDGYQNEMQASIDQATIDLRESLEQFEIQNVELSISKRKAQEANRVKSEFLANMSHELRTPLNGVIGFTRQVLKTPLTENQRDYLQTIDRSANNLLTIINDILDFSKLDAGKMVTENIPFSLRESIDETLTLLAPSAHKKNIELSINLPQELPDSLVGDTMRIKQIITNLVSNAIKFTPQGSVAVDITSEEISQNNIKLKVIVTDTGIGMTTNQQRTIFDAFTQADQSITRLYGGTGLGLVICQRLAQEMNGDIGFSSEKNHGSSFWFTFQCEINAMPLMLELDNQHLANKTVLYFEENNHSREATKNLLKHWKMRVTSVINRHELSQVLSHSSQTQRGFDYALIGHNQTATALSELKKTIAQVQPISSNIHLALNNTSPSLQEALIASGAISCMSKPLSPTTLSRVLQPVMETKAEKLTLNAAMDKVLPIKVLAVDDNEANLKLIKALLLEQVAEVVEADNGMSAVELCKVENFSLIFMDIQMPIMDGISALKEIKQLTNNNNTPIIAVTAHALSGEREKMHQQGFNAYMTKPIDETMLRHIIYEYCDFDHLVNSTVPVISTDVINQVESASKVIDWPLALKRSANKADLAKEMLLGLVESLPETQLSIREAIDVQDIAQIKRLVHKLNGACCYTGTPNLAKITIQLETQLKMGLSTEELEPEFLEFFEHIEQVLFAVPEALKEMSENSH

SEQ ID NO: 5930 - protein, 442 aa, Rickettsia typhi str. Wilmington
MLLRFIIALFFSINCVVEGKETENKISNQEAYKQFQDVFERIEKDYVQVPDRQKMIDEAINGMLNSLDPHSNYYTDEDLEDIFTFTKGEFGGIGVEIMYDSGAIKIISSIDDLPAFKAGLKGGDYIVGVNDELVSTLGPNKAIKEMRGTPGTKVRLLIIKEEEAKPQELELTREIVKIKPIKAHLEKNNIAYIRITTFNESTISELKAAVKKLKTESKDNLKGIILDLRNNAGGILDQAIAVSDYFIDSGVIVTTKGRTTSSNSETKANEFSLKAPRVPMIVLINGNSASASEIVAGALQDHKRAIILGTKSFGKGSVQALTQINSRAAVKLTISKYYTPSGRSIQAEGIEPDILIEPAKVEYPEVKKIDKRFSESSLKNYLKNDNEKNKDSKKETKAKNNKQEESELSELYKKDYQFARAYDVITGLIINMNLETQENAKQ

SEQ ID NO: 5931 - protein, 1035 aa, Desulfovibrio vulgaris subsp. vulgaris str. Hildenborough
MYEGWEASRLPSQGESLNMPGMTYDQRTESTGPQVKDEAAGSAEVQALRERIARLEDENRLLRLCARFEGPAPGEALGSLLPEIIAPASDAPLVYAYVSDMQTHELLFVNRSLTMAVGAWQGRKCYELLQGRDTPCPFCTSGRLQRNPERPVVWEWRNPRLGRWFRCIDRCIHWPDGRPVRYELAVDITDMREAQEDLLRFRAALDASAEAIFLVDLEEGRFLDVNSGACTMLGYDRDTLLGLGLCGIRRSMAADGCRQILDSIAAGAVLENVETVYLHRDGTFVPVEVGARLVDRVGGPRLAIMVARDVSEKRKARRAMEVRYLYEHVLSSCARELLSRSCSESTLVGVLGALRQGAGACRAYIFENYEDAEGRLCCSQRYESSAPGVRPELDNPALQNIIYASEAPNWLHELRKGRAVVGPVADQPLPERDVLQAQGIRSLLVLPIFARGVWCGFVGFDDTRTERTWQGGDILFLQTASEILGAALERHRAEAELAASHQRAEEASRAKSVFLANMSHEIRTPLNAIIGLTELTLQEPISQGVGENLRGVLHSAEALLAVVNDLLDLSRVESGRLHLESVEFSPSRLARGVVRLMTHVADRKGLDFELYIARDVPPTVTGDPARLRQVLLNLVGNALKFTDEGGVSLTVTPCICSTDTGGGILKGGNGGVRGLRFTVTDTGIGIPPDRQACIFESFVQADESTARRFGGTGLGLAISRRLVEMMGGRLELRSEPGKGSEFWCDVPFASEGAARDGICEVACVATPDAPSGTGRRPEGRGAGDRRLEAAPLRILVVESDPLCRRAMVKSLGRRGHAVTALSALSEAAEVLVAERHDAVVVEATPGAWAFCESLRQGGYGANRAALPLVFICDGDTFLPESVEPLAAPHALLSRPVKGRALCEAVEHLAGADAGQPASERVALPEDVPLLQPGALLLTAPDAQMRFVRQVPSLRESLWSAMDRGSRVELASLAHLLRHEAEGIGALRLQVLAERLEDRVRIGATEDARPVFMLLADALNQLEHDLRKLVPALSED

SEQ ID NO: 5932 - protein, 641 aa, Listeria innocua Clip11262
MKFNSMFSPIDIGPMRVPNRFVVSPMCNNYANTDGTLTDTSLAYYKERALGGFGLITFEATVVDVRAKGGANKACLYSDHQIASFKRVIDACHDAGAKISVQLQHAGPEGNSKVSGYPLKAASAIASAEGRNTPEAISREELYELIELYGEAALRAKKAGADAVEVHCAHGYLVSSFLSGRTNKRVDEFGGCFENRMRLPRLIIESIRKRVGHSIAILCRINSTDGVDGGLSVQDSATVAAYLEDCGLDGLHVSRSVHIRDEYMWAPTVLHAGFSSDLVTQIKRAVSIPVITVGRFTEPHYAELMVREGRADLVAFGRQSLADPETPNKAAAGKLDELLPCIACLQGCVANMYAGKPITCLVNPLLGRESEAYLPKTPSKKVVVIGGGVGGLYAGWMAGSRGHDVTVYEASDIIGGQMRLAAYPPGKGDLTNMVRSYIKKCEQFDVEIKTNTPVTPELIQDIAPDAVIIATGATPLVLPIPGIEDSGLIHAVDLLDGKESCGKKVLVVGGGMVGSETAAFLGEAGHDVTVVELRDEVGADVISEHRKFLMRDFDEYKIKSITNAKVTSFLPDGVTYSLADEKEYRIDGFDSVVLAMGSRAYNPLEEAIKKIVPETYVIGDAVRARRALDATKEALDAVLQL

SEQ ID NO: 5933 - protein, 239 aa, Triticum aestivum
MAVEAVLEAATMIPSPPSKEMEASSSTSEEASALLGQAEGWSKRKRSRRQRALDPSEEEYLALCLLMLAHGHRDSAPAAAPEQQHGCSVCGKVFASYQALGGHKASHRKPTAAPAGAEDQKPLAAVAAASSSGSGEAAVSAGGGKVHECNVCRKTFPTGQALGGHKRCHYDGTIGSAAAGPTQKLAAKAAAASATAASQGFDLNLPALPDIPERCAVTEDGEEVLSPASFKKPRLMLAA

SEQ ID NO: 5934 - protein, 486 aa, Lactobacillus plantarum
MYKPTYPKTFPKDFLWGGATAANQVEGAWNEAGKGLTTAEVVKKTTDRKHMSMDDVTISSIQTALDDQTDTMYPKRRGVDFYHHYKEDIKLFAEMGFKVYRFSIAWSRLFPKGDELKPNSDGLAFYDRVIDELRRYHIQPLVTLSHYEMPIGLTLKQNGWASRATIADFNRFTEVVFKHFKGRVPYYLTFNEINTGTWGFHATGAVDTENSAHDQMQLRYQALHHQFIASALATKQLHAIDPDAKIGSMLARMQTYPATPNPADVQAAQVEDDKNLFFTDVQARGEYPEFMNRFFAENDIQLQMAPDDQTILAKYPVDFISFSYYMTTVTQADAPEQVNGNMATGGRNPYLEESDWGWQIDPVGLRVTLNEMWDRYRKPLFVVENGLGALDQLTTDQQVHDTYRIDYLRKHIAQMKAAVQDGVQLMGYTMWGPIDLISFSTSEMSKRYGFIYVDQDDAGKGSLKRYKKDSFYWYQKVIKSNGEDLA

SEQ ID NO: 5935 - protein, 508 aa, Haemophilus influenzae 86-028NP
MSSQCPFSHLAATNLTMGNGAPVADNQNSLTAGPRGPLLAQDLWLNEKLADFVREVIPERRMHAKGSGAFGTFTVTHDITKYTRAKIFSEVGKKTEMFARFTTVAGERGAADAERDIRGFALKFYTEEGNWDLVGNNTPVFFLRDPRKFPDLNKAVKRDPRTNMRSATNNWDFWTLLPEALHQVTVVMSDRGIPASYRHMHGFGSHTYSFWNEAGERFWVKFHFHTQQGIKNLTDAEAAAVIASDRESHQRDLYEAIERGDFPKWTLFVQIMPEADAEKVPYHPFDLTKVWPKKDYPLIEVGEFELNRNPENFFADVEQSAFAPSNLVPGIGASPDRMLQARLFNYADAQRYRLGVNYRQIPVNRPRCPVHSNQRDGQGRVDGNYGSLPHYEPNSFSQWQQQPDFAEPPLRINGDAAHWDYRNDDNDYFSQPRALFNLMNADQKQSLFNNTAAAMGDAPDFIKYRHIRNCHWCDAAYGEGVAKALGLTVEDALKARDTDPALGQGGLL

SEQ ID NO: 5936 - protein, 176 aa, Callerya atropurpurea
YDRVMAYKFHEDDQGEVIAEVTKPGLEPYLGLHYPATDIPQATRFLFMRNKVRMIVDCSAKHVKVHQDKNIPFEGTLCGSTLRAPHSCHLQYMENMNASASLVMAVVVNDDEEDEDSAGDVEPQKRKRLWGLVVCHHITPRFVPFPLRYACEFLAQVFAIHVNKEIELEYQIIEKE

SEQ ID NO: 5937 - protein, 565 aa, Sorghum bicolor
MALLLASAINHTAHPAGLRSHPNNESFSRHHLCSSPQNISKRRSNLSFRPRAQTISSESAGIHRLSPWEIPRRDWFPPSFLFGAATSAYQIEGAWNEDGKGPSTWDHFCHNFPEWIVDRSNGDVAADSYHMYAEDVRLLKEMGMDAYRFSISWPRILPKGTLAGGINEKRVEYYNKLIDLLLENGIEPYITIFHWDTPQALVDAYGGFLDERIIKDYTDFAKVCFEKFGKTVKNWLTFNEPETFCSVSYGTGVLAPGRCSPGVSCAVPTGNSLSEPYIVAHNLLRAHAETVDIYNKYHKGADGRIGLALNVFGRVPYTNTFLDQQAQERSMDKCLGWFLEPVVRGDYPFSMRVSARDRVPYFKEKEQEKLVGSYDMIGINYYTSTFSKHIDLSPNNSPVLNTDDAYASQETKGPDGNAIGPPTGNAWINMYPKGLHDILMTMKNKYGNPPMYITENGMGDIDKGDLPKPVALEDHTRLDYIQRHLSVLKQSIDLGADVRGYFAWSLLDNFEWSSGYTERFGIVYVDRENGCERTMKRSARWLQEFNGAAKKVENNKILTPAGQLN

SEQ ID NO: 5938 - protein, 565 aa, Sorghum bicolor
MALLLASAINHTAHPAGLRSHPNNESFSRHHLCSSPQNISKRRSNLSFRPRAQTISSESAGIHRLSPWEIPRRDWFPPSFLFGAATSAYQIEGAWNEDGKGPSTWDHFCHNFPEWIVDRSNGDVAADSYHMYAEDVRLLKEMGMDAYRFSISWPRILPKGTLAGGINEKGVEYYNKLIDLLLENGIEPYITIFHWDTPQALVEAYGGFLDERIIKDYTDFAKVCFEKFGKTVKNWLTFNDPETFCSVSYGTGVLAPGRCSPGVSCAVPTGNSLSEPYIVAHNLLRAHAETVDIYNKYHKGADGRIGLALNVFGRVPYTNTFLDQQAQERSMDKCLGWFLEPVVRGDYPFSMRVSARDRVPYFKEKEQEKLVGSYDMIGINYYTSTFSKHIDLSPNNSPVLNTDDAYASQETKGPDGNAIGPPTGNAWINMYPKGLHDILMTMKNKYGNPPMYITENGMGDIDKGDLPKPVALEDHTRLDYIQRHLSVLKQSIDLGADVRGYFAWSLLDNFEWSSGYTERFGIVYVDRENGCERTMKRSARWLQEFNGAAKKVENNKILTPAGQLN

SEQ ID NO: 5939 - protein, 477 aa, Listeria monocytogenes EGD-e
MTESKFPKDFLWGGAVAANQCEGAYLEDGKGLSLVDILPTVEDGRWEALFNPSKALATDYGFYPSHESIDFYHRYKEDIKLMAEMGFKCFRMSISWPRIFPNGDETTPNEKGLAFYDAVFDECHKYGIEPVVTINHFDTPLEVFKKYGGWKNRKCIDFYLNFCEAIFTRYKDKVKYWMTFNEINMILHLPYIGGGLDVTKEDNPEEVKYQAAHHQLVASALATKLGHEINPENQIGCMLAAGNTYPMTCNPKDVWKSIEADREGYFFIDVQARGYYPSYTKRFFKEHNINIKMEDGDLDALRDHTVDYVAFSYYSSRLTSADPEKNKETEGNVFATLKNPYLKASEWGWQIDPLGLRITMNTIYDRYQKPLFIVENGLGAVDTVEEDGSITDDYRIDYMREHVREMGEAIEDGVELLGYTPWGCIDLVSAGSGEMKKRYGFIYVDRDNKGNGTLNRSKKKSFDWYKKVIETNGKDID

SEQ ID NO: 5940 - protein, 668 aa, Zea mays
MTASQSSMSGGGEPGVRTVVWFRRDLRVEDNPALAAAARTAGEVVPAYVWSPEEDGPYYPGRVSRWWLSQSLKHLDASLRRLGACRLVTRRSSDAVVALIDLVRSTGATHLFFNRLYDPLSLVRDHRVKEQLSAEGITVQSFNADLLYEPWEVLDDDGFPFTMFAPFWNRCLCMPDPAAPLLPPKRINSGDLSRCPWDELIFEDESEKGSNALLARAWSPGWQNADKALTAFLDGPLVDYSANHKKADSASTSLLSPYLHFGELSVRKVFHQVRMKQLMWSNDGDRAGEESCTLFLRAIGPAGVLEVWRQGRTGYPLVDAGMRELWATGWVHDRIRVVVSSFFVKVLQLPWRWGMKYFWDTLLDADLESDALGWQYISGSLPDGRELDRIDNPQFEGYKFDPHGEYVRRWLPELARLPTEWIHHPWDAPESVLQAAGVELGSNYPRPIVELDAANSRLQGALSEMWELEAASCAAIENGMEEGLGDSTDEPPIDFPQELRMEVDRQPAQPAIIHTPVVAGWRREDQRVPSMTSSLIRAETELTADFGNTSEDSRPEVPSNIHLQARAEREETVDGATGNTVRVNGNQQQQNLQNNMHRVLGIAPSISEASSSWTGREGGLVPVWSPPAASVHSDPYTADEADISSRSYLDRHQQSNTMMNWSQLSQSL

SEQ ID NO: 5941 - protein, 512 aa, Zea mays
SARVGSQNGVQMLSPSEIPQRDWFPSDFTFGAATSAYQIEGAWNEDGKGESNWDHFCHNHPERILDGSNSDIGANSYHMYKTDVRLLKEMGMDAYRFSISWPRILPKGTKEGGINPDGIKYYRNLINLLLENGIEPYVTIFHWDVPQALEEKYGGFLDKSHKSIVEDYTYFAKVCFDNFGDKVKNWLTFNDPQTFTSFSYGTGVFAPGRCSPGLDCAYPTGNSLVEPYTAGHNILLAHAEAVDLYNKHYKRDDTRIGLAFDVMGRVPYGTSFLDKQAEERSWDINLGWFLEPVVRGDYPFSMRSLARERLPFFKDEQKEKLAGSYNMLGLNYYTSRFSKNIDISPNYSPVLNTDDAYASQEVNGPDGKPIGPPMGNPWIYMYPEGLKDLLMIMKNKYGNPPIYITENGIGDVDTKETPLPMEAALNDYKRLDYIQRHIATLKESIDLGSNVQGYFAWSLLDNFEWFAGFTERYGIVYVDRNNNCTRYMKESAKWLKEFNTAKKPSKKILTPA

SEQ ID NO: 5942 - protein, 664 aa, Clostridium perfringens str. 13
MGGKEMRNCKELKHEKNGNVTEKVGKNKGKSKKVSKDESLLSFDLFLEGKEHSAYKFMGAHFITENRKRGVRFTTWAPRASKIYVIGDFNNWELKEEYSMKKINERGIWSLFLPKLEEGIKYKFAVVNECGNNTVYKADPYAFKSELRPNTASVLTKIKSFRWGDKRWLNKREKEGLDNKPMNIYELHLGSWKRKDGEFMTYEEISEVLVEYIKEMGYTHVEFMPINEHPLDASWGYQGVGYYSVTSRYGDLNGLKTLINKLHKNNIGVLLDWVPSHFCKDEHGLFMFDGSPTYEYEAWWKANNEGWGTCNFDLGRPEVKSFLFSNAMYWINEFHVDGLRVDAVSNMLYLDYGREYGEWEPNIYGGNGNLEAIAFLKELNTIIKKEGKGAITVAEESTSWEGITKPVEEDGLGFDYKWNMGWMNDTLSYIELDPIYRKYHHNKMNFSMMYNYSEKFILPISHDEVVHGKKSLINKMWGDDWKKYAGLRVYASFMMGHPGKKLMFMGCEFGQFVEWREWEELQWNVIEEFDIHRKTKEYFKALNKFYLENSSLWSLDYEEEGFKWIDADNSEESVLSFIRIGKNKKEKLIFICNFTPEVYYDFKVGVPELGEYVEAFNSDALEFGGAGNIVGDSILKATEESFKDFDYSISVKVPPLGTLVLKVK

SEQ ID NO: 5943 - protein, 505 aa, Rhodococcus equi
MTSIQPRPTTNDFGIPVNSDNESLTAGTQGPILLHDHYLIEKLAHFNRERVPERVVHAKGGGAFGELVITGDVSKYTKAKFLQPGKKTESLVRFSTVAGEQGSPDTWRDPRGFAMKFYTEDGNYDLVGNNTPVFFIKDPIKFPDFIHSQKRLPGSGLRDHNMQWDFWTLSPESAHQVTWLMGDRGIPNTWRHMNGYSSHTYMWVNAQGERFWVKYHFKTDQGIEFFTQDEGDQMAAMDTDYHQRDLWEHIDGGDYPTWTLKMQIMPYEEAKTYRFNPFDLTKVWPHADYPLIDVGTMKLDRNPADYHCEIEQAAFEPSSSVPGTGPSPDKMLLGRWFSYPDAHRYRIGSNYKELPVNSPHAGPRNSYTKDGQLRHHNPGDPVYVPNSKGGPHADISVSGESPGWYTDGEMVHQAYTLRKDDDDWGQAGTMVRDVLDDAARERLVSNIVGHLLNGVTEPVLVRAFDYWRNVDKDLGERVEKGVRTAQNGNASSDRNPASPAAEAKA

SEQ ID NO: 5944 - protein, 382 aa, Picea glauca
MSALVLSLAFSTPARGGGESRFAEGKALRRRLNASSCNASSKNAQLMCERRILSWCYGIRRRNSAGLWGKATRVQVSAVAEEEGGRILLSDVVVKKKRKPFLLELREWSLGDIGAAGTVFGMHALCLLAPFTFTWKAFGVFAVLYVVTGLLGITLSYHRNLSHRSFRLPKWLEYLFAYCGVQAVQGDPLDWVSTHRYHHEYCDSVKDPHSPNEGFWYSHMSWMFDEKTMFDRVGTRNNVSDLEMQPFYRFIRDTYIIHPIAMGLLLYALGGPPFVIWGMAVRIVWVYHITWLVNSAAHVWGYQAWNTGDLSRNNWWVAALAFGEGWHNNHHAFQYSARHGLEWWQFDPTWYVIKILEALGLAKDVRAPLEQHKTRMSSKPGL

SEQ ID NO: 5945 - protein, 462 aa, Cytophaga hutchinsonii
MILSEPKASLEKDASTLYAYKKQLDASFVWGVSASAYQTEGAYNIDGKGPSIWDTFTNENKNKIKDRKNANIACDFYSRYEDDLKLMQSLGINHFRFSISWSRILPSGTGEINPAGIAFYDRLIDTCLRYGITPWVTLYHWDLPQALEKRGGWTNREVVNWFTGYVAICVKHFGDRVQHWMVMNEPMVFVGAGYFLGLHAPGRRGMKNFLPAIHHAVLSMCEGARAIKSIYPNATVGTTFSCSHIEPYRNIEKDHLAAYKVDALLNRMFIEPTLGMGYPIDTLKPLQNIHQYILPGDEYKMKYDFDFIGVQNYTREFVKHSWFTPYLNARLITAPNRKVPHTLMNWEVYPESIYHMIRKFDAYPGIKKILITENGAAFEDTHHESLISDHLRTTYLQDHIEQVLRARAEGSKVDGYFVWTWTDNFEWAEGYHPRFGLIYTDFKNQNRIVKESGLWYGSFIRE

SEQ ID NO: 5946 - protein, 412 aa, Trichodesmium erythraeum IMS101
MKKRFLQIPLLLILPILLSWGLWISSATALTEEQGLLGEAWRIVNLAYVDDSFNHQNWWFVRQNLMKKPLTTREETYSTIQEMLASLEDPFTRLLKPQQYRNLQVDTSGELTGVGLQIALDSQTGELIVISPLEGSPAETAGIQAGDRVVKIDGHPTTEFSLDEAANRMRGTVGSPVILTILKESRDQPQDITIIRDQIEINPVYAKLKSNSQAGPIGYIRLSQFNANATAEISQVIESFEQKGAIGYILDLRNNPGGLLQAGVGIARLWLDDGTIVYTVNRQRVLGSFEAVGIAITNAPLVVLTNKGTASASEILAGALQDNGRAMLVGEKTFGKGLIQSLFDLSDGSGLAVTVAKYETPNHIDINKQGIIPDVVIKQDPILPNQITTEADKQYQAALELITSQFVLTNAA

SEQ ID NO: 5947 - protein, 661 aa, Candida glabrata CBS138
MATIPKRHTYGGGPEVHYTRNPYSAAPRNSMSSRGKKHVTFGPYIVGSTLGEGEFGKVKLGWTRTPSTGPEQRPAVSKQVAIKLIRRDTIVKNSEKEIKIYREINALKHLTHPNVVRLEEVLQNSKYIGIVLEYASGGEFYKYIQRKRRLKESTACRLFAQLISGVTYMHSKNLVHRDLKLENLLLDKNENLVITDFGFVNEFLPDNEYMKTSCGSPCYAAPELVISTRPYVARKADVWSCGIILYAMLAGYLPWDDDSTNPEGDDIGKLYQYITRTPLKFPEYITPIPRDLLRKILVPDPNKRVNMQYIHRHEWLKPHRPFLAVSTSQWDKLIKNSANVQLDHTKRVSRTSQHFETEQENSSVNQPVRSDMVNKAMDTSNTTDDAQHSIPNRQPLANVFINSRTYSARSASYAPRHSMSDDPNAIESARHAVQNKHESNLATVMGSPNKDKDDTTEDNNLETVARTSSHHRKPRPTSYYPVDINRSANNFSPIVLNLTNSDENDNSKHPYSTSTSNNPVAPTPQRDQSQVVTDEHGLQLEKNRVREQPLTSDKSRMSSLRSNATAKSSDSKKNKRFSLLSFYTNNGSKTSLHNDSKVSVTPSSKEESATVPPSIPSVVHHTDTTENKRNHRASMMGPSAGGDKSTARRVIDFFKRRSMRM

SEQ ID NO: 5948 - protein, 629 aa, Hypocrea lixii
MLARSVYTVTRSQITSTSYLPSLSSYSKFLQPKFTFSTMPPKGSKRETASPVGKANGVETKRVKHEANQDELHQPHPFAKDAEEHGIVLRRFYPHEMSTSRAYAYNSNEIERPMEGLVAALEETAGARKQAKVRHAVVHWFKMDLRHSDNRSLALASAKAKEAGVPLICVYIISPQDFEAHLTSPVRVDFMLRTLSVLKDDLAALDIPLHVETVDKRKDIPRRILELMEEWGSNHLFANMEYEVDELRRETRMIRQFAENNMSFEVVHDTCVVPPGELHSGTGKQYAVYTPWYRAWMAHIHENLDLLEIYDRPEKNPGATRRTFKTLFDCPIPDAPKNKQLNDEEKKRFHGLWPCGEHEAMSRLEKFCDEAVTSYHDRRNIPGDNGTSCLSVHLASGTISSRTCVRTARDRNKTKRLDGGHQGIHVWISEVAWRDFYKHVLVNWPYVCMNKPFKPEYANIEWSYNMDHFEAWCEGRTGFPIVDAAMRQLNHMGYMHNRCRMIVASFLSKDLLIDWRMGEKYFMEHLVDGDFASNNGGWGFSASVGVDPQPYFRVFNPLLQSEKFDPNGEYIRKWIPELKALSDKEIHDPYNRGAGTKAKKQGYPKQIVDHKGARERALSAYKDGLERGI

SEQ ID NO: 5949 - protein, 443 aa, Arabidopsis thaliana
  misc_feature (159)..(159): Xaa can be any naturally occurring amino acid
MANDYVSTVLLLLSLLIFLSQRTDSASIVKSLPGFDGPLPFELETGYIGVGEEEEVQLFYYFIKSERNPQEDPLLLWLSGGPGCSSISGLLYENGPVNVKIEVYNGTLPSLVSTTYSWTKVSSIIYLDQPVGTGFSYSRTKLVNKPSDSGEAKRKEKPXRIHEFLEKWLGKHQVFSSNPFYVAGDSYSGLVVPATVQEISKGNYECCNPPINLQGYVLGNPLTDYTTGSNSRIPFAHGMALISDELYESLKKTCKGEYTNVHPRNTQCLKFVEEFNKCTNRIFQQLILDPLCETETPDCYIYRYLLTTYWANDATVREALQINKESIGEWVRCYYSIPYNNDIKSSMPYHVNNSISGYRSLIYSGDHDFEVPYLGTQAWIRSLNYSIIDDWRPWMVKNQIAGYTRTYANKMTFGTIKGGGHTAESKPEEASIMFQRWINGQPL

SEQ ID NO: 5950 - protein, 421 aa, Aspergillus nidulans FGSC A4
MTSKQIPDIEVKPAPGISYFTPAQEPPAGLAADPQSDGAPIPKLFQPLKVRGITLHNRIGLSPLCQYSADDGHMTAWHMAHLGGIAQRGPGFLMVEATAVEPEGRITPQDLGLWKDSQIEPLKGVIEFAHSQNQIIGVQIAHAGRKASTVPPWLSSGDTATEKVGGWPDRVKGPSNVPFTSRFPVRKQMTRDDIENLKTAWVAAVKRAVRAGADFIEIHNAHGYLLMSFLSPAVNTRTDEYGGSFENRIRLSMEIAKLTREAVPDHLPVFLRVSATDWLEESRPDLPSWRLEDTVKFAKALAESGYIDVLDVSSGGTHADQHIHAKPGFQAPFAAAVKKAVGDKLLVGTVGMIDSAHLANSLLEKEGLDLTLVGRGFQKNPGLVWAFAEELGVEIGMANQIRWGFASRGGGPYLRKRSGKI

SEQ ID NO: 5951 - protein, 195 aa, Triticum aestivum
  misc_feature (132)..(132): Xaa can be any naturally occurring amino acid
  misc_feature (168)..(168): Xaa can be any naturally occurring amino acid
  misc_feature (174)..(174): Xaa can be any naturally occurring amino acid
TDLSLSLVPTATPALNKDDYFAICLAALVATDKEQQASAWNPSPAPAQELRFSCAVCGTAFASYQALGGHKSSHRKPPPTGERCVAVAQASAGAGSEASAAASSGGSSGGPHQCTVCGRGFATGQALGGHKXCHYWDGTSVSMSMSVSVSASSAVLRNFDLNLLPMPXNKAGVXKWAEEEEGAKPSPHQNLKLLL

SEQ ID NO: 5952 - protein, 441 aa, Methylococcus capsulatus str. Bath
MVKVTGMRALKIGLLVGVVSAASWAEDKPTSAGAVNIPFEGLKTFSEVYGRIQQDYVEPVPDDKLLEDAIRGMLSGLDPHSTYLDQEQYNELKVGTTGQFGGLGIEVGMENGFVKVIAPIDDTPAFHAGIKAGDLIIRLDDKPVKGMSLNDAVKMMRGEPGSPIVLTVVREGVEQPLKITITRDIIKIKSVKSRILEDGYGYLRITSFQSKTGDNVIEAIDEMKKKGALKGLVLDLRNNPGGVLNAAVAVSDAFLESGLIVYTDGRVEDAKMRFSATPNDVIGGAPMVVLINGGSASASEIVAGALQDHKRAVIMGEKTFGKGSVQTILPTSNGGAVKLTTARYYTPSGRSIQAEGITPDVPISRVKLEMAAKSEFAPIKEADLTGHLSNDKAKKGGEAKDAKDKESDKVDDTLALQDYPLNEALNLLKGINIVHKNGVKN

SEQ ID NO: 5953 - protein, 294 aa, Listeria innocua Clip11262
MTKTLQDRMILPGNETIPYIGLGVFQVTEQEFIAGAVEKAIEVGYRLFDTAAVYNNEAIVGQAILDSAVPREELFISSKVWNGDLGYDETLFAFERTLRNLKLDYLDLYLIHWPVAGKYRDSWRAMERLHDEKLIKSIGVANFKQHHLSDLLVAANEKPVLNQVETHPLLPQNDLRKYLAEQNIAHAAWSPLAKGILMQNPVITEIAKKHQASVDQVILQWHLNRNTIIFPKSITSSRIEENSRLSYFQLDASDMEKIDRLETGKRVGPDPDDLEYFLSSIERERAYLTGGEKE

SEQ ID NO: 5954 - protein, 150 aa, Oryza sativa (japonica cultivar-group)
MSLVRRSNVFDPFSLDLWDPFDSVFRSVVPATSDNDTAAFANARIDWKETPESHVFKADLPGVKKEEVKVEVEEGNVLVISGQRSKEKEDKNDKWHRVERSSGQFMRRFRLPENAKVDQVKAGLENGVLTVTVPKAEVKKPEVKAIEISG

SEQ ID NO: 5955 - protein, 469 aa, Arabidopsis thaliana
  misc_feature (210)..(210): Xaa can be any naturally occurring amino acid
MEESNRSSTVLFDKYNIGRLLGTGNFAKVYHGTEISTGDDVAIKVIKKDHVFKRRGMMEQIEREIAVMRLLRHPNVVELREVMATKKKIFFVMEYVNGGELFEMIDRDGKLPEDLARKYFQQLISAVDFCHSRGVFHRDIKPENLLLDGEGDLKVTDFGLSALMMPEGLGGRRGSSDDLLHTRCGTPAYVAPEVLRNKGYDGAMADIWSXGIVLYALLAGFLPFIDENVMTLYTKIFKAECEFPPWFSLESKELLSRLLVPDPEQRISMSEIKMIPWFRKNFTPSVAFSIDETIPSPPEPPTKKKKKDLNEKEDDGASPRSFNAFQFITSMSSGFDLSNLFEIKRKPKRMFTSKFPAKSVKERLETAAREMDMRVKHVKDCKMKLQRRTEGRKGRLSVTAEVFEVAPEVSVVEFCKTSGDTLEYYLFCEDDVRPALKDIVWSWQGDDDEDDVTTNDNVDTNDNKINNVS

SEQ ID NO: 5956 - protein, 210 aa, Carmichaelia sp. 'Lavin 6201'
YDRVMAYKFHEDDHGEVIAEVKKPGLEPYLGLHYPATDVPQAARFLFMKNKVRIIVDCSAKRVKVIQDKNIPFDLTLCGSTLRAPHNCHLQYMDNMKASASLVMAVVVNDSNEDGDSSDAVQPQKRKRLWGLVVCHHITPKFVPFPLRYACEFLAQVFAIHVNKEIELEYQVIERNILRTQTLLCDMLMRDAPLGIISQSPNIMDLVKCD

SEQ ID NO: 5957 - protein, 468 aa, Lactococcus lactis
MTKTLPKDFIFGGATAAYQAEGATHTDGKGPVAWDKYLEDNYWYTAEPASDFYHKYPVDLELAEEYGVNGIRISIAWSRIFPTGYGEVNEKGVEFYHKLFAECHKRHVEPFVTLHHFDTPEALHSNGDFLNRENIEHFIDYAAFCFEEFPEVNYWTTFNEIGPIGDGQYLVGKFPPGIKYDLAKVFQSHHNMMVSHARAVKLYKDKGYKGEIGVVHALPTKYPYDPENPADVRAAELEDIIHNKFILDATYLGHYCDKTMEGVNHILAENGGELDLRDEDFQALDAAKDLNDFLGINYYMSDWMQAFDGETEIIHNGKGEKGSSKYQIKGVGRRVAPDYVPRTDWDWIIYPEGLYDQIMRVKNDYPNYKKIYITENGLGYKDEFVDNTVYDDGRIDYVKQHLEVLSDAIADGANVKGYFIWSLMDVFSWSNGYEKRYGLFYVDFDTQERYPKKSAHWYKKLAETQVIE

SEQ ID NO: 5958 - protein, 188 aa, Carmichaelia sp. 'Lavin 6201'
YDRVMAYKFHEDDHGEVVSEIRRSDLEPYLGLHYPSTDIPQAARFLFKQNRVRMICDCHAKPVKVIQSEELRQPLCLVNSTLRSPHDCHTQYMANMGSIASLVMAVIVNGNDSTRLWGLLVCHHSSPRYVPFPVRYACEFLMQAFGLQLYMEIQLASQMAEKRILKTQTLLCDMLLRDAPFGIVTQSQ

SEQ ID NO: 5959 - protein, 146 aa, Glycine max
  misc_feature (34)..(34): Xaa can be any naturally occurring amino acid
  misc_feature (43)..(43): Xaa can be any naturally occurring amino acid
  misc_feature (123)..(123): Xaa can be any naturally occurring amino acid
MVQAKKFRGVRQRQWGSWVSEIRHPLLKRRVWLXTFETAECSXQGAYDQAAILMNGQNAKTNFPTSKNQAEADHDNNNTFLSPKALSELLSTKLRKYCKDPAPSLTCLRLDADNSHIGVWQKXGSDHILAPTVVMRVELGKKQIIT

SEQ ID NO: 5960 - protein, 414 aa, Arabidopsis thaliana
MENGATTTSTITIKGILSLLMESITTEEDEGGKRVISLGMGDPTLYSCFRTTQVSLQAVSDSLLSNKFHGYSPTVGLPQARRAIAEYLSRDLPYKLSQDDVFITSGCTQAIDVALSMLARPRANILLPRPGFPIYELCAKFRHLEVRYVDLLPENGWEIDLDAVEALADENTVALVVINPGNPCGNVYSYQHLMKIAESAKKLGFLVIADEVYGHLAFGSKPFVPMGVFGSIVPVLTLGSLSKRWIVPGWRLGWFVTTDPSGSFKDPKIIERFKKYFDILGGPATFIQAAVPTILEQTDESFFKKTLNSLKNSSDICCDWIKEIPCIDSSHRPEGSMAMMVKLNLSLLEDVSDDIDFCFKLAREESVILLPGTAVGLKNWLRITFAADATSIEEAFKRIKCFYLRHAKTQYPTI

SEQ ID NO: 5961 - protein, 417 aa, Oryza sativa (japonica cultivar-group)
MSSGGGRPPAAQHIVRSVRQRFVPLPPPLARAPFAAAPGDYHRFAAASRGGEIEEGIVIRRTPLKRKTPCGESEAAESSERMMTSPGFTEGVGSPLMTPVSGKTSRTTKSMAKFNKAGPQTPISNAGSPGNPSTPASSRYDNSLGLLTRKFINLLKQTQDGILDLNDAAKILDVRKRRIYDITNVLEGTGLIEKKLKNRIRWRGSDDSGTNLDSDISCLKTEVENLYIQEQALDRSISEIREKMEELTEDESNHRWLFVTEDDIKGLPCFQNEALIAIKGPRGTTVEVPDPDEAGDYLQRRYRILLRSTMGPIDIYLVSQYKKMEELGETATPPRHASVVEPPSIATEAGHSSKQTMPLNVQQDIQETPELNASRAFGRMKKITPSDVDTDADYWLLTDDDISITHMWTTACILDEI

SEQ ID NO: 5962 - protein, 460 aa, Oryza sativa
MAAGRKKRVGRYEVGRTIGQGTFAKVKFAVDADTGAAVAMKVLDKDTILNHRMLHQIKREISIMKIVRHPNIVRLNEVLAGKTKIYIILELITGGELFDKIARQGKLRENEARKYFQQLIDAINYCHSKGVYHRDLKPENLLLDSRGNLKVSDFGLSTLAQKKCSDWDFFFEGFQGVGLLHTTCGTPNYVAPEVLSNNGYDGSAADVWSCGVILYVLMAGYLPFEEDDLPTLYDKITAGQFSCPYWFSPGATSLIHRILDPNPKTRITIEQIREDTWFKKTYVAIKRGEDENVDLDDVQAVFDNIEDKYVSEQVTHNDGGPLVMNAFEMITLSQGLDLSALFDRQQEFVKRQTRFVSRKPAKTIVATIEVVAETMGLKVHSQNYKLRLEGVSSNRMSPFAVVLQVFEVAPSLFMVDVRKVAGDTLEYHRFYKNLCNKMESIIWRPIEVSAKSALLRTATC

SEQ ID NO: 5963 - protein, 375 aa, Bacillus cereus ATCC 14579
MTSSRNKATSFYEGTNVNAGGFFENVEETKLFYPIQVGGWSLRNRIAMAPMTRCFADNETGVVGADVVEYYRKRAADGIGLIITEGIVISPRAKGNPGVPGIYTQEQIDSWKPVTEAVHKEGGTIIAQIWHVGRMSHHEIIGGQMPQAPSAIAAEGNVPRFRKPFDMPEAMTLEEIQEVIDQYAQAAKNAIEAGFDGVEIHGAHGYLIDQFTYEFANKRTDKYGGDLKQRLTFMKEVTAAVIEAVGANKTLLRFSAFKGDNPTYMWENPEFAIETFINMFKEVGLTMIHPSTMNYTQEIADGKNFHQLVRKYWDGTIVGVGNLNPKEAEEALQEGTIDVAAFGRPLIANPDFVHRIKHAESLVEYDAKEHLVTLV

SEQ ID NO: 5964 - protein, 352 aa, Pseudomonas syringae pv. syringae
IKFPDMVRAFKPDPRTNLDNDSRRFDFFSRVPEATRTLTLLYSNEGTPAGYRFMDGNGVHAYKLVNAKGEVHYVKFHWKSLQGLKNLDPKEVAQVQSKDYSHLTNDLVGAIKKGDFPKWDLYVQVLKPEELAKFDFDPLDATKIWPDVPEKKIGQMVLNKNVDNFFQETEQVAMAPANLVPGIEPSETACCRPCVSYADTQMYRLGANGLSLPVNQPKVAVNNGNQDGALNTGHTTSGVNYEPSRLEPRPADDKARYSQLPLSGTTQQAKITREQNFKQAGDLYRSYSAKEKTDLVQSFGESLADTDTESKNIMLSYLYKADPDYGTRVAEVAKGDLSRFSSLAASLKELMI

SEQ ID NO: 5965 - protein, 333 aa, Phytophthora infestans
MANQVDHSNPITLSRFILAEKEIQGNADLSVLFTSIELACKVIASSVRRAGLTGLYGLDGSENSTGDQVKKLDVLANDIFINSLKFSTKIEVMVSEEEEKPIVVQNDSSGTKYCIAFDPLDGSSNIDCNVSTGTIFAIYQRDASSEGGYKDILQPGSKLVSAGYCMYGSSTQLVLTWGKGVHCFTLDPTIGAFMLSHQDIRIPDEPKAIYSCNEGNYAQWDSATKAFVDECKTGSKAYAARYVGSMVSDIHRTILYGGIYLYPGSTKAKDGKLRLLYECNPMSFIVEQAGGMATTGTERILDLVPTDIHQRSPIFLGCKRDVERVIALYKEHN

SEQ ID NO: 5966 - protein, 363 aa, Pseudomonas putida KT2440
MSALFEPYTLKDVTLRNRIAIPPMCQYMAEDGMINDWHHVHLAGLARGGAGLLVVEATAVAPEGRITPGCAGIWSDAHAQAFVPVVQAIKAAGSVPGIQIAHAGRKASANRPWEGDDHIAADDARGWETIAPSAIAFGAHLPKVPREMTLDDIARVKQDFVDAARRARDAGFEWIELHFAHGYLGQSFFSEHSNKRTDAYGGSFDNRSRFLLETLAAVREVWPENLPLTARFGVLEYDGRDEQTLEESIELARRFKAGGLDLLSVSVGFTIPDTNIPWGPAFMGPIAERVRREAKLPVTSAWGFGTPQLAEAALQANQLDLVSVGRAHLADPHWAYFAAKELGVEKASWTLPAPYAHWLERYR

SEQ ID NO: 5967 - protein, 343 aa, Oryza sativa
MFNCAAREKAMVINLEFIRAIVTADEILLLDPLTIDVIPFVARGTHHLPLKNLVCGNGQPGGDDHGEKHDDSHGDQVPRLNEATGAEHELPFEFQVLELALETVCSSFDVNVSGLERRATPVLEELTKNVSTRNLDRVRTLKSDLTRLLAHVQKVRDEIEHLLDDNEDMAHLYLTRKQLQNQQVEALISSAASNSIVPGGTSLSRLNNSFRRSVSIATSMHLDNDVEDLEMLLEAYFMQLDGIRNRILSVREYIDDTEDYVNIQLDNQRNELIQLQLTLTIASFGIAVNTFIAGAFAMNIQSKLYSIDDGSFFWPFVGGTSSGCFMICIVLLWYARWKKLLGP

SEQ ID NO: 5968 - protein, 499 aa, Zea mays
  misc_feature (101)..(101): Xaa can be any naturally occurring amino acid
  misc_feature (116)..(116): Xaa can be any naturally occurring amino acid
  misc_feature (167)..(167): Xaa can be any naturally occurring amino acid
ITMDPTKFRPSSSHDTTVTTTNAGAPVWNDNEALTVGPRGPILLEDYHLIEKVAHFARERIPERVVHARGASAKGFFECTHDVTSLTCADFLRAPGVRTPXVIVRFSTVIHERGSXPETIRDPRGFAVKFYTREGNWDLLGNNFPVFFIRDGIKFPDVIHAFKPNPXGRHVQEYWRVFDFLSHLPESLHTFFFLFDDVGVPSDYRHMEGFGVNTYTFVSAAGKAQYVKFHWKPTCGVRCILTDEEAALVGGRNHSHATQDLYDSIAAGSFPEWTLYVQVMEPDTEEQYDFDPLDDTKTWPEDLLPLRPVGRLVLDRNVDNFFNENEQLAFGPGLVVPGIYYSDDKMLQCRVFAYADTQRYRLGPNYLMLPVNAPRCAHHNNHYDGAMNFMHRDEEVDYYPSRHAPLRQAAPPTPLPPRPVAGRREKATIRKPNDFKQPGERYRSWDADRQDRFVRRFADSLGHPKVSQELRSIWIDLLAKCDASLGMKIATRLNMKPNM

SEQ ID NO: 5969 - protein, 257 aa, Nostoc sp. PCC 7120
MQVIRLAALSDNYIFLLHDSHKNIAAVVDPAEAEPVLKQLAQLKAELVAIFNTHHHNDHVGGNQKLIQKFPQVKVYGGAKDQGRIPGQQVFLQPGDRVQFADRVAEVIFVPGHTRAHIAYYFPPQTDDTPGELFCGDTLFAGGCGRLFEGTPAQMVESLTKLRSLPENTRVWCAHEYTLKNLQFALSVDSKNTELQKRLDEVKTKRSQGIATVPSLLGVEKLTNPFLRWEQPSLQLAVNSNDPVQTFARIRGLKDKF

SEQ ID NO: 5970 - protein, 661 aa, Bacillus thuringiensis serovar konkukian str. 97-27
MEQLEHHVTDNQRKHALTTNQGVKIAEDEFSLKMGLRGPTLMEDFHFREKMTHFDHERIPERIVHARGVGAHGYFQLYESLEAYTKADFLTNPSKKTPVFVRFSTVQGSKGSNDTVRDVRGFATKFYTDEGNYDLVGNNMPVFFIQDAIKFPDFVHAVKPEPHNDIPQGASAHDTFWDFVAHNPESTHMVMWQMSDRAIPRSLRMMEGFGVHTFRLINAEGKAHFVKFHWKPALGVHSLVWDEAQKIAGKNPDFHRQDLYEVIEKGDYPEWELGLQLIPEEDEHAFDFDILDPTKLWPEEEVPVKLVGKMTLNKNVDNFFAETEQVAFHPGHVVPGIDFSNDPLLQGRLFSYTDTQLSRLGGPNFHQIPINQPVCPFHNNQRDGMHQMQIHRGQTSYHPNGLNDNQPATVQAEQGGYEHYQEKIDGHKIRGRSKSFLNFYSQAKLFYNSMSPIEKQHIKEAFCFEVGKCKSDMVKANVIALLNHVDRQLAQEVANMIGAPLPKENREVNSDAKSPALSMSNTIFKADSKNVAIVLNGDPSVSLLSEWIQAFAQHRINYSIIDNKIYQFNDSIKVTDTYTTTDSSLFDAVLVFSSESVIHPPVLEFAETTFKHFKPIAYVLSNPHSLDNSKIKLDGAGIYNLANTSIKSFIEGIAQGRFWNR

SEQ ID NO: 5971 - protein, 469 aa, Streptococcus pyogenes SSI-1
MVSVMWFRRDLRIDDQKALAHAIASQSPTLCVFQFNNEQLNLLHSRNQSSFITSVLAFRKLLKCEGIDLYLMYGDLMTCFEQLLTQLKDWTDVYFNYDESGYGRLRDQKAAQFFKKNGIAVHTYQDHYLHGSQEIINQSGQPYKVFTPYYRIWQNYPKETPIKVELSQGRWLNLETPDDVLRTVESFKDEKYQDVATFDEASKQLNRFIQDQLAAYHANRDFPAQLGTSRLSPFLRIGAIGIRTVYHAVRQAPNSLGQATFLKELAWRDFYNMVYVAYPDQKTQPIQKAFSQIEWVNNPDWFQLWKEGKTGYPIVDAAMLQLQKTGWMHNRLRMIVASFLTKDLLCDWRLGEQYFQQQLIDYDAASNIGGWQWAASTGTDAVPYFRIFNPVTQGKRFDPKGEFIKAYLPQLEHVPEKYLHEPWKMPKYLQESVSCIIGTDYPQPIVDHAKQREQAIAKYEWAKEKAKIE

SEQ ID NO: 5972 - protein, 215 aa, Arabidopsis thaliana
  misc_feature (9)..(9): Xaa can be any naturally occurring amino acid
  misc_feature (80)..(80): Xaa can be any naturally occurring amino acid
  misc_feature (98)..(98): Xaa can be any naturally occurring amino acid
  misc_feature (111)..(111): Xaa can be any naturally occurring amino acid
  misc_feature (160)..(160): Xaa can be any naturally occurring amino acid
  misc_feature (180)..(180): Xaa can be any naturally occurring amino acid
  misc_feature (182)..(182): Xaa can be any naturally occurring amino acid
  misc_feature (186)..(186): Xaa can be any naturally occurring amino acid
EFGENEWYXFSPRERKYPNGVRPNRAAVSGYWKATGTDKAIHSGSSNVGVKKALVFYKGRPPKGIKTDWIMHEYRLHDSXRKASTKRNGSMRLDEWVXLCRIYKKRGASKXLLNEQEGFMAEVLMEDETKVVVNEAERRTEEEIMMMTSMKLPRPCSLAXHLLEMDYMGPVSHIDNFSQXRXIFIXPDSESSWFGDLQFNQDEILNHHRQAMFKF

SEQ ID NO: 5973 - protein, 565 aa, Methanosarcina mazei Go1
MKGDNCKNPMDKNQLGEPLPSRNQTVGDTPELTTVAGAPVESNQDSMTSGRRGPLMLQDIWFLEKLAHFDREVIPERRMHAKGSGAFGTFTVTHDITSYTKAAIFSEIGKQTKMFARFSTVAGERGAADAERDIRGFALKFYTEEGNWDMVGNNTPVFFFRDPLKFPDLNHAIKRDPRTNMRSPNTNWDFWTSLPEALLQLTIIMGDRGLPSSFRHMHGFSSHAYSLINKNNERVWVRFHFRSQQGIRNLTDQEAVIVVGMDRESHQRDLYEAIEKGMFPKWKMYIQVMTEEQANSMKNNPFDLTKMWHKKDFPLMPVGEFELNKNPENYFADVEQAAFSPANVVPGISFSPDRMLQGRLFSYGDAHRYRLGVNHHQIPVNSPQGVKNYHSFHRDGQMRVDGNRGSQLHYEPNSYGNWKDQPQYALPVEKTGSTDILRYDFREDDSDYYTQPGELFRAMTPDQQQVLFENTARNMGDSTLQIKHRHIYNCYQADPKYGEGVAKALEIDISTVDLNLPARTSRKANYEANNKHPELNQPTMKKDSGREIDTNGDPYIEPENDPWLL

SEQ ID NO: 5974 - protein, 709 aa, Xanthomonas campestris pv. campestris str. ATCC 33913
MRHPASAAYATPSRIRQGRPFPRGAIFDGKGTNFALFSAHATRVELCLFDEQGNESRVDLPEYTNEIWHGYLPDVKPGQRYGYRVHGPYAPTEGHRFNHNKLLLDPYARELDGDLVWADELYGYTVGHPDGDLSFDERDSAPFMPKCVVVEDTYDWEDDARLLKPWNETVIYETHVRGYTMRNAQVPEAVRGTFAGLAQPSVLQYIKDLGITAVELLPVHAYLDDQHLLDKGLRNYWGYNTISFFALKSRYLSSGHRDEFRDMVKAMHKQGLEVILDVVYNHTAEGSELGPTLSFKGIDNASYYRLAEDKRYYINDTGTGNTLNLSNSRVIQFVNDSLRYWAGEMHVDGFRFDLATILGREPSGFDQRGGFLDACNQDPLLSEVKLIAEPWDCGPGGYQVGHFPPGWSEWNDKFRDNAREFWKGEDGKLAEFATRFTGSADLFDRSGRRPWASVNFITAHDGFTLRDLVSYNEKHNIDNGEDNRDGSSNDGSCNYGEEGETDNAEILQLRERQMKNLLATLLLSQGTPMILAGDERAQSQGGNNNTYCQDNEITWLEWENDPTDGRLTDFVKSLTALRKRYPILSRGRFLNGQYNEEAGLRDLTWLNPGGTEMDDAHWTDAGARSVGLLLEGKAQTSGVKERGNDATLLIVINAYHEGVTFTLPSSDEPVHWKLALSTDEALEVDSMPAGASEFLAPPRSITVFECKVG

SEQ ID NO: 5975 - protein, 547 aa, Bacillus subtilis subsp. subtilis str. 168
MKDDHQNKQHQSNAQGSEEAFSHKTSGKNESEDTLTNRQGHPVTDNQNVRTVGNRGPTTLENYDFLEKISHFDRERIPERVVHARGAGAHGYFEAYGSFGDEPISTYTRAKLFQEKGKKTPAFVRFSTVNHGKHSPETLRDPRGFAVKLYTEDGNWDLVGNNLKIFFIRDPLKFPDLVHAFQPDPVTNIQDGERIFDFISQSPEATHMITFLFSPWGIPANYRQMQGSGVHAYKWVNEEGKAVLVKYHFEPKQGIRNLTQKEAEEIQGKNFNHATQDLYDAIENGDYPEWEVYAQIMSDDEHPELDFDPLDPTKLWYKDDFPWKPIGKLVLNKNPENYHAEVEQASFGTGVLVDGLDFSDDKLLQGRTFAYSDTQRYRVGANYLQLPINSPKKHVATNQEGGQMQYRVDRAEGQNPHVNYEPSIMGGLKEAKQDGKDHTPHVEGDVKREAIDRTNNFGQAGETYRRFTEFERNELITNLVNTLSTCRKEIQDQMIENFTKADPDYGKRVAEGLKKVSENNSNGPIGTTETEQAAKQAEQESHPSDPY

SEQ ID NO: 5976 - protein, 613 aa, Anaerobranca gottschalkii
MENMIRAINLFHQGENFEAYKFFGAHLNGEGVTFTLWAPRARAVEVVGNFNNWDGNNHKMNKISEGVWQIFIPGLKEWEIYKYKILTEDGNTILKADPFAFYSELRPNTASVIVNWKNYQWGDGRWQERKNKIDVYQGPLSIYEVHLGTWRTKNGNLMNYREIAHELVPYVKEMGYTHIELMPVMEHPFDGSWGYQVTGFFSPTSRYGSIKDLKYFIDYCHQNELGVILDWVPSHFCRDDHGLRMFDGSPCFENENPKKADNPQWGTSNFDYGKGEVVSFLISNALYWLKEFHADGLRVDAVANILYLDFCKGPQDFIPNKYGSNENLEGIEFLKKLNTVVKNHSPNSLMIAEDSSTFPKVTGTVEEGGLGFTYKWNLGWMNDTLNYMAHPWPRKAEKHHQMTFSLTYSFFEKFLLPLSHDEVVHCKKSLIDKMDGDYWQKFAALRTYYGFQYTHPGKKLLFMGGEFGQFIEWRDYEELEWHLLRFDLHRKLQIYVKDLNHFYQKEKTLWELDYGWDGFQWLEADDKENSIYVYQRRDLEGNVLVVICNFTPIVHHSYSFGVITNGVYEEEFNSDLEKYGGSNLYNGIPLTTSNNILTALIPPLAIICLKLKK

SEQ ID NO: 5977 - protein, 245 aa, Eucalyptus globulus
MGRGRVQLKRIENKINRQVTFSKRRCGLLKKAHEISVLCDADVALIVFSTKGKLFEYATDCCMERILERYERYSYAESQVLTNNAETNGNWTLEHAKLKARMEILQKNQKNLMGEELDSLSLKELQNLEHQLDTALKNIRSRKIQLMCESISELQRKDKALQEQNNMLAKKVKEKEKALAQQTQWDNPQDDGLTSSSVILSQSLQPLNIGGPYHPSGIEEGAALGPPQHRNATLFPSWMLSHLQE

SEQ ID NO: 5978 - protein, 210 aa, Enterolobium cyclocarpum
YDRVMAYKFHEDDHGEVIAEITKPGLEPYLGLHYPATDIPQAARFLFMKNKVRMIVDCHARHVKVLQDEKLPFELTLCGSTLRAPHTCHLQYMENMNSIASLVMAVVVNDNDEDVDSSDSIQPQKRKRLWGLVVCHNTTPRFVPFPLRYACEFLAQVFAIHVNKELELENQIVEKKILRTQTLLCDMLMRDAPLGIISQSPNIMDLVKCD

SEQ ID NO: 5979 - protein, 443 aa, Zea mays
  misc_feature (136)..(136): Xaa can be any naturally occurring amino acid
MEDAMAADGKSVLQGRYELGRVLGHGNFGRVHAARDLRTGRSVAVKVVAKDKLERAGMAEQIKREIAVMKMVSHPNIVELHEVMATRSKIYLALELVRGGELFSRIARAGRVREDVARCYFRQLVAAVDFCHGRGXFHRDLKLENLLLDEVGNLKVADFGLSALAGHARSDGLLHTACGTPSYVAPEVLGGKGYDGAKADLWSCGVILYVLLVGSLPFHEDNLMVMYRKMQRGEFLCPPWVSADARKLIGELLDPDPSTRITVARLVETPWYRKPLPVLPPLNLKEPTPDARRATSDKEEPEVLNAFHLISFSEGFDLSPLFDQGRGGGVGRSSAGGIRFVTREAASSVVSRLESLVTGRGANMRVTKSGSRGVRLEAVSRGRSGARLAVAAEIFSVAPSVLLVDVKKDGGDTMEYRSFCSEELRPALKDIVWASSQDTPGAA

SEQ ID NO: 5980 - protein, 478 aa, Streptococcus pneumoniae TIGR4
MTTFKDGFLWGGAVAAHQLEGGWQEGGKGISVADVMTAGRHGVAREITLGVLEGKYYPNHEAIDFYHRYKEDIALFAEMGFKCFRTSIAWTRIFPKGDELEPNEEGLQFYDNLFDECLKNGIEPVITLSHFEMPYHLVTEYGGWKNRKLIDFFARFAEVVFKRYKDKVKYWMTFNEINNQANYQEDFAPFTNSGIVYEEGDNREAIMYQAAHYELVASARAVKIGHEINPDFQIGCMIAMCPIYPVTCNPKDILMAMKAMQKRYYFADVHVLGKYPEHIFKYWERKGISVDFTAQDKEDLLGGTVDYIGFSYYMSFAIDSHRENNPYFDYLETEDLVKNNYVKASEWEWQIDPEGLRYALNWFTDHYHLPLFIVENGFGAIDQVAADGMVHDDYRIEYLGAHIREMKKAVVEDGVDLMGYTPWGCIDLVSAGTGEMRKRYGFIYVDKDDNGKGSYNRSPKKSFGWYKEVISSNGESVE

SEQ ID NO: 5981 - protein, 319 aa, Phytophthora infestans
MDSRGEMKALDAQIDRLRRAENLTETEIYELCQKAKEILAGESNVQPVKCPVTVCGDIHGQFYDLLELFRIGGACPDTNYLFMGDYVDRGYYSLESVALLVALKVRHRERITILRGNHESRQITQVYGFYDECLRKYGNANVWKYFTDLFDHLPMTALIENRVFCMHGGLSPSIDTLDHARALDRVQEVPHEGPMCDLVWSDPDDRCGWGISPRGAGYTFGQDITEQFKRSNGLTFIARAHQLVMEGYQWTHNRGVVTIFSAPNYCYRCGNQAALMEIDEVMADRNGDKVYETCKFIQFDPAPRDSNFNEKKRTPDYFL

SEQ ID NO: 5982 - protein, 457 aa, Staphylococcus aureus subsp. aureus MRSA252
MAIAVLLNRMFRMEHNPLFEYIYQQKEDIDACYFIIPEEDMSSASDLKAQFYRGTLQRFYQSLHAEKLTPYVMSYDDIISFCKENNISEVVIAGDIMSYHLEEYDILHQRSLFNEARIAVTLIRGNHYFKASKTMNQQGEPYKVFTSFSKKWRPYLRHRDVYHYDLKSFEDFVIASPDDLVFDDIAFGSSQIIEQNKWQHFLDQDIQNYESGRDYLPEVLTSQLSVALAYGLLDIIEIFNDLLARYDEDEANYEAFIRELIFREFYYVLMTQYPETSYQAFKSKYRQIKWSQNEADFNAWCEGQTGFPIIDAAIMELTQTGFMHNRMRMVVSQFLTKDLFIDWTWGEKFFRKHLIDYDAASNIHGWQWSASTGTDAVPYFRMFNPIRQSERFDPKALYIKTYLPIFNQIDAKYLHDTQRNESNLFELGIELGRHYPRQMVDHQEKRTQVLAAFKALD

SEQ ID NO: 5983 - protein, 248 aa, Gibberella zeae PH-1
MSDSPQSPPKEVDQGAPSPDDEAQMNEQQDPQSANAAGYEFEGVKEQDRWLPIANARSAVHIWIPLMSCDSSSKSPKASRASKADRADELDANIRNFAPVARIMKNALPDNAKIAKEAKECMQECVSEFISFITSEASEKCQQEKRKTVNGEDILFAMTSLGFENYAEALKVYLSKYREQQNQSNRERVNMDNGQWGSGTMMGDAKAESGAVGDFGHDGNSVESGADPNYMYGSQPGHNGNAPEARER

SEQ ID NO: 5984 - protein, 193 aa, Enterolobium cyclocarpum
YDRVMAYKFHEDDHGEVVSEIRRSDLEPFFGLHYPATDIPQAARFLFKQNRVRMICDCHANPVKVIQSEESRQPLCLVNSTLRSPHQCHAQYMENMGSIASLVMAVIVNGNDTTKLWGLLVCHHTSPRHVPFPLRYACEFLMQAFGLQLYMEMQLASQMAEKRTLKTQTLLCDMLLRDALFSIVTQSPNIMDL

SEQ ID NO: 5985 - protein, 170 aa, Brassica napus
  misc_feature (77)..(77): Xaa can be any naturally occurring amino acid
GLLRDNRFASIALSPNVSAQIFMGLMVNPPKPGDISYAKFTRESKGILESLRRRAKIMTDGFNSCKNVVCNFTKGAXMYSFPQIRLPPGALQAAKQAGKVPDVFYCLKLLEATGISTVPGSGFGQKEGVFHLRTTILPAEEEMPEIMDSFKKFNDAFMTQYDNNFGYSRM

SEQ ID NO: 5986 - protein, 637 aa, Caulobacter crescentus CB15
MAATDCLRSGWGGHLSLLLGRHRDSDDLRSPAINPAAIRVRILRAVPAVCLIVGVAMAMDYIVTILLLNEPAAYVPIATLVISTIIAVPLAYWLAGQRLRLETMHAELKASLDAKQDAIEDAEVALAKYREVDRLYRLLGDNLTDHVALWSPLGERLYSSPSIERITGYTLEEFMALPPAALVGEADFRRVQGIIRSLEPGGEPVSADYESLCKDGSRIWVESTYSLLGDGSGILLVTSRDITERKRLELDIAKALQMAEAASAAKSDFLANMTHELRTPLTAIIGFAEVLRRSRNLNKTAARQVGHILDASNTLLSVVNDVLDFSRLEAGGLELDPAPFDPAAMASSCAGLVAERAEAKGLAVEVRAPRGLKPMNLDGPRLSQVLLNFLSNAVKFTSHGAITVALRQTIDGDQAVLRGEVTDTGIGIAPEHRENIFDRFSQADAAVSRRFGGTGLGLAISRRIIERMDGRIGVDSVEGQGSTFWFEVRGPLADLPTQEAVETSPLDADAGVRLLLVEDNAVNRELICAILEPFGVAIETANDGVAGVEAMRQGHYDLVLMDVQMPMMDGLTATREIRAMEGARGASTPIIAMTANVLPEQVANCMAAGMDDHLGKPISPAKLLEAVARWSGRSHAA

SEQ ID NO: 5987 - protein, 101 aa, Cucumis sativus
HIQENWRILDFFSHHPESMNMFTFLFDDIGIPQDYRHMDGSGVNTYTLINKAGKAHYVKFHWRPTCGVKSLLEEDAIRVGGSNHSHATQDLYDSIAVETYP

SEQ ID NO: 5988 - protein, 177 aa, Zea mays
MQTKPIREMAAVSSTATASSQPELPTSTAHPTANAAAISRLARRPRRNNSFVMVEEASYASGGGDGGVARTKSLTEDDLEELKGCVDLGFGFAYSEIPELCGTLPALELCYSMTRRFLDEQRAPGQDEEEEEPASPPLPNWRIFAPASVLAGDDPEEVKARLKYWAQAVACTVKLCS

SEQ ID NO: 5989 - protein, 341 aa, Pisum sativum
MDHAGDAMRTDLMTITRYVLNEQSKRPESRGDFTILLSHIVLGCKFVCSAVNKAGLAKLIGLAGETNIQGEEQKKLDVLSNEVFVKALTSSGRTCILVSEEDEEATFIEPSLRGKYCVVFDPLDGSFNIDCGVSIGTIFGIYMVKDFETATLEDVLQPGKNMVAAGYCMYGSSCTLVLSTGSGVNGFTLDPSLGEYILTHPDIKIPNKGKIYSVNEGNAKNWDGPTTKYVEKCKFPTDGSSPKSLRYIESMVANVHRTLLYGGIFLYPGDKKSPNGKLRVLYEVFPMSFLMEQAGGQAFTGKQRALDLIPTKIHERSPVFLGSYDDVEDIKALYAAQEKTA

SEQ ID NO: 5990 - protein, 489 aa, Exiguobacterium sp. 255-15
MSEKRLTTNQGVPIGDNQNSRTAGRRGPTLLEDYQLIEKMAHFDRERVPERVVHARGFGAHGVFTVKNSMKKYTKAAFLQNEGTEVPVFARFSTVIHGTHSPETLRDPRGFSVKFYTEEGNWDFVGNNLPVFFIRDSMKFPDMVHSLKPDPRTNIQDPDRYWDFMTLRPESTNMLMHLFTDEGIPASYRKMRGSSVHAFKWVNAHGNTVYVKLRWVPKVGVHNLSADEATEIQGKDFNHASNDTYQAIEDGEFPEWDLFVQVLDPADVDNFDFDPLDATKDWFEDVIPFQHVGTMVLNKNVDNYFAETESVGFNPGVLIPGMLPSEDKLLQGRLFSYSDTQRYRIGTNYQQLPINCPFAQVNNYQRDGAMPVGQQTSPVNYEPNRYQDEPKQTPEYTEENQPLYDDIHGRLEIEKTNNFGQAGEVYRRMTEEEQTALLNNLVDDLKQVRHENTVLLAICNFYRADESLGKKLSEALQVDIQPFLQQMQK

SEQ ID NO: 5991 - protein, 489 aa, Nicotiana glutinosa
MGFENEKNNSILSKLATNEEHGENSPYFDGWKAYDNDPFHPLKNPNGVIQMGLAENQLCFDLIEEWIKRNPNASICTTEGIKSFRAIANFQDYHGLTEFRRAIAKFMEKTRGGRVTFDPERVVMAGGATGANETIIFCLADAGDAFLVPSPYYPAFNRDLRWRTGVQLIPIPCDSSNNFQITTKAVKEVYENAQKSNIKVKGLILTNPSNPLGTTLDRDTLKNLLTFTNQHNIHLVCDEIYAATVFSTPQFVSIAEIVNDEMRHCNKDLVHIVYSLSKDMGLPGFRIGIVYSFNDTVVSCARKMSSFGLVSTQTQYLLAEMLSDEKFVSNFLTESSKRLAKRHKHFTNGLEQVGIKCLRSNAGLFCWMDLRPLLKESNFDAEMSLWRVIINDVKLNVSKGSSFDCQEPGFFRVFFANMDDETVDIALRRIRRFVSVKRTGDETTAMERKQQWKKNNLRLSFSKRMYDESVNLSPLSSPIPHSPLVRART

SEQ ID NO: 5992 - protein, 342 aa, Bordetella pertussis Tohama I
MNLLSPIDIAGIALRNRIAVAPMSRTQADAHGHPAAETAAYYARYARHGAGLVITEALYTAGPAARAYFNQPGLASEAQAEHWRAAVRAVHQEGGRVIAQLQHAGKLAEPGLHARPLGLVDGAAQGLSWQTQQPNAPAHAATAEEIERIIEGFALSARLAHYAGFDGVEIHGARGYLVNDFLSAYNVRDDEWGADRARIAEAVLRAVRQACPLPIGFNYSIYKMDEYRYQPPGGGAEIAALLARLCQAGADILHISSRRVLKPEPWGGLLAQLARAAAPKALMVNGGLATLQDCETVLAATQADLVSLARPFLANPDWLARSLAGEPLRAYEPGMEQRPLLD

SEQ ID NO: 5993 - protein, 242 aa, Glycine max
MEFPNEAIPEGCSQKKTGRGKIGIKRIENTTNRQVTFCKRRNGLLKKAYELSVLCDAEVALVVFSSRGRLYEYANNSVRGTIDRYKKACAASTNPESVSEANTQFYQQEASKLKRQIRDIQNLNRHILGEALSSLSLKELKNLESRLEKGLSRVRSRKHETLFADIEFMQKREIELQNHNNFLRAKIAEHEKAQQRQQDMIPGNVCESTIPPQSYDRNFFPVNLIDSNNQYSNQDQTALQLV

SEQ ID NO: 5994 - protein, 538 aa, Staphylococcus aureus subsp. aureus COL
MVKQLKFSEDARQAMLRGVDQLANAVKVTIGPKGRNVVLDKEFTAPLITNDGVTIAKEIELEDPYENMGAKLVQEVANKTNEIAGDGTTTATVLAQAMIQEGLKNVTSGANPVGLRQGIDKAVKVAVEALHENSQKVENKNEIAQVGAISAADEEIGRYISEAMEKVGNDGVITIEESNGLNTELEVVEGMQFDRGYQSPYMVTDSDKMVAELERPYILVTDKKISSFQDILPLLEQVVQSNRPILIVADEVEGDALTNIVLNRMRGTFTAVAVKAPGFGDRRKAMLEDLAILTGAQVITDDLGLDLKDASIDMLGTASKVEVTKDNTTVVDGDGDENSIDARVSQLKSQIEETESDFDREKLQERLAKLAGGVAVIKVGAASETELKERKLRIEDALNSTRAAVEEGIVAGGGTALVNVYQKVSEIEAEGDIETGVNIVLKALTAPVRQIAENAGLEGSVIVERLKNAEPGVGFNAATNEWVNMLEEGIVDPTKVTRSALQHAASVAAMFLTTEAVVASIPEKNNDQPNMGGMPGMM

SEQ ID NO: 5995 - protein, 929 aa, Pectobacterium carotovorum subsp. carotovorum
MTKYSLRARMLILILAPTLMIGLLLSSFFVIHRYNQLQSQLADSGASIIDAAGNHQRYAITHRQMDTIPALINTLHRRHSAIIRTISVFDARNQLLATTKLRNKRTLQCLSNDVLAHNKLHLHHTNDALILHMPIVTDSEFMAGTTPVLPGTATPLGYLVIELDTSTIRLQQYQEIFIAALLLLLSLGAAVIFAYRLMRDVTTPIRNMVDTVDRIRRGQLDSRVEGYMLGELDMLKNGINSMAMSLTAYHEEMQQNIDQATYDLRETLEQMEIQNVELDLAKKRAQEAARIKSEFLANMSHELRTPLNGLIGFTRQTLKTPLNTTQTDYLLTIERSANNLLNIINDVLDFSKLEAGKLVLEDIPFSLHNTLDDVVMLLAHTAHEKGLELTLSIQNDVPEQFVGDPLRIQQIITNLLGNAIKFTEQGNIDIRVEKRRQELHQVLLEVQIRDTGIGIAELQQSQLFQAFRQADTSISRRHGGTGLGLVITQRLVKEMGGDISFQSELSKGSTFWFHITLPLNPHAIPTEPAYTMLQGKHLAYVEYHPIAAQATLDILSQTPLIVSYSPTFEQLPEGEFDILLLGIPVQYRNTLLDYTPRLRDICRRSPCVILALPSLAQMDAEQLKTFGVHACLSKPLAASRLLPLLQDSTLFQFSFLPDDTASHQSAVRHLARLPLRVMAVDDNPANLKLIGTLLEEQVETIILCESGQDAIAQAELNQCDIILMDIQMPGMDGICASELIRQIPHHATTPIIAVTAQTMTGEREHLLRSGMDDYLAKPIDEQMLKSVLTRHARQDPLKRNRGEMTGLLNEHDDSQLSLDWALAQQQAANKPELGRDLLQMLLDFLPEVQRKIENVLKGQTDDDIIELVHKLHGSCSYSGVPLQPICRYLEQQLRKGVHASDLEPEWLELLDEIDNVNRAAQPHINPRLP

SEQ ID NO: 5996 - protein, 1313 aa, Geobacter metallireducens GS-15
MNRRELMAGVLLGSAGFLVNWFKLSLFFNVDFLFGSVFSMFALLRFGPATGLLAAVIAAGCTWLQWHHPWAIVIFGCEALCAGWLRNRKRMDLMLGDIIYWFSGGLVLVWLFYHQVMGFNAGATLLVALKQGMNGIINTLIAEALFLLSWRLRGGTELPSLRKWLGVILEGVVLVPAFVFAFLDTSWYFRQQMTRLQESTARTAEVGNLTISSWLDEEQHKLGMLVKLVGDPDHNPSQEMQRLLERYHAAHGSDTYRLGVMDRNHVTRAFSPRVDEKGVSTIGVWLGDRPYIAELNDPSHPIVFDAFMGKIGVPGPRLIMLAPCMVGGEYRGAVFSVVSLGHPAALLKGIVGKRDVNLTLLDRHRRVVASTDSGKKFLEQFALPKGGQLHSVGSNVSQWVPDPQPGGGPMKRWNRSFYMTEIALEPKSGFRLVVQSSLAPSLKEINNRASILLGVLAILTLVVVGLSRYFSRRLLAPFAMLGKVTSQLPVRIAQGEQISWRPAEVREEQELQDNFRLMENALQNSFSELTAINEELEHRVTERTAELRIAKEAAENSELQLRSITNSAHDAILMMDHQGSISYWNPAAEQILGYSAAEALGKNLHDLLTPERYLADHLTAFSEFQQTGSGNAVGKTLELFARRKDGQEIEVALSLSAVFLNGAWNAVGLLRDITEQKRINASLRMLSAAVEHSPVSIIITDRDGRIEYVNPKSCQMTGYAFEELRGQNPRIMKGPTHPPEFYKNLWETILSGREWYGEFHNRRKDGSLVWVMASISPIYDEKGEITHFVGVREEIEKQKKLQEELANIAQLEKVARDRAEQANRAKSEFLAGMSHEIRTPLNAIIGMSDLLAETRLDGEQSGYLSVVHSAGETLQGLINDILDLSKIEAGMLQLDSVPFSLRDCIRQLTDITSVKASSKGVTYSFSVKSAVPDWLMGDSLRLRQVLINLVGNAVKFTDSGGSVLLEVEPVQQSDAEVLIRFSVADTGIGIAPEKLDTIFESFSQADSSTTRRYGGTGLGLAISRHLAGMMGGEIGVESTVGKGSCFRFTVPFAISRRTEEPLPKEQLPGDKLGRPLSILVVDDNLANRTVLTAYFRRTEHTVECAVNGEEALAKIKGGGYDVVFMDMEMPVMDGYTAVRLVREWERETGRAPLPVIALTANALKEDQLRSLDAGCTAHLTKPIKKDKLLEIVGEYQQRPRTNGKQGTNMDRDNVPDKIVVVCDPDLEDIIPAYLEGRKTEGSVIRELAVNGQFDEVRTIAHGLKGSGGCYGFSRITEIGRDMELAANDGNLVEVLKQLDTLEAYLQAIEVRYE

SEQ ID NO: 5997 - protein, 457 aa, Bordetella bronchiseptica RB50
MSKSPEQMTPYDQFNIEVPEDHFPVEGMSARAAQALVLSDEWTDTNPMLNMSSFVTTFAEPEAVRIAEKNMYKNYIDHDMYPQLFAMEQRMVRWLHQLWNGPKDAEPYGTATVGSSEACMLAGLAHKWNWRQRREREGKDATRPNMVTGGNVQIVWKKFLRYFDVEPRIVPLKPGQYCLTAEDLDKYVDENTIAVVAIAGQTFTGEDDDIQGIHDWLDAYEKKTGVSVPMHIDGASGGFVNPFLYPDYKWDFRLPRVQSINASGHKYGLTPPGLGWVIFRERKVFNEDLVFYVNYLGGEMPTATLNFSRNSFQVAVQYYQFLRLGFDGFKRVMQRTLDNAIALRQHLVDSGYFTIMNDTQRIPVVAVTLDPKVKKFNEFDVSNKVRERGWVISAYTMPPDAESVRSLRVVVRPHINRNVALLLAEDIVKACKYLEQHGGTATPPALHDTHKSSPAKC

SEQ ID NO: 5998 - protein, 544 aa, Chlamydophila abortus
MAAKNIKYNEDARKKIHKGVKTLAEAVKVTLGPKGRHVVIDKSFGSPQVTKDGVTVAKEIELEDKHENMGAQMVKEVASKTADKAGDGTTTATVLAEAIYSEGLRNVTAGANPMDLKRGIDKAVKVVVDQIKKISKPVQHHKEIAQVATISANNDAEIGNLIAEAMEKVGKNGSITVEEAKGFETVLDVVEGMNFNRGYLSSYFTTNPETQECVLEEALVLIYDKKISGIKDFLPVLQQVAESGRPLLIIAEDIEGEALATLVVNRLRAGFRVCAVKAPGFGDRRKAMLEDIAILTGGQLISEELGMKLENTTLSMLGKAKKVIVSKEDTTIVEGLGNKEDIEARCENIKKQIEDSTSDYDKEKLQERLAKLSGGIAVIRVGAATEIEMKEKKDRVDDAQHATLAAVEEGILPGGGTALVRCIPTLEAFIPVLTNEDEQIGARIVLKALSAPLKQIAANAGKEGAIICQQVLARSSNEGYDALRDAYTDMIEAGILDPTKVTRCALESAASVAGLLLTTEALIADIPEEKSSSVPAMPGAGMDY

SEQ ID NO: 5999 - protein, 279 aa, Staphylococcus aureus subsp. aureus MRSA252
MLNEIQILNNGYPMPSVGLGVYKISDEDMTKVVNAAIDAGYRAFDTAYFYDNEASLGRALKDNGVDREDLFITTKLWNDYQGYEKTFEYFNKSIENLQTDYLDLFLIHWPCEADGLFLETYKAMEELYEQGKVKAIGVCNFNVHHLEKLMAQSSIKPMVNQIEVHPYFNQQELQEFCDRHDIKVTAWMPLMRNRGLLDDPVIVKIAEKYHKTPAQVVLRWHLAHNRIIIPKSQTPKRIQENIDILDFNLELTEVAEIDALNRNARQGKNPDDVKIGDLK

SEQ ID NO: 6000 - protein, 233 aa, Dianthus caryophyllus
MGRGRVELKRIENKINRQVTFAKRRNGLLKKAYELSVLCDAEVALIVFSNRGKLYEFCSTSCMNKTLERYQRCSYGSLETSQPSKETESSYQEYLKLKAKVDVLQRSHRNLLGEDLGELSTKELEQLEHQLDKSLRQIRSIKTQHMLDQLADLQKKEEMLFESNRALKTKLEESCASFRPNWDVRQPGDGFFEPLPLPCNNNLQIGYNEATQDQMNATTSAQNVHGFAQGWML

SEQ ID NO: 6001 - protein, 627 aa, Pseudomonas aeruginosa
MCGIAGFWNITGTLLGDNARVARQMAAAIHHRGPDESGIWYEAPRAPILVHARLAVLELSPAGSQPMHSDCGRYVLIYNGEIYNHLALRARLSEAGVTHSWRGGSDTETLLACFAQWGVESTLKLTVGMFALALWDRQEKTITLARDRMGEKPLYWGWQNGVLFFASELKALKEHPLFRGDIDRDALALFLRYGYVPAPYSIYKGIGKLRAGSYLVLSERSLNETCEPAAYWSANAAIEEALSNPFQGTDAEAVDLLESQLRTSISDQMVSDVPLGAFLSGGVDSSTVVALMQQQSSRPIRTFSIGFDEPGYDEAVYAKAVAEHIGTDHTELYVNSKDALDVIPSLPKIYCEPFGDSSQIPTLIVSGLARQQVTVALSGDGGDELFGGYNPYQFTPRVWRMLERFPHSMRRFASAFAQDLPLPDKLGKLRDVFASRTAEELFYRLNSHWRNHEYPVIGAKGHTALLDTPERWPRVDSFQHWMMAMDVQGYMPDDILVKVDRAAMANSLETRVPLIDHRVFELAWRMPLHMKIRNGKGKWLLREVLYRHVSRELIERPKKGFSVPVSDWLRGPLKEWAESLLDERRLQQEGYLDSRLIRRIWNDHLAGRRDHSRRLWSVLMFQAWLES

SEQ ID NO: 6002 - protein, 1000 aa, Methanosarcina acetivorans C2A
MCGLKKRLFIDCYEGESIEEIRGKKRADREETEVQEKSHLEEKLVRLEWQADSAVTGLITMDFDGTLSYVNPFFVRMWGYGSAEEPPGRQVSELWASPAEFLQAERECREKGEWIGELQARRRDGTFFYVHTSLSLIRNREGLPLGISGSFVDITRLKQVEEELRNRTLELSEAKARLDLALEATEMGTWDWDVLTNGMTWDDNLFRLVGISREEFLQTHDSLLELSNRILSPEDNRRMLEVMQAVADGKTDSYEFEHDVLRPDGTVRHFLVKGRAHRDSEGKLLRVTGTTTDITDQKIAEDALRRSEANLARSQAMAHLGSYSFDAHTGEIYWSEELKTIWDYDPGPNYSFETVISRIHPEDRKRILEALKNAGQGKHPFNSEYGILKPDGSIRYVHDQGEISLDGNGVPVRMFGTLQDITHRKLMEEQLLKAKEAAESANKAKGDFLANMSHEIRTPMNAVLGMLEMLLETSLTDEQREYLQLAHASAESLLSIIDDVLDFSKIEQNKLELEQISFELESLISHIINLLSGKAGSKGLKLAFHIEKDLPSTFIGDPVRLKQVLFNILGNAIKFTKKGEIALSVEVYMPSERNSGLSNSDFPEEVALLFKVKDTGIGIPPEKLSQIFDPFIQADASVTREYGGTGLGLAISSQLVELMEGRIWVESEVGKGCTFYFTVRVKRGESSENYGQGNNIPEESLLVCMEAKESYGNGITSGESLNVLFAEDHPINQKLILGLLEKKGHKLTLVTSGKDALDALSRRDFDAVLMDIQMPGMDGLEATRRIRDPSSGVRRHNIPIIAFTARALKEDREKCFEAGMNYYISKPLKKEKLLNILEDIRVGKNTREKTARERTVQDRIVQEKNIQERAATPLDLESIAFDFPEDQVFNLEEVLERTEGDEVLLKEMVKIFLGMAPELLDSINSALRKGEAEALRENAHILKSAAGSIGANRVFRVAYYLEQVGRRDRMELASDKFEEIKARFKELEPVLVRYLEKQIC

SEQ ID NO: 6003 - protein, 548 aa, Anaplasma ovis
MANVVVTGEALDKSIREVVRILEDAVGCTAGPKGLTVAISKPYGSPEITKDGYKVMKSIKPEEPLAVAIANIITQSASQCNDKVGDGTTTCSILTAKVIEEVSKAKAAGADIISIKNGILKAKEAVLTALLSMKREVASEDEIAQVATISANGDKNIGSKIAQCVREVGKDGVITVEESKGFKDLEVERTDGMQFDRGYLSPYFVTNAEKMLVEFENPYIFLTEKKINLVQNILPVLENVARSGRPLLIIAEDVEGEALSTLVLNKLRGGLQVAAVKAPGFGDRRKDMLGDIAVIAGAKYVVNDELAVKVEDITLEDLGTAKTVRITKDTTTIIGSVDSNADSITSRISQIKSQIEVSSSDYDKEKLKERLAKLSGGVAVLKVGGSSEVEVKERKDRVGDALHATRAAVEEGVVPGGGAALLYTLASLDGVKGKNDDEQLGVNIIKRAVCAPIKRIIKNSGSEEAPCVIQHLLKQNDKELIFNVDTMNYANAFASGVMDPLKVVRIAFDLAVSLAAVFMTLNAVVVDVPNKEDAAGGAAGGMGGMGGF

SEQ ID NO: 6004 - protein, 852 aa, Manihot esculenta
MLGSLGLFPAPDFGSLSPSLAKNSKRAVERNCQIVKQNQIELTGCRKLPGGPRSLFLPRISIDKRVKQGLAISAAVADEKKTITSFEEDMEITGLLSIDPGLESFKDHFRYRMQRFTNQKQLIEKYEGGLEEFSKGYLKFGFNREAGGIVYREWAPAAQEAQVIGDFNGWIGSNHRMEKNEFGVWSINIPDSGGNPAIHHNSRVKFRFKHGDGVWVDRIPAWIRYATVDPTKFGAPYDGVYWDPPPPERYQFNYPRPPKPQAPRIYEAHVGMSSSEPRINTYREFADDVLPRIRANNYNTVQLMAVMEHSYYGSFGYHVTNFFAVSSRSGTPEDLKYLIDKAHSLGLRVLMDVVHSHASNNITDGLNGFDVGQSTQDSYFHTGDRGYHKLWDSRLFNYANWEVIRFLLSNLRWWLEEYKFDGFRFDGVTSMLYHHHGINMAFTGDYNEYFSEATDIDAVVYLMLANSLIHNILPDATVIAEDVSGMPGLGRSVSEGGIGFDYRLAMAIPDKWIDYLKNKSDEEWSMKEISWSLTNRRYTEKCVAYAESHDQAIVGDKTVAFLLMDKEMYYGMSCLTDASPMVDRGVALHKMVQLLTMAFGGKGYLNFMGNEFGHPEWIDFPREGNGWSYDKCRRQWNLVDTEHLRYKFMNAFDRAMNLLDEKYSFLASTKQIVSSTNEEDKVIVFERGDLVFVFNFHPENTYDGYKVGCDLPGKYRVALDSDAWEFGGRGRVGHDVDHFTSPEGIPGVPETNFNNRPNSFKILSAARTCVVYYRVEEKEGNHNSSDIGAANETLTDIAKLGDFEGINETSPADAVAKQEDLKAAQPSLIADDIATKANTETEEIEEETSDDK

SEQ ID NO: 6005 - protein, 210 aa, Myrospermum sousanum
YDRVMAYKFHEDDHGEVVAEITKSGLEPYLGLHYPATDIPQAARFLFMKNKVRMIVDCHAKHVKVLQDEKLPFDLTLCGSTLRAPHSCHLQYMANMDSIASLVLAVVVNDSDEDGDSSDAVQPQKRKRLWGLVVCHNTTPRFVPFPLRYACEFLAQVFAIHVNKEFELEYQIIEKNILRTQTLLCDMLMRDAPLGIVSQSPNIMDLVKCD

SEQ ID NO: 6006 - protein, 355 aa, Kluyveromyces lactis NRRL Y-1140
MAGIKHRRDSAESINTDIITLSRFILDQQHLSAKNATGEFSMLLNSLQFAFKFISQTIRRAELVNLIGLAGASNSTGDQQKKLDVLGDEIFINAMKASGNVKVLVSEEQEDLIVFRNSPGKYAVCCDPIDGSSNLDAGVSVGTIVSLFKIHENQNGNSGEEDSEGTINDVARCGREMVAACYTMYGASTHLVLTTGAGVNGFTLDNNLGEFILTYPELRLPEQKSIYSINEGNTCYWEPTIADFIAKLKENSEENNGKPYSARYIGSMVADVHRTLLYGGLFSYPGDKKNPNGKLRLLYEAFPMAFLVEQAGGKAVNDRGERILDLVPQHIHDKSSIWLGSSGDVDKYLKHIGKL

SEQ ID NO: 6007 - protein, 216 aa, Ophioglossum pedunculosum
SKRRNGLLKKAYELSVLCDAEVAVIVFSGTGKLSEFASSSMMRRILEKHRQVVEGSQSIKPTSQDVVEYWRHEATRLKHQLGVVQETQRHMLGESLETLTYRDLQKLESKLNGALNQVRGRKNQIISERLVYLQEKEDLLNAENIMMRAKLAEIMAGGVPLMSQSMQDPAARESFLNESSTQPNPPIMKNQNGEETNLQLGLELFPTTSFGDGAST

SEQ ID NO: 6008 - protein, 478 aa, Prochlorococcus marinus str. MIT 9312
MNNPRILFWHRKDLRIFDNQALIKAFSLSNAITSTYILDRNYTHDFSANSRAWFLGDSLQELGNNWEKMGSRLVIEEGDPVLIIPQLAKTIDAKFVIWNKTIEPYEINRDLQIKKNLKEKNIQVIESWDHLLVEPLKIFSGNNKPYSVYGPFYKNLKSKMNLLGLYDQDKVIFQFKDIDNKLKENKLINSSDSTLKKFLKNIKFSGSNICPCRPGENGAEILLEKFINEKNIYSYNSARDLPSHNGTSFLSASLRFGTISIRKVWNATLDLNSDFESHENSLSIETWQKELVWREFYQHCLFHFPELEKGPYRKKWGQFPWQNNNEWFQHWSNGETGVPIVDAAMRQLNSTGWMHNRCRMIVASFLVKDLICSWQMGEKKFMETLVDGDLAANNGGWQWSASSGMDPKPLRIFNPYTQAKKFDPICEYIKSWIPELSKVSNSDLLNGEISNLEKNNYSTPIVDHNIQQRLFKSLYAEI

SEQ ID NO: 6009 - protein, 564 aa, Zea mays
  misc_feature (303)..(303): Xaa can be any naturally occurring amino acid
MAPLVATATMNHAVAHLLGPNHESFSRHHLSSSLQQNSKRRCNLSFRPRAAESQNGSQTLSPSEVPKRDWFPSDFIFGAATSAYQIEGGWNEDGKKPSTWDHFCHTFPDWIADHSNGDVAADSYHMYKEDVRLLKEIGMDSYRFSISWSRILPNGTLEGGINPYGIKYYKNLINLLVENGIEPFVTIFHWDTPQALVDKYGGFLDERIVKDYTDFAKVCFENFGDKVNNWLTFNEPQTFSSFSYGTGLCAPGRCTPGQKCANPIGNSLTEPYTVGHNLLRAHAEAVDLYNKYYKGENGRIAPXDHWQGGLAFDVMGRVPYEKSAFTDQQAEQRSWDINLGWFLEPVVRGDYPFSMRSLARERLPFFTDKEQEKLVGSYDMLGLNYYTSRFSKNIDISPNYSPVLNTDDAYASQETNGPDGNPIGPWMGNSWIYLYPEGLKDLLMIMKNKYGNPPIYITENGMGDVDHGDLPMEVALDDHKRVHYLQRHIATLKESRDLGANVQGYFAWSLLDNFEWFSGYTERYGIVYVDRNDGCKRYMKRSAKWFKEFNAAKKAAAKKILTPA

SEQ ID NO: 6010 - protein, 541 aa, Oryza sativa (japonica cultivar-group)
MDPYKHRPSSSFNGPLWSTNSGAPVWNNNNSLTVGSRGPILLEDYHLVEKLANFDRERIPERVVHARGASAKGFFEVTHDITHLTCADFLRAPGVQTPVIVRFSTVIHERGSPETLRDPRGFAIKFYTREGNWDLVGNNFPVFFIRDGMKFPDMVHSLKPNPKSHVQENWRILDFFSHHPESLHMFTFLFDDIGIPADYRHMDGSGVNTYTLVNRAGKSHYVKFHWKPTCGVKSLLDDEAVTVGGTNHSHATQDLYDSIAAGNFPEWKLFIQTIDPDHEDRFDFDPLDVTKTWPEDIVPLQPVGRMVLNRNIDNFFSENEQLAFCPGIIVPGIYYSDDKLLQTRIFSYSDTQRHRLGPNYLLLPPNAPKCAHHNNHYDGFMNFMHRDEEVDYFPSRYDPAKHAPRYPIPSATLTGRREKVVIAKENNFKQPGERYRSWDPARQDRFIKRWIDALSDPRLTHEIRSIWLSYWSQADRSLGQKLASRLSAKPSMAQVHEDITDGLTEGDDEVVRSRRGVRWWMLWRRRRLGRNGIAVGRKEIK

SEQ ID NO: 6011 - protein, 423 aa, Saccharophagus degradans 2-40
MTLPKDPESSTVKPVKKDKRKNIIKSEKLLGVCYDIRGPVLEHANRLEEEGHRILKLNIGNPAPFGFEAPDEIITDVVYNIREAQGYTASRGLFPARKAIMHECQRQEIPNVEIEDIFLGNGVSELIVMANQALLNNGDEVLVPSPDYPLWTAAVNLAGGKAVHYMCDEQSDWFPDIDDMRSKITSRTRAIVVINPNNPTGAVYSQELLEQIVALAREHQLVIFADEIYSKILYDDAEFVPMGRIAKDVLCVTFNGLSKSYRLAGFRSGWIILSGAKHLAKDYIRGIDMLASMRLCANVPAMLAVQTALGGYQSINELILPGGRLLEQRDAAIEELAKIPGVSCVVPKGAIYLFPKIDRTMYDFDDDQQLILDFLIQEKILLVQGTAFNWKQPDHFRIVFLPQADQLRQAIIKFGEFLQQYRI

SEQ ID NO: 6012 - protein, 136 aa, Zea mays
  misc_feature (75)..(75): Xaa can be any naturally occurring amino acid
MDARMFGLENPLVAALHHLLDARAMAATPADVKELAGAYAFVVDMPGLSTGDIRVQVEDERVLVISGERRREERXDAKYLRMERRMGKFMRKFVLPDNADVDKVAAVCRDGVLTVTVEKLPPPEPKKPKTIEIKVA

SEQ ID NO: 6013 - protein, 917 aa, Pseudomonas syringae pv. tomato str. DC3000
MLTKLGIKGRELLLTILPASLMAAMLGGYFTWMQLSELQSQLLLRGEMIAQDLAPLSASALGRKDKVLLSRIATQTLEQPDVRAVSFLDVDRSPLAHAGPTMISPTPIGNSSQLLNSTGTDATRYLLPVFGNQRHLTSPIIPAEADTLMGWVDVEISHNGTLLRGYRSLFASLLLIFTGLAITAVVAVRLSRTINGPMSQIKQAVSQLKDGNLETRLPPLGSRELDELASGINRMAATLQNAQEELQMSIDQATEDVRQNLETIEIQNIELDLARKEALEASRIKSEFLANMSHEIRTPLNGILGFTHLLQKSELTPRQFDYLATIEKSADNLLSIINEILDFSKIEAGKLVLDNIPFNLRDLLQDTLTILAPAAHAKHLELVSLVYRDTPLALSGDPLRLRQILTNLVSNAIKFTREGTIVARAMLEDETEEHAQLRISVQDTGIGLSSQDVRALFQAFSQADNSLSRQPGGTGLGLVISKRLIEQMGGEIGVDSTPGEGSEFWISLKLPKAREDKEESLNLPLEGLRAAVLEHHDLARQALEHQLEDCGLHTVVFTNLENLLNGVTAAHETPAAIDLAVLGVTTLEISPERLRQHIWDLENLNCKVMVLCPTTEYALFQLAVHDVYTQLQAKPACTRKLQKALSELIAPRAIRADIAPPLSSRAPRVLCVDDNPANLLLVQTLLEDMGAEVMAVEGGYAAVNAVQQEAFDLVLMDVQMPGMDGRQATEAIRAWEAERGQSSLPIVALTAHAMANEKRSLLQSGMDDYLTKPISERQLAQVVLKWSGLALRNPAPERQNESLEAHVGPLVLDPEEGLRLAAGKADLAADMLAMLLASLDADREAIRVARASQDVQALIERIHRLHGATRYCGVPQLRTACQRAETLLKQDAPHTGDALDDLDKAIVRLETEARVTA

SEQ ID NO: 6014 - protein, 349 aa, Pseudomonas fluorescens Pf-5
MTTLFDPIKLGDLELSNRIIMAPLTRCRADAGRVPNALMAEYYVQRASAGLILSEATSVTPMGVGYPDTPGIWSNDQVRGWANVTKAVHGAGGKIFLQLWHVGRISHPSYLNGETPVAPSALQPKGHVSLVRPLADFPTPRALETAEIADIVDAYRVGAENAKAAGFDGVEIHGANGYLLDQFLQSSTNQRTDQYGGSLENRARLLLEVTDAAIEIWGAGRVGVHLAPRADSHDMGDANLAETFTYVARELGKRGIAFICSREKEGADSLGPQLKEAFGGPYIANERFTKDSANAWLAAGKADAVAFGVPFIANPDLPARLKADAPLNEAHPETFYGKGPVGYIDYPTL

SEQ ID NO: 6015 - protein, 370 aa, Bordetella pertussis Tohama I
MSTLFQPLNAGKLRLANRIVMAPLTRNRSPNAVPPPLTATYYAQRASAGLIITEATAISHQGQGYADVPGLYAPEQLAGWRRVTDAVHAAGGTIVVQLWHVGRISHTTLQPGQGAPVAPSAIRAQARTYLVDAQGKGQFADTSEPRALALDELPGIVEDYRRAARAAIDHGFDGVELHAANGYLLDQFLRSGSNHRDDAYGGSIENRARLLLRALDAVCAEVGADRVGIRLSPVTPANDAHDDQPQPLFEYVLRELARRGLAYVHVIEGATGGDRAYQQGPAPFDYAALKAAYRAAGGAGAWMVNNGYDISLAEQKLSSGQADLVAFGKPFIANPDLVARLRQGAALNEGDRDTFYGGGERGYTDYPALA

SEQ ID NO: 6016 - protein, 555 aa, Debaryomyces hansenii CBS767
MEPASKKTKLEELSKFGSKYYPYDIDNKTIISKYIKREDLKPINVLEAKLNDTRANRNNIDVGDSIAHLFLRDFRTIDNKGLSIASELATTTKTPLITFHIFCLEEFDAHSVSPFKLEYMLGSLDVLKKDLREMNIPLVSLQVEKRKDVPTKIAEFLEQNNTSHVFCNMEYEVDELRLLSKLVCFLLDKHISFNPVHDSCIVKPGELKTKSKGTQYAVFTPWYKAWCNYLKIEDAPFMEYPRPHANESFSDPNKLFDSEIPQVPESKRLTHDQQKEFDTCWKCGEHEAWLALSVFLESDKFKKYDESRNEISEESVSRMSCPISSGIISTRSIIRYILENKFVKKIDSGEQGTGWIRQIAWRDFYRHILCNWPYVCMFKPFLLEYDDLNWEYNSDHFYKWCQGKTGFPIVDAAMRQLNQTGYLHNRCRMIVASFLSKHLLIDWKYGEYYFMEHLIDGDFASNNGGWGFSSSTGVDPQPYFRIFNPWLQSERFDKKGTYIRTWVPELKDIQDEKGIHNPYEKGYGHIAEKNGYPKPIVDHKYCRERALNRFKDAKY

SEQ ID NO: 6017 - protein, 733 aa, Burkholderia vietnamiensis G4
MTDTLFDRRDIDALLGGRHPDPFACLGPHGEAGRTVVRALLPGALRVRAVTPGGDELGALACVDEAGCFAGTITHDGRYRLAIDWPDAQQVTDDAYAFGTLLDDAALARFAAGDPAAVLDCLGATPIRVDGVDGVRFAVWAPNAQRVSVVGNFNSWDGRRHPMRLRRPWGVWELFVPGIGPGEHYKYELCAADGSLLPHKADPCARATEAPPRTASVVADTAALDGFGWHDAGWIDARPDAGRRFRVPWSIYEVHAESWQRVPEEMDRSATWDELAERLIPYVKGMGFTHVEFMPISEYPFGGSWGYQPLAQFAPSARFGPVDGFARFVDRAHAAGIGVIVDWVPAHFPNDAHGLAQFDGSALYEHADPREGMHPDWNTCVFNLGRNEVSAFLIASALAWARRYHVDGIRVDAVASMLYRDYSRKEGEWVPNVYGGRENLESVAFLRTLNDALHGAAAPAGVVTIAEESTAWPGVTAPTGDGGLGFDFKWNMGWMHDTLAYLHEDPIHRRYHHDRMTFGLVYAFSERFVLPLSHDEVVHGKGSLAAKMPDDAWQRLATLRAYFGFMWAHPGKKLLFMGSEFAQWSEFAHDGTPHWDLLDAPAHRGVQRLVRDLNRAYASEPALHALDCDAAGFTWLIGDDRDNSVLAFARRDDSGRVVVAICNFTPVPRSGYRVGLPAPGQWRELMNTDAAVYGGSNAGNDGAVWAQDVPAHGQPWSATLRLPPLATLWLAPA

SEQ ID NO: 6018 - protein, 767 aa, Burkholderia vietnamiensis G4
MTSRSDLPPGTHAYASSFGATCVNAGHTRFRLWAPASSNAALELQGDFEGKRPGEQRIDMQPAGDGWFEVVAACGAGALYRYVLDDGFAVPDPASRFQPYDVHGPSQVVDPAAYRWRNDAWRGRPWHETVLYELHVGACGGYANVERRLPALAALGVTAIELMPINAFPGARNWGYDGVLPFAPDASYGRPEELKALIDAAHGLGLQVFLDVVYNHFGPDGNFLPRYAPEFFRADRKTAWGPAIDFSRAQPSTFFIDNALYWLDEYRFDGLRIDAAHAIDDDAWLRQLVRRVRAHVGDARHVHLVLENERNTASLLGPDGFDAQWNDDFHNSAHVLLTGERDGYYRAYADAPLRRLARTLGEGFAYQGEPSPLHDGAPRGESSAHLAPTSFVAFLQNHDQVGNRAFGERLRALANDDAVRAATALLLLAPQVPLLFMGEEDGSTQPFQFFTDYRGELADAVRDGRRREFAAFPAFADPAHRDAIPDPNDLGTFVRSSPAHAHENAHQDADTWRRLYRSALTVRAALVTPHLPGARALGVELLGAHVEEMGNGGAAGAGAGAGAGAGAGAGAGAGAGAGAAGTAARAAAGTASAAAGGADAADAGGAAAGAAGAAGAAGAAGAAGAAGAAGSGAGEAGGAGGAGGAGGAGGNGGTGDAGTDGASAPRDDSGDAGDSHGNGNPNDTPIALAARWRLGDGSTLTIAFNPGSHDAVLDTLPVGKVVFETPPRARDRLADRRLPARSCIAWRDGAVNHDALMHRANAPTANT

SEQ ID NO: 6019 - protein, 776 aa, Trichodesmium erythraeum IMS101
MTISADQVNQIAWNHHHDPFQVLGSHQIELSGKTMTVIRAYQPSAEAVSVISPIDRKEYPMQSVHNPHFFECVINTPKLANYQLKIKEGEHERVIHDPYAFRSAKLTEFDLQLFGEGNHHRIYEKLGAHITEVDGIKGVYFAVWAPNARNVSILGNFNYWDGRKHQMRKGHTGVWELFIPDIGPGESYKYEVKNWEGHIYEKSDPYGYQQEVRPKTASIVVDLDSYTWNDQEWMEKRRHTDPLTQPISVYECHFGSWIHASAHEPAKLPNGETEPVVQVSELRPDARFLTYRELADRLVSYVKDLGYTHIEMLPVAEHPFDGSWGYQVTGFFAPTSRYGSAQDFMYFVDKCHENGIGVIVDWVPGHFPKDGHGLAFFDGTHLYEHPDPRKGEHKQWGTLVFDYGRNEVRNFLAANALFWFDKYHIDGVRVDAVASMVYHNYMRPDGEWVANKYGGVEYIEAADFLRQVNHLLFSYYPGVLSIAEESTSWPMVTWPTYVGGLGFNFKWNMGWMHDMLDYFEMDPWFRQFHQNNVTFSIWYHHTENYMLALSHDEVVHCKSSILGKMPGDNWQKFANVRALFAYMFTHPGKKTMFMGMELPQWGEWDVWGDLEWHLLEFDAHQGMKRFFRDLNHLYCSEPALYEQDCNEGGFEWIDCNDNNHSVVSFIRRAKDGKDFVVTVCNFTPQPHSHYRVGVPEPGFYTEIFNSDAGNYGGSNMGNLGGKWTDDWFFHDYQQSLDLCLPPLGVVVFQLDKKKTIAMIQESEDVETVEAKAKNAS

SEQ ID NO: 6020 - protein, 540 aa, Frankia sp. EAN1pec
MPKIIAFDEEARRGLERGMNQLADAVKVTLGPKGRNVVLEKKWGVPTITNDGVSIAKEIELEDPYEKIGAELVKEVAKKTNDVAGDGTTTATILAQALVREGLRNVAAGANPMGLKKGIEAAVERVSEELSSVAKDVETKEQIASTASISAGDPAIGSMIAEAMDKVGKEGVITVEESNTFGLELELTEGMRFDKGYISPYFVTDTDRMEAVLDDPYILIANSKISAVKDLLPILEKVMQAGKPLAIISEDVEGEALATLVVNKIRGTFKSTAVKAPGFGDRRKAMLTDIAVLTGGQVISEDVGLKLEGTTVDLLGRARKVVITKDETTIVEGAGDADQIAGRVNQIRNEIEKSDSDYDREKLQERLAKLAGGVAVIKVGAATEVELKEKKHRIEDAVSNAKAAVEEGIVAGGGVALLQAATSAFEKLDLSGDEATGANIVRLALEAPIKQIAFNSGLEGGVVVEKVRNLPTGHGLNAATGEYVDMVATGIIDPAKVTRSALQNAASIAGLFLTTEAVIADKPEKDKAPAMPGGGGEMDF

SEQ ID NO: 6021 - protein, 777 aa, Polaromonas sp. JS666
MHILCLGGGPAGLYFALLMKLQNPAHQVTVVERNRPFDTFGWGVVLSDQTLGNLRVADPVSAQLIGDAFNHWDDVEVFFKGRSVRSGGHGFCGIGRKRLLNILQERCLALGVELVFETDVQDDQAIAAQYQADLVVASDGLNSRIRNRYAETFKPDVELRACRFVWLGTRKTFDAFTFAFEKTEHGWFAAHAYKFDENTSTFIVETPEAVWKAHGLDQMSQEEGIAFCERLFAKYLDGNALMNNATHVRGSAIWIRFPRVVCERWVHHETVEGKRVPIVLMGDAAHTAHFSIGSGTKLALEDAIDLANEFSASAEEFNTGHGMDEVLQAYEARRSVEVLKIQNAARNSTEWFENVNRYSGMEIEQFAYSLLTRSQRISHENLRLRDAKWIESYESWLSGGPVIPPMLTPFKVRGTELKNRIVCSPMATYSAIDGVPQDFHLVHLGARALGGAAMVMVEMTSPNPEGRITPACTGLWNDEQTAAFKRIVDFVHGQSTAKIGMQLGHSGPKGSTQVGWEEMDEPLPAGGAHANWPVVSASAVPYGERNQTPQAMTHSHMETLKQQFVDATRRAAAAGFDWLELHCAHGYLLSAFITPLTNLRSDEYGGNIENRCRYPLEVFRAMRAVWPAHLPMSVRISAHDWAPGGNTPDDAIVVARLFKDAGCDVIDVSSGQTTRQAKPVYGRMYQTPFADRIRNEVGIQTIAVGAISEVDHVNSIIAAGRADLCALARPHLADPAWTLHEAAKLQSQAVDWPKQYLSGRDQLYREISKQQALAAQS

SEQ ID NO: 6022 - protein, 841 aa, Arabidopsis thaliana
MSIEKPFFGDDSNRGVSINGGRYVQYNVYGNLFEVSKKYVPPLRPIGRGASGIVCAAWNSETGEEVAIKKIGNAFGNIIDAKRTLREIKLLKHMDHDNVIAIIDIIRPPQPDNFNDVHIVYELMDTDLHHIIRSNQPLTDDHSRFFLYQLLRGLKYVHSANVLHRDLKPSNLLLNANCDLKIGDFGLARTKSETDFMTEYVVTRWYRAPELLLNCSEYTAAIDIWSVGCILGEIMTREPLFPGRDYVQQLRLITELIGSPDDSSLGFLRSDNARRYVRQLPQYPRQNFAARFPNMSVNAVDLLQKMLVFDPNRRITVDEALCHPYLAPLHEYNEEPVCVRPFHFDFEQPSLTEENIKELIYRESVKLIFLILAILFSLQFVFYPLNFISSSSQPLIKFSVSPVVSGSGSVHEPDQTELKHVVFGIAASAKFWKHRKDYVKLWWKPNGEMNGVVWLDQHINQNDNVSKTLPPIRISSDTSRFQYRYPKGLRSAIRITRIVSETVRLLNGTELEKNVRWIVMGDDDTVFFPENLVKVLRKYDHNQFYYIGSSSESHIQNLKFSYGMAYGGGGFAISYPLAKALEKMQDRCIQRYSELYGSDDRIHACMSELGVPLTKEVGFHQIDLYGKLLGLLSAHPLAPLVSIHHLDLVDPVFPNMGRVNAMRRFMVPAKLDSPSLAQQSICYDADHRWTVSVSWGYTVQIIRGVLSAREMVIPTRTFIDWYKQADERSYAFNTRPIAKSACQRPRVYYLSNALPDLALRRTASEYVRWYDMWEPECDWDMSDPSEFERVIVYKKPDPDRWNKHRAPRRDCCRVLPTTKNGTMVIDVGACKDDEFAEFLVK

SEQ ID NO: 6023 - protein, 204 aa, Lycopersicon esculentum
MARAQQRYRGVRQRHWGSWVSEIRHPLLKTRIWLGTFETAEDAARAYDEAARLMCGPRARTNFPYNPNMPQTSSSKLLSTTLTAKLHKCYMASLQMTKTSPQGQKLAKNATNVQESVINSYKMKQQMLVPKPSVLLTHHDHHEEAKVVNLGVGVIRKVEDQVLEGIPQFVKPLEDDHIEQMIEELLDYGSIELCSNVVPSHQIQ

SEQ ID NO: 6024 - protein, 519 aa, Lycopersicon esculentum
MPADPDNSSAMNDSTGSGEASVSSSGNQVVPLKESAKKKRNLPGMPDPDAEVIALSPTTLLATNRFVCEICSKGFQRDQNLQLHRRGHNLPWKLRQRSSNEVKKRVYVCPESSCVHHDPSRALGDLTGIKKHFCRKHGEKKWKCDKCSKKYAVQSDLKAHSKICGTREYKCDCGTLFSRAFCDALAQESAKTLPEKPPSTNEEPKTQAVASSSPPPSPPAPPPATESQPPPPPPAAPKSLMTPTVPPSTAVMSFASSVQNRELRENPVTNSAGAATKQVVEEAAVVASLTGNCSSSCSNGSSSSNVFGSLFASSTASGSLPSQAPVFSDIFRAMAPEHTLEMAPPSSTEPISLGLAMSHSSSIFRPAGQERRQYAPAPQPAMSATALLQKAAQMGAAATSSSFLRGIGVMSSTSSSNGHQEWSGRPSDANGASLAAGLGLGLPCDAGSGLKELMLGTPSVFGPKHPTLDLLGLGMAASVGPSPGLSALLTSMGSNLDMVTSAGSFGSADFSGKDLGRNS

SEQ ID NO: 6025 - protein, 722 aa, Rubrobacter xylanophilus DSM 9941
MRREEAIRAVVAGDHPDPFSFLGPHEEAGRRVVRTFLPGAARVRVLSAAGRPLGELERVHPEGFFSGPLSGNGRYRLRVLWEGGGEDELEDPYRFPPVLSDYDLYLFGEGNNHRIYRHLGAHPAEMDGVCGTAFAVWAPNARRVSVVGDFNLWDGRRHPMRNRNGVWEIFLPGVGPGALYKYEIKDAGGSLLPLKADPYGFFAEQYPGTASIVWDLSRHRWEDGEWMERRGSRNAPDAPMAIYEVHLGSWRRRPDGSHLTYRELAEELVPYVAGLGYTHVELLPPMEHPFGGSWGYQPVGLFAPTSRFGPPEDFKHLVDAFHRAGVGVIADWVPAHFPEDAHGLARFDGTHLYEHADPRKGRHPDWGTLIYNYGRNEVRNFLISNALFWLDEYHIDGLRVDAVASMLYLDYSRKEGEWVPNEHGGNENLEAIAFLRRMNEVVYGEAPGAFTVAEESTAWPMVSRPTYMGGLGFGYKWNMGWMHDTLQYMKEDPVHRRYHHDRITFGLLYAFNENFILPLSHDEVVHGKGSLLGRMPGDRWQRFANLRAYYGFMYGHPGKQLLFMGGEFAQEREWDSGSQLDWHLLEGGENRGVRDLVADLNALYRATPALHQVDFEPEGFEWVEGGDAEQSVVSFLRRARNPEDFVLVVSNFTPVVRHGYRVGVPASGPYAEVLNTDDPRYGGSGVANGELEAEEVPWHGRPFSLRLTLPPLATVFLRPRPV

SEQ ID NO: 6026 - protein, 484 aa, Listeria monocytogenes EGD-e
MEHNKLKPFPKDFLWGSASAAYQVEGAWDEDGKGPSVWDEFVRIPGTTFKETNGDVAVDNYHRYKEDVALMAEQGLKAYRFSVAWSRVIPHGNGEVNEAGLKFYDNLIDELLSYGIEPVVTLYHWDIPQGLQDEYGGWESRKVVEDFTNYAALLFERFNGRVKYWVTLNEQNVFISHGYKLAYHPPGVSDDKRMFAANHNANLANASAIAKFRELGTSGKIGPSFAYGPSYSIDANPANVLASENSEEFNAHFWMDVYTWGEYPTATWNWLEEHGLAPEILPGDTELLKKGKPDFMGVNYYRSMTHAFNGKDGVGSGKMNTTGEKGTSEETGVPGLYKNTNNPYLEKTNWDWDIDPTGLRIGLRRITNRYKLPIMITENGLGEYDSLTEDHKIHDEYRIEYIRAHALAIQEAITDGVEMLGYCTWSFTDLLSWLNGYQKRYGFVYVDRDENDEKELKRYKKDSFYWYKKTIEANGANLVEEQGK

SEQ ID NO: 6027 - protein, 487 aa, Oceanobacillus iheyensis HTE831
MSNKRNTLTTASGAPVGDNQNSITAGHNGPTLLQDFHLLEKLAHFNRERIPERVVHAKGAGAHGYFEVTNDEISKYTKADFLSEKGKRTDMFIRFSTVAGEQGSADTVRDPRGFAVKFYTEEGNYDLVGNNTPIFFIRDAIKFPDFIHTQKRNPQTHLKDKDMVWDFWSLSPESLHQVTYLHSDRGLPATLRHMNGYGSHTFKWVNAEGEAFWVKYHFISEQGIKNLDPALADKIAGENPDYHTEDLFNAIEEGDHPAWKLYVQIMPYEDAKTYKWDPFDVTKIWSKKDYPRIEVGRMVLDRNPENYFAEVEQAAFSPGQFVPGIEASPDKMLQGRLFGYSDAHRYRLGANHHSIPVNRPKNEVNNYQRDGFMSVDGNGGNKPNYEPNSVNGPTEDSEAKINPFEIYGQADSVTYDSDDHYTQAGDLYRLMSADEKDRLVEAFVGHMTPVTKDEIKLRQIEHIYKADAEWGERVAQGLGLQVPESVK

SEQ ID NO: 6028 - protein, 163 aa, Glycine max
RGDLFVHWEKGRDVFERLLIDSDWAINNGNWMWLSCSSFFYQYNRIYSPTTFGKKYDPNGDYIRHFLPVLKDMPREYIYEPWTAPKSIQTKANCIIGKDYPMPVVSHDSASKECRRKMGEAYALNKELNGLVSEDDLKNLRRKLDESEGQEAGAKRYKQQLIG

SEQ ID NO: 6029 - protein, 549 aa, Prosthecochloris aestuarii DSM 271
MTAKDILFDAEARAKLKVGVDKLANAVKVTLGPAGRNVLIDKKFGAPTSTKDGVTVAKEVELEDAFENMGAQMVREVSSKTSDVAGDGTTTATVLAQAIYREGLKNVAAGARPIDLKRGIDLAVKDVVAELREISRDITGKKEIAQVGTISANNDPEIGELIAEAMDKVGKDGVITVEEAKGMDTELTVVEGMQFDRGYLSPYFVTNSEKMDADLEDPYILIYDKKISNMKELLPVLEKTAQSGRPLMIIAEDIEGEALATLVVNKLRGTLKVCAVKAPGFGDRRKAMLEDIAILTGGTVISEEKGYKLENATISYLGQAASITVDKDNTTIVDGKGQADDIKARIGEIKGQIEKSTSDYDTEKLQERLAKLSGGVAVLNIGASTEVEMKEKKARVEDALHATRAAVQEGIVAGGGVALIRAAKALDATNPENEDQKTGVDIIRRALEEPLRQIVANTGTTDGAVVVEKVKNSEGDYGFNARTEEYMNLIEAGVVDPTKVTRTALENAASVAGILLTTEAAITDIKEDGSDMPPMPGGMGGMGGMGGMM

SEQ ID NO: 6030 - protein, 329 aa, Campylobacter coli RM2228
MKDGALTVISPIEGTPADKAGIKSGDIILKINDEATLGINLNDAVDKMRGKPKTQITLTIFRKGATKPFDVTLTRDIIKVESVYAKLIEDENILYLRVTNFDKNVVDMTSKELKKHPNVKGVILDLRNNPGGLLNQATGLVNLFVDKGVIVSQKGRVTSENQEYTANPKNKISDSSLVVLVNGGSASASEIVSGALQDLKRAIIVGENTFGKGSVQQIIPINETEALRLTIARYYLPSGRTIQAVGVKPDIEVFPGKVNTQEDGFNIKESDLKQHLESELEKLDKNEKKEDKKEQKNDKNIITQKQINDDAQLKSAIDTIKILNIKQGQ

SEQ ID NO: 6031 - protein, 547 aa, Haemophilus ducreyi
MAIKDVKFGNDARVKMLKGVNILADAVKVTLGPKGRKVVLDKAYGAPTITKDGVSVAREIELEDKFENMGAQMVKEVASKANDVAGDGTTTATVLAQSIVSEGLRAVAAGMNPMDLKRGIDKAVAAVVEELKAISKPCETSKEIEQVGTISANSDETVGKLIAQAMEKVGKEGVITVEDGTGLDDALDVVEGMQFDRGYLSPYFINKPEAGTVELDNPYIILVDKKISNIREILPVLEAVAKAGKPLLIIAEDVEGEALATLVVNTMRGIVKVAAVKAPGFGDRRKAMLQDIAILTAGTVISEEIGMELEKATLEELGQAKRVVITKDNTTIIDGIGDEAQIKARVVQIRQQIEDSTSDYDKEKLQERVAKLAGGVAVIKVGAATEVAMKEKKDRVDDALHATRAAVEEGIVPGGGVALVRAANKVSATLTGDNEEQNVGIKLALRAMEAPLRQIVENSGEDASVVARDVKDGSGNFGYNATTEEYGDMLEMGILDPTKVTRSALQFAASIAGLMITTECMITDLPKEDKLDAQAAMGGMGGMGGMM

SEQ ID NO: 6032 - protein, 550 aa, Rickettsia prowazekii str. Madrid E
MTTKLIKHGSKAREQMLEGIDILADAVKVTLGPKGRNVLIEQSFGAPKITKDGVTVAKSIELKDKIKNAGAQLLKSAATKAAEVAGDGTTTATVLARALAREGNKLVAAGYNPMDLKRGMDLAVNAVVEEIKRSSKKINSQEEIAQVGTISSNGDKEIGEKIAKAMEEVGKEGVITVEEAKNFSFDVEVVKGMMFDRGYLSPYFVTNSEKMVAELENPFILLFEKKLSNLQPMLPILEAVVQSQRPLLIIAEDVEGEALATLVVNRLRGGLKVAAVKAPGFGDRRKAMMEDIAILTKGELITEDLGMKLENVNIKNLGTAKRVTISKENTVIVDGNGDKKNIEDRVLQIKSQIAETTSDYDKEKLQERLAKLSGGVAVLKVGGATEVEVKERKDRVEDALAATRAAVEEGVVAGGGVTLLHASQTLTKLKVENKDQQAGIEIVIEALKDPLKQIVKNAGENGGVVVGKLLEHNDKNYGFNAQDMQYVDMIKAGIIDPAKVVRTALQDAASVASLIITTETLIVDEPSDKEEPMPMRGGMGGMGGMGGMDF

SEQ ID NO: 6033 - protein, 159 aa, Zea mays
MSLIRRGNAFDPFSLDLWDPFEGFFPFGSGGVRSLVPSLPRTSSETAAFAGARIDWKETPEAHVFKADVPGLRKEEVKVEVEDGNVLQISGERNKEHEEKNDRWHRVERSSGKFLRRFRLPDNAKADQIKASMENGVLTVTVPKEEAKKADVKNVQITG

SEQ ID NO: 6034 - protein, 686 aa, Bacillus subtilis subsp. subtilis str. 168
MSDDQNKRVNEHSKDEQLEQYRTDNSGKKMTTNQGLRVSEDEHSLKAGVRGPTLMEDFHFREKMTHFDHERIPERVVHARGFGVHGFFQVYEPMTEYTRAKFLQDPSVKTPVFVRFSTVAGSKGSADTVRDARGFATKFYTEEGNYDLVGNNIPVFFIQDAIKFPDLVHAFKPEPHNEMPQAATAHDTFWDFVANNPESAHMVMWTMSDRGIPRSYRMMEGFGVHTFRFVNEQGKARFVKFHWKPVLGVHSLVWDEAQKIAGKDPDFHRRDLWETIENGGKVEYELGVQMIDEEDEFKFDFDILDPTKLWPEELVPVKIIGKMTLNRNQDNVFAETEQVAFHPGNVVPGIDFTNDPLLQGRLFPYTDTQLIRLGGPNFHEIPINRPVCPFHNNQYDGYHRMTINKGPVAYHKNSLQNNDPSPATAEEGGYVHYQEKVEGKKIRQRSDSFNDYYSQAKLFWNSMSPVEKQHIISAFCFEVGKVKSKDVQRQVVDVFSNVDADLAEEIAKGVGVAAPAKRKASKENLTSPALSQARTVKTASTRKVAVLAGNGFHEKELQTVLEALKQEGITVDIISQNLGYMTSGSGQQLEASGTFLTVDSVLYDAVYAAGGLELKDNKQAMAFIREAYNHYKAIGAANEGIDLLQSSVGTTEGLGIVTAKDEPDYTAFSKAFIDAVAAHRHWDRRI

SEQ ID NO: 6035 - protein, 481 aa, Arabidopsis thaliana
MESVPESVPSPNSNTPSIPPPVNSVPPFLSKTYDMVDDPLTNEVVSWSSGNNSFVVWSVPEFSKVLLPKYFKHNNFSSFVRQLNTYGFRKVDPDRWEFANEGFLRGRKQLLKSIVRRKPSHVQQNQQQTQVQSSSLGACVEVGKFGIEEEVERLKRDKNVLMQELVRLRQQQQATENQLQNVGQKVQVMEQRQQQMMSFLAKAVQSPGFLNQLVQQNNNDGNRQIPGSNKKRRLPVDEQENRGDNVANGLNRQIVRYQPSINEAAQNMLRQFLNTSTSPRYESVSNNPDSFLLGDVPSSTSVDNGNPSSRVSGVTLAEFSPNTVQSATNQVPEASLAHHPQAGLVQPNIGQSPAQGAAPADSWSPEFDLVGCETDSGECFDPIMAVLDESEGDAISPEGEGKMNELLEGVPKLPGIQDPFWEQFFSVELPAIADTDEILSGSVENNDLVMEQEPNEWTRNEQQMKYLTEQMGLLSSEAQRK

SEQ ID NO: 6036 - protein, 277 aa, Corynebacterium sp.
TVPSIVLNDGNSIPQLGYGVFKVPPADTQRAVEEALEVGYRHIDTAAIYGNEEGVGAAIAASGIARDDLFITTKLWNDRHDGDEPAAAIAESLAKLALDQVDLYLVHWPTPAADNYVHAWEKMIELRAAGLTRSIGVSNHLVPHLERIVAATGVVPAVNQIELHPAYQQREITDWAAAHDVKIESWGPLGQGKYDLFGAEPVTAAAAAHGKTPAQAVLRWHLQKGFVVFPKSVRRERLEENLDVFDFDLTDTEIAAIDAMDPGDGSGRVSAHPDEVD

SEQ ID NO: 6037 - protein, 252 aa, Brassica napus
  misc_feature (14)..(14): Xaa can be any naturally occurring amino acid
MGRGRVELKRIENXINRQVTFAKRRNGLLKKAYELAVLCDAEVSLIVFSNRGKLYEFCSTSNMLKTLERYQKCSYGAPRVRNKPAKELENSYREYLKLKGRYENLQRQQRNLLGEDLGPLNSKELEQLERQLDGSLKQVRCIKTQYMLDQLTDLQGKEHILLEANRALSMKLEDMIGVRSHQIGGAWEGGDQHNVAYGHHQAQSQGLFQSLECDPTLQMGYNHPVCSEQMAVTAQGQSSQPGNNGYIPGWML

SEQ ID NO: 6038 - protein, 515 aa, Aspergillus nidulans FGSC A4
MVHLASIKKDDDFEPVVNRVDSIKLDTIEEDDYSATVYGTRFATQQLPHAEMPDREMPREVAYRMIKDELSLDGNPMLNLASFVTTYMEDEAEKLMAESFSKNFIDYEEYPQSAEIQNRCVNMIARLFNAPTDSDTDHPMGTSTVGSSEAIMLGTLAMKKRWQNKRKAEGKDYSRPNIVMNSAVQVCWEKAARYFDVEERYVYCTEERYVIDPQQAVDLVDENTIGICAILGTTYTGEYEDVKAINDLLVERGLDCPIHVDAASGGFVAPFIHPTLQWDFRLEKVVSINVSGHKYGLVYPGVGWVVWRSPEFLPKELIFNINYLGAEQASFTLNFSKGASHVIGQYYQMIRLGKRGYRSVMVNITRIADYLADQLEQLGFIIMSQRRGRGLPLVAFRLPADRADETFDEFAIAHQLRERGWIVPAYTMAPHSNNLKLMRVVVREDFSMSRCDQLLSDIKLALKSLREMDQAMLERYTQHVRSHTTKSHRAKHTHPHYKNETHSLQGRTGKTHGVC

SEQ ID NO: 6039 - protein, 222 aa, Glycine max
MGRGKIEIKRIENTTNRQVTFCKRRNGLLKKAYELSVLCDAEVSLIVFSSRGRLYEYSNNNIRSTIERYKKACSDHSSASTTTEINAQYYQQESAKLRQQIQMLQNSNRHLMGDALSTLTVKELKQLENRLERGITRIRSKKHEMLLAEIEYFQKREIELENENLCLRTKITDVERIQQVNMVSGPELNVIQALASRNFFNPNMLEGGTVYPHSDKKILHLG

SEQ ID NO: 6040 - protein, 480 aa, Azoarcus sp. EbN1
MTEHSKLTTAAGCPVVDNQNVMTAGPRGPQLLQDVWFLEKLAHFDREVIPERRMHAKGSGAYGTFTVTNDITRYTRAKLFSELGKKTDLFVRFSTVAGERGAADAERDIRGFAVKFYTEEGNWDLVGNNTPVFFMRDPLKFPDLNHAVKRDPRTNLRSARNNWDFWTSLPEALHQVTIVMSDRGIPASYREMHGFGSHTFSLINANNERYWVKFHMESLQGIRNLTDAEAEAAIGKCRETHQRDLFDAIERGDFPKWKFCVQVMPEADAAKVPYHPFDLTKVWPHKDYPLIEVGILELNRNPANYFAEVEQAAFNPANVVPGIGFSPDKMLQGRLFSYGDAQRYRLGVNHVHIPVNAPRCPAHSYHRDGAMRVDANYGATLGYEPNSYGEWQEQPDFREPPLALGGAADHWDFRKDDDDYYSQPRALFRLMTPEQRQTLFENTARAMGDAPLEIKQRHVENCSRCDPAYGAGVAKALDLG

SEQ ID NO: 6041 - protein, 750 aa, Salmonella enterica subsp. enterica serovar Typhi Ty2
MSHNEKSPHQSPVHDTRESQPGLDSLAPSDGSHRPTPEPTPPGAQPTAPGSLKAPETANDKLTALDAFRKGSENYALTTNQGVRIADDQNSLRAGSRGPTLLEDFILREKITHFDHERIPERIVHARGSAAHGYFQPYKDLSDITKAAFLCDPQKITPVFVRFSTVQGGAGSADTVRDIRGFATKFYTEEGIFDLVGNNTPIFFIQDAHKFPDFVHAVKPEPHWAIPQGQSAHDTFWDYVSLQPETLHNVMWAISDRGIPRSYRTMEGFGIHTFRLINAQGKATFVRFHWKPLAGKASLVWDESQKLTGRDPDFHRRDLWEAIEAGDFPEYELGLQLIAEEDEFKFDFDLLDPTKLIPEELVPVQRVGKMVLNRNPDNFFAENEQAAFHPGHIVPGIDFTNDPLLQGRLFSYTDTQISRLGGPNFHEIPINRPTCPYHNFQRDGMHRMDIDTNPANYEPNSINDNWPRETPPAPKRGGFESYQERVDGNEIRERSPSFGEYYSHPRLFWLSQTPIEQQHIIDAFSFELGKVARAYIRERVVDQLAHIDVTLAQGVAHNLGFALTHEQTQIAPPPDVNGLKKDPALSLYAVPDGDVKGRVVAILLNDKVNAAELLTIFQALKAKGVHVKLLYSRMGEVTADDGSTLTIAATFAGAPSLTVDAVIVPCGNIADIESCGDARYYLLEAYKHLKPIALAGDARRFKALLNIDSQGEEGLVEADNVDHHFMDTLLTLMAAHRVWSRAGKINAIPA

SEQ ID NO: 6042 - protein, 375 aa, Psychrobacter arcticus 273-4
MPNTSTLFSSIQLGPYTLKNRIVLPPLTRCRSTQPGNIPNDLMASYYAQRASAGFMVTEGTQIEPRGQGYAWTPGIHSPAQIEGWKKVTQAVHAKGGIIFAQLWHVGRVSHTNLQPNQNQPIAPSAITANNVKVFIETGPGEGALADPSEPRALSTEEVGELVAMYAQAARNALEAGFDGVELHCANGYLVNQFISEHSNTRDDQYGGSLTNRLRFLKEVVAAVSDVVGADRLGVRFAPLFASTNETRVYLGLVEADPHHTYIEAIKVLEQAGIAYLSIAEADWDNAPDLPEPFYQAVRAEFSQRIIYAGKYTVQKSVDILSKGYGDLFAFGRPFIANPDLPERIANNWSLNEVDPATMYGGTAIGYSDYPRYQE

SEQ ID NO: 6043 - protein, 243 aa, Mycobacterium fortuitum
MNTQPNVFTDVFSEAKLGPVTLRNRIIKAATFEASTPNALVTEDLINYHRLPAAGGVGMTTVAYCAVSPGGRTDGWQIWMRPEAVPGLTKLTEAIHAEGAAISAQIGHAGPVANSRTNKAKALAPVRFFNPLSMRFAKKASIDDIRDVTEAHANAARLAIDSGFDAVEVHLGHNYLASSFLSPLINRRTDEFGGSLENRAKVARGVVRAVRDAVDKHGDRKIAVIAKLNMSDGIRGGIPIDES

SEQ ID NO: 6044 - protein, 156 aa, Prunus dulcis
MDVRIAGLDSPLFSTLQHIMDFTDEPDKSFNAPTRTYVRDAKAMASTPADVKEYPNSYVFVVDMPGLKSGDIKVQVEDDNVLLITGERKREEEKEGAKYVRMERRVGKFMRKFVLPENANVEAISAVCQDGVLTVTVEKLPPPEPKKSKTIEVKIA

SEQ ID NO: 6045 - protein, 257 aa, Trichodesmium erythraeum IMS101
MDIYRLPALSDNYIFLLHDPNQNIGAVVDPAEVRPVIDKLESLGAELVTIFNTHHHFDHVGANKQLIQKFPQLKVYGGVEDRGRIPGQQVFLQEGDRVHFADRVGEVLFVPGHTIGHIAYYFPSVAFGETGELFCGDTLFAGGCGRLFEGTPAQMVDSLNKLRNLPDNTRIWCAHEYTLKNLQFAITVDKDNTDLQSRWAEVKTARGRNEATVPSMIGVEKRTNPFLRWEQPALQLAVQSQDPVQTFARLRGRKDRF

SEQ ID NO: 6046 - protein, 229 aa, Arabidopsis thaliana
  misc_feature (198)..(198): Xaa can be any naturally occurring amino acid
MGRGKIVIRRIDNSTSRQVTFSKRRNGLLKKAKELAILCDAEVGVMIFSSTGKLYDFASSSMKSVMDRYSKSKEEPCQLGSSASEIKFWQREAAMLRQQLHNLQESHRRKMMGEELSGLTVKELQNLENQLEISLHGVRMKKDQLLMGEIQELNRKGNLIHQENVELYKKVYGTQDDNETNRDSVLTNGLGIGEDLQXACESPAKPATATATTLQGIFRNYKIGIAIAL

SEQ ID NO: 6047 - protein, 257 aa, Magnetospirillum magnetotacticum MS-1
MAKIIVEQIPVLSDNYVYLAHEPLGGVTAAIDPAVSEPVLERLAARGWTLTHILNTHHHGDHTGANLDLARRTGCAVVGAARDSGRIPGITLEVSDGETFMLGHAAVTVLDVPGHTSGHVAYWFADSHVLFCGDTLFSLGCGRLFEGSAEEMWASLKKLRDLPSDTMAYPAHEYTAANGRFAKLVERDNQALKARLDEVERLRAGNRPTVPVRLAEERAVNPFLRADTASVARAVGMEPGADPAQVFAELRRRKDVF

SEQ ID NO: 6048 - protein, 727 aa, Xylella fastidiosa Dixon
MRLRILNSLKVALLTLAITTAPALMAKSDSASPQVATPDQTTATKLVYGLLSDSRYAYRLRPLDEAMSKDIFKRYLEALDSNKQFFTEADIDNFSAFKAEIPDSIRNGNLKPAFSIFAVYKKRVAERVTYANQLLKQNFDFSGQEKYEYDRSKAPWPASPQDLDDIWRRSTMNDWLRLKLAGKKPEDIRKTLKKRYANLLKTVNELKGEDVFQLYLNAYTNSIDPHTDYFTPRTADAFNQQMSLSLEGIGAQLQKQEDMVIIREVIPGGPTALDGTLKPGDRIVGVGQGKGGPIEDVIGLRIDDVVSKIRGKKDTQVRLEYIPAESGIDGAHRIVTLTRQKVRLAEQAAKGETITIEGSNGDAQRRIGIIKLPTFYEDFEGRRRNVANYTSATRDVAKLLTNFKTDKVDGVVLDLRNNGGGSLDEAIQLTGLFIEQGPVVQVRESGGRVTVNGDRDDKVTWDGPLAVLINRGSASASEIFAGAIQDYGRGLVIGETSFGKGTVQNIVDLDRWPANESRRFGQVKLTIAQFFRISGSSTQHKGVLPDIAFPASVGATEFGESTYENALPWTQIASLQHTQYGNFSPILSKLKKIHISRTANDIEFKWWQEDVHNFSLEKEKKYVILNEAKRLAERRKQETQHRERQTIRKNLGLQLDPLSEESDDGLIGNERDIAKDTAREKLADKRPDPLLHESAAILTDTINLLEKDQILSAQVLLQSTTPGHWAN

SEQ ID NO: 6049 - protein, 420 aa, Zygosaccharomyces rouxii
MATHEEFIRTQVFGTVFEITNRYTDLNPVGMGAFGLVCSATDTLVGQPVAIKKIMKPFSTAVLAKRTYRELKLLKHLRHENLICLQDIFLSPLEDIYFVTELQGTDLHRLLQTRPLEKQFVQYFLYQILRGLKYVHSAGVIHRDLKPSNILINENCDLKICDFGLARIQDPQMTGYVSTRYYRAPEIMLTWQKYDVEVDIWSAGCIFSEMIEGKPLFPGKDHVHQFSIITDLLGSPPRDVINTICSENTLKFVTSLPHRDPVPFQERFKTVEPDAVDLLRRMLVFVPKKRITAADALVHPYLAPYHDPTDEPTAEAQFDWDFNDADLPVDTWRVMMYSEILDFHKIGGGDGQIDTNAAFDDQVAAAHAAAMAQHHHQTQQQSSGKHTNPTTSSSAATITVTVPIAITMPSLIMVIKRFTT

SEQ ID NO: 6050 - protein, 375 aa, Bradyrhizobium japonicum USDA 110
MKFPALFKPLQVGPYELAHRVAMAPLTRMRAERDSFSPRPLNAEYYGQRATPGGLLIAEASPVLSHGRGNPATPGIYSEAQIAGWRKVTDAVHAKGGIIFLQLWHVGRVSHSSFHGGELPVSASAIAIKAEGMKAMTAEGKIADYETPRALETDEVKGIVEAFRQGAKNALAAGFDGVEIHGANGYLLEQFLQSRSNQRTDQYGGGIENRARLLLDVTQAAIDVWGANRVAVRLSPHGIANDSGEPDPMPLYTHVVKALDKLGLAYLHFIEPRSSGAGRADVHWENVPSAMVLFRPLYSGVLMTAGGFTGETANAAIADGHADIIAFGRIFISNPDLPRRLRHDYPITPYNRATFYGGEEKGYTDYPAYDELTPA

SEQ ID NO: 6051 - protein, 448 aa, Zea mays
MSAAATKVKRRVGKYELGRTIGEGTFAKVRFAKNTETGEPVAVKILDKEKVLRHKMAEQIKREISTMKLIKHPNVVRIYEVMGSKTKVYIVLEYVTGGELFDTIANQGRMREGEARSYFQQLINAVDYCHSRGVYHRDLKPENLLLDSYGNLNVSDFGLSALSQQIKDDGLLHTTCGTPNYVAPEVLEDQGYDGAMADLWSCGVILFVLLAGYLPFEDSNLMTLYKKISNAEYTFPPWTSFPAKRLLTRILDPNPMTENSCDFRITIPEILEDEWFKKGYKRPEFDEKYDTPLDDVDAVFNDSEEHHVTEKKEEEPVALNAFELISRSAGLNLGNLFDSEQEFKRETRFTSKCPPKEIIRKIEEAAKPLGFGVQKKNYKLRLEKVKAGRKGNLNVATEILQVAPSLHMVQVRKAKGDTLEFQKFYKNLSKTLKDVVWKSEDLQMRAAS

SEQ ID NO: 6052 - protein, 453 aa, Magnetospirillum magnetotacticum MS-1
MTIAKAADAAPKGGRQFPKDFFWGASTAAYQIEGAYDTDGRGMTIWDKFTADGKIMDGSSAKVACDHYHRYPEDIALMKAAGFNAYRFSLAWPRIIPAGTGAINPKGLDFYDRLVDKILEAGIKPMACLYHWDLPQPLEDKGGWQGRDIVGPFAEYARIATKRLGDRVKDWYMLNEPNVVAIIGYGIGEHAPGYKLGEDGILKALHHQNLAQGTALRAIRAEHSDAVLGTVINLQPCRSEDDDPKNRAAAIRWDAVWNRVPLDGVMRGAIPDVLAEKMKHIVKPGDLETIKFPIDMLGINYYSRMTMKHEEGHPFDVFWGDAHCDRWTAMAWPVQPDGLYDLLREFKELYGNPAVFIAENGAAYDDVVAPDGQVHDAERVAFLKDHVSEVARAVKDGCNVKGYLAWSLLDNFEWAYGLSKRFGLVRVDYDTLKRTPKDSYKWFAEVIKSGRVD

SEQ ID NO: 6053 - protein, 321 aa, Parasitella parasitica
MVVDYLTLDRTEDKMPLRGFGCWKIEKKDAENTIYQAIKIGYRLFDGACDYGNEVEVGRGINKAIKEGLVKREELFIVTKLWNTFHSKQHVRTAFDRQLKDWGLEYFDLYLIHFPIPLQYVDPAVSYPPEWYVPHADKLNFERSPIHECWAEMEKLVQAKLTRNIGVANFNCQAILDLLSYAKIKPAVLQIEIHPLLPQERLVKWVQEQGIQVTAYSSFGPTSYVDLCESGKTYSSLLANADVKSIANKHNANTGQILLRYALDRNIAVIPKSVHEDRMKSNLDILNIQLDQDDRKILNSLKTNQRFNDPMIFGFGLPLFD

SEQ ID NO: 6054 - protein, 485 aa, Nitrosomonas europaea ATCC 19718
MDDAKKKLTTSAGAPVADNQNVMTAGPRGPMLLQDIWFLEKLAHFDREVIPERRMHAKGSGAYGTFTVTHDITRYTRANIFSQIGKKTDLFVRFSTVAGERGAADAERDIRGFAIKFYTEEGNWDLVGNNTPVFFLRDPLKFPDLNHAVKRDPRTNLRSARNNWDFWTLLPEALHQITIVMSDRGLPATYRHMHGFGSHTFSFINARQERYWVKFHFRTQQGIKNLTDAEAEALVGKDRESHQRDLYESIENGEFPRWTLFVQIMPESDAASLPYNPFDLTKVWPHKDYPLIEVGVMELNRNPENYFAEVEQAAFNPASVVPGISFSPDKMLQGRLFSYGDAQRYRLGVNHYQIPVNAPRCPFHHYHRDGAMRVDGNQGSTLGYEPNSYQEWQQQPEYAEPPLTLEGAAAHWNHRVDEDYYIQPGNLFRLMNSSQQQVLFDNTARSIGEAPREIQIRHITNCLKADRAYGEGVARALGIALSEVD

SEQ ID NO: 6055 - protein, 76 aa, Zea mays
RSTLPALELCYSMSQRLQLDDEKPPQQHEGAAPDAATPSPPVTNWKISSPGDSPDEVKARLKYWAQAVACTVRLCS

SEQ ID NO: 6056 - protein, 254 aa, Cucumis sativus
MSCYEEEDEESGVVGLRRSSSSSRTGRGKIEIKRIENTTNRQVTFCKRRNGLLKKAYELSVLCDAEVALIVFSSRGRLYEYANNSVRATISRYKKAYSDPSTAMTVSEANTQFYQQESAKLRAQIGNLQNLNRHLLGESISSLSVKDLKSLEVKLEKGISRIRSRKNELLFSEIEYMQKREIELHTNNQLIRAKIAETERSQQNTNASNNNGIATRRGEEGSMGTNLEDNNHHQYDSTNYFDPHHNHPISLQLV

SEQ ID NO: 6057 - protein, 2471 aa, Candida albicans
MSMNFFNSSEPARDHKPDQEKETVMTTEHYEFERPDVKAIRNFKFFRSDETETKKGPNLHISDLSPLESQSVPPSALSLNHSIIPDQYERRQDTPDPIHTPEISLSDYLYDQTLSPQGFDNSRENFNIHKTIASLFEDNSSVVSQESTDDTKTTLSSETCDSFSLNNASYLTNINFVQNHLQYLSQNVLGNRTSNSLPPSSSSQIDFDASNLTPDSIPGYILNKKLGSVHQSTDSVYNAIKIPQNEEYNCCTKASASQNPTNLNSKVIVRLSPNIFQNLSLSRFLNEWYILSGKHSSKEHQIWSNESLTNEYVQDKTIPTFDKESARFRPTLPINIPGILYPQEIINFCVNSHDYPLEHPSQSTDQKRFAMVYQDNDYKTFKELSMFTLHELQTRQGSYSSNESRRKSSSGFNIGVNATTTEAGSLESFSNLMQNHHLGATSTNGDPFHSKLAKFEYGVSKSPMKLIEILTDIMRVVETISVIHELGFVHNGLTSSNLLKSEKNVRDIKITGWGFAFSFTENCSQGYRNKHLAQVQDLIPYMAPEVLAITNSVVDYRSDFYSLGVIMYELVLGILPFKNSNPQKLIRMHTFENPIAPSALAPGWISEKLSGVIMKLLEKHPHNRYTDCHSLLHDLIEVKNMYISKLLDSGETIPNSNLNLSDRQYYLTKENLLHPEKMGITPVLGLKESFIGRRDFLQNVTEVYNNSKNGIDLLFISGESGRGKTIILQDLRAAAVLKQDFYYSWKFSFFGADTHVYRFLVEGVQKIITQILNSSEEIQNTWRDVILTHIPIDLSILFYLIPELKVLLGKKYTSIYKHKIGMGMLKRSFKEDQTSRLEIKLRQILKEFFKLVAKQGLSIFLDDVQWCSEESWRLLCDVLDFDSSGEVRESYNIKIVVCYALNADHLENVNIEHKKISFCRYAKQSHLNLREFSIPHIPLEDAIEFLCEPYTRSHDHECNSKKSDVIANLNCTNEYPQNTCKVIPSIIQELYQSSEGNVLLLIFLTRMTKLSGKVPFQRFSVKNSYLYDHLSNSNYGTTRKEILTNYLNMGTNSDTRALLKVAALISNGSGFFFSDLIVATDLPMAEAFQLLQICIHSRIIVPTSTYYKIPMDLIASDQTPFDLTDDNIWKLATLCSYKFYHDSICTHIIKELNASGEFKELSRLCGLRFYNTITKERLLNIGGYLQMATHFRNSYEVAGPEENEKYVEVLVQAGRYAISTYNMKLSQWFFNVVGELVYNLDSKTQLKSVLTIAENHFNSREFEQCLSVVENAQRKFGFDRLIFSIQIVRCKIELGDYDEAHRIAIECLKELGVPLDDDDEYTSENSLETCLGKIPLSVADIRGILKIKRCKNSRTLLMYQLISELIVLFKLQGKDKVRRFLTAYAMSQIHTQGSSPYCAVILIDFAQSFVNETTTSGMLKAKELSIVMLSLINRAPEISLSYVQSIYEYYFSCHAVFFESIEKMSDLIHPGNASSHCTRSSYYSSFHLIVNVSKIFFSCMNGESFKMFSTFKCKSYLTGDPQMPEMDNFLYDSEMLLAGHSELNEFMRKYQSFNQTSVGKFCYYLIVLLVMSREHRFDEAADLVLKVLEDLSEKLPVSFLHHQYYLICGKVFAYHQTKTPESEEQVERILARQFERYELWASTNKPTLLPRYLLLSTYKQIRENHVDKLEILDSFEEALQTAHKFHNVYDMCWINLECARWLISINQKRHRISRMVKQGLKILRSLELNNHLRLAEFEFDEYIEDEDHRNKWAGLTNNPTLDTVTTWQQQNMPDKVSPCNDKQLVHGKQFGKKEFDSHLLRLHFDGQYTGLDLNSAIRECLAISEALDENSILTKLMASAIKYSGATYGVIVTKKNQETPFLRTIGSQHNIHTLNNMPISDDICPAQLIRHVLHTGETVNKAHDHIGFANKFENEYFQTTDKKYSVVCLPLKSSLGLFGALYLEGSDGDFGHEDLFNERKCDLLQLFCTQAAVALGKERLLLQMELAKMAAEDATDEKASFLANMSHEIRTPFNSLLSFAIFLLDTKLDSTQREYVEAIQSSAMITLNIIDGILAFSKIEHGSFTLENAPFSLNDCIETAIQVSGETILNDQIELVFCNNCPEIEFVVGDLTRFRQIVINLVGNAIKFTTKGHVLISCDSRKITDDRFEINVSVEDSGIGISKKSQNKVFGAFSQVDGSARREYGGSGLGLAISKKLTELMGGTIRFESEEGIGTTFYVSVIMDAKEYSSPPFSLNKKCLIYSQHCLTAKSISNMLNYFGSTVKVTNQKSEFSTSVQANDIIFVDRGMEPDVSCKTKIIPIDPKPFKRNKLISILKEQPSLPTKVFGNNKSNLSKQYPLRILLAEDNLLNYKVCLKHLDKLGYKADHAKDGVVVLDKCKELLEKDEKYDVILMDIQMPRKDGITATRDLKTLFHTQKKESWLPVIVALTANVAGDDKKRCLEEGMFDFITKPILPDELRRILTKVGETVNM

SEQ ID NO: 6058 - protein, 39 aa, Zea mays
YHVTNFFAPSSRFGTPEELKSLIDRAHELGLLVLMDVVH

SEQ ID NO: 6059 - protein, 495 aa, Zea mays
MTMDPTKFRPSSSHDTTVTTTNAGAPVWNDNEALTVGPRGPILLEDYHLIEKVAHFDRERIPERVVHARGASAKGFFESTHDVTSLTCADFLRAPGVRTPVIVRFSQVIPEPGSGRTIRDARGFAVKFYTREGNWDLLGNNFPVFFIRDGIKFPDVIHAFKPNPRSHVQEYWRVFDFLSHLPESLHTFFFLFDHVGVPSDYRHMEGFGVNTYTFVSAAGKAQYVKFHWKPTCGERSILTDEEARVGGRNHSHTQDLYDSIAAEGSFPEWTLYVQVMDPAQQEQYDFDPLDDTKTWPEDLLPLRPVGRLVLDRNVDNFLNENEQLAFGPGLVVPGIYYSDDKMLQCRVFAYADTQRYRLGPNYLMLPVNAPRCGTHNNHYDGAMNLMHRDEEVDYYPSRHARRCGRAAPTPLPPRPVAGRREKATIRKPNDFKQPGERYRSWDADRQDRFVKAIRRLARTPKRQPELRSIWIDLLAKVDASLGMKIATRLNMKANM

SEQ ID NO: 6060 - protein, 359 aa, Kineococcus radiotolerans SRS30216
MDLFSPVALGDLQLSNRLVMAPLTRMRSGSEGVPGPLVAEHYAQRASLGLIVTEGTYLNGESQGFVGQPGIVTDAQQEGWRAVAEAVHAGGGKIVMQVMHAGRVTHPETTGGDRIVGPSAIAIQGETHTPTGKQPYPVPHALTTEEVAGVVADFVAASRRAVDAGLDGVEIHSANGYLLHEFLAPSSNHRDDQYGGSPENRARLVVEIATAVAAEIGAGRVGVRISPEHNIQDALETDPADVEATYSALVEGLRPLGLAYLSVLHADPSGGLVQGLRKQFEGHLMVNSGFGVVTSRQDALDLVAEGTADSVAVGRMAIANPDLVRRWQEDLPENEPNPATFYADGAEGYTDYPFVDAPA

SEQ ID NO: 6061 - protein, 246 aa, Cucumis sativus
MAPREKAVAVKPSVGNVKEVHFRGVRKRPWGRYAAEIRDPSKKSRVWLGTFDTAEEAARAYDSAARDFRGVKAKTNFPLPSDDQLLNLNNKINNINNNQSPSQSSTVESSSREQALMVDSSPLNLNLGHGIGGLTNAGPISFPFQRYQIPMIGEVFTRGIPPSNHVLYFDAALRAGMINSHPNQRLHFDRIREAVSDFRREFAGSGVQSDSDSSSVVDMNGQDLKPRGGSGGRLDLDLNFPPPESA

SEQ ID NO: 6062 - protein, 496 aa, Zea mays
MTMDPTKFRPSSSHDTTVTTTNAGAPVWNDNEALTVGPRGPILLEDYHLIEKVAHFARERIPERVVHARGASAKGFFECTHDVTSLTCADFLRAPGVRTPVIVRFSTVIHERGSPETIRDPRGFAVKFYTREGNWDLLGNNFPVFFIRDGIKFPDVIHAFKPNPRSHVQEYWRVFDFLSHLPESLHTFFFLFDDVGVPSDYRHMEGFGVNTYTFVSAAGKAQYVKFHWKPTCGVRCILTDEEAALVGGRNHSHATQDLYDSIAAGSFPEWTLYVQVMDPDTEEQYDFDPLDDTKTWPEDLLPLRPVGRLVLDRNVDNFFNENEQLAFGPGLVVPGIYYSDDKMLQCRVFAYADTQRYRLGPNYLMLPVNAPRCAHHNNHYDGAMNFMHRDEEVDYYPSRHAPLRQAAPPTPLPPRPVAGRREKATIRKPNDFKQPGERYRSWDADRQDRFVRRFADSLGHPKVSQELRSIWIDLLAKCDASLGMKIATRLNMKANM

SEQ ID NO: 6063 - protein, 360 aa, Methanococcoides burtonii DSM 6242
MLFEPITMAGLTVKNRFVRSATNEGMAELDGTVTKGIGDMYEDLAREDVGLIITGYSYVDVKGQSDERQQGIYDDRFIGPYREIVSRVHKYDSKIFLQIVHGGRQSIVKEGVALLAPSAVEDPASGKVPVEMTEEDIFDTIENFAEAARRSKEAGFDGVQIHCAHGFLLSSFISPYTNHRTDKWGGSVENRARIVTEIVKRIQEKVGKDFPVMVKMNATDGFDVFSGKIGLDAPECVEIASLLEKAGICAIEVSGGIFEAGPVMSQNGIDSEDKEAYFRRYSKMILDTVKIPVILVGGIRTKAVMESILRGYADMISLSRPFIAEPDLVVKLKEGSDRVKCVSCNGCFRTDGVSCTYNFD

SEQ ID NO: 6064 - protein, 510 aa, Oryza sativa
MDGNAKGGGHSEALKNYNLGRTLGIGSFGKVKIAEHKLTGHRVAIKILNRRQMRNMEMEEKAKREIKILRLFIHPHIIRLYEVIYTPTDIYVVMEYCKFGELFDYIVEKGRLQEDRVALRIFSQIISAVEYCHRNMVAHRDLKPENLLLDSKYNVKLADFGLSNVMHDGHFLKTSCGSPNYAAPEVISGKLYAGPEVDVWSCGVILYALLCGTLPFDDENIPNLFKKIKGGIYTLPSHLSALARDLIPRMLVVDPMKRITIREIRERQRFQIRLPRYLAVPPPDTAQQAKMIDEDTLQDVVNLGYGKDHVCESLRNRPQNEATVAYYLLLDNRFRATSGYLGADYQESLERNFNRFASSESASSNTRHYLPGSSDPHASGLGPHYPVERKWALGLQSRAQPREIMIEVLKALQDLNVSWKKNGQYNMKCRWSVGYPQATDILDVNHSFVDDSIIMDNGDVNGRLPAVIKFEIQLYKSRDEKYLLDMQRVTGPQLLFLDFCAAFLTKLRVL

SEQ ID NO: 6065 - protein, 190 aa, Cucumis sativus
NSLVIGAYGIVCSVLNSETNEMVAVKKIANAFDNHMDAKRTFREIKLLRHLDHENVIGIRDVIPPPLRREFNDVYISTELMDTDLHQIIRSNQSLSEEHCQYFLYQILRGLKYIHSANVIHRDLKPSNLLLNANCDLKICDFGLARPTSENECMTEYVVTRWYRAPELLLNSDYTAAIDIWSVGNRIPAA

SEQ ID NO: 6066 - protein, 182 aa, Cucumis sativus
YRGDWHGSEVAVKILTEQDFHPERVNEFLREVAIMKSLRHPNIVLFMGAVTKPPNLSIVTEYLSRGSLYRLLHKSGVKDIDETRRINMAFDVAKGMNYLHRRDPPIVHRDLKSPNLLVDKKYTVKVCDFGLSRLKAHTFLSSKSAAGTPEWMAPEVLRDEPSNEKSDVYSFGVILWESNSRG

SEQ ID NO: 6067 - protein, 206 aa, Pisum sativum
MPSRRRTLLKVIILGDSGVGKTSLMNQYVNKKFSNQYKATIGADFLTKEVQFEDRLFTLQIWDTAGQERFQSLGVAFYRGADCCVLVYDVNSVKSFDNLNNWREEFLIQANPSDPENFPFVVIGNKIDIDGGNSRVVSEKKARAWCAAKGNIPYFETSAKEGINVEEAFQTIAKDALKSGEEEELYLPDTIDVGNSSQPRSTGCEC

SEQ ID NO: 6068 - protein, 272 aa, Griffithsia japonica
RFVQACTRRLMSDVPVGVFISGGLDSSLVASIAKKHLPDGYVFHSFSCGLEGSPDVRAAQKVADYLGTKHHVLTFTVEDGISALRDVIYHLETYDVTTIRASTPMYLLSRLCKQYVKVVLSGEGADEVYGGYLYFHNAETERDFHEETVRRVKLLYTSDVLRGDRSTAAQSLELRVPFLDRDFLDVSMSFSAQDKVTQKGKRIEKWPMRQAFAKEFCGEEFLPDDILWRSKEQFSDGVGYNWIDGLKEFCDKEVSDKLLANASDKFPHQPPK

SEQ ID NO: 6069 - protein, 238 aa, Prunus tomentosa
AHYKSEADVGNAIAEAIQSGLVKREELFITSKASNHGHVVEACKSSLKKLQLDYLDLYLVHYPLATKHSGVGTTASLLDENKVLDIDVTVSLETTWHDMEKTVDLGLVRSIGLSNYELFLTRDCLSYAKIKPQVSQFETHPYFQRESLVRFCKKHGVVPMAHTPLGGATANVKAFGSISPLEDPVLIGLAKKYQKSVAQIALRWNIERGTPVIPKSSKVERLKENLEILNFKLEKEDI

SEQ ID NO: 6070 - protein, 252 aa, Prunus padus
AHYKSEADVGNAIAEAIQSGLVKREELFITSKASNHGHVVEACKNSLKKLQLDYLDLYLVHYPLATKHNGVGTTASLLDENKVLDIDVTVSLETTWHDMEKTVSLGLVRSIGLSNYELFLTRDCLSYAKIKPQVSQFETHPYFQRESLVRFCKKHGVIPMAHTPLGGATANVKAFGSISPLEDPVLLGLAKKYQKSVAQIALRWNIERGTPVIPKSSKVERLKENLEVLNFKLEKEDIELIDTIDKKSRTTL

SEQ ID NO: 6071 - protein, 252 aa, Prunus caroliniana
AHYKSEADVGNALAEAFETGLVKREELFIISKASNHGHVVEACKDSLKKLQLDYLDLYLVHYPLATKHSGVGTTASLLDKNKVLDIDVTVSLESTWHDMEKTVSLGLVRSIGLSNYELFLTRDCLSYAKIKPQVSQFETHPYFQRETLVRFCRKHGVCPMAHTPLGGATANVKAFGSMSPLEDPVLHGLAKKYKKSVAQIALRWNIERDTPVIPKSSKVERLKENLEVLNFKLEKEDIELINTIDKKSRTTL

SEQ ID NO: 6072 - protein, 559 aa, Sulfolobus solfataricus
MTFAYKIDGNEVIFTLWAPYQKSVKLKVLEKGLYEMERDEKGYFTITLNNVKVRDRYKYVLDDASEIPDPASRYQPEGVHGPSQIIQESKEFNNETFLKKEDLIIYEIHVGTFTPEGTFEGVIRKLDYLKDLGITAIEIMPIAQFPGKRDWGYDGVYLYAVQNSYGGPEGFRKLVDEAHKKGLGVILDVVYNHVGPEGNYMVKLGPYFSQKYKTPWGLTFNFDDAESDEVRKFILENVEYWIKEYNVDGFRLDAVHAIIDTSPKHILEEIADVVHKYNRIVIAESDLNDPRVVNPKEKCGYNIDAQWVDDFHHSIHAYLTGERQGYYTDFGNLDDIVKSYKDVFVYDGKYSNFRRKTHGEPVGELDGCNFVVYIQNHDQVGNRGKGERIIKLVDRESYKIAAALYLLSPYIPMIFMGEEYGEENPFYFFSDFSDSKLIQGVREGRKKENGQDTDPQDESTFNASKLSWKIDEEIFSFYKILIKMRKELSIACDRRVNVVNGENWLIIKGREYFSLYVFSKSSIEVKYSGTLLLSSNNSFPQHIEEGKYEFDKGFALYKL

SEQ ID NO: 6073 - protein, 222 aa, Picea mariana
MGRGKIEIKRIENTTNRQVTFCKRRNGLLKKAYELSVLCDAEVALIVFSSRGRLYEFANHSVKRTIERYKKTCVDNNHGGAISESNSQYWQQEAGKLRQQIEILQNANRHLMGDGLTALNIKELKQLEVRLEKGIGRVRSKKNEMLLEEIDIMQRREHILIQENEILRSKIAECQNSHNTNMLSAPEYDALPAFDSRNFLHANLIDAAHHYAHQEQTTLQLG

SEQ ID NO: 6074 - protein, 222 aa, Picea mariana
MGRGKIEIKRIENTTNRQVTFCKRRNGLLKKAYELSVLCDAEVALIVFSSRGRLYEFANHSVKRTIERYKKTCVDNNHGGAISESNSQYWQQEAGKLRQQIEILQNANRHLMGDGLTALNIKELKQLEVRLEKGIGRVRSKKNEMLLEEIDIMQRREHILIQENEILRSKIAECQNSHNTSMLSAPEYDALPAFDSRNFLHANLIDAAHHYAHQEQTTLQLG

SEQ ID NO: 6075 - protein, 218 aa, Picea mariana
KIEIKRIENTTNRQVTFCKRRNGLLKKAYELSVLCDAEVALIVFSSRGRLYEFANHSVKRTIERYKKTCVDNNHGGAISESNSQYWQQEAGKLRQQIEILQNANRHLMGDGLTALNIKELKQLEVRLEKGIGRVRSKKNEMLLEEIDIMQRREHILIQENEILRSKIAECQNSHNTNMLSAPEYDALPAFDSRNFLHANLIDAAHHYAHQEQTTLQLG

SEQ ID NO: 6076 - protein, 271 aa, Cicer arietinum
RSLRVDQFCSVVSISSSLMIELVPCLRDNYAYILYDVDTGTVGVVDPSEAAPIIEALTKKNLNLTYILNTHHHNDHTDGNAELKERYGAKVIGSDLDKERIPGIDIYLSDGDKWMFAGHEVHIMATPGVTRGHISFYFPGSGAIFTGDTLFSLSCGKLYEGTPEQMLSSLKKIMSLADDTSIYCGHEYTLNNSKFALSIEPENKELQSYASHVAHLRNKGLPTVPTTLKMEKACNPFLRTWSTEIRQKLKVAATAEDAEALSVIRQAEDTF

SEQ ID NO: 6077 - protein, 356 aa, Oryza sativa
  misc_feature (49)..(49): Xaa can be any naturally occurring amino acid
MGRDKARRLSGSRHFRQRVVLATLTSTAITIDDIRSGGAAPGLRPHEGXKLRYKPGVIVGGRDLEHDCGVHRGIGYFLEPLILLGLFARAPISIRLKGITNDTKDPSVDTFRMVTLHMLKQFGVPLEGLELKIESRGAPPLGGGEVFLRVPNIKSTLKAANWADEGMVKRIRGVSFSTRVSPQIENRIIYAARGIFNRFIPDVHIFTDHRSGSAGGRSAGYGVSVVAETTTGCLLSADATVSYPNVDEMNEESENLELTSPEDLGVQVASMLLEEVAQGGVVDSAHQGLLFILCALSPPDVSKVRVGQLTPYAIETLRNIRDFLDVKFIIKPDPNSNTVTLKCVGAGVKNLARKTS

SEQ ID NO: 6078 - protein, 450 aa, Oryza sativa
MAAAAEEGEGKKGGGTVLQGRYEMGRVLGHGNFGRVHVARDLRTGRSVAVKVVAKEKVVRAGMMEQIKREIAVMKRVSHPNIVELHEVMATRSKIYLALELVRGGELFGRIVRLGRVREDAARHYFRQLVSAVDFCHSRGVYHRDLKPENLLLDEAGNLKVVDFGLSALADHARADGLLHTLCGTPGYAAPEVLRDKGYDGAKADLWSCGVILYVLLAGSLPFPDDNIVTLYRKAQRGDYRCPAWLSTDARRLIPRLLDPNPTTRISVAQLVETPWFKKTSISRPVSIELPPAFADPAPAKEEAEKDEPETLNAFHLISLSEGFDLSPLFEGDSAKGRRDGGMLFATREPASGVISRLEGVAARGGGRMRVTKSGARGVRLEGAERGGAKGRLAVAADIFSVAPSVLVVDVKKDGGDTLEYRSFCSEELRPALQDIVWGAAADPTPTAAV

SEQ ID NO: 6079 - protein, 226 aa, Corynebacterium efficiens YS-314
MGRNETNESNTFEHTNEERNFATLACMTNELKLHRISVSKMDNNCYLLTSGDKGLLIDAADDAPAILKMAEDAGVTITTVLTTHRHADHVRALKEVLQATGATHYAPFLEVPALPAPVDVELEHGDIIEFEGHQFPIAILRGHTPGGAALAAEIDGRVNLFVGDSLFPGGLGKTSSEGDFIRLFNDVKQRLFDVYPDDSIVWPGHGRETTLGNERPELEVWWERRW

SEQ ID NO: 6080 - protein, 235 aa, Brassica rapa
MALETLNSPTSATASARPLLRYREEMEPENLEQWAKRKRTKRQRFDQSRLNQETAPSEEEYLALCLLMLARGSAVQSPLPPSSSSDHRGYKCTVCGKSFSSYQALGGHKTSHRKPASNVNVPINQEQSNNSHSNSNGGSVVINGNGVSQSGKIHTCSICFKSFSSGQALGGHKRCHYDAGNNGNGNGSSSNSVEVVGGSDGSYVDDERSSEQSATGDNRGFDLNLPADQVAVVIS

SEQ ID NO: 6081 - protein, 237 aa, Brassica rapa
MALETLNSPTSATASARPLLRYREEMEPENLEQWAKRKRTKRQRFDQSRLNQETAPSEEEYLALCLLMLARGSAVQSPLPPSSSSDHRGYKCTVCGKSFSSYQALGGHKTSHRKPASNVNVPINQEQSNNSHSNSNGGSVAINGNGVSQSGKIHTCSICFKSFSSGQALGGHKRCHYDAGINGNGNGSSSNSVEVVGGSDGNYVDDERSSEQSATGDNRGFDLNLPADQVAVVISKR

SEQ ID NO: 6082 - protein, 448 aa, Arabidopsis thaliana
  misc_feature (62)..(62): Xaa can be any naturally occurring amino acid
  misc_feature (94)..(94): Xaa can be any naturally occurring amino acid
  misc_feature (113)..(113): Xaa can be any naturally occurring amino acid
  misc_feature (129)..(129): Xaa can be any naturally occurring amino acid
  misc_feature (144)..(144): Xaa can be any naturally occurring amino acid
  misc_feature (207)..(207): Xaa can be any naturally occurring amino acid
  misc_feature (218)..(218): Xaa can be any naturally occurring amino acid
  misc_feature (230)..(230): Xaa can be any naturally occurring amino acid
  misc_feature (240)..(240): Xaa can be any naturally occurring amino acid
  misc_feature (282)..(282): Xaa can be any naturally occurring amino acid
  misc_feature (293)..(293): Xaa can be any naturally occurring amino acid
  misc_feature (299)..(299): Xaa can be any naturally occurring amino acid
  misc_feature (316)..(316): Xaa can be any naturally occurring amino acid
  misc_feature (346)..(346): Xaa can be any naturally occurring amino acid
MELTLKMLVLMSLKIKFLLLLVLYHHVDSASIVKFLPGFEGALPFELETWYIGIGEDENISXIFYYFFKSLKTIQKKMLFLYRLNGGPGCSSLXCLLFLKKGPVGFEFFRFSXELLSSLFSTTYSWTKXANLIFLVQPVRSAYXTQKHQLIKLMTISEVNRTHEFLQKWLSSYTQYFSNPLYVVGDSYSGMIVPALVQEISQGNYIXCETPINLQGYXLGNPVTYMDFEXNFRIPYVYGXGLISDEIYEPMKRICNGNYYNVDPSNTQCLKLTKEYHKCIAXINIHHILTPDXDVTKVXLLICYYYPYHLIECWAXTTKSVRVALHIEKGSKGKWARCNRTIPYKXDIESSIPYHMNNSISGYRSLIYSGDHDIAVPFLATQAWIRSLNYSPIHNWRPWMINNQIAGYTRAYSNKMTFATIKGGGHTAEYRPNETFIMFQRWISGQPL

SEQ ID NO: 6083 - protein, 492 aa, Oryza sativa
MVLSKAVSESDMSVHSTFASRYVRASLPRYRMPENSIPKEAAYQIINDELMLDGNPRLNLASFVTTWMEPECDKLIMAAINKNYVDMDEYPVTTELQNRCVNMIAHLFHAPLGEDETAVGVGTVGSSEAIMLAGLAFKRRWQNKRKAEGKPFDKPNIITGANVQVCWEKFARYFEVELKEVKLRDGYYVMDPEKAVDMVDENTICVAAILGSTLNGEFEDVKLLNDLLDKKNKETGWETPIHVDAASGGFIAPFLYPELEWDFRLPWVKSINVSGHKYGLVYAGIGWCIWRNKEDLPEELIFHINYLGTDQPTFTLNFSKGSSQVIAQYYQLIRHGFEGYRNIMENCHENAMVLKEGLVKTGRFDIVSKDEGVPLVAFSLKDRSRHDEFEISDMLRRFGWIVPAYTMPPDAQHVTVLRVVIREEFSRTLAERLVLDIEKVMYQLDALPSRLMPPVPPAPLLVVAKKSELETQRSVTEAWKKFVLAKRTNGVC

SEQ ID NO: 6084 - protein, 39 aa, Zea mays
YHVTNFFAPSSRFGTPEDLKSLIDRAHELGLLVLMDVVH

SEQ ID NO: 6085 - protein, 526 aa, Oryza sativa
  misc_feature (214)..(214): Xaa can be any naturally occurring amino acid
MATCSRPLFVPASAAAASPSPAASRRGAPLVRLHAVAIVSIWEPRRHLRAHMSLCCKATRRSSGGLTTGHPISALPRAIKRILSSYPSLLTSLGGNLARGYKAAKPFLSIGFGRVVLGMVLVMSVSAATYTAPSSLALTEENLLFLEAWRAVDRAYYDKSFNGQSWFRYRENALRNEPMNTREETYAAIKKMLSTLDDPFTRFLEPEKFKSLRXPGSQGTLTGVGLSISYPMALNGSPSGLSVMSATPGGPAENSGILPGDVILAIDNRSTEDMDIYDAAQRLQGPEGSSVDLDIRSGSNTRHVVLKRQTVTLNPVRSRMCEIPGAKDNSKVGYIKLTTFNQNAAGSVKEALQKLRENNVKSFVLDLRNNSGGLFPEGIEIAKIWMDKGVIVYICDSQGVRDIYEADGISTVAASEPLVVLVNKGTASASEILAGALKDNKRAVIYGEPTYGKGKIQSVFALSDGSGLAVTVARYETPAHTDIDKVGVIPDRPLPASFPTDEDGFCSCLRDSNSACNLNAAQLFTR

SEQ ID NO: 6086 - protein, 227 aa, Zea mays
MPSSTASWSRYGAVPTSPPSPPPPPPQLRPEDDAAGGEAAPSPSVSATAAEAGVAFFSRARAFAGAGRPRAWREVLDPTAFSRPESCGEARARARRNLAYFRANYALAALALVFLGLVYRPVSMLVFLALFVAWLGLYFGRGDRGPLVCLRREVDDRAVLAALSAATALAVALTRAGINLLVSLAVAAVAVGLHAAFRVNLYVDETDAFDVAGTSFTDSRYGYALPR

SEQ ID NO: 6087 - protein, 169 aa, Listeria welshimeri
VPERVVHARGAGAHGKFVTKKSMKKYTIANFLQEEGTETEVFARFSTVIHGQHSPETLRDPRGFSVKFYTEEGNYDFVGNNLPVFFIRDAIKFPDVIHSLKPDPRTNIQDGNRYWDFFSLSPEATTMIMYLFSDEGTPASYREIRGSSVHAFKWINEEGKTVYVKLRWI

SEQ ID NO: 6088 - protein, 122 aa, Triticum aestivum
MVGFFRSGNLASRVFDRQFLSPRPGATVNTVRQFYENLVPSYTIYDIDCPDYSFRKFTDDERFESFFKQLYSISLASSNEYICEDFFLYMECHQYGLFATSTARSNESSVTEGAIYGVPSIE

SEQ ID NO: 6089 - protein, 254 aa, Oemleria cerasiformis
SEADVGQAFAEAFKTGLVKREELFITSKANHGHVVEACKNSLKKLQLDYLDLYLVHYPLATKHSGVGTTASLLDENKVLDIDVTVSLEETWRGMEKAVSLGLTRSIGLSNYELFLTRDCLSYAKIKPAVSQFETHPYFQRESLVRFCQKHGVVATAHTPLGGATANTKYFGSISPLGDPVLHDVAKKYQKSVAQICLRWNIERNTPVIPKSSKVERLKENLQVLEFKLEKEDIELINGIDKKSRSTLPSLSWGL

SEQ ID NO: 6090 - protein, 328 aa, Yarrowia lipolytica CLIB122
MGNNPNEVIQRLLDAGYSGKITKAVCLKNSEIALICRRARSILLSQPTLLELLPPVKIVGDVHGQFGDLIRMFDMCGFPPAANYLFLGDYVDRGKQSLETILLLLCYKIKYPENFFILRGNHECAKVTRVYGFYDECKRRCNIKTWKTFVDTFNTLPIAAVVAQKIFCVHGGLSPSLSSMSEIRSIVRPTDVPDYGLINDLLWSDPADTQNEWEDNERGVSYCFSKVAINKFLTKFSFDLVCRAHMVVEDGYEFFNDRSLVTVFSAPNYCGEFDNWGAVMSVSEELLCSFELLKPLDSAALKQEMKKGKHQRRLSLETRSAPATPQSV

SEQ ID NO: 6091 - protein, 264 aa, Sorbus aucuparia
AHYKSEADVGEALTEAFKTGLVKREELFITTKIWNSDHGHVVEACKNSLEKLQLDYLDLYLVHYPMPTRHNAIGKTASLLGEDKVLDIDVTVSLQQTWEGMEKAVSLGLVRSIGLSNYDLFLTRDCLAYSKIKPAVSQFETHPYFQRDSLIKFCIKHGVLPTAHTPLGGAAANKDMFGSVSPLDDPVLNDVAKKYGKSVAQICLRWGIQRKTAVIPKSSKIQRLKENLEVLEFQLSDEDMQLIYSIDRKYRTSLPSKTWGLDVS

SEQ ID NO: 6092 - protein, 127 aa, Oryza sativa
KHIFNFDKDIMSLDGKERLISGGSPICHHSDDTSMIISFTRGPFLFVFNFNPDASYQLYSVGVDEAGEYQLILNTDETRYGGRGELTSNQYMKRTSDNRVGGCRNSLELTLPSRSAQVYKLVRILRI

SEQ ID NO: 6093 - protein, 388 aa, Aspergillus nidulans FGSC A4
MGSLSPLEPLFTPLRIGAFALQHRVVQAPCTRMRSTKESDGIWVPNDLNVEYYAQRASKGGLMLSEATPISRDAAGYPGVPGIFTPSQIEGWRKVTNAVHTKGGLILCQLWHVGRATTPGFLGGKTPLAPSDIPISGKALDGNVYADAPPRPMTVDEIKEVVLEYAAASKRAIEAGFDGVEIHGGNGYLLDQFLHDNVNNRTDAYGGSIENRSRIVLEIISAVTEAIGAERVGIRLSPYNYFQDTRDSNPQKHWGYLCTQIASLPESSRPAYVHMIEPRFDEILDESEKISALETMQEVVKPSLDGLRSSLKKGGVSFIAAGNFKPENAGEKLITDSADAIAFGRLFISNPDLPRRLKEGIELTKYDRSTFYGATPPEKGYTDYPFAQ

SEQ ID NO: 6094 - protein, 265 aa, Kageneckia oblonga
AHYKSEADVGEALAEAFKSGLVKREELFITTKIWNSDHRYVAEACKNSLEKLQLQYLDLYLVHYPLPTRHNAIGKTASLLGEDKVLDIDVTIPLQQTWEGMEKTVALGLVRSIGLSNYDLFLTRDCLAYSKIKPAVSQFETHPYFQRDSLVKFCMKHGVLPTAHTPLGGAAANKDMFGSVSPLDDPVLNDVAKKYGKSVAQICLRWGIQRKTAVIPKSSKIQRLKENLEVLEFQLSDEDMQLIYSIDKKYRTSLPSKTWGLDVYA

SEQ ID NO: 6095 - protein, 433 aa, Lophopyrum elongatum
MQCFRFASWEKEREEELQGPARSQSALSNSSMSTDRDARRSGSECCSLTVSSEISVDSFGRYRQLSLPHRPNNDLRIFTFQELKSATRSFSRALMIGEGGFGCVYRGTIQSTLEPRRSLDVAIKQLGRKGLQGHKEWVTEVNFLGVVDHPNLVKLIGYCAEDDERGIQLLLVYEFMPHGSLADHLSTRSPKPASWAMRLRVALDTARGLKYLHEDSEFKIIFRDLKPSNILLDENWNAKLSDFGLARLGPQEGSHVSTAVVGTIGYAAPEYIHTGRLSSKNDIWSYGVVLYELLTGRRPLDRNRPRGEQNLVEWVKPYSSDTKKFETIMDPRLEGNYNLKSAARIASLANKCLVRHARYRPKMSEVLEMVQKIVDSSDLGTPERPLISHSKKLASDEKKRKGLNLKRRIADIKAGDGRWFRWHKWTPKLVRTQ

SEQ ID NO: 6096 - protein, 340 aa, Bacillus clausii KSM-K16
MPNLMDSFQLKELTLKNRVVMSPMCQYSATGKDGMPTDWHLHHYTSRAIGGVGLIIVEMTNVEPNGRISDYCLGLWSDAHRDAFKPIVDAAHQYGAKIAIQIAHAGRKAEDAPEPVAPSAQAFDETYKTPRALSENEIAEMVQTFKAAARRAVEAGFDAIELHGAHGYLIHQFLSPYTNTRTDRYGKDRTLFAKEVIRAVKSVIPDSMPLLMRISATEYVDGGYDIEEAIRFSQILKDEGVDVFDVSSGGEGPIGSRGLPGSHAGYQTPLAKQIKQALSVPVIAVGRLENPVLANAVIGNEEADLVAVGRGLLANPYWALGAASELQLPVEAPTQYKAGF

SEQ ID NO: 6097 - protein, 265 aa, Vauquelinia californica
AHYKSEADVGEALAEAFKTGLVKREELFITTKIWNSDHGHVVEACKNSLEKLQLDYLDLYLVHYPMPTRHNAIGKTASLLGEDKVLDIDVTISLHTTWEGMKKAVSLGLVRSIGLSNYDLFLTRDCLAYSKIKPAVSQFETHPYFQRDSLVKFCMKHGVLPTAHTPLGGAAANKDMFGSVSPLDDPVLNDVAKKYGKSVAQICLRWGIQRKTAVIPKSSKIQRLKENLEVLKFQLSDEDMQLIHGIDRKYRTSLPSKTWGLDVYA

SEQ ID NO: 6098 - protein, 545 aa, Arabidopsis thaliana
MMSFEMNDRKKIGLGLTGFGVFFSFLGIVFVFDKGLLAMGNILFISGVSLTIGFKSTMQFFMKRQNYKGTISFGVGFFFVIIGWPILGMMLETYGFFVLFSSLTSTGASVCRSSLPSRVERRFTELDAAEQAIKISGEVIHWREMKSSRMKFAKKLKSIRAGEYLNQDRILQVLSAADEFLPKISNHIPQITSAASIWRTPQKSENQIANVTELLENVRRGEEEASGNFVGDEENVRPPVNQIPRVPCDRKESKLAVSCGSDTGIGRKSFGSGFRRPDLNSTTLFDPKLLEAFELAALCFRKIKDFSREARVNDEDDIVFPEEEEIRKDGNSIPPVISVVEYRRKDENVVILHKDDGNALQIVNAIREEVIGEEDIGKDGNTLMDPLLEFEERCPPGGEESVVFYTTTLRGIRKTFDDCNMIRFLLDSFKVKYYERDVSMHREYREELRRISAAETEVLPPVLFVKGRCIGGAQRVLGLHEQGKFKILFEGIPITGDERCRRCDGFRFLMCDGCRGSRRIISGDGSRIQCLICNENGLIVCVGCS

SEQ ID NO: 6099 - protein, 378 aa, Oryza sativa
MALDGKPPVPPPSTPPMDSWACGGRRSKRRGGGGGSSGSSGSSGGGGGGESEEEYLAACLLMLAHGVRDEAEVVGVAAATAKPQHGYECSVCGKVYGSYQALGGHKTSHRKPPSPAAEPAAGEEPSSGGVAGEAKVHRCSICLRTFPSGQALGGHKRLHYEGGAVGDAVKEKNSLKTKAAVATAVLKDFDLNLPAAATTAGDEAESSPPEAKRALHFWLGDGDGWHDKHAVFRWLASSSGGNNIMGPHDSPARCVEYSYSPTCRYGTFATGGCDSFMAFGMALAKVPQPSNTHVTSLLVFQQGWPSASLSHPGARSISLTFLLRYQSYETHWVSTGYTIPNGYGHGYEFLPANSIGYQSGGQKRVRHKPDAIFICNVN

SEQ ID NO: 6100 - protein, 423 aa, Synechocystis sp. PCC 6803
MLKQKRSLILGTTALLLTTVAVTGVGLRLARSQGYLQDNPKELVDEVWQIVNRTYVDGTFNGEDWVAVRQDYLTRDYKNQEEAYTAIREMLEKLNDPYTRFMSPDEFQSMRIDTSGELTGVGIQITQDQDTKKIVVVAPIEDTPAYNAGILSKDVITKIDGKSTDGMEVDDAVKLIRGKPGTSVVLTIEREGQAIEYPLTRTLIEIHPVRAQVEDINGARVGYIRLNQFSAQASEEMRQAVQKLEKENVVGYIFDLRSNPGGLLYSSVDIARIWLDEGGIVSTVDRRGEVEQQSANKRQLSNRPLVVLVDGGSASASEIVSGALQDNQRAVIVGTKTFGKGLVQSVRELGDGSGMAVTIAKYLTPNGRDINKHGIDPDVEVELTDAQRKELQQNREKVGTLEDPQFARAYEVLMQQVNKTASK

SEQ ID NO: 6101 - protein, 265 aa, Amelanchier alnifolia
AHYKSEADVGEALAEAFNTGLVKREELFITTKIWNSDHGHVVEACKNSLEKLQLDYLDLYLVHYPMPTRHNAIGKTASLLGEDKVLDIDVTISLQQTWEGMEKAVTLGLVRNMGLSNYDLFLTRDCLAYSKIKPAVSQFETHPYFQRDSLVKFCIKHGVLPTAHTPLGGAAANKDMFGSVSPLDDPVLNDVAKKYGKSVAQICLRWGIQRKTAVIPKSSKIQRLKENLEVLEFQLSNEDMQLINGIDRKYRTSLPSKTWGLDVYA

SEQ ID NO: 6102 - protein, 611 aa, Candida glabrata
MENKEHHHHHHHHHHHHSNGSYVSNKVSSLADGSRVGNYQIVKTLGEGSFGKVKLAYHVTTGQKVALKSINKKVLAKSDMQGRIDREISYLRLLRHPHIIKLYDVIKSKDEIIMVIEYAGNELFDYIVQRNKMSEQEARRFFQQIISAVEYCHRHKIVHRDLKPENLLLDEHLNVKIADFGLSNIMTDGNFLKTSCGSPNYAAPEVISGKLYAGPEVDVWSCGVILYVMLCRRLPFDDESIPVLFKNISNGVYTLPKFLSPGASDLIKRMLIVNPLNRISIHEIMQDEWFKVDLAEYLVPQDLKQQEQFNKKSGNEENVEEIDDEMVVTLSKTMGYDKDEIYEALESSEDTPAYNEIRNAYILIKDNKSLIKDMKQDNNVTQELDTFLSQSPPTFQQNGDGMKASEDQKKKHSGRRLASSVTQQRTFHQPPFMDQSKEEDSTISIPTSLPQIHRANMLAQGLPAASKISPLVTKKSKTRWHFGIRSRSYPLDVMGHIYIALKNLGAEWANPSEEDLWTIRVRWKYDSDESRLIEDGVKKIPNLMKIVIQLFQIETNNYLVDFKFDGWESTYGDSTISTNMSEDEMSTFSAYPFLHLTTKLIMELAVNSQGN

SEQ ID NO: 6103 - protein, 632 aa, Solibacter usitatus Ellin6076
MCGIVAVYDAEGAGASAEVAAGLKTLRHRGPDAQHVWLSPDGAICLGHARLSIIDLAHGDQPLANEDESIHCVVNGEFYDFERIRRGLEGRGHRFRTHSDSEILLHLYEDLGVECLRELRGEFAFVLWDGRRRVLMAARDRFGIKPLFYSRTGERLLFASEVKALHAAGVPAAWDEQGFLETFSAMYASSPTLFRHVSAIPPGHYLLSRDLGCSLHKYWDFEFPAEGNLPERRDEECVAEFGAVLDEAVRLRLRADVPVGCYLSGGIDSCSVLALMAKHAPGRVRAFSLSFDHELYDEGPIAREMAQRTGAEFTMIPVSHAGMAADLSDALWHNESFFLNAGSAAKFALSRAVRDAGYKVVLTGEGSDEVLAGYAFFRQDMIRHASNNGGAAEAIERLRAANPASGGLMFTTKQVTPVAGYVDRLGYFPSFLEARKAGLEALRALLTIAYETDEVLTRLLNRVDIAGQLTGRHVLNQSLYLNNKTILPGYILSALGDRVEMAHSIEARLPFLDHHVVEYTRRIPVDLKIRGTVEKYILREAMKPMLTTTVYKRQKHPFLSPPALLKPDEPLHALLQDTLRGRALDRVPYLRRTEVAGFLDRAGGLDVAGKIAAEFPLMMMLSACLVAERFGL

SEQ ID NO: 6104 - protein, 305 aa, Triticum aestivum
  misc_feature (292)..(292): Xaa can be any naturally occurring amino acid
WIPRAAGIRHQFGLDTDVDAVVYLMLANHLMHKLLPEATVVAEDVSGMPVLCRSVDEGGVGFDYRLAMAIPDRWIDYLKNKDDLEWSMSGIAHTLTNRRYTEKCIAYAESHDQSIVGDKTMAFLLMDKEMYTGMSDLQPASPTIDRGIALQKMIHFITMALGGDGYLNFMGNEFGHPEWIDFPREGNNWSYDKCRRQWSLADIDHLRYKYMNAFDQAMNALDDKFSFLSSSKQIVSDMNEEKKIIVFERGDLVFVFNFHPSKTYDGYKVGCDLPGKYKVALDSDALMFGGQXRAHDNDHSWYSFR

SEQ ID NO: 6105 - protein, 468 aa, Lactococcus lactis
MTKTLPKDFIFGGATAAYQAEGATHTDGKGPVAWDKYLEDNYWYTAEPASDFYHKYPVDLELAEEYGVNGIRISIAWSRIFPTGYGEVNEKGVEFYHKLFAECHKRHVEPFVTLHHFDTPEALHSNGDFLNRENIEHFIDYAAFCFEEFPEVNYWTTFNEIGPIGDGQYLVGKFPPGIKYDLAKVFQSHHNMMVSHARAVKLYKDKGYKGEIGVVHALPTKYPYDPENPADVRAAELEDIIHNKFILDATYLGHYSDKTMEGVNHILAENGGELDLRDEDFQALDAAKDLNDFLGINYYMSDWMQAFDGETEIIHNGKGEKGSSKYQIKGVGRRVAPDYVPRTDWDWIIYPEGLYDQIMRVKNDYPNYKKIYITCNGLGYKDEFVDNTVYDDGRIDYVKQHLEVLSDAIADGANVKGYFIWSLMDVFSWSNGYEKRYGLFYVDFDTQERYPKKSAHWYKKLAETQVIE

SEQ ID NO: 6106 - protein, 462 aa, Geobacter metallireducens GS-15
MSRLGVIIDLAICCHRHKEPAHPLQAKYSASRGTPTVTQTGTTAVTDADRIVELEHLLVELKAELAERKNIERDLKRAKVSAEAACHSKEDLLALVSHEIRSQIQMLTGAVELLRETPLDKKQTEYLNAFNHAGEFLLSLVNDLLDNSRLDAGRIHLDQIEFPFRELLERTAQLIAWQAGRKGLELEYHLSPDIPAQLVGDPKRLQQVILNLAGNAIKFTEQGKIIITVEPEASSLASQEMQLIFTIQDTGIGIPGDKLEEIFERYAQASPATFRTYGGTGLGLNIAKRLVGLMGGTIRVTSKEGKGTSFVFNARLGVTPPLLSSAVERRKSKSLPERSLRILLAEDAAEIRMLLGAFLGTTSHAVDMAHNGEEALKKFTSSNYDVIIMDIQMPVMDGLSATRKIREWERTHDRTPVPVVALTAGPERSDYLRAREAGCTTHLAKPIKKELLLNTISAVVLQ

SEQ ID NO: 6107 - protein, 79 aa, Glycine max
GNLLLYSRKLPFDITIIGDEPLLLANTSAILPYPHQAPTKTLGPTAFFCYHDIYDAETSVDHLSCFNPANRYLILLYYQ

SEQ ID NO: 6108 - protein, 374 aa, uncultured archaeon GZfos17F1
MDEKTIGSTLYDLKSKDTPYERVLSSMCTYPHPVAVAAHQQFIETNLGDPGLFAGTAEIEHEVVRMMGTLFGNPDAHGYVTTGGTESNIQAIHAIKTARKVRDPNIIVPASAHFSFDKVADILGIDVLKADLDPEFRADISSVEDLINETTIGIVGIAGTTEFGQIDPIKELSDLALSKNIFLHVDAAFGGFVIPFLTEKYEFDFTLPGVTSIGADPHKMGFATIPSGGLLFQDSSYLNRLSVDTPYLTVNSQQTLSGTRSGASAASAYAVFKHLGRTGYERIVQRCMELTYELVARASESGIEPLIDPVTNVLVLDVPDADSVRSALKKRGWDVSITRDPRALRLVIMPHISSENLNLFADDLADVVKWMSAN

SEQ ID NO: 6109 - protein, 260 aa, Camellia sinensis
TREGNFDLVGNNFPVFFVRDGMKFPDMVHALKPNPKSHIQENWRILDFFSHHPESLHMFTFLFDDAGVPQDYRHMEGSGVNTYTLINKAGKAHYVKFHWKPTCGVKCLLEEEAIKVGGANHSHATKDLYDSIAAGNYPEWKLFIQIIDPDHEDRFDFDPLDVTKTWPEDIIPLQPVGRLVLNKNMDNFFAENEQLAFCPAIIVPGVYYSDDKLLQTRIFSYADTQRHRLGPNYLQLPANAPKCAHHNNHHEGFMNFMHRR

SEQ ID NO: 6110 - protein, 265 aa, Amelanchier alnifolia
AHYKSEADVGEALAEAFNTGLVKREELFITTKIWNSDHGHVVEACKNSLEKLQLDYLDLYLVHYPMPTRHNAIGKTASLLGEDKVLDIDVTNFLQQTWEGMEKAATLGLIRNIGLSNYDLFLIRDCLAYSKIKPAVSQFETHPYFQRDSLVKFCIKHGVLPTAHTPLGGAAANKDMFGSVSPLDDPVLNDVAKKYGKSVAQICLRWGIQRKTAVIPKSSKIQRLKENLEVLEFQLSNEDMQLINGIDRKYRTSLPSKTWGLDVYA

SEQ ID NO: 6111 - protein, 621 aa, Listeria innocua Clip11262
MCGFVGCVHDRITEITGADKETFRQMNSMITHRGPDDEGYFTDDHVQFGFRRLSIIDVENGHQPLTYENERYWIIFNGEVYNYVELREQLVAEGMTFETESDTEVIIATYAKYKEKTAERLRGMFGFVIWDKQEELVYGARDPFGIKPFFYAEEDGKLFMGSEKKSILHALKEKELDEVSLQNYMTYQFVPEPDSLTKNVKRLEPGHQFTKKIGQPMEITTYWKASFAPVTKSEDAWIKEVRDVMYDSVKMHMRSDVPVGSFLSGGIDSSIIAAIAKEYHPAIKTFSVGFERDGFSEIDVAKETADKLGVENISYVISPEEYMKELPKIVWHMDDPLADPAAIPLYFLSREARKQVTVALSGEGADELFGGYNIYNEPNSLAMFNKMPGVFKSMLNSVARIMPEGMRGKSFLERGTTPMEERYIGNAKMFTEKEKQILLPKYQSGHDYTNITDPFYAETKNYHPVERMQYIDIHTWLRGDILLKADRMTMANSLEVRVPFLDKEVYNVARNIPDTMKTTNGTTKYILRKAAATFVPEHVLNRRKLGFPVPIRHWLKDEMNAWVKNIIKESPTDHLINKQYVLGLLDDHCAGKFDYSRKIWTVVIFMIWYDVYVADKYDFGK

SEQ ID NO: 6112 - protein, 265 aa, Gillenia stipulata
AHYKSEADVGEVLAEAFKTGLVKREELFITTKIWNSDHGHVVEACKNSLEKLQLDYLDLYLVHYPMPTKHNGVGKTASLLGEDKVLDIDVTISLQQTWEGMEKTVSLGLVRSIGLSNYELFLTRDCLAYSKIKPAVSQFETHPYFQRDSLVKFCLKHGVLPTAHTPLGGAAANKDMFGSVSPLDDPVLNDVANKYGKSVAQICLRWGIQRKTAVIPKSSKIQRLKENLEVLEFQLSEEDMQLIYSIDRKYRISLPSKTWGLDVYA

SEQ ID NO: 6113 - protein, 417 aa, Malus micromalus
MAAKESNSAAAAASSDGKIKRMLTHGGRYAQYNVFGNLFEVSSKYVPPIRPIGRGAYGIVCAAVNAEAREEVAIKKIGNAFDNRIDAKRTLREIKLLRHMDHENVIATKDIIRPPQKENFNDVYIVYELMDTDLHQIIRSNQPLNDDHCRYFLYQLLRGLKYVHSAGVLHRDLKPSNLFMNANCDLKIGDFGLARTTSETDFMTEYVVTRWYRAPELLLNCSEYTAAIDIWSVCCILGEIMTRKPLFPGKDYVHQLRLITELLGSPDDSSLGFLRSDNARRYVRELPQYPKRSFSLGFPNMSPSSIDLLEKMLIFDPNRRITVDEALSHPYLAPLHDINEEPVCPMPFNFDFEQPSFTEENIKELIWRESVRFNPESHFSMDHDIICCILLQTNLKTDCNDMFVDTVIVECVKGVDS

SEQ ID NO: 6114 - protein, 171 aa, Triticum aestivum
HEAEALRRMKESLQNKEWVAKFEKPKGDPSAFLKPSTTVLSPYLKFGCLSSRYFYHCIQDVYKSVRNHTKPPVSLIGQLLWRDFFYTVSYGTPNFDRMKGNKICKQIPWSENEELFVAWRDGQTGYPWIDAIMIQLRKWGWMHHLARHSVACFLTRGDMVSNKNSVGNYLH

SEQ ID NO: 6115 - protein, 753 aa, Escherichia coli K12
MSQHNEKNPHQHQSPLHDSSEAKPGMDSLAPEDGSHRPAAEPTPPGAQPTAPGSLKAPDTRNEKLNSLEDVRKGSENYALTTNQGVRIADDQNSLRAGSRGPTLLEDFILREKITHFDHERIPERIVHARGSAAHGYFQPYKSLSDITKADFLSDPNKITPVFVRFSTVQGGAGSADTVRDIRGFATKFYTEEGIFDLVGNNTPIFFIQDAHKFPDFVHAVKPEPHWAIPQGQSAHDTFWDYVSLQPETLHNVMWAMSDRGIPRSYRTMEGFGIHTFRLINAEGKATFVRFHWKPLAGKASLVWDEAQKLTGRDPDFHRRELWEAIEAGDFPEYELGFQLIPEEDEFKFDFDLLDPTKLIPEELVPVQRVGKMVLNRNPDNFFAENEQAAFHPGHIVPGLDFTNDPLLQGRLFSYTDTQISRLGGPNFHEIPINRPTCPYHNFQRDGMHRMGIDTNPANYEPNSINDNWPRETPPGPKRGGFESYQERVEGNKVRERSPSFGEYYSHPRLFWLSQTPFEQRHIVDGFSFELSKVVRPYIRERVVDQLAHIDLTLAQAVAKNLGIELTDDQLNITPPPDVNGLKKDPSLSLYAIPDGDVKGRVVAILLNDEVRSADLLAILKALKAKGVHAKLLYSRMGEVTADDGTVLPIAATFAGAPSLTVDAVIVPCGNIADIADNGDANYYLMEAYKHLKPIALAGDARKFKATIKIADQGEEGIVEADSADGSFMDELLTLMAAHRVWSRIPKIDKIPA

SEQ ID NO: 6116 - protein, 57 aa, Zea mays
MAMQAAKRANMLLPPEVNRILYIRDFPYKITAEDMYDIFGRYGPIRQIRVGNTPDTR

SEQ ID NO: 6117 - protein, 318 aa, Triticum aestivum
  misc_feature (151)..(151): Xaa can be any naturally occurring amino acid
  misc_feature (157)..(157): Xaa can be any naturally occurring amino acid
  misc_feature (212)..(212): Xaa can be any naturally occurring amino acid
  misc_feature (268)..(268): Xaa can be any naturally occurring amino acid
  misc_feature (279)..(279): Xaa can be any naturally occurring amino acid
  misc_feature (289)..(289): Xaa can be any naturally occurring amino acid
  misc_feature (308)..(308): Xaa can be any naturally occurring amino acid
  misc_feature (313)..(313): Xaa can be any naturally occurring amino acid
MCGILAVLGCADDTQGKRVRVLELSRRLKHRGPDWSGMHQVGDCYLSHQRLAIIDPASGDQPLYNEDKSIVVTVNGEIYNHEKLRAQLSSHTFRTGSDCEVIAHLYEELGRLHRLLMGFSSLVIHATQFLCRDAGSTPLWIAVEAKPLYIXWGIDGXSVGISSEVKGLNDDCGHFEIFPPGHLFSQQAGKASRDGDPPTLGSPEVIPSGAYXPTCSQEGFRKGLSPRGLMTDLPCGVLPSGGPGSSLVAAVTVRHLAGTKAAKRWGTXLHSFCVGLEGXPDLKAAKEVXNYLGTMPMSSPSCSDGIDXIEDVXYHPNI

SEQ ID NO: 6118 - protein, 510 aa, Saccharomyces cerevisiae
MPTSGTTIELIDDQFPKDDSASSGIVDEVDLTEANILATGLNKKAPRIVNGFGSLMGSKEMVSVEFGKKGNEKKSNLDRLLEKDNQEKEEAKTKIHISEQPWTLNNWHQHLNWLNMVLVCGMPMIGWYFALSGKVPLHLNVFLFSVFYYAVGGVSITAGYHRLWSHRSYSAHWPLRLFYAIFGCASVEGSAKWWGHSHRIHHRYTDTLRDPYDARRGLWYSHMGWMLLKPNPKYKARADITDMTDDWTIRFQHRHYILLMLLTAFVIPTLICGYFFNDYMGGLIYAGFIRVFVIQQATFCINSLAHYIGTQPFDDRRTPRDNWITAIVTFGEGYHNFHHEFPTDYRNAIKWYQYDPTKVIIYLTSLVGLAYDLKKFSQNAIEEALIQQEQKKINKKKAKINWGPVLTDLPMWDKQTFLAKSKENKGLVIISGIVHDVSGYISEHPGGETLIKTALGKDATKAFSGGVYRHSNAAQNVLADMRVAVIKESKNSAIRMASKRGEIYETGKFF

SEQ ID NO: 6119 - protein, 105 aa, Solibacter usitatus Ellin6076
MTSLKRENELVLKADLPDVDLKDIDVRVENQTLTIEGERKFEQTSNAKGYHRMERSYGRFVRSFAVPNTFDTEKINAAYKNGLLTVTLVKKEAAKPRQIKVEAAG

SEQ ID NO: 6120 - protein, 325 aa, Schizosaccharomyces pombe
MSIKEFAKNAREAYFTLPNGDKIPSIGLGTWRSGKDETKNAVCAALKAGYRHIDTAHIYGNEKEIGEGIRESGVPRTDIWVTSKLWCNAHRAGLVPLALEKTLQDLNLEYIDAYLIHWPFALLSGPEELPRNEKGELIYEDVPIEETWQAMEELLETGKVRYIGISNFNNEYLDRVLKIAKVKPTIHQMELHPYLPQTEYLEKHKKLQIHVSAYSPLANQNDAYNSDISKLIEHKTLVDIANARGEGITPANIAISWAVKRGTSVLPKSVNESRIVSNFLYIPLTDKEMEAINNIGVVRRFSHGKFAPKPMFVGLQDGTPKQTHA

SEQ ID NO: 6121 - protein, 293 aa, Gibberella zeae PH-1
MAPDVCTFTLNTGDEMPAVGFGTWNIPRSQAAKAVETALRAGYRHIDTALAYGNEKEVGAGIRASGVPREEIWVSGKLRNNWHKHARKCLQTSLKNLGVGYLDLYLIHWPCSRDADNPAICYEDWDYVDTWMEMEELLDEGKVLNIGVSNFGIQQLERLLTSTEIVPAVNQIELHPCNPSPKLVAYCNNRGIHSEGYSCLGSGHSALHRNKTLRDIADAKEKTVQQVLLQWGIEKGWGVVCKSVTPSRIKSNFELSGWELTDDDMEAIDGIKKRFKAVGDGFLPHRVFFGDDE

SEQ ID NO: 6122 - protein, 304 aa, Guillardia theta
MNENTKFLEEVIKKLTQSKKIKNIFLTEKEIGKLCYLSRKVFNNENSMLYLNSPIKICGDIHGQFYDLLRLFEFNGYPPTEKYLFLGDYVDRGKQSIEVISLLFAFKVRYPTKIFILRGNHESSKINRIYGFYDECKKKYNIKIWKIINETFNYLPLAAIIEKKIFCIHGGLSPFLNSIKQIEDIARPVEIPEKGLLCDLLWSDPNEDKQGWNLSDRGISYTYGDNIVKEFIEKFDFDLICRAHQVVDKGYKFFSNRMLVTIFSAPNYCGEFSNAGAVMNVDKLLVCSFQILKPYFGKKINSSK

SEQ ID NO: 6123 - protein, 451 aa, Zea mays
MVGGGGGGPLRRVGKYEVGRTIEEGTFAKVKFAQNTETGESVAMKVLDRSSILKNKMAEQIKREISIMKLVRHPNVVRLHEVLASRKKIFIILEFITGGELFDKIIRHGRLSEADARRYFQQLIDGVDFCHKKGVYHRDLKPENLLLDSQGNLKISDFGLSAWPAQGSFLLRTTCGTPNYVAPEVLSHKGYNGALADTWSCGVILYVLLAGYLPFDEVDLTTLYGKIESAEYSFPAWFSGGAKSLIRRILDPNPETRIRIEEIRSDEWFQKNYEPIKEIENEEVNLDDVNAAFDDPEDDNEDAFEDETGPLTLNAFDLIILSQGLNLAALFDRRQDCDKLQNRFLSRNPAKVILSSMEVVAQSMGFKTHIRNYKMRVEGLNADKTSHLSVMVEVFEVAPSIFMVELQRAAGDTSEYNTFVNNYCSKLDDIIWKFPTEKGKSRIPRLSKSHS

SEQ ID NO: 6124 - protein, 564 aa, Xanthomonas oryzae pv. oryzae KACC10331
MCSIFGIFGLQPGDDLQALRRQALECSQRQRHRGPDWSGVYVDAGAILVHERLAIVDPAGGSQPLLSEDGQLALAVNGEIYNHRELKAELLQPYAFQTGSDCEVINALYREDVPALYLNRLNGIFAFALWDKTEGRVIIARDPIGVVPLYWGHDREGRLRVASELKSLVDDCADAAQFPPGHWYDSATGALSRYYERAWREYAEVEGVQVQLQELREAFERAVHRQLMTDVPYGVLLSGGLDSSLVAAVAARYARHRVEENDTTEAWWPRLHSFAIGLKGSPDLAAAEVAAAALGTVHHGFEYTFEEGLDALPDVIRHIETYDVTTIRASTPMFLLARRIKAMGVKMVLSGEGSDEIFGGYLYFHKAPNAREFHEELVRKLDALNNYDCLRANKSMMAWGVEPRVPFLDREFLDVAMRMDASFKMIDKTSSGAARMEKGVLREAFAGYLPESILWRQKEQFSDGVGYGWIDGLKAHAAANVSERELAAADRRYPVNPPQTKEAYFYRTLFEQFFPGQSAAETVPGGKSIACSSPTAIAWDASFAAMADPSGRAIAGVHAQAMDS

SEQ ID NO: 6125 - protein, 500 aa, Oryza sativa
RVACTDGAEMGKEASAMVARRSTSRRDWRRWWWWLLPLACCFVCWVASSAATVAPAAGVAVTSLPGFDGPLPFSLETGYVEVNESTGVRLFYYFVQSEKDPDVDPLLLWLSGGPGCSSLSGLTHEIGPFQFAAKRYYSGGLPKIIYQPETWTKVSNIIFVDSPVGAGFSYAATQEGSKTSDTKTVKQLVIFLRKWLHDHPQFLLNPLYIGGDSYSGYIVPTLALAIDESNDSGDKPILNLMGYVAGNPRTERQFDEGGKIPFLHGMGLISNELYEHAKETCRGKYNAPGNARCEQSMKVIHDCTKDINMLHVLEPFCEDVGSPGIHNNEATDGMIRLMLESASAANDDIIEFKCRKASYVVLQIWANDKTVRESLGVHKGTVGEWIRCNFDVDYIADVYSTVEYHLTLMRKGYRALIYSGDHDCQVPFTGTQAWIRFLNLSVIDDWRPWYAAGQVAGFTRSYANNNLIYATVKGAGHTAPEYKPKECLEMFARWISGNTL

SEQ ID NO: 6126 - protein, 328 aa, Zea mays
RTLSLRLKVKIIRYAPCGEIVKHASVPYNLTEDNGWGLEIFEVKRCLEEARSAGLTVRAMVVINPGNPTGQVLSVTNQEEIVEFCRKEGLVILADEVYQENIYAENKKFHSFKKVARSLAYDENDLTLVSLHSVSMSYGESGRRGGYMEVSGVAANVKDQIYKVASLTLCPNIAGQILVSLAMDPPKLGDESFESFDKEKEQIRSSFCKRAKTLEKAFSGLEGVTCNKLEGALYLFPRLHLPSAAIRAADFEGVSPDIFYAHRLLDATGIAVVPGSGFHQASGTIHIRCTILPDERKIEAMVARLRAFHKAFMNEFRGSQQVMNDLRR

SEQ ID NO: 6127 - protein, 443 aa, Zea mays
MESTGKILMERYEVGRLLGKGTFGKVHYAKNLESNESVAIKMMDKDKVLKAGLSEQIRREITTMRLVAHKNIVELHEVMATRNNIYFVMEYVKGGELFDKIGKSGKLTEAAAHKYFQQLIGAVDYCHSRGVYHRDLKPENLLLDENENLKVSDFGLSALSESKGQDGLLHTTCGTPAYVAPEVISKTGYDGAKSDIWSCGVVLFVLVAGYLPFRAPNMMEMYRKIQNGDFRCPSWFSHKLKKLLYKILDPSPDTRISVQKIKESTWFRKGPVETRTVKEKILSENDTTNAAPAVAMRRKKNVHEDVKPPTVTSLNAFEIISFSTGLDLSGLFIRKECKKETRFTSDKGAVSIISKLEDVAKALNLRVRKKDNGVVKIQGRKVGRKGVLEFDTEIFEITASYHLIEMKQTGGDSLEYKKLLEEDIRPALKDIVWAWHGDDQQQK

SEQ ID NO: 6128 - protein, 491 aa, Oryza sativa
MDPCKFRPSSSFDTKTTTTNAGAPVWNDNEALTVGPRGPILLEDYHLIEKVAHFARERIPERVVHARGASAKGFFECTHDVTDITCADFLRSPGAQTPVIVRFSTVIHERGSPETIRDPRGFAVKFYTREGNWDLLGNNFPVFFIRDGIKFPDVIHAFKPNPRSHVQEYWRVFDFLSHHPESLHTFFFLFDDVGIPTDYRHMDGFGVNTYTFVTRDAKARYVKFHWKPTCGVSCLMDDEATLVGGKNHSHATQDLYDSIAAGNFPEWKLFVQVIDPEEEERFDFDPLDDTKTWPEDEVPLRPVGRLVLNRNVDNFFNENEQLAFGPGLVVPGIYYSDDKMLQCRVFAYADTQRYRLGPNYLMLPVNAPKCAHHNNHYDGAMNFMHRDEEVDYYPSRHAPLRHAPPTPITPRPVVGRRQKATIHKQNDFKQPGERYRSWAPDRQERFIPLRRRVAHPKVSPELRAIWVNYLSQCDESLGVKIANRLNVKPSM

SEQ ID NO: 6129 - protein, 400 aa, Saccharomyces cerevisiae
MPFVKDFKPQALGDTNLFKPIKIGNNELLHRAVIPPLTRMRAQHPGNIPNRDWAVEYYAQRAQRPGTLIITEGTFPSPQSGGYDNAPGIRSEEQIKEWTKIFKAIHENKSFAWVQLWVLGWAAFPDTLARDGLRYDSASDNVYMNAEQEEKAKKANNPQHSITKDEIKQYVKEYVQAAKNSIAAGADGVEIHSANGYLLNQFLDPHSNNRTDEYGGSIENRARFTLEVVDAVVDAIGPEKVGLRLSPYGVFNSMSGGAETGIVAQYAYVLGELERRAKAGKRLAFVHLVEPRVTNPFLTEGEGEYNGGSNKFAYSIWKGPIIRAGNFALHPEVVREEVKDPRTLIGYGRFFISNPDLVDRLEKGLPLNKYDRDTFYKMSAEGYIDYPTYEEALKLGWDKN

SEQ ID NO: 6130 - protein, 343 aa, Oceanobacillus iheyensis HTE831
MTQLDKQYKIKGLSLKNKIVMAPMCQYSVDAKDGIPNDWHFVHYVSRAVGGAGLIIVEMTDVDPDGRITDYDLGLWSDEHVPAYRRIVDEVHRYDAKIGIQIAHAGRKAEDAEPPVAPSAIPVTAESKVPRALTTEEVKQTVKQFQDAAKRAVEAGFDTIEIHGAHGYLIHQFHSPLINKREDRYGEDLSLFGVEVIQAIKEVIPEDMPLLMRISAMEYMDEGYDLNHSVDIAKKYQEAGVDVFHISSGGEGPPGKRKPANHPGYQIRFARTFRQELNVPIIAVGVLEHPKVAEAALGNEDADLIAIGRGMLKDPYWAIHAIEEITGIAVPPKQYERAFPRKK

SEQ ID NO: 6131 - protein, 117 aa, Emericella nidulans
LYTHHGIETGFSGGYHEYFGPAVDDDGVMYLALANEMLHRLYPDCITVAEDVSGMPALCLPHGLGGVGFDYRLAMAIPDMYIKLLKEKSDNDWDIGNLAFTLTNRRHGEKTIAYAES

SEQ ID NO: 6132 - protein, 131 aa, Zea mays
QSDEAWKMGDIVHTLTNRRWLEKCVTYAESHDQALVGDKTIAFWLMDKDMYDFMALDRPSTPTIDRGIALHKMIRLITMGLGGEGYLNFMGNEFGHPEWIDFPRGPQRLPSGKFIPGNNNSYDKCRRRFDL

SEQ ID NO: 6133 - protein, 483 aa, Arabidopsis thaliana
MSGVVRSSPGSSQPPPPPPHHPPSSPVPVTSTPVIPPIRRHLAFASTKPPFHPSDDYHRFNPSSLSNNNDRSFVHGCGVVDREEDAVVVRSPSRKRKATMDMVVAPSNNGFTSSGFTNIPSSPCQTPRKGGRVNIKSKAKGNKSTPQTPISTNAGSPITLTPSGSCRYDSSLGLLTKKFVNLIKQAKDGMLDLNKAAETLEVQKRRIYDITNVLEGIDLIEKPFKNRILWKGVDACPGDEDADVSVLQAEIENLALEEQALDNQIRQTEERLRDLSENEKNQKWLFVTEEDIKSLPGFQNQTLIAVKAPHGTTLEVPDPDEAADHPQRRYRIILRSTMGPIDVYLVSEFEGKFEDTNGSGAAPPACLPIASSSGSTGHHDIEALTVDNPETAIVSHDHPHPQPGDTSDLNYLQEQVGGMLKITPSDVENDESDYWLLSNAEISMTDIWKTDSGIDWDYGIADVSTPPPGMGEIAPTAVDSTPR

SEQ ID NO: 6134 - protein, 461 aa, Azoarcus sp. EbN1
MRNKLQKAGLIMTGVFAGVLISLNFPASADKVSAAPLPVEELRAFADVFNAIKQGYVEPVEDKKLINHAISGMLSGLDPHSAYLDVEAYKELQVGTHGEFGGLGIEVGMEDGFVKVISPIEDTPAFRSGVKAGDLIVKLDETPVKGMTLSDAVKRMRGKPKTDITLTIVRKGEDRPVVVTLTREVIKVQSVKSKMVEPGYGYLRVAQFQENTSQAVAEHLAKLAKEGDMKGLVLDLRNDPGGLLHGAVGVASAFLPANALVVSTDGRTDDAKREYRARADDYLRGSREDFLKDLPAGARTLPMVVLVNAGSASASEIVAGALQDHRRAVVMGTQTFGKGSVQTILPLNSNTAIKLTTARYYTPSGRSIQAKGIEPDIIVEETANGSSRRLREADLERHLGNDRDPEAEPKKADEPKAGDQSPADDEAEALPRPELASKDDYQLNQAINLLKGLQIVQNKKE

SEQ ID NO: 6135 - protein, 559 aa, uncultured alpha proteobacterium EBAC2C11
MAAKEVKFGAEARTKMLEGVDILANAVKVTLGPKGRNVVLEKSFGAPRITKDGVTVAKDIELKDKFQNMGAQMVREVASKANDVAGDGTTTATVMAQSIAQEGAKAVASGMNPMDLKRGIDMAVDSVVKSLEAKSKKISTSDEVAQVGTISANGEEEIGKMIAEAMERVGNEGVITVEEAKSLDTELDVVEGMQFDRGYLSPYFVTDAEKMRATLEEPYILLHEKKLSNLQDMLPILEKVVQSGRPLLIIAEDIEGEALATLVVNRLRGGLKVAAVKAPGFGDRRKAMLEDIAILTNGTVVSEEVGISLDGLTLDMLGSAKRVEITKDESTIVDGSGAKKEIEARCNQIRAQAEESTSDYDREKLQERLAKLAGGVAVIKVGGATEVEVKERKDRVDDAMHATRAAVEEGIVPGGGVSLVKAIPNLSKLKPANRDQEVGIEIVTRALQAPARYIAQNAGAEGSVIVGKLIEGKDDNVGYDATSNDFTDMIKAGVIDPTKVVRSALQNAASVAGLLVTTEAMVAEKPEPKESAPGGGMPDMGGMGGMGPWGGMGGMGGMM

SEQ ID NO: 6136 - protein, 164 aa, Brassica napus
  misc_feature (14)..(14): Xaa can be any naturally occurring amino acid
  misc_feature (42)..(42): Xaa can be any naturally occurring amino acid
  misc_feature (53)..(53): Xaa can be any naturally occurring amino acid
  misc_feature (135)..(135): Xaa can be any naturally occurring amino acid
LQNRCKFALDIVEXVANEIGPDRVGIRLSPFADYMESADTNXQALALHMAQSXNKYGILYCHVIEARMKTMGEITECPHLLVPMRKAFQGTFISAGGFTRTDGNEAVEEGRTDLVAYGRWFLANPDLPKRFEVDXPLNKYDRPTFYTSDPVVGYTDYPFLESKA

SEQ ID NO: 6137 - protein, 544 aa, Ustilago maydis 521
MVAELKQRTTTATRDAPAAPKEEFADANIPDDYVSRVLATEKPLPPIQLKNILSEIQWVSFLALTVTPILAIYGLFTTSWNTKTALWSFIYYFMTGLGITAGYHRLWAHRSYNATYPLQYFLACMGSGAVQGSIHWWSRGHRAHHRYTDTDLDPYGAHFGLFWSHLGWMLVKPRRKPGVADISDLRKNPVIKFQHKFYIPMLLFFGFGLPTLVAGLGWNDWRGGFFFAGMLRLVFVHHSTFCVNSLAHYLGEATFDNKMTPRDHFFTALVTVGEGYHNFHHQFPMDYRNAVQWYQFDPTKWFIASMYKLGLATHLKTFPDNEVKKGRLAMQLQKAHELGQQLEWPKSSAHLPVISWDDFVEESKTRPLMVVHGFIHDVSSFLDEHPGGRHLLTGKIGKDATTAFLGGVYDHSNAAHNLLSMMRVGVLDGGYQLAKDELAKAERENRATGVSSHRPAGSPPSPVTSDDEDFAAPATPTDDTPMTTTSTVAAASEQLKAQQSADNVKSINAKAAAYVTPGEAYTIVKRGDLRENAKVGGTKFGRFL

SEQ ID NO: 6138 - protein, 726 aa, Solibacter usitatus Ellin6076
MPLPKSRPRGMQDVRWSMLEPHTTKAVEPGSPFPLGATLVDGGVNFAIYSKQAAGVFLLLFDSADGAATDVIPLTARDKLVWHACVKGVRAGQLYGYKVSGEYRPDLGLRFNEAKLLLDPYARAVTGKFRNVDNLLLAYAAQPASADLTQDTRDNSAVVPKGIVIDDGFDWQGVGAPKSALEQLVIYEVHVKGFTAHPSSGVSAPGTYLGFIEKIPHLTRLGVNAVELMPVHEHYVDDFLVDRGLTNYWGYNTIGFFAPEVSYGSQREAGCQVAEFKTLVRELHRAGIQVILDVVYNHTAEGNEMGPSMSFRGLDNVSYYCLTGPAEAPRRYYMNYTGCGNSMNFDSPAVIRLVMDSLRYWVEAMHVDGFRFDLASVLGRGADGSFRSTSGFFDAVAQDPVLSRAILIAEPWDTGTYQLGNFPIDWSEWNGKFRDTVRCFAKSDSGQLSQMGWRLTGSADLYGSEGRSAYNSVNFVTCHDGFTLHDLVSYNGKHNEGNGENNQDGTNDNNSWNCGAEGDTTDSGILSLRRQLMRNHACYLMFACGTPMMLGGDEFARSQQGNNNAYCQDNAIGWFDWSLVERNGDLVEFFRKAIAFTRRFPVLQRRKFLLGDDLDADGVADLTWFSPDLGTPAWSDANARVLCYQLDTSDCGDTCDADRLFFILNSDFDSQWVKLPPLAAGHTWFRAIDTSLAAGEDFAENGTEVRVEPDDHYIANARSTVVLLAR

SEQ ID NO: 6139 - protein, 491 aa, Pseudomonas fluorescens Pf-5
MLSLSVQAATLTRDNGAAVGDNQNSQTAGATGPVLLQDVQLIQKLQRFDRERIPERVVHARGTGAHGTFTVTDNLTDLTRAKVFAAGEVTPVFVRFSAVVHGNHSPETLRDPRGFATKFYTEDGNWDLVGNNFPTFFIRDAIKFPDMVHAFKPDPRTNLDDDSRRFDFFSHVPEATRTLTELYSNSGTPASYREMDGNGVHAYKLINAKGEVHYVKFHWKSLQGLKNLDPKQVVEVQGRDYSHMTNDLVTHINKGDFPKWDLYVQVLKPEDLAKFDFDPLDATKIWPGVPERKVGQMVLNRNPANVFQETEQVAMAPANLVPGIEPSEDRLLQGRVFSYADTQMYRIGANALQLPINAPKNPVNNGNQDGAMNLGHSSTGVNYQPSRLMPREEPQTARYSQMALAGSTQQAKIQREQNFKQAGDLYRSFSKKERQDLIDSFGGSLATTDDESKHIMLSFLYKADPEYGTGVTKVAKGDLARVKALAAKLSD

SEQ ID NO: 6140 - protein, 344 aa, Photobacterium profundum SS9
MMQGLYMPNMKTLGEFIVEKQNDFPHASGDLSSLLGSIKLAAKIVNREINKAGLVDITGAIGSENVQGEEQQKLDLYANDKFKAAMEARDQVCGVASEEEDEAVTFNKDLNRNAKYVILMDPLDGSSNIDVNVSVGTIFSIYRRVSPIGTTPTQDDFLQPGNQQVAAGYVIYGSSTMLVYTTGNGIHGFTYDPSLGVFCLSHENMQIPEDGQIYSINEGNYIRFPQGVKKYIKFCQEDVPADNRPYTSRYIGSLVSDFHRNLLKGGIYMYPSTAMYPNGKLRLLYECNPMAFLMEQAGGVASDGKNRILDITPTELHQRVPFFVGSTNMVKQVESFIEEYPEQH

SEQ ID NO: 6141 - protein, 740 aa, Pelargonium x hortorum
MEACNCFEPQWPADDLLMKYQYISDFFIAVAYFSIPLELIYFVKKSAVFPYKWVLVQFGAFIVLCGATHLINLWTFNLHTRTVEIVMTTAKLMTAAVSCVTALMLVHIIPDLLSVKTRELFLKNKAAELDREMGLIRTQEETGRHVRMLTHEIRSTLDRHTILKTTLVELGRTLGLEECALWMPTRTGLELQLSHTLRQQNPVGYTVPIHLPVLNQVFSSNRAIKISPNSPIARLRPLAGKYVPGEVVAVRVPLLHLSNFQINDWPELSTKRYAMMVLMLPSDSARQWHVHELELVEVVADQVAVALSHAAILEESMRARDLLMEQNVALDMARREAETAIRARNDFLAVMNHEMRTPMHAIIALSSLLQETDLTSEQRLMVETILKSSNLLATLINDVLDLSRLEDGSLQLDIATFNLHAVFRQVFNLIKPIASVKKLFITLNVSPDLPEYVIGDEKRLVQIMLNVVGNAVKFSKEGIISVTAFVAKSESVRDPRAPDFFPVSSDNQFYMRVQVKDSGSGINPQDMPKLFTKFAQSQPVATKNSGGSGLGLAISKRFVNLMDGHIWIDSEGPSKGCTVTFVVKLGIPEGSNEPKLPLMPKVSANNSQTDFPGLKVLLMDENGISRMVTKGLLMHLGCDVTSVSSSEECLRMVSQDHKVVFMDVRVPGLDGHELAVRIHEKFMKRHERPLIVALTSNADKVTKENCLRVGMEGVILKPVSVDKMRNVLSKLLEHRILFEA

SEQ ID NO: 6142 - protein, 193 aa, Yarrowia lipolytica CLIB122
SLSTITKMAPPLNNPNYQPQQQNPNYQTRNNDEPSNACLYVLAVFFPFVAVGIKRGGCSGEMWLCLLLSYFFYIPGLIYAIYIIQQDSDKRRAQDVEHMGQGYATQYQQPQPIQPHYNQQPLHQQQAYPTEGTYPQVAPAKHEPAPMTQPPVNQHSGVAPQMHSGISPQAPPPTYAEGPSQPLHEKAQYVPPN

SEQ ID NO: 6143 - protein, 741 aa, Pelargonium x hortorum
MESCNCIEPQWPADELLMKYQYISDFFIAIAYFSIPLELIYFVKKSAVFPYRWVLVQFGAFIVLCGATHLINLWTFNMHSKTVEIVMTTAKIMTAVVSCATALMLVHIIPDLLSVKTRELFLKNKAAELDREMGLIRTQEETGRHVRMLTHEIRSTLDRHTILKTTLVELGRTLALEECALWMPTRTGLELQLSYTLRQQNPVGFTVPIHLPVINQVFSSNHAIKISPNSPIARLRPIAGKYMPGEVVGVRVPLLHLSNFQINDWPELSTKRYALMVLMLPSDSARQWHVHELELVEVVADQVAVALSHAAILEESMRARDLLMEQNVALDMARREAETAIRARNDFLAVMNHEMRTPMHAIIALSSLLQETELTPEQRLMVETVLKSSNLLATLINDVLDLSRLEDGSLQLDIGTFNLHALLREVHNLIKPIASVKKLCISLNVATDLPEYAVGDEKRLVQIILNVVGNAVKFSKEGNISITAFVAKSESLRDPRAPDFFPICGENQFYLRVQVKDSGLGINPQDIPRLFTKFAQTQPVATKNSGGSGLGLAICKRFVNLMEGHIWIDSEGPGKGCTATFVVKLGIPERSSEPKLLLMPKVPANHGQTNFSGLKVLLLDDNGVSRAVTRGLLAHLGCDVTTVSSSDELLRVVSQDYKVVFMDVCMPEVDGFEIAVRIHEKFMTRHERPLIVALTGNIDQVTKDNCTRVGMEGVVLKPVSIDKMRNVLSNLLEHRVLFEAI

SEQ ID NO: 6144 - protein, 451 aa, Bradyrhizobium japonicum USDA 110
MMRKTSVILLSAATGAALTLFVTQPRAVFMGSSARAATADTYRQLNLFGDVFERVRSDYVEKPDDTKLIESAISGMLTGLDPHSSYMDAKSFRDMQVQTRGEFGGLGIEVTMEDGLIKVVSPIDDTPASRAGIMANDIITNLDDEAVQGLTLNQAVEKMRGPVNTKIKLKIIRKGQDNPLDVTLVRDNIRVRSVRARIEADDIAYIRITTFNEQTTEGLKREVANLSNQIGDKLKGYIIDLRNNPGGLLEEAVTVSDSFLEKGEIVSTRGRNAEETQRRTAHAGDLTKGKPVIVLVNGGSASASEIVAGALQDHKRATIVGTRSFGKGSVQTIIPLGSGNGALRLTTARYYTPSGKSIQAKGIVPDIEVLQDVPDELKSRTDTKGEASLRGHLKNDGDEKTGSQSYVPPDAKDDKALKLADDLLHGIKNSASAAPTPGTDKAATDKPKAAN

SEQ ID NO: 6145 - protein, 524 aa, Escherichia coli
AAKDVKFGNDAGVKMLRGVNVLADAVKVTLGPKGRNVVLDKSFGAPTITKDGVSVAREIELEDKFENMGAQMVKEVASKANDAAGDGTTTATVLAQAIITEGLKAVAAGMNPMDLKRGIDKAVTVAVEELKALSVPCSDSKAIAQVGTISANSDETVGKLIAEAMDKVGKEGVITVEDGTGLQDELDVVEGMQFDRGYLSPYFINKPETGAVELESPFILLADKKISNIREMLPVLEAVAKAGKPLLIIAEDVEGEALATLVVNTMRGIVKVAAVKAPGFGDRRKAMLQDIATLTGGTVISEEIGMELEKATLEDLGQAKRVVINKDTTTIIDGVGEEAAIQGRVAQIRQQIEEATSDYDREKLQERVAKLAGGVAVIKVGAATEVEMKEKKARVEDALHATRAAVEEGVVAGGGVALIRVASKLADLRGQNEDQNVGIKVALRAMEAPLRQIVLNCGEEPSVVANTVKGGDGNYGYNAATEEYGNMIDMGILDPTKVTRSALQYAASVAGLMITTECMVTDLP

SEQ ID NO: 6146 - protein, 347 aa, Bradyrhizobium sp. BTAi1
MAREWPMEQSPTLQAHLALQNADADCAAVIEALADAARELARQIAIAPLAGFDEGAATVNADGDVQKALDIVADNLMRDALRKAPVAGILSEEVDRPETVNAAAPLCVAIDPLDGSSNLQNNISVGTIFSIRPRGRDVLSSFFEPGTAQRAAGFFVYGPQTCLVLAIDHRVDLYVLHPTLREFVLARSGLRIPQDTPEFAINASNRRHWSGTVRNYVDECLAGAAGPRGRDFNMRWIASLVAEAYRILMRGGVFLYPADSRPGYREGRLRLVYEAHPMALIMEWAGGSASSGRSRILELSARSPHQRAPLIMGDVRLVRDVDQLHEGVEPLFETSDAPLFARRGLFR

SEQ ID NO: 6147 - protein, 181 aa, Arabidopsis thaliana
RLYEYANNSVRGTIERYKKACSDAVNPPTITEANTQYYQQEASKLRRQIRDIQNLNRHILGESLGSLNFKELKNLESRLEKGISRVRSKKHEMLVAEIEYMQKRVKEIELQNDNMYLRSKITERTGLQQQESSVIHQGTVYESGVTSSHQSGQYNRNYIAVNLLEPNQNSSNQDQPPLQLV

SEQ ID NO: 6148 - protein, 366 aa, Polaromonas sp. JS666
MPSLFDPTQAGDIHLANRIVLAPLTRNRAPDAIPTSLMAEYYAQRASGGLLVTEATAISHQGQGYADVPGLYGTAQLDGWKEVTRAVHEAGGKIVVQLWHVGRVSHTELQPDGGQPVAPSAITARTKTVLLKDGAPTFVATSEPRALRADELPGIVHAYEAAARNAVETAGFDGVEVHGANGYLLDQFLKRGSNQRTDDYGGSIENRARLLLEVTRAVTGAIGGGRTGIRLSPVTPANDVHDADPQPLFDYVVRQLATLNLAYIHIIEGATGGPREIADRPFDYAALKTAYREAGGKGAWMVNNGYDQALAKQAVANGADLIAFGKPYIANPDLVERLRRNAPLNLPDQATFYGGGAKGYTDYPTL

SEQ ID NO: 6149 - protein, 133 aa, Magnaporthe grisea 70-15
MVNPPKEGEPSYELYKKEYDGIFEGLKARATALHKAFAEMEGVECDTPQGSMYLFPTINVPQKAAAEAEKEGRTPDEFYCMRLLEATGVCVVPGSGFGQKPGTLHLRTTFLAPGTEWVGSIVKFHKEFMDKYR

SEQ ID NO: 6150 - protein, 1008 aa, Chlamydomonas reinhardtii
MPHEFKTAVVWFRRDLRVDDNPALVAALAAAPNVIPVFIWAPEEEGQFQPGRCSRWWSKHSLVDLQQALAALGSRLVIRRSTDSTAALLQLVTELGAEAVFFNHLYDPISLMRDHDCKRGLTAAGVAHRTFNGDMLYEPWDVLDPNKQPYSTFDDFWNSVRAMPVPPPFPVSAPASMPAVPAAVPSMTVAEVDWFFTPEQEASSDQLKFKWKPGVGGAISELEHFLAERLTEFEHDRAKVDRDSTSRLSPWIHIGSISVRYIFYRVRQCQAEWLAAGTDRAQSCDDFLQQMGYREYSRYLAFHFPFIHERSLLGHLRACPWRIDQHAFKAWRQGQTGYPIVDAAMRQLWSSGWCHNRGRVVAASFLVKDLLLPWQWGLKHYWDAQIDADLECDALGWQYVSGGMSDAHPFSYMMDLEKEARRFDPDGEYVRRWLPALSRLPTEYIHAPWKAPASVLAAADVELGCNYPLPIITRSDAKANVDYACGVLEKSAVAPTGSESSGRYPYRAPTYPNAGGGGGASGGVDGAGSSGGNPTAAMGASGGAGPSSGTGTGGQGGAFRGRGDGGGSAPVSQQGGMLPPGVAVCVTAGTGGTQPDSRTVSGAHAGVSNSAGGVACDMPPPSHSHPRGGSSGVAAAGVGGVSGGPSSGGAAAPGATRKATAPGGAVFYHPGEASGEGHALLERILQQQRRQRGAANRQDGSGTNQPPPPVSMPGMLDAAGAAGGGGGGGGGLAGLPGVLQGLHGGAGATAAPAVAWAGRVAAGGVDDMDAVALWQQQQQLLQGGAAAFAFEQAMELLLARRRAGDGVSGFCGGDAPGRGGGDADEADGLMLEEDSEEVVSNTVDLHLSAFTGASCHRQSGTARGARAAERRLKKEAGSPEVTDGGGSAGAGCGEEDAMQCEDEEHGERGSPARRTADEEAQPPAEEGGAGSEDAGAAASEGDEAEGYGSESASEDNGGATPVEEADQMVVDGGGGGGGGGGGGGGRGGGQHKRRRSQLEGEQGDAAWE

SEQ ID NO: 6151 - protein, 354 aa, Nitrosomonas europaea ATCC 19718
MLFNPLQVGSLTLPNRILLAPLTRARADAGHMPNALMAEYYSQRATGGLLISECTMVAPGTSAFVNEPGIYNDAQIAAWRQVTDAVHAKGGRIFMQIWHAGRAAYPGAADGAPIVSSSATAIEGEIHTPQGKVPHAVPRPLTVDEIPGIVAAFAQGARNAIAAGFDGVEVHGANGYLIDQFLRDTPNQRTDAYGGSLENRARLLFEVLTAVTQAIGSERVGLRLSPLNSFNSMKDSDPLALIGFLADRLNAFKLAYLHVMRADFFGVQKADVMPVAREKYKGVLVGNMGYSADEAEAAIAEGRLDAVAFGTAFLANPDLPARIRAKAPLNAPDSNTFYAGGAKGYTDYPTLQLA

SEQ ID NO: 6152 - protein, 414 aa, Dechloromonas aromatica RCB
MKHVKKSAKLANVCYDIRGPVLQKAKQMEEEGHKIIKLNIGNLAAFGFDSPEEIQQDMIRNLPNAAGYTDSKGIFAARKAIMHYTQQKGIKGVTLEDIYVGNGVSELIVMAMNALLDAGDEVLVPAPDYPLWTAAISLSGGTPKHYLCDESKGWLPDLDDIRSKINAHTKAIVLINPNNPTGALYPDDLLYEIIDIARQHHLTIYADEVYDKVLYDDVKHTSIASLAEDVLMITFNGLSKNYRSCGYRAGWMVVSGDKRHAKDYIEGLDMLASMRLCANAPGQHGIQTALGGYQSINDLIKDGGRLRRQRDIAHELITAIPGVTCVKPKAALYMFPRLDPKIYPIKNDQQFISELLQEEKVLLVQGTGFNWPHPDHFRLVFLPHEDDLREAVARIARFLENYRKRHNTNQLIKD

SEQ ID NO: 6153 - protein, 563 aa, uncultured crenarchaeote
MCGIVGILSKKERNVAPLIGKMLSCMKNRGPDGMGLSTENQIVYSDTFDNPLFSQVEGHDVLGHSRLAIVGGSCGQQPFVSCDKKLILEHNGEIYNYKEIRKNLSAHHTFTTSTDSEVIVHLLEDHYQNTKGDLIEAIRRTVTQLDGIYVLAIREQSTGDIVLVRDGIGVRQIYYGESSDFIAFASERKALWKIAMSDQIKRLLPGYALVISRKEGSSNFKTTLFPISVNTKKSICEKYSILYTDIDSAVNAYGDTLVESMRKRVSDFKKIGIVFSGGIDSVIVAYLAKQMAPEVICYTSGIKGSSDILNSLEIAEKLDLKLEIEQMTESDVESTIPKIISIIEDDNMGQVEVAIPIYGAVKLAHEQGIRVMLTGQGADELFGGYSWYSKIVKKHGYEKIQGYLIEDIKLLYKETLEREDKITMSQSIELREPFLDTNLIDTVLRIDPRLNIQNNGNNYDNLGKRVHRKLAEKLGIPKEIAYRIKEAAQHGSGIHNTLNTLAMKNGFTESKVNSSYLDKLKKRELIGSSQRYGHLFEKEQIWSLEPHIQMYLENISKNILPRN

SEQ ID NO: 6154 - protein, 634 aa, uncultured bacterium
MEANHPSAMNAAAHSTSLAAPAAAAFSHFRQYEVLGAHADSTGTHFTVWAPNAKQLELIGTFSNWVPVAMQRAQDGSGRWSARVEGAGHGDLYKYRIEDAHGQWTEKADPYATRQEHPPGTASQIWKLDYEWNDRAWMAARADRQALGAPMSIYEVHLGSWQRQEGGRFLNYRDIAQRLAAHCNALGFTHVELMPITEHPFYGSWGYQTTGYFAPTARYGDPQDLMVLVDTLHQHGIGVLLDWVVSHFPSDAHGLARFDGTALYEHEDLRKGFHPEWNSLIFNYGRYEVRDFLIGNALFWLSKYHFDGIRVDAVSSMLYLDFARKPGEWVPNADGGHQNWEAVRFLQDLNCAVYAEFPDVQVIAEESTAWAGVSRPVDAGGLGFGMKWNMGWMNDTLRYMQRDHGHRHWHEGDIRFSMVYAFDENFVLALSHDEVVYGKRSLLSRQPGDQWQRFAGLRTLYGMMWSHPGKKLLFMGGEFGQVDEWHHERTLDWHLWAKARHSGMARWVADLNRIYRERPALHAHDFDAEGFAWAPVAPHQSTVLAFVRRAGDDIVLAVHNLTPQPVAALRVGVPVAGRWHELLNSDAEPYGGSGMGNFGGVDATPTPLEGQPAHLHLTVPPLSTVFLSNRPTRA

SEQ ID NO: 6155 - protein, 256 aa, Schizosaccharomyces pombe
MSFQILPIPMWVGTQDNYAYLLLCEETRQAAIVDPAEVNVVMPILKKKLKNKEIDLQAILTTHHHADHSGGNLNLKKEFPHVTIYGGSDQNGVSHVLQDKETLRIGNVQIEALHTPCHTRDSICFYAHSSNEHAVFTGDTLFNAGCGRFFEGTAAEMHIALNAVLSSLPNNTVIYPGHEYTKSNVKFASKHLQSEALNHLEGLCNHNQFIAGHITMGQEKQFNPFMRVTDPELQKHLGLNDPIKVMDELRTLKNQG

SEQ ID NO: 6156 - protein, 646 aa, Xanthomonas oryzae pv. oryzae KACC10331
MCGLAGLLLASPRLHGEQLDALVRPMGAALRHRGPDDAGTWCDAQAGVALAHQRLSILDLSPLGHQPMRSADGRYVLAYNGEVYNFAQLRAALSALGHRFRGHSDTEVLLAAVVEWGLDETLTRCNGMFAIALWDERDNCLFLARDRVGKKPLYYGWAGDTLVFGSELKALWQHPDFDNGVDRNALTLLLRLGYIPAPACIHAHTFKLMPGRVLRMDAQAVAAGAAAHRADQAQQPFWNAREAMQRALAAPFTGSDAQAEEQLDSVLRDAVALRMVADVPVGVFLSGGTDSSIVTAMMQAQSAQPVHTFSIGFEGSHHDEAPLAREVATHLHTDHTELYVSGADALAVVPCLPDMFDEPFADASQVPTALVARLARGGVTVALSGDGGDELFFGYGRYQRALRNWRMHGLVPGPLRRLMAVAARRNGESSRTGGLAALVAEAGARGIGDIYRNRISRWRDPAAVVPGATEPDSFYSLADPLHGSGTPADAMMLADFAAYLPDDLLCKVDRTTMAVGLEARAPLLDWRVAEFAWSLPLSLKYRDGMSKYLLKRVLCRYLPDTMVYRGKRGFGAPVSAWLRGDLHGWADDLLAHGALQREGVFAADTVAGLWRDFNGGERKWHTHLWTVLMFQAWQAHWREQRAAITR

SEQ ID NO: 6157 - protein, 376 aa, uncultured archaeon GZfos18B6
MEERGISKQELESFLKEQKQRDLTYRKVLSSMCTYPREIAVYAHNLFLDSNLGDSGLFPGTKEIEDELIRMIGALLGNENAHGYISTGGTESNIQAIRAIRNRKRKEGLQQMNIIVPKTAHFSFDKIEDLLSLEVKKAGLDDELRVDVNLVEELIDDNTISIVGIAGTTEFGQIDPIKELADIAHNSDIFLHVDAAFGGFVIPFLDAEYQFDFSLDAVSSISVDPHKMGMSTIPAGCILFRDESYLADLAVNTPYLTTNEQCSLIGTRSGAPVAATYAVLKYLGRNGLRAIVDECMLLTRMLVRGAKAMDIYPVIEPVTNVVTLRFPDVDRVAKALEARGWRVSTTRAPKALRLVIMPHVTEDTIELFLNDLACVT

SEQ ID NO: 6158 - protein, 131 aa, Edwardsiella tarda
VTAINRGDYPKWDLYIQVLKPADLKNFDFDPLDATKVWPDVPERKIGEMVLNKNPDNVFQETEQVAMAPSNLIPGIEPSEDKLLQGRLFAYADTQFYRIGANGLSLPINKPHSVVNNGNQDGQLNSGHTLD

SEQ ID NO: 6159 - protein, 529 aa, Zea mays
MFSPPFSPSPSPPSLEAFAPQLLRPVRPPTRLIPPAAMDPYKHRPSSGSNSSFWTTNSGAPVWNNNSALTVGQRGPILLEDYHLIEKLAQFDRERIPERVVHARGASAKGFFEVTHDVSHLTCADFLRAPGVQTPVIVRFSTVVHERGSPETLRDPRGFAVKFYTREGNFDLVGNNMPVFFIRDGMKFPDMVHAFKPNPKTNLQENWRIVDFFSHHPESLHMFTFLFDDVGIPLNYRHMEGFGVNTYSLINRDGKPHLVKFHWKPTCGVKCLLDNEAVTVGGTCHSHATKDLYDSIAAGNYPEWKLYIQTIDLDHEDKFDFDPLDVTKTWPEDIIPLQPVGRMVLNKNVDNFFAENEQIAFCPAISVPGIHYSDDKLLQTRIFSYADTQRHRLGPNYLMLPVNAPKCAHHNNHHDGFMNFMHRDEEVNYFPSRFDPARHAEKVPIPPRVLTGCREKCIIQKENNFKQAGERYRSFDPARQDRFIQRWVDALTDPRVTHEHRTIWISYWSQCDAALGQKLPSRLNLKPSM

SEQ ID NO: 6160 - protein, 711 aa, Cytophaga hutchinsonii
MKKPTSKTEGTDPKFQDLQKNTSDATDQFMTTDQGLKINDDNNSLKAGERGPSLLEDFILREKITHFDHERIPERIVHARGSAAHGYFQVHESMAQYTKAGFLQDPSIKTPVFVRFSTVAGSRGSTDLARDVRGFSVKFYTAEGNYDLVGNNMPVFFIQDAAKFPDLIHAVKPEPHHEMPQAASAHDTFWDFISLMPESMHMIMWVMSDRAIPRSLRMMEGFGVHTFRFINKNNESHFVKFHWKPKQGTHSVVWDEAQKISGKNCDFHRQDLWEAIESGNFPEWELGVQLIPEADEHKFAFDLLDPTKLVPEEEVPVTIIGTMVLNRNPDNFFAETEQVAFHPGHLVPGIDFTNDPLLQGRLFSYTDTQLSRLGSPNFHEIPINRSVAPTHNNQRDGHMRQEINTGRVSYHPNSLGGGCPFQAKMAEGGFTSFNERIDAKKVRERSESFSDHFSQATLFFNSQTEVEKGHIIKALRFELGKVETEAIRVRMVGLLSQIDKTLATKVAAGLGIAVPAPAFPMNHGVGADDDFEKHEPKKAEQVTKSSDALTILRNPTVTPSIATKQIAFLCADEVSGASVVSYKNALERKGAVVKIIAPHLGFIKTEEGKKIKVDQSLLIAASVLFDAVFIPAGKGIKQLKGIKEVAEFITDTYKHCKVIGGEDEGALVIQSVQAIMEAGKNADEGIVLNKDTTAFVKALGKHRFWEREEAV

SEQ ID NO: 6161 - protein, 581 aa, Nicotiana tabacum
MGNTCVGPSISKNGLFQSVSAAMWRTRAPDDSGSTTNGDSARGETTESGKDPDLVVQNKPPEQITMPKSEQKEEEPAKKEEGPVKPKKPVEMKRVGSAGLRTDSVLQKKTGNLKEFFSIGKKLGQGQFGTTFKCVEKATGKEYACKSIAKRKLLTDDDVEDVRREVQIMHHLAGHPNVISIKGAYEDAVAVHVVMEYCAGGELFDRIIQRGHYTERKAAELTRTIVGVLETCHSLGVMHRDLKPENFLFVNQKEDSLLKTIDFGLSIFFKPGDRFNDVVGSPYYVAPEVLKKRYGPEADVWSAGVIVYILLSGVPPFWAENEQGIFEEVLHGDLDFSSDPWPSISEDAKDLVRRMLVRDPKKRLTAHEVLCHRWVQVDGVAPDKPLDSAVLSRMKQFSAMNKLKKMALRVIAESLSEEEIAGLKEMFRMIDTDNSGQITFEELKVGLKRVGANLKESEIYDLMQAADVDNSGTIDYGEFIAATLHFNKIEREDHLFAAFSYFDKDGSGYITADELQQACEEFGIGDVHLEDMIRDADQDNDGRIDYNEFVAMMQKGNPVIGGGKKGLEHSFSTGFREALRL

SEQ ID NO: 6162 - protein, 833 aa, Saccharomyces cerevisiae
MNNAANTGTTNESNVSDAPRIEPLPSLNDDDIEKILQPNDIFTTDRTDASTTSSTAIEDIINPSLDPQSAASPVPSSSFFHDSRKPSTSTHLVRRGTPLGIYQTNLYGHNSRENTNPNSTLLSSKLLAHPPVPYGQNPDLLQHAVYRAQPSSGTTNAQPRQTTRRYQSHKSRPAFVNKLWSMLNDDSNTKLIQWAEDGKSFIVTNREEFVHQILPKYFKHSNFASFVRQLNMYGWHKVQDVKSGSIQSSSDDKWQFENENFIRGREDLLEKIIRQKGSSNNHNSPSGNGNPANGSNIPLDNAAGSNNSNNNISSSNSFFNNGHLLQGKTLRLMNEANLGDKNDVTAILGELEQIKYNQIAISKDLLRINKDNELLWQENMMARERHRTQQQALEKMFRFLTSIVPHLDPKMIMDGLGDPKVNNEKLNSANNIGLNRDNTGTIDELKSNDSFINDDRNSFTNATTNARNNMSPNNDDNSIDTASTNTTNRKKNIDENIKNNNDIINDIIFNTNLANNLSNYNFNNNAGSPIRPYKQRYLLKNRANSSTSSENPSLTPLISNLIMTAKFQKFLLMTKKKKKPDFRPFTSRDPNNQTSENTFDPNRFTMLSDDDLKKDSHTNDNKHNESDLFWDNVHRNIDEQDARLQNLENMVHILSPGYPNKSFNNKTSSTNTNSNMESAVNVNSPGFNLQDYLTGESNSPNSVHSVPSNGSGSTPLPMPNDNDTEHASTSVNQGENGSGLTPFLTVDDHTLNDNNTSEGSTRVSPDIKFSATENTKVSDNLPSFNDHSYSTQADTAPENAKKRFVEEIPEPAIVEIQDPTEYNDHRLPKRVKK

SEQ ID NO: 6163 - protein, 639 aa, Lactobacillus reuteri
MCGIVAFVDNEKPQIKDQLIQKMKDRIIHRGPDAEGQYVDDDVALGFRRLSFIDVKSGNQPIFNEDSSKAIEFNGEIYNFEELREELISKGHTFKTHADTEVILHGYEEWGKDVVNKLRGMFGFVIWDFKTKEMFGARDHFGIKPLYYAKMNGTFFVGSEIKAFLDHPNFKKELNKEALKPYMTFQYPVTQETFFKGVYRLPEGHYFTYKDGQFEMTQYWDENFEPEDETFDEAVNKIDEVVKNSVKAHTFADKGIKVGSFLSAGVDSSLVTALMRPDNTFSIGFDSTYDETKQARELAAKMGLKNTDEKLTNEEAFHAFPMIQYYLDEPDSNPSVVPLYFLNKLAKDNGYKALLSGEGADELFAGYIDYGFNTKVKFIRWVTDQLKKMPRERRYKFAKWLDGKHFHGQEHMYRNLAPARDTFIGQAYIFSPEEAADYLQPEFDCGPSIADILNPLFDKMEDKDIDEVAKKQYVDLHRFMPGDICLKADKMSMANSVEIRVPLLDKEVMKVAETTPTKYLFNYKDTKWAFRMAANRHLPEEWATRPKMGFPTPVRAWLREKKYYQEVRELFEQDFVKEFFDQEKLLKLADDNFEGKVDGRRKIWTIYTFLTWYKLYFIDNFKPDESGIDRAQKAATTEV

SEQ ID NO: 6164 - protein, 131 aa, Zea mays
  misc_feature (22)..(22): Xaa can be any naturally occurring amino acid
  misc_feature (34)..(34): Xaa can be any naturally occurring amino acid
  misc_feature (36)..(36): Xaa can be any naturally occurring amino acid
QSDETWKMGDIVHTLTNRRWLXKCVTYAESHDQXLXGDKTIAFWLMDKDMYDFMALDRPSTPTIDRGIALHKMIRLITMGLGGEGYLNFMGNEFGHPEWIDFPRGPQRLPSGKFIPGNNNSYDKCRRRFDL

SEQ ID NO: 6165 - protein, 248 aa, Arabidopsis thaliana
MEGGASNEVAESSKKIGRGKIEIKRIENTTNRQVTFCKRRNGLLKKAYELSVLCDAEVALVIFSTRGRLYEYANNSVRGTIERYKKACSDAVNPPTITEANTQYYQQEASKLRRQIRDIQNLNRHILGESLGSLNFKELKNLESRLEKGISRVRSKKHEMLVAEIEYMQKRVKEIELQNDNMYLRSKITERTGLQQQESSVIHQGTVYESGVTSSHQSGQYNRNYIAVNLLEPNQNSSNQDQPPLQLV

SEQ ID NO: 6166 - protein, 514 aa, Lycopersicon esculentum
MKANPPCLILLLLISATVLTVHSDDDDDDVSPENTILDTGGLSRESFPKGFTFGTATSAYQVEGSASTEGRGPSIWDTFLKIPGLEPNNANGEIAVDQYHRYKEDIDLMAKLNFEAYRFSISWSRIFPNGTGKVNWKGVAYYNRLIDYMLKRGITPYANLNHYDLPQALQDRYNGWLGREVVKDFADYAEFCFKTFGDRVKNWFSFNEPRVVAALGYDNGFFAPGRCSKPFGNCTEGDSATEPYIVAHNLILCHASAAQRYREKYQEKQKGKFGILLDFVWYEPLTKGKADNYAAQRARDFHLGWFLHPLVYGEYPKTMQNIVGTRLPKFSKEEVKMVKGSFDYVGINQYTSYYMYDPHYTTPQPLGYQQDWNVGFAYDRKGVPIGPRAHSYWLYIVPWGLYKAINYVKEHYGNPTIILAENGMDYAGNITLPKALHDTKRINYYKSYLQQLKKTVDDGANVIGYFAWSLLDNFEWRLGYTSRFGIVYVDFNTLRRYPKMSAYWFKKLLKRQKH

SEQ ID NO: 6167 - protein, 450 aa, Trichoderma viride
MLPKDFQWGFATAAYQIEGAVDQDGRGPSIWDTFCAQPGKIADGSSGVTACDSYNRTAEDIALLKSLGAKSYRFSISWSRIIPEGGRGDAVNQAGIDHYVKFVNDLLDAGITPFITLFHWDLPEGLHQRYGGLLNRTEFPLDFENYARVMFRALPKVRNWITFNEPLCSAIPGYGSGTFAPGRQSTSEPWTVGHNILVAHGRAVKAYRDDFKPASGDGQIGIVLNGDFTYPWDAADPADKEAAERRLEFFTAWFADPIYLGDYPASMRKQLGDRLPTFTPEERALVHGSNDFYGMNHYTSNYIRHRSSPASTTPSATSTCSSPTSRATASAPRRSPPLAPVRPAATSWCGSARGTYPPIYVTENGTSIKGESDLPKEKILEDDFRVKYYNEYIRAMVTAVELDGVNVKGYFAWSLMDNFEWADGYVTRFGVTYVDYENGQKRSPRRAQRA

SEQ ID NO: 6168 - protein, 516 aa, Zea mays
MAAAMVRTMSTTAAGTPPVSVATINPKLVWVALICDRIAGRLKVSISVLKCEYAVRGEIVTHAQNLQQELQKNPESLPFDEILYCNIGNPQSLGQQPVTYFREVLSLCDHPALLDKSETHALYSSDAIERAWQILEKIPGRATGAYSHSQGIKGLRDEIAAGIAARDGFHASGDNIFLTDGASPAVHMMMQLLISSESDGILCPIPQYPLYSASIALHGGSLVPYFLNEETGWGLDVDELKKQLEEARSKGITVRALVVINPGNPTGQVLVEENQKKIVEFCKNEGLVLLADEVYQENIYVEDKPFHSFKKIARSLGYTDDDLPLVSFQSVSKGYYGECGKRGGYMEITGFSPEVREQIYKVASVNLCSNVSGQILASLVMNPPKAGDESFESFMSEKDGILSSLARRAKALEEAFNSLEGITCNKAEGAMYLFPRLHLPQKAIGAAQAVGTAPDAYYAKRLLEATGIVVVPGSGFGQVPGTWHFRCTILPQEDKIPAIVSRLKEFHEKFMDEFRD

SEQ ID NO: 6169 - protein, 254 aa, Oryza sativa
MISPDAARNVVGIIGNVISFGLFLSPVPTFWRICKRKDVEQFKADPYLATLLNCMLWVFYGIPIVHPNSILVVTINGIGLIVEGTYLFIFFLYSPNKKRLRMLAVLGVELVFMLAVILGVLLSAHTHKKRSMIVGILCVFFGSIMYFSPLTIMGKVIKTKSVEYMPFFLSLVCFLNGVCWTAYALIRFDIYVTIPNGLGAIFGAIQLILYACYYRTTPKKTKAAKDVEMPSVISGPGAAATASGGSVVSVTVER

SEQ ID NO: 6170 - protein, 674 aa, Frankia sp. EAN1pec
MPHDHPTASSSSAYPTTFSPIALGPRTARNRIWLAAHATEFSTDGTFADASADYYAERARGGVAVITMEAMAVHPSTRPRRGVILAYEAAVVDSYRKVAAAVHPHGALLMAQLWHRGRQTDGIISRLPTWAPSPVPDTVYREIPHEVTRREIDELVAHYVLSARHAMEGGVDGVEIHGLAHGYLLGQFLSPATNHRTDEYGGSFDGRIRIVRRIVEEVRQVVPADRVLGIRLNSSDGPGQNGLDNADWVRIATETESWGALDYISTTQGTYLDRMQIYGTSAARPAGYEVADTANITRAVSLPVVAVGRITTPEMAEDILASGKAQFVGMARQLIADPLWAVKAEQGRPDDIRPCIGANWCVASFARGPLACIHNPQVGRERQFRQDETRQRRRRRVAVVGGGPAGLRAALTAAELGHQVTLFEQDDTLGGQVNLIAQAPSYREWTGVTDWLTTQLARTDVSIQLKHRVTVNDLVGRYEAVVVATGSTPLRHGWTARRPERWARDAAALPGSDQWNVYTPVEILTGSVELPNRILIVDDTGDRQAFITAEYLRQRRHAVHVVSQYPQLGHAFADGHDLPFAFGQLRRSGVTFTPNVEVNAIDGDTVTLTDVFTGEASQLPDVDGVVLILGNTANDLLARELDGAGLDIHLVGDAQAPRRIFNAIWEADTAARTI

SEQ ID NO: 6171 - protein, 140 aa, Zea mays
MVSFEMNDLKKIGLSLTGFGVFFSFLGIVFFFDKGLIAMGNILFLSGLGLTIGLKSTMQFFTKPKNYKGTISFGAGFFLVLIGWPFFGMLLEAYGFIVLFSGFWPTLAVFLQRIPILGWIFQQPFVTSFLDRYRGKRVPV

SEQ ID NO: 6172 - protein, 921 aa, Yersinia pestis biovar Medievalis str. 91001
MTKYSLRARMMILILAPTLLLGLLLSTSFMVNRYNELQNQIVSAGTNIIEPLAVASEYGMSFRNRDTVRQLINLLHRRHSNIVRSISVFDVDNKLFVTSNYNYNSSQLRLPPGEPVPDSLMLSYRGDSLILRMPIVSESNLSSEQASGQGESDQILGYIAIDLDLQSVRLKQYKEIFISTLLLLFCMCVAILFAYRLMRDVTGPIRNMVNTVDRIRRGQLDSRVEGHMLGELDILKNGINSMAMSLAAYHEEMQQNIDQATSDLRETLEQMEIQNVELGLAKKRAQEASRIKSEFLANMSHELRTPLNGVIGFTRQTLKTSLTPTQTDYLQTIQRSANNLLCIINDVLDFSKLEADKLILEHIPFSLRETLDEVIILLAHTAHEKGLELTLHINNDVPDQVLGDAMRLQQIVTNLLGNAIKFTEEGNIDILVVVKAIASQQVTLMVEIHDTGIGISESQQAQLFQAFRQADASTSRRHGGTGLGLVITERLVKEMGGNISFQSQMSCGSIFRFHLTLELNESIPYRQPDMAHLEGKQLAYIERNSTAARATINILNTTPLQVTHRQSLAQLPEQHYDFLLVGVPIPFRNNMAIHQDKLLTALKIADHVILALPSQSQVEAEQLKQIGAKDCLLKPISSIRLIPLLLAEDTHSKVPSEEQPRKQPKLPFRVMAVDDNPANLKLIGTLLEEQIEETVLCDSGAMAITYAREHTLDIILMDIQMPEIDGIRASEIIHQIPHHQETPIIAVTAHAVKGQQEQLLRLGMADYLAKPIDEARLLQVLSRYQSDNPPLSTASTAESLPLPVPKGAGVIDWAQAVRQAANKEDLARDLLTMLLEFMPQITARVQAILAGADDGDILNLVHKFHGSCACSGVPRLRQLCMTIELQLRQQVNLQDLEPEWLELLDEIENVSEAAKTYLRTE

SEQ ID NO: 6173 - protein, 171 aa, Arabidopsis thaliana
MEEKKTESTNKNVKKANLLDHHSIKHILDESVSDIVTSRGYKEDVRLSNLKLILGTIIIVVALVAQFYNKKFPENRDFLIGCIALYPFFSNSIDTFCFLLDSHLVGFQDHSPALVWWYLQSCPDSLISTLSPSTVLIQNQSQLGSQFSSPKVSPNGSRKMEFLLRVYSGKT

SEQ ID NO: 6174 - protein, 709 aa, Magnaporthe grisea 70-15
MCGASVIVSLRRKHEETNGAAAAKTSDKESRLAKSLDALAHRGPDARGVWIDPTGEVGLAHTRLAIIDLSAEGNQPLHDDQDHIHAVITGEIYDHDRLRRECVEAGYRFKGHSDSEVVVALYQRYGAPGFLEHCRGEFSMVVYDDRSGEVFACRDRSGIKPLFYTIVQNELWFSSEVKGFLGMGWKPEWALESIAMGVTQVGSSTIFQGVNRIEPGFYMKVTADGDITHSKYWDFDYPDKTVVDNRSMEDMVQELREALVDAVRLRLRADVPVGIYLSGGLDSSMIAGIAKKLIDEEGATAGSQKASERMTTFTLAVNSDQDNSVYNEASIASRTAKFLGVKEKTLNADEQLLASTFEDACWHIEQPISTLSMCAKVALSKLARDSGVTVILTGEGADETFAGYPWMLPDLTAEADHSRPDAPINRDIDNLRGPIRKQLFDMWANLGSTEMPKLLQQVKPETWAKMNFVSTPVVSDGSSGVGLIHPKLRAKYNLDDRISKTQDCIGEDVLKKVREKWHPLNSSLYLNHKTLLANTIIPSNGDRTEMANSVEGRPPILDHKVLELASKLPPSVQVGYFPDGANLNSGKTVFRSNNADGELMARFREKFLLREAARPFVTDEIYSRPKHSFMASSNYHAGGPIHQVLKRLLTKENVEAVGFLDWPKIEAHLASAFDPQLAHVAGQNFAPCLQAASFVTISQKFGVARASVE

SEQ ID NO: 6175 - protein, 536 aa, Thermoplasma acidophilum
MRIRNRLVMSPMISNMADPDGNTNENHISYLEERAKGGAGLIITEYTYVDRRSGIGSRNQMGMYDERQIPKFSRLTERIHAHGAKIFVQLVHAGAKAIGAINEYKIAPSKTNFDPSVREMDASDIEDVISAYRKAANIAERSGFDGIEIHGAHGYLVDEFLSPWWNKRTDRYGGSFENRIRFAQEVIDAVRSEVDIPVGIRISLYEDEEDGYSPDYGMKIAESIRNIDYVHVSAGNNEPPGSSASFYSPHAHIFQKLRGSTGKTLIVAGSITAREDVDLVLSAADFVAVGRAMLADPYFPMKIITGKGEIRPCIRCNQGCRNLAYGEVRCTVNPYFVVPEPRKIYKGEVVVVGAGVKGLEASLYAAKSGLKVVIYEKEDRIGGQINSIFDASKAREFRQLLDYYGRTIKKYGIDVRLGERYSGDGIYCLPDTVYPDLPDKDEIWIDSNVYMYHDLALRYAAEHKVYLSSYSLTSLDRARRKAYANIARKAGVTIVDTADHYDVSIHDRNQYDIYQAMLSGIEAMRSHIAASENEYL

SEQ ID NO: 6176 - protein, 122 aa, Aspergillus parasiticus
MSEQPYDPYIPSGSTTNAPAGASAAQNGDPRTREIDKKIQETVDTMRSNIFKVSERGERLDSLQDKTDNLAVSAQGFRRGANRVRKQMWWKDMKMRVCLVICVILLLVVIIVLPLSLLSIKH

SEQ ID NO: 6177 - protein, 578 aa, Nicotiana tabacum
MGNTCVGPSISKNGIFQSVSAAMWRSRSPDDTASTTNGESARIETPISVKEPDSPLPVQEPPEQMTMPKSEKKEEEKEQPKKPKKPAEMKRVSSAGLRTDSVLQKKTGNLKEFFSIGKKLGQGQFGTTFKCVEKATGKEYACKSIAKRKLLTDDDVEDVRREVQIMHHLAGHPHVISIKGAYEDAVAVHVVMEFCAGGELFDRIIQRGHYTERKAAELTRTIVGVVEACHSLGVMHRDLKPENFLFVDQKEDSLLKAIDFGLSIFFKPGDRFTDVVGSPYYVAPEVLRKRYGPEADVWSAGVIIYILLSGVPPFWAENEQGIFEQVLHGDLDFTSDPWPSISEDAKDLMRRMLVRDPRRRLTAHEVLCHPWVQVDGVAPDKPLDSAVLSRMKQFSAMNKLKKMALRVIAESLSEEEIAGLKEMFKMIDTDNSGQITFEELKDGLKRFGSNLKESEIYDLMQAADVDNSGTIDYGEFIAATLHMNKIERQDHLFAAFCYFDKDGSGYITADELQQACEEFGIGDVRMEEMIREADQDNDGRIDYNEFVAMMQKGNPVLGGGKKGLEHSFSIGFREAVKL

SEQ ID NO: 6178 - protein, 341 aa, Triticum aestivum
  misc_feature (146)..(146): Xaa can be any naturally occurring amino acid
MKFGSIYEEYLRAEQDKYLAKCSHVEYKRLKKVLKRCRLDRSLQADGTNGEQQEDRSDDSSDACDCNSCTLCDQMFFTELTKETSDIAGYFSSRVQHLLNLHVPSGLQRYIWRVRQCFIDDQQIMVQEGRLLVNYVTMNAIAIRKXILKKYDKVHGSVSGRDFRSKMQSEHTELLQSPWLIELGAFHLNCDSSDIDEPVGFFKNGFFKNFSCDLTGTQPVMTMAISETIKYDYSLTCPICLDTLFNPYALSCGHLFCKGCACGAASVYIFQGVRSAPPEAKCPVCREVGVFAHAVHMNELDLLIKTRCKDYWRCRLREERTEMVKQSKEYWESQAMLSMGI

SEQ ID NO: 6179 - protein, 284 aa, Corynebacterium efficiens YS-314
MSPTPSPTLSLSDGSEIPQIGLGTWQMHGEEAYRTVREAIGMGYRHIDTAKLYDNEVEVGRAVTDAIRSGEVTRDELFITSKVWNDDQGREQAARAFQASLARLGLDYLDLYLVHWPCPRKGLYNETFEAVARIQGLGQVQSIGVANFYAGVLEDLVVTTGIVPAVNQVELHPGFSQAPLRALHDRLGVVTTAWAPLARGGVLSHPVIKGIAGRYGVPASAVVLRWLVQLGVVAIPKSSDPGRLRSNLDVHGFQLSVEEVERITALDEGPGMGRLFHDPEEFPA

SEQ ID NO: 6180 - protein, 581 aa, Nicotiana benthamiana
MGNTCVGPSISKIGLFQSVSAAMWRTRMPDDSGSTTNGDSARGETAESSKDPNLVVPSKPPEQITMPKSDQKEEEPAKKEEGPEKPKKPVQMKRVGSAGLRTDSVLQKKTGNLKEFFSIGKKLGQGQFGTTFKCVEKATGKEYACKSIAKRKLLTDDDVEDVRREIQIMHHLAGHPNVISIKGAYEDAVAVHVVMEYCAGGELFDRIIQRGHYTERKAAELTRTIVGVLEACHSLGVMHRDLKPENFLFVNQKEDSLLKTIDFGLSIFFKPGDRFNDVVGSPYYVAPEVLKKRYGPEADVWSAGVIVYILLSGVPPLWAENEQGIFEEVLHGDLDFSSDPWPSISEDAKDLVRRMLVRDPKKRLTAHEVLCHRWVQVDGVAPDKPLDSAVPSRMEQFSAMNKLKKMALRVIAESLSEEEIAGLKEMFRMIDTDNSGQITFEELKVGLKRVGANLKESEIYDLMQAADVDNSGTIDYGEFIAATLHFNKIEREDHLFAAFSYFDKDCSGYITADELQQACEEFGIGDVHLEDMIRDADQDNDGRIDYNEFVAMMQKGNPVIGGGKKGLEHSFSTGFREALRL

SEQ ID NO: 6181 - protein, 366 aa, Propionibacterium acnes KPA171202
MTSPLLFQPLTLRGLTVRNRAWLPPMCQYAVDSQDGIPSTWHLIHYGSFAVGGFGLIVAEATAVSPEGRISPCDTGLWNDAQVAAWRTITDAVHELGGTIAVQLGHAGRKASTEKWWPGFHGGVIPPEKGGWIPVGPTAAPADGKQYAGSPVTALNEDGISKIIDDFRTAASRAVVAGFDAVEIHSAHGYLLHQFYSPLSNTRTDGWGSDYDGRVRLPLAVADAVRGAIPDDMPLLARLSVTDWRDDGWSVEDSIELSRRFALAGVDLVDASSGGNSSAPIPVAPGYQADLAARVRAEADVPTATVGMIWTGELAEDLLNKGCADAVMVGRAALRDTNWPLRAAHELGVPNEEAPWHPARFRGAWR

SEQ ID NO: 6182 - protein, 542 aa, Kineococcus radiotolerans SRS30216
MSKIIAFDEEARRGLERGMNQLADAVKVTLGPKGRNVVLEKKWGAPTITNDGVSIAKEIELEDPYEKIGAELVKEVAKKTDDVAGDGTTTATVLAQALVREGLRNVAAGANPMGLKRGIEKAVEAVTEQLLGAAKEVTTKEQIAATAGISAGDASIGELIAEALDKVGKEGVITVEESNTFGLELELTEGMRFDKGYISPYFVTDAERQETELEDPYILILNSKISTVKDLLPLLEKVMQSGKPLVIVAEDVEGEALATLVVNKIRGTFKSVAVKAPGFGDRRKAMLGDIAILTGGQVISEEVGLKLDTADLDLLGRARKVVVTKDETTIVEGAGDADAIAGRVGQIRAEIERSDSDYDREKLQERLAKLAGGVAVIKAGAATEVELKERKHRIEDAVRNAKAAVEEGIVAGGGVALIQAGVLAFEKLELVGDEATGANIVKVAIEAPLKQIAINAGLEGGVVAEKVRNLPTGHGLNAATGEYVDLLGAGINDPVKVTRSALQNAASIAALFLTTEAVIADKPEKAAAAPAGGDGGMGGMDF

SEQ ID NO: 6183 - protein, 371 aa, Brassica oleracea var. italica
QMGQAENQVSFDLLESYLEKKNPEGSLWESKGSRGFRENALFQDYHGLKNFRQAMASFMEKNRGGKARFDPDRIVLTAGATAANELLTFILANPNDALLVPTPYYPGFDRDLRWRTGVRIVPIHCDSSNHFQITPEALEAAYKTARDANIRVRGVLITNPSNPLGATVQKKVLEDLLDFCVRKNIHLVSDEIYSGSVFHASEFTSVAEIVENIDDVSVKERVHIVYSLSKDLGLPGFRVGTIYSYNDNVVRTARRMSSFTLVSSQTQHMLASMLSDEEFTDKYIRINRERLRRRYETIVEGLKKEGIECLKGNAGLFCWMNLGFLLNTNTKEGELELWDVILKELELNISPGSSCHCSEFGWFRVCFANMD

SEQ ID NO: 6184 - protein, 369 aa, Brassica oleracea var. italica
QMGLAENQLCLDLIKEWIKENPKASVCTPEGVHQFSDIANFQDYHGLKEFRQAIAHFMGKARGGRVTFDPERIVMSGGATGANETIMFCLADPGDVFLVPSPYYAAFDRDLRWRTGVEIVPVHCSSSNNFKLTVEAVEWAYKKAVESNKNVKGLLFTNPSNPLGTILDKDTLKNLVRFVTKKNIHLVVDEIYAATVFAGENLVSVAEVVKDSEVNADLIHIVYSLSKDMGLPGFRVGIVYSYNDSVVSCARKMSSFGLVSSQTQFMLASMLSDDSFVGNFLMESSKRLGIRHGVFTLGLKKAGINCLISTAGLFVWMDLRHLLRVRNSFESEIELWHIIIDKVKLNVSPGSSFQCTEPGWFRVCFANMD

SEQ ID NO: 6185 - protein, 344 aa, Mesorhizobium sp. BNC1
MPVPSSMPSAPNSKHGGTSAQAPTFRPAPDHESRRTMKTYKLVNRDVSAPGRDSAADADGSGVEMPMIGLGVFQTPPDETTAAVEEALRLGYRHIDTAAAYGNEREVGEGIRRAGIARDEVFIETKIWISDYGYDETLHAFDKSAGKLGVDQIDLLLLHQPLPSAFDRTLGAYRALEKLLADGKVRAIGVSNFMPEHLTRLLTETSIVPAVNQIEVHPYFQQRALQRLHAEHGILTQAWSPIGGITFYRGGEKSTLEDPVLLEIAQQHGKSAAQVMLRWHLQEGRSVIPKSTKPARIAENFDVFDFELSGEQIAAIDALDTGVRSGPEPDSITLESYGRPIPEA

SEQ ID NO: 6186 - protein, 482 aa, Zea mays
MAASVTVENLNPKVLKCEYAVRGEIVIHAQRLQQQLQTQPGSLPFDEILYCNIGNPQSLGQQPVTFFREVLALCDHPCLLEKEETKSLFSADAISRAKQILATIPGRATGAYSHSQGIKGLRDAIAAGIMSRDGFPANADDIFITDGASPGVHMMMQLLIRNEKDGILCPIPQYPLYSASIALHGGALVPYYLNEKTGWGLEISDLKTQLENARSKGIDVRALVVINPGNPTGQVLAEDNQYDIVKFCKNEGLVLLADEVYQENIYVDNKKFNSFKKIVRSMGYGEDDLPLVSLQSVSKGYYGECGKRGGYMEITGFSAPVREQIYKIASVNLCSNITGQILASLVMNPPKAGDESYASYKAEKDGILESLARRAKALEDAFNKLEGFSCNKAEGAMYLFPQIHLPQKAIEAAKAAKKAPDAFYALRLLESTGIVVVPGSGFGQVPGTWHIRCTILPQEDKIPAVISRFRAFHEAFLAEYRD

SEQ ID NO: 6187 - protein, 635 aa, Dechloromonas aromatica RCB
MCGITGIFDTRSKRDIDRAVLHRMNESQIHRGPDEGGTHVEPGVGLGHRRLSIIDLSTGQQPLYNEDNSVCVVFNGEIYNYQELIPELQALGHVFHTRSDTEVIVHAWEAWGESCVDRFRGMFAFALWDRNRETLFLARDRLGVKPLFYALLDDGTFLFGSELKSLLAHGGLKRDIDPCAVEEYFALGYVAEPRSIFKQALKLPPASTLLVRRGQPVGTPREYWDVRFTLDNPISDADAQAELTHRLEESIKLRMISEVPLGAFLSGGVDSSAVVALMAGLSQKPVNTCSIGFSDPAFNESEFAKMVADRYQTNHHLDIVESDDFDLIDTLARLYDEPYADSSAIPTYRVCQLARKHVTVALSGDGGDESFGGYRRYRLHMMEEKMRSALPLGLRRPLFGALGKLYPKADWAPRVFRAKTTFEGMARNSVEAYFHSVSILRAPMRDRLFSTQFKSALSGYDALKVFTDHAAKADTTDPLALIQYLDLKTYLIGDINTKVDRASMAHSLEVREPLMDHKLVEWLATLPSTLKIRGQEGKYLLKKSMEPHLPNDVLYRPKMGFSVPLARWFRGPLKTRVQESILGSRLADTGWFNRDYLQKLVTDHNNGSRDYSASIWTILMFEAFLRNVMEQGEAA

SEQ ID NO: 6188 - protein, 716 aa, Glycine max
ITGIPPPGTGQKIYEIDPSLLAHRDHLDFRYGQYKRLCYEIDKHEGGLDTFSRGYEKFGFIRSATGITYREWAPGAKSAALIGDFNNWNPNADVMTRNEFGVWEIFLPNNVDGSPPIPHGSRVKIRMDTPSGIKDSIPAWIKFSVQAPGEIPYSGIYYDPPEEEKYVFKHPQPKRPKSLRIYESHIGMSSPEPKINTYVNFRDDVLPRIKRLGYNAVQIMAIQEHSYYASFGYHVTNFFAPSSRFGTPEELKSLIDRAHELGLLVLMDIVHSHASNNTLDGLNMFDGTDGHYFHPGSRGYHWMWDSRLFNYGSWEVLRYLLSNARWWLDEYKFDGFRFDGVTSMMYTHHGLEVAFTGNYNEYFGFATDVDAVVYLMLTNDVIHGLFPEAVTIGEDVSGMPTFCLPTQDGGIGFDYRLHMAIADKWIEILKKNDEDWKMGDIVHTLTNRRWLEKCVAYAESHDQALVGDKTIAFWLMDKDMYDFMALDRPSTPIIDRGIALHKMIRLITMGLGGEGYLNFMGNEFGHPEWIDFPRGDQHLPTGVIVPGNNNSFDKCRRRFDLGDADYLRYRGMQEFDQAMQHLEEKFGFMTAEHQYISRKNEGDKIIVFERGNLIFVFNFHWNNSYSDYRVGCSTPGKYKIVLDSDDALFGGFSRLNHTAEYFTSEGWYDDRPRSFLIYAPSRTAVVYALADDVEPTLADEAEPALADEAEPEPVDP

SEQ ID NO: 6189 - protein, 349 aa, Pseudomonas syringae pv. phaseolicola 1448A
MTTIFDPITIGDLQLPNRIIMAPLTRCRADEGRVPNALMSEYYVQRASAGLILTEATSVTPMGVGYPDTPGIWSNDQVRGWSNITKAVHTAGGRIVLQLWHVGRISHPAYLNGETPVAPSAIAAEGHVSLMRPITPLPTPRALELAEIGDIVEAYRVGAENAKAAGFDGVEVHGANGYLLEQFLLTGSNQRTDEYGGSVENRARLLLEVTDAVIEVWGAGRVGVHLSPRFDMHDMSDANRTETFSYVAKELGKRGIAFICARERDAEDSLGPQLKKDFGGVYIANEKFTKDTANTWLAEGKADAIAFGVPYIANPDLPERLASDAPLNEAHPETFYGKGPVGYIDYPRL

SEQ ID NO: 6190 - protein, 356 aa, Yarrowia lipolytica CLIB122
MSKPKPSEVRTLAFNVSDHYQILDMVGEGAYGIVCSALHTPSGQKVAIKKITPFGRSMFCLRTLREIKLLRHFSHENIIGILDVQKPASFESFNEVYLIQELMDTDLHRVIRTQELSDDHCQYFVYQTLRAIKALHSANVLHRDLKPSNLLLNASCDLKICDFGLARSAASTEDNFGFMTEYVATRWYRAPEIMLTFKEYTKAIDMWSIGCILAEMLGGRPLFPGRDYHSQLTMILDVLGTPTMEDYYSVKSRRAREYIRSLPFKKKLPFSQLFPKANPLAIDLLEKLLTFNPAKRITVEEALVHPYLEQYHDADDEPTAEPIPDEFFDFDRNKDELSVEQLKTLIYNEIMYWKRP

SEQ ID NO: 6191 - protein, 207 aa, Mycobacterium avium subsp. paratuberculosis K-10
MAGIDKIVTHGTFELDGGSWEVDNNIWIVGDDSDVVVFDAAHTAEPIVAAVGNRNVVAVVCTHGHNDHVTVAPELGAALDAPVLLHPGDDVLWRMTHPDKDFRTIADGDTIDVAGTELLALHTPGHSPGSVCWYAPELGVVFSGDTLFSGGPGATGRSYSDFPTILQSISGRLGTLPGETVVHTGHGDSTTIGDEIVHYEEWVARGH

SEQ ID NO: 6192 - protein, 135 aa, Zea mays
MRKHRIVSLVAALLVLLALAAVSSTRSAQKESVADNAGMLAGGIKDVPANENDLQLQELARFAVNEHNQKANALLGFEKLVKAKTQVVAGTMYYLTIEVKDGVVKKLYEAKVWEKPWENFKQLQEFKPVEEGASA

SEQ ID NO: 6193 - protein, 162 aa, Glycine max
  misc_feature (101)..(101): Xaa can be any naturally occurring amino acid
  misc_feature (113)..(113): Xaa can be any naturally occurring amino acid
  misc_feature (115)..(115): Xaa can be any naturally occurring amino acid
  misc_feature (140)..(140): Xaa can be any naturally occurring amino acid
MVRSKTAYQTDVSDHSTFAYRYDRTYLARDKIAEESILEEAAYQIIHDQLMLDGNSRLNLAAFETTWMEPERDKVIVADIDKNDDHMDEDPVSTELQNRSXNMIPHLFNAPLXRXHTAIGGGTVGSSEAIMWDGLAFHRXWRNRKTLDGKPYDIPNIVTGAN

SEQ ID NO: 6194 - protein, 209 aa, Bacillus clausii KSM-K16
MYTQIPLGPLQTNAYVLYNEKKEAVLFDPGGDGAAFVNWIREQKLTPQAILLTHAHFDHIGALEEVRQAFACPVYLHEAEKQWLLDPLKNGSARMGRQPIKTKPADHLLKDEGTLKVGSFSFKLFHTPGHSPGSVSYYVADENIVFSGDALFQQGIGRTDLFGGNHELLVQSIHNKLLTLPEETIVASGHGPLTTIGQEMDHNPFLNGY

SEQ ID NO: 6195 - protein, 455 aa, Yarrowia lipolytica CLIB122
MHIKISTDFAIQNLHCTTMIRPLLRLCGQRTAATPFVSFFRPPKKPLSGISFARHYSPTKKPPSEVPTPTPGNYLVPITGPPGDTPRDTDLLIKSLTHKSLLPENNLVRCTVFDSDGNVTVASGEFKRTELLNKHGLLPRDLRKLDTGVNSIVPTILVRDNSILINLLHIRALIKADKVLLFDVFGSTDSKTQSLFMYDLGHKLKKSNKTMGSLPYEMRALEAIFISVIAALDAEMKVHTTVINGILSELEQDIDREKLRHLLIQSKKLSAFLQKATLIRDVIDELLDTDEDLAGLYLTEKKAGHPRAIDDHSEVEMLLETYYKHCDEIVQTVGNLVSNIRNTEEIVNIILDANRNALMHLDLKFQIGALGLAGGTFIASLYGMNLKNFIEESYWGFLGVTGVASLLTVWIIAHFLKSLRQVQRVTMTSDKKKAMKKKDTVAEKRRNHLRNWLTK

SEQ ID NO: 6196 - protein, 147 aa, Myxococcus xanthus
MQTRNPFNSAVVVNPLMRDVDALFRELTQPMWRQAPRERTPAADITESESGLTLHLDMPGLEAKAIQVTVEKDILTVQSERKAEPRAEGVNVRRQERAFGTFARSFALPDTVDASRVEARYEQGVLTLTLPRREESKPRVIEVKVQG

SEQ ID NO: 6197 - protein, 1267 aa, Kluyveromyces lactis NRRL Y-1140
MSCAVQAAVVAMKDNSSHGQVPYRANNEHLNRVVQSVTDATKRLSQISTASSNANVNNTKTSKRRNRDTVGPWKLGKTLGKGSSGRVRLAKNMETGKLSAIKIVPKKFVKSNQIKQLPYGIEREIIIMKLISHPNVMGLYEVWENKSELYLVLEYVEGGELFDYLVSKGKLPESEAIHYFKQIVQAVAYCHGFNICHRDLKPENLLLDKKKRSIKIADFGMAALETSDKLLETSCGSPHYASPEIVLGRKYHGSPSDVWSCGIILFALLTGHLPFNDDNVKKLLLKVQSGKYQMPQWLSVEAKDLISRILVVDPNRRITIDQILQHELLTKYDQKSRSKSNSDLNLLNRTPNIVSFSSERDIDETILSNLQILWHGAARKHLVTRLMKPGFTEEKMFYSLLWNYQEKQQKSMQKDLIPVPTLKTSSASSVSPLNISSDVNSVTNTAKKQQQSSNGTVLPASMAPTISAFGQQISSDSSESSTLQAPKIHQKSHFSISSLKNGSSKSPKKTKQGFIASSSSSKLFQPNFGAKSSSQSISKSSSKKSLTPTTPKKRTLQNSASKRSLYSLQSISKRSINLNELLHDELQHEYPPPPLPSISSSEHTSSKLESIVDDYDRSTSVHGATMDNFLGESGQHMKAQQNEKLTQPSKNILAQPKLNNQPQTENRQSVTSMKRKTADNTIATVPVSMTPLKDMTNTFQSKSMYVSSLDPKRNKPKPSLENLLRKVSVPQRIKSRSTIRKLRDSGDWTVSGEAQALFGGKGSSEGENQLQRQKTNPSKLTAPETVLTTSTPMTDIKPDLLRMPSSLINSSMTFKDLSQFIMNIDEDKVPVTQASNPVNTDHEKLSENQTLMIENDSNRFETSSNYDDYNVNTAPAVTTAGDIDIFEDAPDDANESVTTSESMIDQSQLNLKKKAASIDSIDTSHVLTPATDVRVSLYINQMDKLDNLPRETTEQIISKFKLSPIKDIKQKRFSNGDRDLTITGSMISMFKDLDGDESRAEYDDNGLGLLGSALDTRPVENETNEDTNGTTVKRNSTVLVSSINGDNLDLSTEEQKNDDGNHGQGQTRRVTLLFDDGSSESEQVFKPVAAERRQPTLNANSTTTNNVGSKRKSNYINKLPKIKEDEVKPITSMKSSSPVNWFSKLLQRIKTSKPKRTVYEYRTSSIPFDNIHILLMTQFGKNGVDCELKKMERKGDKEYVTYDCNFGGIKRNRPKSKFTVEMRCMNGTETVLSLETRSKRFVNDKDTMASFERFNKDVAGAISAQEE

SEQ ID NO: 6198 - protein, 181 aa, Zea mays
MVVTVAATGSDTAEPLHSTTFASRYVRDQLPRYRMPEGSIPKEAAYQIISDELMLDGNPRLNLASFVTTWMEPECGKLMMDSVNKNYVDMDEYPVTTELQNRCVNMIAHLFNAPIGEDETAIGVSTVGSSEAIMLAGLAFKRKWANKMKEQGKPCDKPNIVTGANVQVCWEKFARYFEVEL

SEQ ID NO: 6199 - protein, 349 aa, Symbiobacterium thermophilum IAM 14863
MAHLFDPFTQKSVTLRNRIVMSPMCMYVAGADGVATDWHLVHYGTRAVGGAGLIITEATAVEPRGRISEGDLGLWNDQQAEALARIARFVHDQGVAFAIQLAHAGRKAWTPCKGQGPEPAVAPSALPFDTDWVTPQALDAEGIDRVVAAFGAAARRAGELGCDLVEIHAAHGYLLHEFLSPLTNRRTDEYGGPLVNRARLLRRVFEAVREAFPADRPVWVRISATDWVEGGWDIAESVELARMMKAWGVDLVDVSTGGNSPLQRIPSIGPGYQVAFAERIRREAGIATGAVGLITTPEQADSVVRTGQADVALLGRELLRNPYFPLAAAHRLGHEVTWPEPYVRGKFRR

SEQ ID NO: 6200 - protein, 273 aa, Propionibacterium acnes KPA171202
MSVPSITLNDGVAIPQLGFGTWKVPANEAEKAVSAALEAGFRHIDTAAIYGNEEGVGRALADSGLDRKDLFVTTKLWNSSHHADDARKAIETSLTKLGLDHVDLYLIHWPAPVKYGDAYIEAWNALQDFKSEGLTRSIGVSNFKTEHLDAIEGATPSVDQIEMHPSFNQATFRAELAERGINPEAWSPLGQSKDLDNPVLTDISKATGKTPAQVVIRWHLQIGNVVFPKSVTPSRIAENFDVFDFELSDEQIAAIDGLDHGNRLGGDPSTADF

SEQ ID NO: 6201 - protein, 779 aa, Frankia sp. CcI3
MLRDSARFSRNGCLLAGSSLVPRWFLAGSRWRRGRPRRRRDAVRKRGLLVSSRVGPGTPGQHQVVSEVTIMTDPGTSRLPRDDAKQQQLDAVRIGDDGARMTTDQGIGVEHTDDSLAAGERGPTLLEDFHFREKLTRFDHERIPERVVHARGAGAYGYFEAYESLADVTRAHFLGEDGRRTPVFVRFSTVGGSRGSADTVRDVRGFAVKFYTEEGNFDLVGNNMPVFFIQDGIKFPDFVHAVKPEPHNEIPQASSAHNTLWDFVSLVPESMHMMMWLMSDRALPRSYRMMQGFGVHTFRFVDAAGQGTFVKFHWRPKLGTHSLVWDETQKIAGKDPDFNRRDLWESIENGTFPEWELGVQLVPESDEHAFDFDLLDATKIIPEERVPVRPVGRLVLNRNPGNFFAETEQVAFCVQNVVPGIDFTNDPLLQARLFSYLDTQLIRLGGPNFAQLPVNRPVAAVHNNSRDGYGQHRIQQSQTSYFPNSISGGCPVLSDPAHGGYVHYAERVDGNTIRKRSESFKDFYSQATLFWNSMSSWERRHIVDAFSFELGKVDYTQIKERVLGHLAQVDHELAAGVAENLGLPVPPESTPNHGRSSPALSQADQPSGVATRRIAVLAADGVDEVALRSATAALREQGAILEVLAPHGGMLATVSGDALPVDRTLVTMSSVLYDAVFVAPGERGVTALTHNGEAVHYVGEAYKHAKPIGAVGAGVSLLEIASLPGARVADQGDAVVSDRGIVTVRDLAGPSVLGDFGSAFATAVAAHRHFDRALEAVAA

SEQ ID NO: 6202 - protein, 813 aa, Escherichia coli
SSMQLGSNVPFPRQLTVTRDGDIMILRTPIISESYSPDESPSSDAKNSQNMLGYIALELDLKSVRLQQYKEIFISSVMMLFCIGIALIFGWRLMRDVTGPIRNMVNTVDRIRRGQLDSRVEGFMLGELDMLKNGINSMAMSLAAYHEEMQHNIDQATSDLRETLEQMEIQNVELDLAKKRAQEAARIKSEFLANMSHELRTPLNGVIGFTRLTLKTELTPTQRDHLNTIERSANNLLAIINDVLDFSKLEAGKLILESIPFPLRSTLDEVVTLLAHSSHDKGLELTLNIKSDVPDNVIGDPLRLQQIITNLVGNAIKFTENGNIDILVEKRALSNTKVQIEVQIRDTGIGIPERDQSRLFQAFRQADASISRRHGGTGLGLVITQKLVNEMGGDISFHSQPNRGSTFWFHINLDLNPNIIIEGPSTQCLAGKRLAYVEPNSAAAQCTLDILSETPLEVVYSPTFSALPPAHYDMMLLGIAVTFREPLTMQHERLAKAVSMTDFLMLALPCHAQVNAEKLKQDGIGACLLKPLTPTRLLPALTEFCHHKQNTLLPVTDESKLAMTVMAVDDNPANLKLIGALLEDMVQHVELCDSGHQAVERAKQMPFDLILMDIQMPDMDGIRACELIHQLPHQQQTPVIAVTAHAMAGQKEKLLGAGMSDYLAKPIEEERLHNLLLRYKPGSGISSRVVTPEVNEIVVNPNATLDWQLALRQAAGKTDLARDMLQMLLDFLPEVRNKVEEQLVGENPEGLVDLIHKLHGSCGYSGVPRMKNLCQLIEQQLRSGTKEEDLEPELLELLDEMDNVAREASKILG

SEQ ID NO: 6203 - protein, 264 aa, Brassica napus
RFLWLCWSSGDIHGQYQDLLRLFEYGGYPPSANFLFLGDYVDRGKQSLETICLLLAYKIRYPSKIYLLRGNHEDAKINRIYGFYDECKRRFNVRLWKIFTDCFNCLPVAALIDDKILCMHGGLSPELDNLNQIREIQRPTEIPDSGLLCDLLWSDPDQKIEGWADSDRGISCTFGADKVAEFLDKNDLDLICRGHQVVEDGYEFFAKRRLVTIFSAPNYGGEFDNAGALLSVDESLVCSFEIMKPALASSSGHPLKKVPKMGKS

SEQ ID NO: 6204 - protein, 218 aa, Glycine max
  misc_feature (32)..(32): Xaa can be any naturally occurring amino acid
MVQTRKFRGVRQRHWGSWVSEIRHPFLKRRVXLGTFETAEEAARAYDQAAILMSGRNAKTNFPILQTPEGDPKTTLTPIDHETSSSSTTTSKELEEILHAKLRKCGKLPSPSMTCLRLDPENSHIGVWQKRAGQRSDSNWVMMVPPLGKKGGANEGGTGGDASCSNSFPFSECDPTPQVARQELLRTEMDEEERIALQMIEELLSRNCPTSPSFNNLY

SEQ ID NO: 6205 - protein, 149 aa, Arabidopsis thaliana
  misc_feature (109)..(109): Xaa can be any naturally occurring amino acid
GPPALKAGKEGAEYLGTGPPKFHFSGQDGIDAKKDGIYPVGTLDGAPFKASPPVFLMSRKIKSLGGKRVLSGEGAAEIFGGALFFHKAPTKKKFPQKTWRRGFISPPKXRHHQFFLLTLIRRAGDNLQIKALPKYDCLKANKSTSAFGL

SEQ ID NO: 6206 - protein, 644 aa, Solibacter usitatus Ellin6076
MCGIAGFVTVQPSDSPSIIERMTDTIRHRGPDDFGFYRDPWASLGFRRLAIIDVSGGHQPMPNEDQSKFIIFNGEIFNHASLRPALEQAGHRYSNRSDTETILHSYEQYGADCVLRLRGMFAFAIWDKNTRKLFCARDRLGKKPLYYFWDGRTFAFASEIKALFEHPSISPQFEESLLPEYLAFGYVSEDRTLFRGIRKLMPGHHLTLHLGAPNPQPVIRQYWEIPDPQPEQRDDASWISECRDRMEQTVQMRLMSDVPLGMFLSGGVDSSAIAALMKRNFSGPVKTFAVGYQEAEFSELSYARHVAGAIGTDHHEVVVGMEDFFNALPRLIWHEDEPITWPSSVSLYFVSKLAREHVTVVLTGEGSDEMFGGYARYRFYAMNERWMRFYRILPRAVRTAIRSQVATTSLLSSTLRRKLQHTFVGRAEDLESLYLDNFYSAFSQSQQRDLFPALAATSPYANFRRYWDSKPGLNPLPRMLFADQKTYLIELLMKQDQMSMATSIESRVPFLDHEFVEFSTRVPEHMKLRNGEGKYIVKKAIEGLVPHEIIYRKKMGFPTPLRQWLLDPRAAHLFDMMRAKDGLLASCIDPARLDDLLLRQTSGREDVTDRIWRLLTLQLWGDMFFTGKREERWDGLMAAARPAV

SEQ ID NO: 6207 - protein, 480 aa, Streptococcus pyogenes MGAS8232
MLAFPKEFWWGGATSGPQSEGRFAKQHRNLFDYWYEEEPDLFYDYVGPDTASDAYHQIESDLALLASLGHNSYRTSIQWTRLIDDFEQATINPDGLAYYNRVINACLANGIRPVINLHHFDLPIALYQAYGGWESKHVVDIFVAFSKVCFEQFGDRVKDWFVHNEPMVVVEGSYLMQFHYPAIVDGKKAVQVAYNLALATAKVIQAYRRGPAELSNGRIGTILNLTPAYPASQSEADMAAAHFTELWNNDLFMEAAVHGKFPEELVAVLKKDGVLWQSTPEELALIAENRVDYLGLNFYHPKRVKAPDVIPVISPSWSPEWYYDPYLMPGRRMNVDKGWEIYPEAVYDIAIKMRDHYDNIPWFLSENGVGISGEDRYRDETGQIQDDYRIQFLKEHLTYLHKGIEAGSNCFGYHVWTPIDGWSWLNAYKNRYGLVENNIHTQVRRPKASAYWFKKVATHNCLISLEVMEEFGGSASHLSD

SEQ ID NO: 6208 - protein, 392 aa, Candida albicans SC5314
MTISNSNLFKPINIGKKTISHRIAHLPTTRNRATKDHVPTDLMQKYYTDRAKTGGLLVTEATLISLNQGIYPNVPGIWNNQQRDAWKKITDSVHSVGGFISVQLWALGRVGNAKLLKNHGLPLTGVSPIYEHEQAEKDAVKAENPIQELTQDEIKDIIYNQFANAAKLADEAGFDFIELHGANGYLFEQFIHPGTNKRTDKYGGSIENRARFLFEVVDHLSTIVDPSKLAIRLSPLNNFQVPGINPTAKEDYSYIIAGLQKRADEGKGFGYINVVEGRFSPDGSTEACDVNFVGDIWKGALLKGGNYTYDKKNSWETIERDANADNRTLVGFGRYFIANPDLPTRIEKDLPLNDYDRSTFYANDDYGYNTYPFYGQEIKADPEHKVFGVALA

SEQ ID NO: 6209 - protein, 220 aa, Brassica napus
  misc_feature (56)..(56): Xaa can be any naturally occurring amino acid
MGSEGRTPVTINITGFKKFHGVAENPTEKRAYNLKEYLAKYPQSKDVVLGSCTVLXTADQGALPSLYQLLQSTINRKKSESVTCGKTIWVHFGVNSGATKFAIEQQAVNEATYRCPDELGWKPQHLPIVPSDGPISTVRKTTLPVEEITKALEKKGFEVITSDDAGRFVCNYVYYHSLRFAEQNKTYSLFVHVPLFVAVDEETQMRFPASLLEVLTSVCK

SEQ ID NO: 6210 - protein, 443 aa, Glycine max
  misc_feature (66)..(66): Xaa can be any naturally occurring amino acid
MREAQNDIVATEFATTTNDEEVPSGVVLFGKYELRRLLGVGAFAKVYHATSVDDTHQSVALKAVSXNKVLNGGFAANVEREISIMRRLHHPNIINLFEVLATKTKIYFVMEFAAGGELFHEVAGKGRLTEETARFYFRQLISAVKHCHSRGVFHRDLKLDNLLLDEDGNLKVSDFGLSAVTGQIRPDGLLHTVCGTPTYVAPEILAKRGYDGAKVDLWSCGVVLFALIAGYLPFNDYNPSVLYRKIYRGQFRFPRWISHDLRFLLSRLLDTNPKTRITVDEIYKDTWFNADGEYRFNRVLVKESECEKQLGRTGFKSLNAFDLISFSTGLDMSGLFEDPTGSNSVERVVSTVVPEKIMERVEAMTEEGRVVVRREKNGGGAKLEGQDGNLIGIVVVYQLTDELVVVEMKRSEKGGGFGGQFWKDKLRPLLLELASELEEPVSR

SEQ ID NO: 6211 - protein, 140 aa, Brassica napus
LNESTGWGLEISDVKKQLEDARSRGIDVRALVVINPGNPTGQVLAEENQYDIVKFCKNEGLVLLADEVYQENIYADNKKFHSFKKIVRSLGYGEEDLPLVSYQSVSKGYYGECGKRGGYMEITGFSAPVREQIYKIASVN

SEQ ID NO: 6212 - protein, 474 aa, Brassica napus
  misc_feature (450)..(450): Xaa can be any naturally occurring amino acid
  misc_feature (466)..(466): Xaa can be any naturally occurring amino acid
MAAAVSTVGAINRAPLSLNGSGAGAASVPATTFLGKKVVTASRFAQNNKKSNGSFKVVAVKEDKQTDGDRWRGLAYDMSDDQQDITRGKGMVDSVFQAPMGTGTHNAVLSSYEYLSQGLKQYNLDNMMDGLYIAPAFMDKLVVHITKNFLTLPNIKVPLILGVWGGKGQGKSFQCELVMAKMGINPIMMSAGELESGNAGEPAKLIRQRYREAADLIKKGKMCCLFINDLDAGAGRMGGTTQYTVNNQMVNATLMNIADNPTNVQLPGMYNKEDNARVPIIVTGNDFSTLYAPLIRDGRMEKFYWAPTREDRIGVCKGIFRTDKIKDEDIVTLVDQFPGQSIDFFGALRARVYDDEVRKFVEGLGVEKISKRLVNSREGPPVFEQPEMTLEKLMEYGNMLVMEQENVKRVQLADQYLNEAALGDANADAIGRGTFFGQTTVNLPVPEGCXTDPAAKNFDPTARSDXDGTCVFNF

SEQ ID NO: 6213 - protein, 942 aa, Pseudomonas aeruginosa PAO1
MVRLRIAIGLLVSFLLLLLGPMSPAVADDAGVSSVPLQTTATTPSANQNWRLLRDESAQLRIADVLQRKEQFRPLAKRSFIFPASPQAVWLQVQLPAQKVPSWLWIFAPRVQYLDYYLVQDGQLVRDQHTGESRPFQERPLPSRSYLFSLPVDGKPMTLYVRMTSNHPLMAWFDQIDEAGLVGLEKPAYAFGMLLGGMLLLLMYNLIRFAYSRSASSLWLAAVHAALAVCAAANLGLVAFWLPGLKFNQSLTADLGALGAAVSLLWFACSFFRGTAESRLNRLLQGEALLILAVGAIIAFTQQLWFSWLIYLLVILSSLSVPLIAAWHWYRGYQPARLIVAGMIVFNAGFMVFLPVLFGTKQLDPGWLVLGVFSFATLAGLVLSVSLTERQRLIQQLNLQQRTSEAAHTAELQTKAEFLAKISHEIRTPMNGVLGMTELLLGTPLSAKQRDYVQTIHSAGNELLTLINEILDISKLESGQIELDEVQFDLNALIEDCLDIFRVKAEQQRIELISFTQPQVPRVIGGDPTRLRQVVLSLLDNAFKQTEEGEILLVVALDDQGETPRLRIAVQDSGHPFDAKEREALLTAELHSGDFLSASKLGSHLGLIIARQLVRLMGGEFGIQSGSSQGTTLSLTLPLDPQQLENPTADLDGPLQGARLLVVDDNETCRKVLVQQCSGWGLNVSAVSSGKEALAQLRTKAHLREYFDVVLLDQDMPGMTGMQLAAKIKEDPNLNHDILLIMLTGISNAPSKIIARNAGIKRILAKPVAGYTLKATLADELAQRGVSGVTNYLQPAKEAQAPSLPSDFRILVAEDNSISTKVIRGMLNKLNLQPDTASNGQEALSAMKATQYDLVLMDCEMPVLDGFSATEQLRAWEAHEQRPHTPVVALTAHILSEHKERARLVGMDGHMAKPVELSQLRELIAYWVGERDRRRQGDALPS

SEQ ID NO: 6214 - protein, 550 aa, Kluyveromyces lactis NRRL Y-1140
MPSEYSSPPVYSTSNGFKYSHHPYGAQYSRPDGPLLLQDNHLIESLARFDRERIPERVVHAKGGGCHIEFELTDSLSDITYAAPYQSPGYKCPGIIRCSTVGGESGAPDTARDPRGFSFKFYTKWGNHDWVFNNTPVFFIRDANKFPHFIHTQKRSPRNHLGQASDTSMYWDYLTQNIESIHQITYMFGDRGTPASWSDMSAYSGHTYKFINAEGKLTYVQIHVLPENGFKTLSLEEANKLAGENPDYNNQLLFEKLEAGERPKFNCYVQTMTPEQAENFRYSINDLTKIWPHKEFPLRKFGTITLTHNVDNYFEEIEQLAFSPSNTCIPGIEPSNDSVLQSRLFSYPDTQRHRLGTNFMQLPVNRPVNMGREACPFAGANFQRDGPMCMFNFKDQPNYIASSGKNLVQFNTLDDNNAKSTHERFTGVVLEEDVVAEIKRQEENRVEHERVVNGKINEYYIVNGASPVDLEQPRALYEKVYNDKDKKTFVKNVVAHASKISNPEIKTRVSQYFGLLNEDLGKQIAEGLEIQWEPVSFETYARRISIASAF

SEQ ID NO: 6215 - protein, 574 aa, Kluyveromyces lactis NRRL Y-1140
MCGIFASFRNPDVQAYKPKALQLSKRIRHRGPDWSGNIVKNSTILVHERLAIVGLDSGAQPITSEDGSYTLAVNGEIYNHIMLREECASYPFKTLSDCEPIIPLYEKYDIDAPKHLDGMFAWCLYDSKKDRIIAARDPIGITTLYMGRSSASPKSVWFSSELKCLTDDCDEIIAFPPGHVYDSETDKLTRYFTPDWLDESRIPTTPVDFKAVRESLEKAVRKRLMAEVPYGVLLSGGLDSSLIAAIAARETEKTNAELDPVVYDSDPHQLAGLDEQGHLHAAGWSRLHSFAVGLPNAPDLQAARKVATFIGSIHHEHTFTLQEGLDALDDVIYHLETYDVTTIRASTPMFLLSRKIKAQGVKMVLSGEGSDEIFGGYLYFAQAPSAAEFHVESVKRVKNLHLADCLRANKSTMAWGLEARVPFLDRDFLQLCMNIDPNDKMIKPAEGKIEKYILRKAFDTTDEPDLKPYLPEEILWRQKEQFSDGVGYSWIDGLKDAAESTISDEQFAQPKAEWGDDIPTTKEAYWYRLKFDALFPQKTAASTVMRWIPKADWGCAEDPSGRYAKIHEQHVDKK

SEQ ID NO: 6216 - protein, 492 aa, Lactobacillus plantarum WCFS1
MPEEPKQTNPHIKKVPRPKRRVGLWTYIISIVVALGIGVGGTYWLIGRQVNAQLSSMQQTSKAMKKIESVYETINENYYKPVNANKLANGAINGMVNSLGDKFSEYMDKSETESLNDTIDSSFSGIGAQVQKSGNYVQIISPIAGTPAKKAGLKPKDIIKAVNGKSVAGKTLTQAVSMMRGKIGTTVKLTIERSGQTFTVSLKRAKIPVTTVDYKLVGGDKKIGYITVSTFSTNTAKEFKTALKALDKKGAKKLVIDMRGNPGGLMTAALKMASIFLKNGKTIMQVQARDGSTEKYTASKKYDGGFKETKSTTVLIDGGSASAAEIFSAALHQSAGVKLVGSQSYGKGTVQTVTTFNDKTEMKITVAKWLTPNGTWINKKGLTPDVKADEPSYASLTVISKVSDLQADKVNSNVKTFQKYLQALGYFKGTVNGYFGDSTTSAVKQYQKHAKLTVNGKVDKQTLTKIETELANKISDNDRAYDAAMKLIEKTN

SEQ ID NO: 6217 - protein, 496 aa, Actinobacillus pleuropneumoniae serovar 1 str. 4074
MNNGAPVVDNQNSMTAGPRGPLLAQDLWLNEKLANFVREVIPERRMHAKGSGAFGKFTVTHDITQYTKAAIFSEVGKETELFARFTTVAGERGAADAERDIRGFAVKFYTEQGNWDFVGNNTPVFFLRDPRKFPDLNKAVKRDPRTNMRSATNNWDFWTLLPEAFHQVTIVMSERGIPASYRHMHGYGSHTYSLINANNERFWVKFHFRTEQGIKNLTNEEAAAIIANDRESHQRDLYESIEKGDFPKWKLYIQVMPEAEAEQVDFHPFDLTKIWSKKDYPLIEVGVMELNRNPANFFADVEQSAFAPSNLVPGISVSPDRMLQARLFNYADAQRYRLGVNHHQIPVNAPRCPVHSNARDGQSRVDGNYGSTLHYEPNSFGQWQEQAQFAEPPLKINGDAAFWDYRQDDSDYFSQPRALFNLMTEKEKQSLFKNTAEGMGDALDFIKYRHIRNCYFCDPAYGEGVAKALGMTVADAMEAYNTDPAMGQPGLIKPNF

SEQ ID NO: 6218 - protein, 645 aa, Sinorhizobium meliloti 1021
MCGFGGYLGSIRDGKPLLERMTAAIGHRGPDERGIFTAPGAGLGHVRLSIVGLGDGQQPMSNPSGELTIAFNGEIFNYVELRDELRARGRQFRTSSDTEVILHLYEEMGEDCLSLLNGDFAFAIWDARRRRMMLARDRMGVRPLFHTLKGGTLYFASEVKALLEVPGVSAEIDPIALDQIFTLWAPIAPRTPFRDIHELEPGHLMIADQNGTTTRPYWQLDYPDRDERPAYAEESRAAEELRALLTDATRIRMRADVPVGAYLSGGLDSSIISALAAGMTSQGLRTFSVTFDSAEHDESAFQEEMAAALGTEHRAVACRAGDIARDFPDVIRFTEKPIIRTAPAPLYKLSGLVREAGLKVVLTGEGADEVFAGYDIFKEARVRRFCGRQPGSRIRPHLFRKLYPYLPGLQQQSAEYLAAFFGAGDVALDDPLFSHRPRLKGTAATKMFFSSDLRAELTGYDAAEELVSRLPAAFGRWHPLHQAQYLESRFLLPGYILSSQGDRMAMAHGIEGRFPFLDHRLVEFAAKLPPEMKLRGLVEKHILREATKDLLPPAIGRRTKQPYRAPDSHSFSGAGELDYVRSAMSEDAVAAGGLFNAKAVTKLYEKCQSRPASGFRDNAAFVGVLSTQLWLQTFTGTSLRKAEAA

SEQ ID NO: 6219 - protein, 480 aa, Oryza sativa
  misc_feature (320)..(320): Xaa can be any naturally occurring amino acid
MVLSHASSGRDDAVRCTFATRYACETLPRFRMPEQSIPREAAYQIINDELMLDGNPRLNLASFVTTWMEPECDKLIMDSVNKNYVDMDEYPVTTELQNRCVNMIAHLFNAPIKEDETAIGVGTVGSSEAIMLAGLAFKRKWQNKRKEQGKPCDKPNIVTGANVQVCWEKFARYFEVELKEVKLSEGYYVMDPVKAVEMVDENTICVAAILGSTLTGEFEDVKLLNNLLTEKNKETGWDVPIHVDAASGGFIAPFLYPELEWDFRLPLVKSINVSGHKYGLVYPGVGWVIWRSKEDLPEELIFHINYLGTDQPTFTLNFSXKGYKNIMQNCMENTAILREGIEATGRFEILSKEAGVPLVAFSLKDSGRYTVFDISEHLRRFGWIVPAYTMPANAEHVAVLRVVIREDFSRSLAERLVSDIVKILHELDAHSAQVLKISSAIAKQQSGDDGVVTKKSVLETEREIFAYWRDQVKKKQTGIC

SEQ ID NO: 6220 - protein, 367 aa, Pseudomonas fluorescens PfO-1
MPVQALFKPFQLGALELPTRVVMAPMTRSFSPGGVPNSKVIEYYRRRAAAGVGLIITEGTTVGHQASNGYPNVPHFYGEAALAGWKKVVEAVHAEGGKIVPQLWHVGNVRRLGTEPDASVPGYGPSEKLKDGQVVVHRMTKQDIQDVIAAFAQAAKDAQSIGMDGVEIHGAHGYLIDQFFWEGSNQRTDEYGGSLANRSRFAIELIQAVRAAVGEGFPIIFRFSQWKQQDYTARLVQTAEALGEFLKPLSDAGVDIFHCSTRRFWEPEFDGSDLNLAGWTRKLTGKPTITVGSVGLDGEFLQFMVNTDKVAQPASLEKLLERLNNEEFDLVAVGRALLVDPDWAQKVREGREQDILPFSREALMTLV

SEQ ID NO: 6221 - protein, 634 aa, Zea mays
MDGCDCIEPLWPTDDLLVKYQYISDFFIALAYFSIPLELIYFVKKSSFFPYRWVLIQFGAFIVLCGATHLINLWTFTTHTKTVAMVMTIAKISTAVVSCATALMLVHIIPDLLSVKTRELFLKNKAEELDREMGLIRTQEETGRHVRMLTHEIRSTLDRHTILKTTLVELGRTLGLEECALWMPSRSGSSLQLSHTLRHQITVGSSVPMNLPVVNQVFSSNRAIIIPHTSSLARVRPLAGRYVPPEVAAVRVPLLHLSNFQINDWPELSAKSFAIMVLMLPSDSARKWHVHELELVEVVADQVAVALSHAAILEESMRARDLLMEQNVALDLARREAEMAIRARNDFLAVMNHEMRTPMNAIIALSSLLLETELTPEQRLMVETVLKSSNLLATLINDVLDLSKLEDGSLELEIKAFNLHAVFKEVMGFIKPIASIKRLSVSVMLAPDLPLCAIGDEKRLMQTILNISGNAVKFTKEGHITLVASIVKADSLREFRTPEFHPTASDEHFYLKVQVKDTGCGVSPQDLPHVFTKFAHPQSGGNRGFNGSGLGLAICKRFVSLMGGHIWIDSEGTGRGCTATFVIKLGVCDNTNTYQQQLVPLVWPSSADSNLSAPKVLPDGRGSVSLKSRYQRSV

SEQ ID NO: 6222 - protein, 473 aa, Lactobacillus acidophilus
MTKTLPKDFIFGGATAAYQAEGATKTDGKGRVAWDKFLEENFWYKGDPASDFYHNYVEDLELAEKFGGNVIRISIAWSRIFPNGDGEVKPNGVDFYHKLFAECDARHVEPFVTLHHFDTPEGLHEDGDFLTHEKMDDFVEYADYCFKEFPEVKYWITINEIRSVAVDQYIIGNFPPADTFGFDKMFQTHHNQMVGHARAVKLFKHDGSKGEIGIVHALQTNYPFNESNPADIGAAELEDLLDNKFLVDGTFVGKYPQETMEAVKDILAANHGGEFNIEDEFKAIDAAKDVQDFVGVDYYLSEWMRAYDGKSEITHNGTGDKGTSKVQVKGVGEEKLPDGIETTDWDWLIYPQGLYDKIMRVKNDYPNIHKVYITENGIGFKDTVPDNEETDKTVHDDARIDYVKQHLEVIADAIADGANVKGYFIWSLMDVFTWTNGYTKRYGLFYVDFDTQDRYPSKTADWFKNLAETHIIE

SEQ ID NO: 6223 - protein, 538 aa, Thermotoga neapolitana
MPKLLKFNEEARRALERGVDKVANAVKITLGPKGRNVVIEKSWGSPTITNDGVSIAKEIELEDKFENLGAQLVKEVASKTNDVAGDGTTTATVLAQAMIKEGLKNVAAGANPILLKRGIDKAVERAVEEIKKLSKKLSGREDIAHVAAISANSPEIGELIAEAMDKVGEDGVITVEDSKTLETYVEFTEGMQFDRGYISPYFVTDAEKMEVVLKEPSILITDRKLSAVKPLIPILEKVAQTGKPLLVIAEDVEGEALTTLVLNKLKGTLQSCAVKAPGFGERRKAMLQDIAILTGGQVASEELGINLEDLTLEDLGRADLVRVKKDETIIIGGKGDPEAIKKRIAQIKAQIEETTSEYEKETLQERMAKLAGGVAVIKVGAATETELKEKKHRIEDALSATRAAVEEGIVPGGGVTLLRSRKAVEKLLEELDGDEKIGAQIVYKALSAPIRQIAENAGYDGAVIIEKILASDDPAYGFDALRGEFGNMFEKGIIDPAKVTRSALQNAASIAGMLLTTEVLVVEKPEEKKETPSLPEEY

SEQ ID NO: 6224 - protein, 525 aa, Escherichia coli
AAKDVKFGNDAGVKMLRGVNVLADAVKVTLGPKGRNVVLDKSFGAPTITKDGVSVAREIELEDKFENMGAQMVKEVASKANDAAGDGTTTATVLAQAIITEGLKAVAAGMNPMDLKRGIDKAVTVAVEELKALSVPCSDSKAIAQVGTISANSDETVGKLIAEAMDKVGKEGVITVEDGTGLQDELDVVEGMQFDRGYLSPYFINKPETGAVELESPFILLADKKISNIREMLPVLEAVAKAGKPLLIIAEDVEGEALATLVVNTMRGIVKVAAVKAPGFGDRRKAMLQDIATLTGGTVISEEIGMELEKATLEDLGQAKRVVINKDTTTIIDGVGEEAAIQGRVAQIRQQIEEATSDYDREKLQERVAKLAGGVAVIKVGAATEVEMKEKKARVEDALHATRAAVEEGVVAGGGVALIRVASKLADLRGQNEDQNVGIKVALRAMEAPLRQIVLNCGEEPSVVANTVKGGDGNYGYNAATEEYGNMIDMGILDPTKVTRSALQYAASVAGLMITTECMVTDLPK

SEQ ID NO: 6225 - protein, 575 aa, Bacteroides fragilis YCH46
MSTKNSSRFTPVIIAISVVIGILIGTFYAKHFAGNRLGIINGSSNKLNALLRIVDDQYVDTVNMADLVEKAMPQILAELDPHSTYIPAQNLEEVTSELEGSFSGIGIQFTIQDDTIHVNSVIQGGPSEKVGLMAGDRIVMVDDSLFVGKKVTNERAMRTLKGPKGTQVKLGVKRATEKDLLNFTITRGDIPQNTIDAAYMLTDDFGYIQVSKFGRTTHVELLNAIALLNHKNCKGLIIDLRGNTGGYMEAAVRMVNEFLPEGKLIVYTEGRKYPRADEFANGTGSCQKMPVIVLIDEGSASASEIFTGAIQDNDRGMVVGRRSFGKGLVQQPIDFSDGSAIRLTIARYYTPSGRCIQRPYQNGKDRNYEMDWLTRYEHGEYFSKDSIKLDENLRYSTALGRPVYGGGGIMPDVFVPQDTTGVTSYLTEVLSKGLTIQFTFHYTDNNRDKLKKYEDEESLLNYLRRQGLVEQFIRYADSKGVKRRNILIQKSYKLLEKSIYGNIIYNMLGKEAYIQYLNQSDQTVKKAVELLESGEAFPKAPVSVEPQKEEKKDGKKKTTAQVDSTGEEEILRLYA

SEQ ID NO: 6226 - protein, 451 aa, Cryptococcus neoformans var. neoformans JEC21
MTSLNFKVAPAVQATEAPPIPKAQAWGCQYVPSPSAPLLDLSQGVPRAAPHPNVLAALSKVASDPQAARYGPILGEPGLRQALAEEIKVQYHVSGQGVTFEDVAITTGCNMAFLSLLMTLCPPGKSSVLLPLPAYFNHTMSLSLQDVKPVYVLCEPDNMLKASLPSARSYLASLRKGNGDRREPRMIVLVSPSNPTGTVYTNEEIKQWYDLAREYKVALVLDETYRDFVEGESGQRGLPHRLFEEPDWRSTLVSLGSFSKGYRIPGHRLGSIIASPELLQHITTICDCMQICPPRPPQIALTPLLPSLRPDLFAASSQLSHRRHLFETTVNAIPGWEVISSGGFFAYVQFPEDYIYASSILGLKRKKLGSEDVARVLALRCGVVTLPGSFFMPPLADDEQWDDILNGETLRQDKWLRFAVANVEDDVILSLGPRLKLMNKIMGVDNEGVAS

SEQ ID NO: 6227 - protein, 296 aa, Brassica napus
MAKMGINPIMMSAGELESGNAGEPAKLIRQRYREAADLIKKGKMCCLFINDLDAGAGRMGGTTQYTVNNQMVNATLMNIADNPTNVQLPGMYNKEDNARVPIIVTGNDFSTLYAPLIRDGRMEKFYWAPTREDRIGVCKGIFRTDNVKDEDIVTLVDQFPGQSIDFFGALRARVYDDEVRKFVEGLGVEKIGKRLVNSREGPPVFEQPAMTLEKLMEYGNMLVMEQENVKRVQLADQYLNEAALGDANADAIGRGTFYGKAAQQVNLPVPEGCTDPQADNFDPTARSDDGTCVYNF

SEQ ID NO: 6228 - protein, 322 aa, Candida tenuis
MSASIPDIKLSSGHLMPSIGFGCWKLANATAGEQVYQAIKAGYRLFDGAEDYGNEKEVGDGVKRAIDEGLVKREEIFLTSKLWNNYHDPKNVETALNKTLADLKVDYVDLFLIHFPIAFKFVPIEEKYPPGFYCGDGNNFVYEDVPILETWKALEKLVAAGKIKSIGVSNFPGALLLDLLRGATIKPAVLQVEHHPYLQQPKLIEFAQKAGVTITAYSSFGPQSFVEMNQGRALNTPTLFAHDTIKAIAAKYNKTPAEVLLRWAAQRGIAVIPRSNLPERLVQNRSFNTFDLTKEDFEEIAKLDIGLRFNDPWDWDNIPIFV

SEQ ID NO: 6229 - protein, 287 aa, Halobacterium sp. NRC-1
MADVIDAVFDAIADAAPEVRAGLPDHRATRDDQNASGDTQLEADVWADDLLFDRTESIEGVNWYASEERDAVVTVGDAEGGYAVALDPLDGSSNVKSNNPCGTVVGIYDQPLPAPGSSLVAAGFVLYGPTTTMVVARDDTVRESLVSETGATTDLGPVELPADPTVYGFGGRVPDWTPAFESFVRDVEDDLKLRYGGAMIADVNQVLVYGGVFGYPGMESAPDGKLRAQFEALPIAYIVETAGGASSDGTQSLLDVAPTRLHERTPTFVGTDDVIAALDAALPDHTN

SEQ ID NO: 6230 - protein, 492 aa, Oryza sativa (indica cultivar-group)
MDPYKHRPSSGSNSTFWTTNSGAPVWNNNSALTVGERGPILLEDYHLIEKLAQFDRERIPERVVHARGASAKGFFEVTHDISHLTCADFLRAPGVQTPVIVRFSTVVHERGSSETLRDPRGFAVKFYTREGNFDLVGNNMPVFFIRDGMKFPDMVHAFKPSPKTNMQENWRIVDFFSHHPESLHMFSFLFDDVGIPLNYRHMEGFGVNTYTLINKDGKPHLVKFHWKPTCGVKCLLDDEAVTVGGTCHSHATKDLTDSIAARNYPEWKLYIQTIDPDHEDRFDFDPLDVTKTWPEDIIPLQPVGRMVLNKNIDNFFAENEQLAFCPAIIVPGIHYSDDKLLQTRIFSYADTQRHRLGPNYLMLPVNAPKCAYHNNHHDGSMNFMHRDEEVNYFPSRFDAARHAEKVPIPPRVLTGCREKCVIDKENNFKQAGERYRSFDPARQDRFLQRWVDALSDPRITHELRGIWISYWSQCDASLGQKLASRLNLKPNM

SEQ ID NO: 6231 - protein, 142 aa, Clostridium thermocellum ATCC 27405
MSLISWNPFREVDSISRDMETFFERSPFGFFSRATAPRVDVFETEKDVVVKAEIPGVSKEDLNVYVDENSIRLSGETKRDTEYKNEHIYRTERYYGSFSRTIPLPVEVKSEQAKAEYKDGILTVTVPKVETTQMKGKKIDIH

SEQ ID NO: 6232 - protein, 682 aa, Escherichia coli CFT073
MNMFFRLTALAGLLAIAGQTFAVEDITRADQIPVLKEETQHATVSERVTSRFTRSHYRQFDLDQAFSAKIFDRYLNLLDYSHNVLLASDVEQFAKKKTELGDELRSGKLDVFYDLYNLAQKRRFERYQYALSVLEKPMDFTGNDTYNLDRSKAPWPKNEAELNALWDSKVKFDELSLKLTGKTDKEIRETLTRRYKFAIRRLAQTNSEDVFSLAMTAFAREIDPHTNYLSPRNTEQFNTEMSLSLEGIGAVLQMDDDYTVINSMVAGGPAAKSKAISVGDKIVGVGQTGKPMVDVIGWRLDDVVALIKGPKGSKVRLEILPAGKGTKTRTVTLTRERIRLEDRAVKMSVKTVGKEKVGVLDIPGFYVGLTDDVKVQLQKLEKQNVSSVIIDLRSNGGGALTEAVSLSGLFIPSGPIVQVRDNNGKVREDSDTDGQVFYKGPLVVLVDRFSASASEIFAAAMQDYGRALVVGEPTFGKGTVQQYRSLNRIYDQMLRPEWPALGSVQYTIQKFYRVNGGSTQRKGVTPDIIMPTGNEETETGEKFEDNALPWDSIDAATYVKSGDLTAFEPELLKEHNARIAKDPEFQNIMKDIARFNAMKDKRNIVSLNYAVREKENNEDDATRLARLNERFKREGKPELKKLDDLPKDYQEPDPYLDETVNIALDLAKLEKARPAEQPAPVK

SEQ ID NO: 6233 - protein, 649 aa, Lactobacillus gasseri
MCGICAFFDPELKDKDCAIQGMMDTIKHRGPSSDGKYTNDQVALGFRRLSIIDLRGGSQPIFNEDKSRAIIFNGEIYNFKPLRKELIDAGHTFTTKADTEVLLHGYEEWGMDGLLKRVRGMFAFVIWDDNTKTLYGARDFFGIKPMYYSDQNGKLIVGSELKSFLAYPGFKKELNTEAVKPYLMNQYNDLKETFFKGVYRFPAGHWFEYKDGKMKTHQYWDAKYVENSLSFEETLDKINEDLKETVDLYRNADVPVGAFLSEGIDSSYLTSLLDPEDVFSVSFDDSTYNEASKAKALSDLHGWKFFADKVDADEAMRDFPEMQYHMDEPDANPSIIPLWYLCKLARKHVTVALSGEGADELFAGYVNYGMHTHNDVIKVFTAGLKKLPKKSRVRLAHKIKKMPNFPGKVHMYTNLAEPSEFYVGQSVIYDMDYPTIFTSKDANNILRDKYKNDLTVNGIYQEDFKKVKNIDEVKQMQYIDLHHFMLNDIEQKADKISMAHSLELRVPYLDKKIAELANSIPTKYLVNRHDTKYALRKASEKVLPEEWAQRPKLGFPTPIKQWLKEPRFYKQVRELFTEDFVNDIFDQKKIVKLLDDNYKGDGSARRQIWAIYTFLVWYKLFFVDYDETVKKYQHVQPEVAELIESGRLV

SEQ ID NO: 6234 - protein, 512 aa, Arabidopsis thaliana
MKKQLILGVILLGLFVIFLNTTQVEAARPLQADSEIRFVFQLLQRGQVIGSGPNGCTNIPGGSGTCRPNKFTYITIIKNPRISGCVSRRRIKCPVSTQPWHLGVPRGMLVQPFGPDPLTGPLCSAWNTNRISSAAVGNGLIASTCLTSKNTTKKATNITKIITCLFIFLDQLLVNTSWLDFGIILTSLYISSVTDLVTWKLVSQPCVRPCVRQLHVRKGLVSGVMKLFSSPLRTLRDAGKSVRISRFCSVSNVSSSLQIELVPCLTDNYAYILHDEDTGTVGVVDPSEAVPVMDALQKNSRNLTYILNTHHHYDHTGGNLELKDRYGAKVIGSAADRDRIPGIDVALKDADKWMFAGHEVHIMETPGHTRGHISFYFPGARAIFTGDTLFSLSCGKLFEGTPEQMLASLQRIIALPDDTSVYCGHEYTLSNSKFALSIEPTNEVLQSYAAYVAELRDKKLPTIPTTMKMEKACNPFLRTENTDIRRALGIPETADEAEALGIIRRAKDNFKA

SEQ ID NO: 6235 - protein, 464 aa, Zea mays
  misc_feature (28)..(28): Xaa can be any naturally occurring amino acid
MSGVGSGRPPAAQKILQSLRPPLSFATXPSRPPFAAPDDYHRFPTPAAATAPAATSGGVGAGAPPRDTIEEGLVIRTPLKRKATSEENDAAAEPSDCIITSPMPTSVSGKTVKASKAKAKNSKTGPQTPTSNVGSPLNPPTPVGTCRYDSSLGLLTKKFINLLKQAPDGILDLNNAAETLEVQKRRIYDITNVLEGIGLIEKTLKNRIRWKALDDSSVQLDNGISALQAEVENLSLQEQALDERISDMREKLRGLTEDENNKRWLYVTEDDIKGLPSFQNETLIAIKAPHGTTLEVPDPDEAGDYLQRRYRIVLRSTMGPIDVYLVSQFDEKFEELGGVATPVKHSNVPRHQPVEDFNTYAGQSSTPMDVAHDVQHGQKIPQDPSALHDFGGMTRISPSDVHTDSDYWLLTEGDVSMTDMWKTGQEVQWDQIDFLSEDVVTPRAHNQQPVTVDGPHMEVPSMDP

SEQ ID NO: 6236 - protein, 882 aa, Vibrio parahaemolyticus RIMD 2210633
MERWMLRLSIKTRLALLALLPAVVIVAFAIHQFYANSVRVDHLNQTVSNIQGFQLISQASHFIYSMEKDRRQYGQETPLSIEVDVQNNVVLSMHHKFSTNPHTSEYADDLKEAMLGMVSGDLTNTDEVGDWAFQLLQEMSLSLLQNYQLYGNSDGHAMQNFIAYLAQLSYWTQKEAWLTYRLVMDPDAKLNQSVFFQTIDRQQQNLDAFLHLGASYAHVDKLLGLFSSPRYQRNLESRARLMNGDMPRSDYAAYLDELDFRVQRLQMMIEGFTRQAEQSLLTQVNEQKRNVLLITCGVAVVLLLLGWLGFATWYRVNSKIGAIIHALNALVNEEEKEKKVAVDGSDEFTLFAQQVNRVVEEKQRQTHEILHAKESAVAANRAKSVFLANMSHEIRTPLNGIMGMTEILSQSELSPHQQEVVDDIDTSSHTLLALLNDILDLSKIESGRLELSLVEADIREVVYQSVILFQSKATSKQLELDISLDENIPARVMVDDHRIKQIITNLVSNAVKFTEQGYILVDVSYEEALEQGRGSLTFLIKDSGIGIERDKLATIFEPFTQEDEGVSRQFGGTGLGLAICRQLVSMMGGKLVATSTKGVGTCFGFSIEVEALPLFGWHSDVVKRGLFICDNYAYAEQIVQECRLAQIELVGVNSLSEAKALDEDFDVIFLCNDGQMDIDSCLSELAEVYDVRRVVVCQHHLTSSYTNAENVHAVLTQPFLGNRFKHAIEELAKLEKNTLRDNVTNIASRAESKISRTHRRILIAEDNLMNQKIASFFLDKAGYDYLITSNGQEALDAITKGEQFDAILMDCMMPVMDGLTATKEIRRWEKKVGCKKTTIIALTASVLEEDIHNCFAAGMDAYLPKPYKSNQLFELFNELKLA

SEQ ID NO: 6237 - protein, 250 aa, Cynodon dactylon
MERVEVLGGGSSAGQVRKKRMRRKSTGPDSIAETIKRWKEHNQKIHEDRKAPAKGSKKGCMAGKGGPENGNCAYRGVRQRTWGKWVAEIREPNRGRRLWLGSFPTALEAAHAYDEAARAMYGPTARVNFSESSADANSGCTSALSLLASNIPPASQRSDDKDEVESVETEVHEVKMEVNDDMRSVHVERKTLEVFQSEESVLRKEGDVSYDYFHVEDVLEMIIVELNAAKKIEVHEEYQDGDDGFSLFSY

SEQ ID NO: 6238 - protein, 250 aa, Cynodon dactylon
MERVEVQGGASSAGQVRKKRMRRKSTGPDSIAETIKRWKEHNQKIHEDRKAPAKGSKKGCMAGKGGPENGNCAYRGVRQRTWGKWVAEIREPNRGNRLWLGSFPTALEAAHAYDEAARAMYGPTARVNFSESSADANSGCTSALSLLASNIPPASQRSDDKDEVESVETEVHEVKMEVNDDMRSVHVERKTLEVFQSEESVLRKEGDVSYDYFHVEDVLEMIIVELNAAKKIEVHEEYQDGDDGFSLFTY

SEQ ID NO: 6239 - protein, 423 aa, Xanthomonas campestris pv. vesicatoria str. 85-10
MSTAPQKPLAIRERLSEVRYEIRGELARRARELEAQGRKLIKLNIGNPGAFGFRAPEHLQRAIADDMGRTDPYTHQQGLPEAREAVATAYSRRQHPDAHPDRIFIGNGVSELIDLSLRALLNPGDEVLVPSPDYPLWSAATILNDGRPVYYRCAPENGFQPDPVEIETLVSSRTRAIVLINPNNPSGASYSRELLERIVAIATKHNLLLMVDEIYDQVLYDDAAFVPVAPLAGAHPCITFSGLSKVHRACGWRVGWALLSGDQARINDLRNAMDLLGALRLCANVPGQYAIDAAVNGPDTISALCAPGGRLYETRRAVIEACAASEHLQLVAPAGALYAFPAVVGAAARNFDDHAFALDLMNEEGVLVVPGSSFNVPYRHHFRVTLMPEAGVMRDVFARIDRALARRAEAITKVVPLKPRNVA

SEQ ID NO: 6240 - protein, 661 aa, Saccharomyces cerevisiae
MSELLAIPLKRTLEVDFATELSKLIDTTSFQTASFFQSDILKVVDARNNAIAPDISIDGLSALKEYYVILLQLEKKFPNNQIEFTWFQTLSQKSRGTSQYSLQWEKLTIIYNIGCMYSLLALNSNNDAAESLKTSCLYFQNAAGCFKHVLDHQKNLETIPVVDDATLNALTSLMLAQAQECFWFKAVQDKHKDSLIAKLSQQIVDFYCEAINDAQRGKLIRSDWINHLKAKKAYFSAVTYYRIALSFNEKKQFGNVVKALQMGLQFINESTLSSQAKFKTVVESSLKEAQRDNEFIYLQEVPSELPSIKPALMVKPSSSATLLPSIKKDETLFKDLIPIEVMEYCTAYNERQDEYVEQRVTNPLASLNKLLKESLTTFQIPQGLTKVSEAELSHYQASLNNLLINNKNVQVQLDNIEQILNEEAFTDNQLRLKHGTLNWTLPESSTTNTAYYEKLKKLRGYLDEGSAIDKQTNELFQSIDKNLIGSEIRLPESNDPLTNKIKMIIQERNDYIDRTRRKSSEYRILPKIITSYKKNGTVDFEPIFIGHLKYFDEDLRYVNSTKEENIKLIEEVNLSKKNNPGRSGIEPKKMVRIDPRELYIEDLRYSFKLLDEVKENLSAGTAFYENLITSTSNLYNEVQEYDTARRAEKARLDKSLTFEDQ

SEQ ID NO: 6241 - protein, 268 aa, Triticum aestivum
  misc_feature (16)..(16): Xaa can be any naturally occurring amino acid
  misc_feature (227)..(227): Xaa can be any naturally occurring amino acid
  misc_feature (229)..(229): Xaa can be any naturally occurring amino acid
  misc_feature (244)..(244): Xaa can be any naturally occurring amino acid
  misc_feature (251)..(251): Xaa can be any naturally occurring amino acid
  misc_feature (255)..(255): Xaa can be any naturally occurring amino acid
  misc_feature (262)..(262): Xaa can be any naturally occurring amino acid
  misc_feature (267)..(267): Xaa can be any naturally occurring amino acid
GSGTRDRPGRRRRPWXPYKHRPTSGANSGYWTTNSGAPVWNNNNALTVGQRGPILLEDYHLIEKLAQFDRERIPERVVHARGASAKGFFEVTHDVSQLTCADFLRAPGVQTPVIVRFSTVVHERGSPETLRDPRGFAVKFYTREGNFDLVGNNMPVFFIRDGMKFPDMVHAFKPSPKTNMQENWRIVDFFSHHPESLHMFTFLFDDVGIPLNYRHMDGFGVNTYTLXSXDGKAHLVKFHWKPTXGVKCLLXDETXTVGGTCXTMPQXT

SEQ ID NO: 6242 - protein, 382 aa, Triticum aestivum
  misc_feature (318)..(318): Xaa can be any naturally occurring amino acid
QGNRNPLNKIHWQATKRHVRPHREWRTTAAAAAAGTATSAPTPSRWRFFRPTAGTPLAAAGSMSIRSVLNRLNSSVDASGTRPVVPLGHGDPTSSACFRTAPEAEDAVVDALRSRKHNGYSPTVGVPQARSAIAEYLSRDLPYELSPDDIYLTSGCVQAIEIMISVLAQPGANILLPRPGFPMYESRTTFSELEVRYFDLVPERGWEADLESVKAIADENTVAMLIINPSNPCGSVYSHDHLAQIAETAGELGILIIADEVYDHLAFGSKPFIPMGVFGKTVPVITLGAISKRWLVPGWRLGWIPTCDPNGIFKETNXHQSIPNYIYITSDPCTIIQGAAPPILAHTREGYFNKIPGLLRKSTNYCTVIKEIRGIIFRQPEG

SEQ ID NO: 6243 - protein, 283 aa, Physcomitrella patens
MGRGKIEIKKIENTTSRQVTFSKRRGGLLKKAHELAVLCDAEVALVIFSSTGKLFEYASSGSMRDIIERYKKSPNGAMKSGASTDFLGREVLKLQEQVERLKSSQRRMLGEDLSALKVPDLLQLEQQLDLGASRVRARKNQLILEEIEGLQKKEQELMVANEDLRKKIADAEAVARANLSEARPESPRHLARTLSRDVSASSHPAATVYPHPNLRDVQRSQTSLQLGMFSSESYPPSSSRWPSEQQFPSASEGCAGESSMKWDHPHYHIQNRLHANILPSVRI

SEQ ID NO: 6244 - protein, 1125 aa, Populus tremula x Populus tremuloides
MSSSRPSHSSSNSARSRHSARIIAQTTVDAKLHADFEESGSSFDYSSSVRVTDSVGGDQPPRSDKVTTAYLHHIQKGKLIQPFGCLLALDEKTFRVVAYSENAPELLTMVSHAVPSVGEHPVLGIGTDIRTIFTAPSASALQKAMGFGDVSLLNPILVHCKTSGKPFYAIVHRVTGSLIIDFEPVKPYEVPMTAAGALQSYKLAAKAITRLQSLPSGSMERLCDTMVQEVFELTGYDRAMAYKFHDDDHGEVVSEVTKPGMEPYLGLHYPATDIPQASRFLFMKNKVRMIVDCHAKHVKVLQDEKLPFDLTLCGSTLRAPHSCHLQYMENMNSIASLVMAVVVNDGDEDGDTPDSANPQKRKRLWGLVVCHNTSPRFVPFPLRYACEFLAQVFAIHVNKELELENQIVEKNILRTQTLLCDMLMRDAPLGIVTQSPNIMDLVKCDGAVLFYRNKIWRLGITPSDLQLQDIAFWLSEYHMDSTGLSTDSLYDAGYPGALALGDVVCGMAAVRITSKDMLFWFRSQTAAEIRWGGAKHEPGEKDDGRRMHPRSSFKAFLEVVKTRSLPWKDYEMDAIHSLQLILRNTFKDIETMDVDTKTIHARLSDLKIEGMQELEAVTSEMVRLIETATVPILAVDVDGLVNGWNTKISELTGLLVDKAIGKHLLTLVEDSSVDIVKRMLFLALQGKEEQNIQFEIKTHGSKSECGPICLVVNACASRDLHENVVGVCFVGQDITGQKMVMDKFTRIEGDYKAIVQNRNPLIPPIFGTDEFGWCSEWNPAMTNLTGWKREEVLDKMLLGEVFGLNMACCRLKNQEAFVNLGVVLNTAMTGQESEKVSFGFFARTGKYVECLLCVSKKLDREGAVTGVFCFLQLASQELQQALHVQRLSEQTALKRLKALAYLKKQIWNPLSGIIFSGKMMEGTELGAEQKELLHTSAQCQCQLSKILDDSDLDSIIEGYLDLEMVEFTLREYYGCYQSSHDEKHEKGIPIINDALKMAETLYGDSIRLQQVLADFCRCQLILTPSGGLLTVSASFFQRPVGAILFILVHSGKLRIRHLGAGIPEALVDQMYGEDTGASVEGISLVISRKLVKLMNGDVRYMREAGKSSFIISVELAGGHKSQKRA

SEQ ID NO: 6245 - protein, 467 aa, Pectobacterium carotovorum subsp. carotovorum
MRRNTMKAFPDGFLWGGSVAANQVEGAWNEDGKGVSTSDLQLKGVHGPVTERDENISCIKDRAIDFYHQYPQDIQLFAEMGFKVLRTSIAWTRIYPEGDEAEPCEAGLAFYDRLFDEMAKHQIQPLITLSHYEMPYGLVKKLGGWGNRAVIDHFEKYARTVFSRYKDKVKYWLTFNEINMALHSPFTGIGLSGEPSKQEIYQAIHHQLVASARAVKACHDLIPDAKIGNMLLGAVRYPMTCHPKDVLEAQNKNREWLFFGDVQVRGTYPAWIQRYFRENGVELTITAQDKDDLSHTVDFVSFSYYMSGCATFEPEKYQSSRGNIIRLIPNPHLEASEWGWQIDPEGLRFLLNELYDRYQKPLFIVENGLGARDVVEEDGSIHDSYRIDYLRRHLLQVREAIDDGVELLGYTSWGPIDLVSAGTAQMSKRYGFIHVDRDDDGKGTLVRRRKDSFYWYQDVINSNGKSL

SEQ ID NO: 6246 - protein, 516 aa, Zea mays
MAAAMVRTMSTTAAGTPPVSVATINPKLVWVALICDRIAGRLKVSISVLKCEYAVRGEIVTHAQNLQQELQKNPESLPFDEILYCNIGNPQSLGQQPVTYFREVLSLCDHPALLDKSETHALYSSDAIERAWQILEKIPGRATGAYSHSQGIKGLRDEIAAGIAARDGFHASGDNIFLTDGASPAVHMMMQLLISSESDGILCPIPQYPLYSASIALHGGSLVPYFLNEETGWGLDVDELKKQLEEARSKGITVRALVVINPGNPTGQVLVEENQKKIVEFCKNEGLVLLADEVYQENIYVEDKPFHSFKKIARSLGYTDDDLPLVSFQSVSKGYYGECGKRGGYMEITGFSPDVREQIYKVASVNLCSNVSGQILASLVMNPPKAGDESFESFMSERDGILSSLARRAKALEEAFNSLEGITCNKAEGAMYLFPRLHLPQKAIGAAQAVGTAPDAYYAKRLLEATGIVVVPGSGFGQVPGTWHFRCTILPQEDKIPAIVSRLKEFHEKFMDEFRD

SEQ ID NO: 6247 - protein, 324 aa, Nostoc punctiforme PCC 73102
MVEYYTQRASAGLIITEGTHPSPMGRGYTTCPGLHNQEQVGGWRKVTDAVHAAGGRIFVQLMHAGRVSHSSLLPNHARPIAPSAVPVVSEEVHVWDGKVPFEIPRPLELSEIPEIVEEFRRAAELSIEAGFDGVELHAATGYLPNQFQVSGSNQRTDAYGGTLENRTRFTLEVVNALCKVRGAEQIGVKIAPGFTVNDTFDDNPAETYTYVAKALSPLGLAYLHVGYNQGYARGTAPNFNPIDLLRTVYQGTLLAVGGFDRQQGDEAITSRRADAIVFGRPFISNPDLVERLRLNAPLSKGDIRTFYGGSEHGYTDYPTLPQLH

SEQ ID NO: 6248 - protein, 524 aa, Escherichia coli
AAKDVKFGNDARVKMLRGVNVLADAVKVTLGPKGRNVVLDKSFGAPTITKDGVSVAREIELEDKFENMGAQMVKEVASKANDAAGDGTTTATVLAQAIITEGLKAVAAGMNPMDLKRGIDKAVTAAVEELKALSVPCSDSKAIAQVGTISANSDETVGKLIAEAMDKVGKEGVITVEDGTGLQDELDVVEGMQFDRGYLSPYFINKPETGAVELESPFILLADKKISNIREMLPVLEAVAKAGKPLLIIAEDVEGEALATLVVNTMRGIVKVAAVKAPGFGDRRKAMLQDIATLTGGTVISEEIGMELEKATLEDLGQAKRVVINKDTTTIIDGVGEEAAIQGRVAQIRQQIEEATSDYDREKLQERVAKLAGGVAVIKVGAATEVEMKEKKARVEDALHATRAAVEEGVVAGGGVALIRVASKLADLRGQNEDQNVGIKVALRAMEAPLRQIVLNCGEEPSVVANTVKGGDGNYGYNAATEEYGNMIDMGILDPTKVTRSALQYAASVAGLMITTECMVTDLP

SEQ ID NO: 6249 - protein, 486 aa, Oryza sativa (japonica cultivar-group)
MSTAAAGAAPVSLDTINPKVLKCEYAVRGEIVTHAQLQQELQKNPDSLPFDEILYCNIGNPQSLGQQPVTFFREVLSLCDHPALLDKSETHALYSDAIERAWQILDKIPGRATGAYSHSQGIKGLRDEIAAGIAARDGFHASGDNIFLTDGASPAVHMMMQLLIRSENDGILCPIPQYPLYSASIALHGGSLVPYFLDEETGWGLEVDELKKQLEEAQSKGITVRALVVINPGNPTGQVLAEENQKKIVEFCKNEGLVLLADEVYQENIYVEDKKFHSFKKIARSMGYTDDDLPLVSFQSVSKGYYGECGKRGGYMEVTGFSADVREQIYKVASVNLCSNVSGQILASLIMNPPKAGDESYESFMVEKDGILSSLARRAKALEEAFNSLEGITCNKAEGAMYLFPRIYLPQKAIGAAQAAGTAPDAYYARRLLEATGIVVVPGSGFGQVPGTWHFRCTILPQEDKIPAIISKFKEFHEKFMDEFRD

SEQ ID NO: 6250 - protein, 311 aa, Cucumis melo
NFQDYHGLPEFRNAIASFMGKAGGGRVKFDPSRIVMGGGATGASETVIFCLADPGDAFLIPSPYYAAFDRDLQWRTRAQIIPVHCNSSNNFQITREALEVAYKKAEESNIKVKGLIITNPSNPLGTIYDRDTLKSLVNFVNDNNIHLICDEIYSATVFKSPSFTSIAEIIEEMDHCKKELIHILSSLSKDMGLPGFRVGILYSYNDTVVSIARKMSSFGLVSSQTQHLLAAMLSDKEFVDNFLVENSKRLAKRHARFTEELEKMGITCLNSNAGLFVWMDLRKLLKDQSFESEMELWRVIINEVKLNVSPG

SEQ ID NO: 6251 - protein, 488 aa, Triticum aestivum
  misc_feature (290)..(290): Xaa can be any naturally occurring amino acid
  misc_feature (403)..(403): Xaa can be any naturally occurring amino acid
  misc_feature (407)..(407): Xaa can be any naturally occurring amino acid
  misc_feature (416)..(416): Xaa can be any naturally occurring amino acid
MVISHASSSAGEAVYSTFSSRYVREELPRYRMPEGSIPKEAAYQIISDELMLDGNPRLNLASFVTTWMEPECGKLMMDSVNKNYVDMDEYPVTTELQNRCVNMIAHLFNAPIGEDETAIGVSTVGSSEAIMLAGLAFKRKWANKMKEQGKPCDKPNIVTGANVQVCWEKFARYFEVELKEVKLTEGYYVMDPKKAVEMVDENTICVAAILGSTLTGEYEDVKLLNDLLVAKNKETGWDVPIHVDAASGGFIAPFLQPELEWDFRLPLVKSINVSGHKYGLVYPGVGWVIXWRSKADLPDELIFHINYLGTDQPTFTLNFSKGASQIIAQYYQLIRLGFEGYKHIMENCKLNAAVLKEGIDATGRFDVLSKADGVPLVAIRLKDSTNFSVFDISENLRRFGWIXPAYXMPADAEHVXVLRIVIREDFNRSLAQRLLADINKIVGELDAHAIHAIKLSTAAAAEGASKSTVDAVTEAFKGLAGNKKAGVC

SEQ ID NO: 6252 - protein, 909 aa, Kluyveromyces lactis NRRL Y-1140
MSTEAHRHTYYGGPTTNTESSHHIHTSHAHNCSNGSSRRHSSSHNGRRRQVTFGPYIIGPTLGEGEFGKVKLGWSKSNSDESKNVAIKLIRRDTIPKNSEKEVKIYREINALKHLAHPNIVTLEEVLQNSKYIGIVLHYASGGEFYKYIQKKRRLKEPAACRLFAQLISGVHYMHHKGLAHRDLKLENLLLDEHENLIITDFGFVNEFSSRNDLMKTSCGSPCYAAPELVVTTKAYEARKADVWSCGVILYAMLAGYLPWDDDPDNPDGDDIAKLYNYITKTSLKFPEYINPIPRDILRRILVSDPSKRITVELILKHQWLQPHALFLSLKPEDWDIKAKAEISNIFRPPPSQSSQSAYSRPHSNSSVSSSEKRNSLIIDSTLHLQPVPPHESQSHAIAKPSSPSSDLRSSPIKRVNHSRSNSAASIALQAVVDAEREFFQSSQSILQISGVQSIEQSPNTRVQTYTATRSLAHNNSSSLMNRNSIIVEVSPNKEVISSSSSSAIPGMSYSASRESYISTSPVRNAAQSPKFVPGSFTSNTSHHNNKFGSSQQSRPRPTSYHPISSSYLEMQPSNSQNNFITTTNEFSYIPRTVNANNYIDSTRAISPELNGRTVDGTSPPLNSRNFQSGIIRRGSFSASKPSPSVDLNNVEGDLIKTDAEDHKKLKQQRRKSQRYSTVILDNSIATVQEETEEPITAYDANIKKPVENSNNLTKEFGKIVINEPRKEDAHIPISKPESEHLQKPPQQHQSQASIARADSHSKKEKRFSLLSFYSYYNNSKTSVSSDSSGGRRVSANSQKTNERISSVKSNGIPSRNVSGSINQFETSKPRVSSNPSNRTNYRHSMLPPKSSQVIDASAKRMNRSSVMVSSAKDITSSDGTASKEHKEQREPSTAKRVFDFFKRRSMRV

SEQ ID NO: 6253 - protein, 213 aa, Sinorhizobium meliloti
MLQAGIIPVTHFEQNCTVLFDSETKEGVVVDPGGDVDIILQTIRENGIALKAIWLTHGHIDHAGGAKELKEALGLDIVGPHKDDLPLLERLEDQAERFGLAMKVQNVVPDRWLEEGDTVSFGDHVFEVLHCPGHAPGHVVYFNRAQNFAHVGDVLFHGSIGRTDLPGGNHQQLLDSIRDKILPLGDNVGFICGHGPGGQIGEERRTNPFLRGL

SEQ ID NO: 6254 - protein, 279 aa, Glycine max
MENRTSSVLPPGFRFHPTDEELIVYYLCNQASSRPCPASIIPEVDIYKFDPWELPDKTDFGEKEWYFFSPRERKYPNGVRPNRATVSGYWKATGTDKAIYSGSKHVGVKKALVFYKGKPPKGLKTDWIMHEYRLIGSRRQANRQVGSMRLDDWVLCRIYKKKNIGKSMEAKEDYPIAQINLTPANNNSEQELVKFPRTSSLTHLLEMDYLGPISHILPDASYNSTFDFQINTANGGIDPFVKPQLVEIPYATDSGKYQVKQNSTINPTIFVNQVYDQRG

SEQ ID NO: 6255 - protein, 138 aa, Saccharomyces cerevisiae
MWLTEAQKFGVAFTFGGFLFFLFGIFTFFDRALLALGNILFLIGVFLIIGSQKTYIFFTRPNKRRGSLFFLVGAFLILLKWTFLGFIIESLGIIGLFGDFFGVIVQFLRSMPIIGPILSHPAIAPIVDKLAGVRVLPV

SEQ ID NO: 6256 - protein, 140 aa, Triticum aestivum
NKPKPPVIITRESANTLRAHILEVGSGCDVFECISTYACRRQRGVCVLSGSGIVTNVTLRQPSAPAGAVVTLHGRFEILSLSGSFLPPPAPPGATSLTIFLAGGQGQVVGGNVVGALYAAGPVIVIAASFANVAYERLPL

SEQ ID NO: 6257 - protein, 277 aa, Staphylococcus aureus subsp. aureus MSSA476
MEVKTFYNGNTMPQIGLGTFRVENDENCMESVKYAIEQGYRSIDTAKVYGNEEQVGAGIRAGLESTGIAREDLFITSKLYFEDFGRENVAAAYEASLSRLGLKYLDLYLVHWPGTNEAVMVDTWKGMEDLYKNNKVKNIGVSNFEPEHLEALLAQVSIKPVINQVEYHPYLTQHKLKLYLAAQHIVMESWSPLMNAQILNDETIKDIAQELGKSPAQVVLRWNVQHGVVTIPKSVTPNRISENFQIFDFELSDEQMTRIDGLNQDKRIGPDPKTFEG

SEQ ID NO: 6258 - protein, 500 aa, Oryza sativa (indica cultivar-group)
  misc_feature (214)..(214): Xaa can be any naturally occurring amino acid
MDPYKHRPSSSFNGPLWSTNSGAPVWNNNNSLTVGSRGPILLEDYHLVEKLANFDRERIPERVVHARGASAKGFFEVTHDITPHLRRLPPRPGRPDPGHRPLLHRHPRARQPGDPPRPAWLRHQVLHPGGQLGPRRQQLPRLLHPRRHEVPGHGALAQAQPQVARPGELAHPRLLLPPPGEPPHVHLPLRRHRHPRRLPPHGRFRRQHLHARHXAGKSHYVKSTWKPTCGVKSLLDDEAVTVGGTNHSHATQDLYDSIAAGNFPEWKLFIQTIDPDHEDRFDFDPLDVTKTWPEDIVPLQPVGRMVLNPQHPTTFFSENEQLALRAAGVLPRGSWGPGDLLAPDDKPLQERGIFSYSDTQRHRLGPNYLLLPPNAPKCAHHNNHYDGFMNFMHRDEEVDYFPSRYDPAKHAPRYPIPSATLTGRREKVVIAKENNFKQPGERYRSWDPARQDRFIKRWIDALSGPRLTHEIRSIWLSYWSQADRSLGQKLASRLSAKPSM

SEQ ID NO: 6259 - protein, 543 aa, Arabidopsis thaliana
MFTSGNVTARVFERQIRTPPPGASVNRARHFYENLVPSYTLYDVESPDHCFRKFTEDGLFLISFSRNHQELIVYRPSWLTYSTTDDSTTTLPPLPRRASKFDSFFTQLYSVNLASSNELICKDFFLYHQTRRFGLFATSTAQIHDSSSPSNDAVPGVPSIDKITFVLLRLDDGVVLDERVFLHDFVNLAHNMGVFLYDDLLAILSLRYQRIHLLQIRDSGHLVDARAIGYFCREDDELFLNSSSQAMMSQDKSKQQSLSGSKEDDTGENGLRHSLSQPSGSNSFLSGVKQRLLSFIFREIWNEESDNVMRVQSLKKKFYFHFQDYVDLIIWKVQFLDRQHLLIKFGSVDGGVTRSADHHPAFFAVYNMETTDIVAFYQNSAEDLYQLFEQFSDHFTVSSSTPFMNFVTSHSNNVYALEQLKYTKNKSNSFSQFVKKMLLSLPFSCQSQSPSPYFDQSLFRFDEKLISAADRHRQSSDNPIKFISRRQPQTLKFKIKPGPECGTADGRSKKICSFLFHPHLPLAISIQQTLFMPPSVVNIHFRR

SEQ ID NO: 6260 - protein, 546 aa, Oryza sativa
MRGDETSSLLFIHPWPPSLEAHHRHTGSLLHSAFLARSPHLTSLTYIAGSIAPSPAANEMLRAAARALTVSSLNPKVLALADHHLGGLVARRAQSMQQELDANPASHPFSEIIYCNHSNPQSQGQQPNKFFREVLALCNHPHLLDRSEASFMFSSDAITRAREIVGFIPGKTTGGYSHCQGIEGLRDAIAAGIASRDGLPSYSEDIFLTDGAAAPVHMMMHLLIRGKKDGILCPIPSHSLYTDSMVLRGATLVPYYLDESRGWSVNISDLKKQLDGARAKGIDVRGLVVVNPGNPTGQVLVEENQCEIVELCKNECLVLLADEVYQENIYTDQKKFNSFKKVARSIGYGEGDISLVSFHSVSNGYYGECGRRGGYMEVTGFSSEVRGEVYKVASLSACSNISGQILMSLVMNPPKVGDESYPSYRAERDSILSSLSCCAEAMVSTFNSMEGMTCNKAEGGISVFPSVRLPPRAIEAAEAMNTEPDVFYALRLLESTGIVVVPGSVFGQVPGTWHFRCTILPQEEKTRQIISRFNVFHEAFMEEFRS

SEQ ID NO: 6261 - protein, 530 aa, Oryza sativa
MCGILAVLGVADVSLAKRSRIIELSRRLRHRGPDWSGIHCYQDCYLAHQRLAIVDPTSGDQPLYNEDKSVVVTVNGEIYNHEELKANLKSHKFQTASDCEVIAHLYEEYGEEFVDMLDGMFAFVLLDTRDKSFIAARDAIGICPLYMGWGLDVCRIKILVLIYVPSKKFKVFVTGHEVGFFFDVISGSLFKAIIKRLMTDVPFGVLLSGGLDSSLVASVVSRHLAEAKVAAQWGNKLHTFCIGLKGSPDLRAAKEVADYLGTVHHELHFTVQEGIDALEEVIYHVETYDVTTIRASTPMFLMSRKIKSLGVKMVLSGEGSDEIFGGYLYFHKAPNKKEFHEETCRKIKALHLYDCLRANKSTSAWGVEARVPFLDKNFINVAMDIDPEWKMIKRDLGRIEKWVLRNAFDDEEKPYLPKHILYRQKEQFSDGVGYSWIDGLKDHANEHNAARLTVPGGPSVACSTAKAVEWDAAWSKNLDPSGRAALGVHDAAYEDTLQKSPASANPVLDNGFGPALGESMVKTVASATAV

SEQ ID NO: 6262 - protein, 205 aa, Juglans regia
KRRNGLLKKAYELSVLCDAEVALIVFSSRGRLYEYANNSVKSTIDRYKKARADSSNTGSVSEANTQFYQREAATLRQQINSVQESNRKMLGESLSGMAFRDLKSLESKLESGIRRIRSKKNELLFAEIEYMQKREVDLHNNNQLLRAKIAENERNQQNLNVMPGGGNLELMHSQPFDSRNYFQVDALQPNHDQYPRQDQMALQLV

SEQ ID NO: 6263 - protein, 219 aa, Lactobacillus collinoides
MKIDQIFSPYQLNKRVTLRNRLVLAPLNIQSSLFDGSVSLNNLNFHKARAKYVGLDIIGSAYISDSANTAYGAISVADDSKIDGLKKLATVIHQGGSKAILQLVHAGRMTNSYASKGAPVLTPSEVKAAHGDVDLPKAMTKTDIETVIKQFETATIRAIKAGFDGVELHGANTFLFQQFMSPLSNLRTDEYGGSLENRIRFCAETAKRVLDTAHAHKPG

SEQ ID NO: 6264 - protein, 315 aa, uncultured crenarchaeote DeepAnt-EC39
MNEPIKNIRLLLEEITIKCDASWIAFSGGLDSSILAEIKKEQNLNAITIISKDFLATDLSYSQITAKHIDIPLEIKYVSIDQMLGAIESTIKILKNFNDIEIRNSIVPYLYMNALKEKNITNVITGDGADEIFAGYNFLLKKDHNELKNELKRIKKIMHFTSQKIANKLGMSIQMPFIDEKIIELVETLPINLLINQKNGIKFGKWVLRKAFENTLPTNVIWRKKTAMQDGSGTTNLTKLFDSIITDDIFTKKVKKIKSECNIKIRTKESLYYYELFKENFIIPECEDKKNICPDCNAEIVSNSKFCRMCGKFPI

SEQ ID NO: 6265 - protein, 247 aa, Petunia integrifolia subsp. inflata
MVFPNQEFESSSSQRKSGRGKIEIKRIENTTNRQVTFCKRRNGLLKKAYELSVLCDAEVALIVFSSRGRLYEYANNSVRATIDRYKKHHADSTSTGSVSEANTQYYQQEAAKLRRQIRDIQTYNRQIVGEALSSLSPRDLKNLEGKLEKAIGRVRSKKNELLFSEIELMQKREIEMQNANMYLRAKIAEVERATQQMNLMPGGGSEYQQQPMSSTSQPYDARNFLPVNLLEPNPHYSRQDQTALQLV

SEQ ID NO: 6266 - protein, 370 aa, Pseudomonas aeruginosa PAO1
MLFSPYTLGHLTLPNRIVMPPMTRSRAASGEVATALMAEYYSQRAGAGLIVSEGTQISRQGQGYAWTPGIHSAEQVAGWRQVTDAVHAAGGRIFAQLWHVGRVSHTSLQPGNAAPVSSSALVAEGVKVFVDPQGRGAQAGGGEMVQHSAPRALAVEEIREIVADYAQAARNALDAGFDGVELHGANGYLINQFIDSQANARNDQYGGSLENRLRFLREVAEAVTAVVGRERIGVRLAPLTTLQGAVDDTPQATYLAAARLLDEIGVAYIHIAEADWEDAPAMPAAFKEALRIVYRGSLIYSGMYTKARAEEALARGWADLVGFGRPFIANPDLPYRLEHDLALADGDRSTYFGGGAAGYTDYPSLPQAAG

SEQ ID NO: 6267 - protein, 1412 aa, Cryptococcus neoformans var. neoformans JEC21
MHQQRAPAAHHHSYSYAPYPHASVSAENTVPSMAQPQVYYQQPPADFYPHVPGHNPHTGASHGTQAGPSQSAENNAFAMPDVRQSKSARPRPPPSSVTMPMIPTSLPDPSMHSYAPVQAPVPQQQTRTANRRSHNPAATLNSPSAPRPEELTDEYVLHPSVYAFKQEYPRRAMVGLGPYIVLQTLGEGEFGKVKLGVHADYGVEVAIKLIRRGDLQEEAHASKVEREINVLKTLKHPNIVRMFDVLDTHKYIGIVLEFAGGGELFEYILANEYLKDKEGQRIFAQLISGVDYLHKKGVIHRDLKLENLLLDKNRNLIITDFGFANQFDLSKGDLMSTSCGSPCYAAPELVVLDTPYHGSAVDIWSCGVILYAMLAGYLPYDDDPDNPDAGNVVELYRYIMNTELHYPDHVSPLGKNLLQHMLILHPEHRIKIPVIVKHPWLKSYHDMFNKSVEECEAAFQDAMYRKSRQARKELQERRRVQTQARESLQTKERAHVQRSQSSAPGTIINAAALDQIRRRPHSAMPGSTPLPEIIAKHSESVDDVALTMRSATPPTALSQPTEIRSPTTESPRPRSESMAPRLSFTTSVSTPTAMTVETPSSVPVQSPTDALPPAAMTVMQPSVEAAPPMRDHKNRNTIQVEHAGEGLHDRAKEAFDANHGRADGSMETTSTADTGMVASSLLDVKREESTDIEMESGSSDSEQPKPANDGISQQPGEKSMDIPPIVPITIPLAPPAESGTATAANDSSQVLEPQEKLSPALVEHGSASIDEMASPSTPRVSTSVEQEPVNITPRAKMRAPPVATTPKASLVNERKRHGSMPPPMGPSFVSDSRPESSLTATGLPKLPKKDRYRKGMSLDKFGLAKLLGHASQAHTTVHGEGKMAPPSASSSALALQHQLQQHGGQSQAVSESDSVKKSRRRTLQFGFHSRKDSKASSAAVATPGTPLMDKDTNGENRLSSITGGTASLRDKRRKTVQIGLSTQSEQKDTTVNVPGLSSSGHLVKNPATEPPQGISIGPVVGTDASALSQSSPSAVALEAFAAQQGHYPSYRGSSSRASKVMDWFRRKTFVKETLPEPKSPVIKSDSQSSFVRIGEVASPASKTQESAQASTVSQENTDKAEEKIDSTADQENAAKTTPTKSPVLPQPIGATATTPSVMITPPRPTAATTPTIGSSTQQSPPTTIRTRSASTFTFDESKIRVHTGLVDQSALSTKPPQDVFVEVIQVLRGMGVEMKRESDFKLRCTRAKKKAAGTSIGLGSVVSTGSGMSPFSIMNNASASKTDSRGLPRPTSPSAVANRSSAGIKGLLRRGSSRSSAHPARLTRTGDEVPNPPSQSTPNLELPESSMASKPEPLYGKELMDAGDEVKFTVELCKMKNLPGLFILKIKRTKGNLWSFKFIYQTVIERTTTLTH

SEQ ID NO: 6268 - protein, 357 aa, Acinetobacter sp. ADP1
MNQIFKPILIGQYQLANRLAMAPMTRSRAQFDGTPSELAAEYYTQRASVGLIIAEGAQPSEDGQGYLATPGIYTDSHIAGWKKITNAIHAKGGRIFIQLMHVGRMSHPDNTPHHRQAVAPSSIAPGTVTFTPTGMQEIPKPRALTIKEIKQTIQDFRHAARSAIEAGADGVEIHGANAYLFQQFFAPTANTRTDEYGGSIENRARFAIEVATAIAEEIGADKTAIRLSPGSLLWGIDEGQEGPELYHYLVKELNKLGLVYLHIMHLGNETLLQDIRQLWTQALIVNRPGRPREQIGTDVESGLADLESYGEMILANPDFVNRLQQNLPMNEADKTTYYGGDAKGYVDYPALNASDKI

SEQ ID NO: 6269 - protein, 232 aa, Zea mays
  misc_feature (2)..(2): Xaa can be any naturally occurring amino acid
  misc_feature (10)..(10): Xaa can be any naturally occurring amino acid
  misc_feature (219)..(219): Xaa can be any naturally occurring amino acid
GXAERGELAXESVRLRAELKKGATGLPFPEVISANIGNSQQLDQKPITFFRQVLSLLENPQLLEHEDVLLEKLGYKSDVIARAKWLLSEVSSVGAYSASSGVSGIKESIARFLERRDGIPADPKHIYLSAGASSGVNTLLHIICANKNSGVLVPIPQYPLYTASLSVLDAVCVPYLLDESKAWGTDLDIMRASYEKAKADGVDTRALVVINPGNPTGAXLSEADVRATIQFA

SEQ ID NO: 6270 - protein, 84 aa, Oryza meridionalis
ARYVKFHWKPTCGVSCLMDDEATLVGGKNHSHATQDLYDSIAAGNFPEWKLFVQVIDPEEEERFDFDPLDDTKTWPEDEVPLRP

SEQ ID NO: 6271 - protein, 320 aa, Yarrowia lipolytica CLIB122
MAATDPKKYLFNHTMLRIKDPKVSVPFYEKHFGMKVLGHYKFEQFKFDIYYLAYDHPESPYYGKPVWDRQGVLELTHNYGTENDANYKINNGNVEPHRGFGHICFSVDNIEKVSADLENGGVKFQKKLTDGRQKDIAFALDPDGYWIELITNHEAKLVANETNPSSYRFNHTMLRVKDPKKSIEFYTEKLGMRLFRTSKHENAKFTLYFLSYDKDFEVNDASRAGDREGLLELTHNWGTEDEADFSYHNGNAEPQGFGHLAITVDDIEAACERFNKIGVKFKKQLDEGGMKYIAFILDPDGYWIEVIPPYNLPLENHAKI

SEQ ID NO: 6272 - protein, 85 aa, Oryza barthii
KARYVKFHWKPTCGVSCLMDDEATIVGGKNHSHATQDLYDSIAAGNFPEWKLFVQVIDPEEEERFDFDPLDDTKTWPEDEVPLRP

SEQ ID NO: 6273 - protein, 84 aa, Oryza glaberrima
ARYVKFHWKPTCGVSCLMDDEATIVGGKNHSHATQDLYDSIAAGNFPEWKLFVQVIDPEEEERFDFDPLDDTKTWPEDEVPLRP

SEQ ID NO: 6274 - protein, 693 aa, Pseudomonas putida KT2440
MRCPHSVITPSGDLSMAADRYPHLLAPLDLGFTTLRNRTLMGSMHTGLEERPGGFERMAAYFAERARGGVGLMVTGGIAPNDEGGVYSGAAKLSTEEEADKHRIVTEAVHAAGGKICLQILHAGRYAYSPRQVAPSAIQAPINPFKPKELDEAGIEKQIADFVNCAVLAQRAGYDGVEIMGSEGYFINQFLAAHTNHRTDRWGGSYENRMRLAVEIVSRVRGAVGPNFIIIFRLSMLDLVEGGSTWDEIELLAKAIEQAGATLINTGIGWHEARIPTIATKVPRAAFSKVTAKLRGVVSIPLITTNRINTPEVAEAVLAEGDADMVSMARPFLADPDFVNKAAAGRADEINTCIGCNQACLDHTFGGKLTSCLVNPRACHETELNYLPVRTVKRIAVVGAGPAGLAAATVAAERGHAVTLFDAASEIGGQFNVAKRVPGKEEFFETLRYFRNKVKSTGVDLRLNTRVDVQALVGGGFDEVILATGIAPRTPDIAGVEHAKVLSYLDVLLERKPVGKSVAVIGAGGIGFDVSEYLVHQGVATSQDRAAFWKEWGIDTHLQARGGVAGIKAEPHAPARQVYLLQRKKSKVGDGLGKTTGWIHRTGLKNKGVQMLNSVEYLGIDDAGLHIRVDGGEPQVLAVDNVVICAGQDPLRELQEGLVAAGQSVHLIGGADVAAELDAKRAINQGSRLAAEL

SEQ ID NO: 6275 - protein, 539 aa, Paxillus involutus
MSLSKHVNAESLIRESKDKKHPHHHRSTTTSISTISYGARYGTQSIPKFHLPSKGTSAENAYQLIHDELALDGSPSLNLASFVHTWMPEPANKLMVENMSKNLIDQDEYPMTQLIHTRCVSILADLWHAPSTKQAIGTATTGSSEAIQLGGLAMKRIWQEHRKAAGKSIHEPGPNIVMGANAQVALEKFARYFEVECRLVPVSAESKYRLDPKKAMEYIDENTIGVFVILGSTYTGHYEPVKEMADLLDEYEKQTGHSVPIHVDGASGAFIAPFAQPKLLWDFKIPRVVSINTSGHKFGLAYVGVGWVVWRSKEYLPKDLIFELHYLGSVEYSFSLNFSRPAAPIIAQYFNFLHLGFEGYRAVALDDLKNARLLSRVLEGTGWYTVLSDIHRQKSNSLLTKGMQATIGIDEEHLENYMEGLPVVSFRFSDKFQEQYPEIQQKWIQTLLRAKGWIVPNYELPPNLEKVQILRVVVRENCTEVLIDRLVTDIVEITQNLVDRDSSTHALDMLGNGQHCKTVIGQMEEGSGSRSSGTYAKQC

SEQ ID NO: 6276 - protein, 636 aa, Oryza sativa (japonica cultivar-group)
MDGCDCIEPLWPTDELLIKYQYISDFFIALAYFSIPLELIYFVKKSSFFPYRWVLIQFGAFIVLCGATHLINLWTFTTHTKTVAMVMTVAKVSTAVVSCATALMLVHIIPDLLSVKTRELFLKNKAEQLDREMGLIRTQEETGRHVRMLTHEIRSTLDRHTILKTTLVELGGTLGLEECALWMPSRSGSSLQLSHTLRHQITVGSTVSINLPVVNQVFSSNRAIIIPHTSPLARIRPLAGRYVPPEVAAVRVPLLHLSNFQINDWPELSAKSYAIMVLMLPSDSARKWHVHELELVEVVADQVAVALSHAAILEESMRARDLLMEQNVALDLARREAEMAIRARNDFLAVMNHEMRTPMNAIIALSSLLLETELTPEQRLMVETVLKSSNLLATLINDVLDLSKLEDGSLELEIKAFNLHAVFKEVMSFIKPIAAIKRLSVSVMLAPDLPLCAIGDEKRLMQTILNISGNAVKFTKEGHITLVASVVKADSLREFRTPDFHPTASDDNFYLKVQIKDTGCGISPQDLPQVFTKFAQSQPGGNRGYSGSGLGLAICKRFVTLMGGHIWLDSEGTGRGCTVTFVIQLGICDNTNAYQQKLIPLVWPSSGDADFVGPVPNAPNEEKGQASLKSRYQRSI

SEQ ID NO: 6277 - protein, 86 aa, Oryza glaberrima
GKARYVKFHWKPTCGVSCLMDDEATIVGGKNHSHATQDLYDSIAAGNFPEWKLFVQVIDPEEEERFDFDPLDDTKTWPEDEVPLRP

SEQ ID NO: 6278 - protein, 450 aa, Bradyrhizobium sp. BTAi1
MTTRPRFVWGASTSAFQIEGAAHRDGRADSIWDVYLRAPGRVSHNDTADIACDHYHRYADDVTLMRDLGLDAYRFSIAWPRVLPQGRGAANEAGLAFYDRLIDALLAAGIEPWLCLYHWDLPQALGELGGWQNRDIAGWFADYTALVARRYGDRVKRFATFNEPGVFTLFGYGLGWHAPGVADKAALHQAIHHVNLSHGRAVDVLRRDVVGASIGAIHNRQPCYPCTSSPEDAAAALRLAAYWNDAFPFPQAFACYPPALRDAVTPYVRPDDMAQIGRPVDWFGLNHYSPHYVKADTNLIGASFGPPPQAVPRSAIGWPVVPDAFRETLVDIDQRFRIPIYVMENGTAAADVIDPAGDIQDDDRIGYLKAYITAMEQAIAAGADVRGYFVWSLMDNFEWGAGYSQRFGIVYVDHATQRRIPKASARWYAEMIAARRSPDDPAGPHNRAEE

SEQ ID NO: 6279 - protein, 264 aa, Poa pratensis
MSRKKKVRRRSTGPDSVAEIIKKWKEQNQKLQEENGSRKAPAKGSKKGCMAGKGGPENSNCKYRGVRQRTWGKWVAEIREPNRGNRLWLGSFPTAVEAAHAYDEAARAMYGATARVNFSERSPDANSGCTSAPPVLMSNGPTAVSYPSDEKDESESPPSLMSDAPTATLHRSDAKGEPESAGTLVHEVKTEVSNDSRSIREERKTVEVFQPEGKALHKEEKVSYDYFNVEEVLDMIIVELSADRKMEVHEEYQDGDDGFSLFSY

SEQ ID NO: 6280 - protein, 174 aa, Xanthomonas axonopodis pv. citri str. 306
MPLNDLQHVPGANDAPAETHGFVFNHTMLRVKDATQSLDFYTRVLGFRLLDARDFADAKFSLYFLALLPEGTAIPDDDAQRRLWMAGIPGVLELTHNHGTETQDGPVYHDGNSDPRGFGHLCISVPDIHAACARFDSLNVPYQKRLEDGRMKHLAFIKDPDGYWVEIISNTPLA

SEQ ID NO: 6281 - protein, 142 aa, Silicibacter pomeroyi DSS-3
MPLKYLHVMVRVKDLEKSMAFYELLGLREIRRYDSEEGRFTLVYLAAPGQDETPLELTYNWDGDDGLPSDSRHFGHLAYGVDDIYATCAMLQENGITINRPPRDGRMAFIRSPDNISIELLQNGAALDPAEPWVSMDSTGHW

SEQ ID NO: 6282 - protein, 330 aa, Rhodopirellula baltica SH 1
MTHTDQSVAPAASPEAESQARDAVSEVEPYEFTEIAMPIIAMHVLALFAFIPEFITGTNVLLLMISLVVFSNGITLGYHRLLTHKSLRVPKWLEYGYVGLALCCLQESPAKWVSTHRRHHSHSDEPDDPHSPTASFWWSHVGWLLWKRKGQHEFRTDDRYCADIIADPFYALMEKYPDLPAGIYILHAGVIWLLASALFLVDNSFVSAVWQGAGLVLWCVVLRTVMIWHFSWSVNSLTHCFGYQNHKTSDQSRNNWLVAIVSNGEGWHNNHHHDPASASVQHKWWEFDATYLQIRVLKRLGLATHVIEPRQFRKGSVEPDNPSRLNKQTG

SEQ ID NO: 6283 - protein, 295 aa, Prunus mume
MSSSDLQLPPGFRFHPTDEELVKHYLCRKCQSQPISVPIIAEIDLYKYNPWDLPGLALYGEKEWYFFSPRDRKYPNGSRPNRAAGSGYWKATGADKPIGSPKPVGIKKALVFYAGKAPRGEKTNWIMHEYRLADVDRSPRKKSSSLRLDDWVLCRIYNKKGTVEKQQQQQQQQQQQTTSRMSSGSEFEDRKPENLACPPPPAAVAPTRPNDYVYFDTSDSVPRLHTDSSCSEHVVSPEFTCEVQSEPKWKEWEKALDFNYNYMDTSVENGFGPQFQSANQMSPLQDIFMYLQKPY

SEQ ID NO: 6284 - protein, 142 aa, Glycine max
  misc_feature (24)..(24): Xaa can be any naturally occurring amino acid
  misc_feature (113)..(113): Xaa can be any naturally occurring amino acid
  misc_feature (126)..(126): Xaa can be any naturally occurring amino acid
FSFGIDAIEDVLYHIETYDVTTIXACTPICLMSRLIKSLGVKWVIPREGSSEIFGGYLYLHKAPYKEEFLREPCLWIKALDHYDRLRANRSTFGWGLEARVPFWDKACINAAXEFSPEWNMMKRDXGRIEKWVLRRAFDDEE

SEQ ID NO: 6285 - protein, 417 aa, Zea mays
  misc_feature (328)..(328): Xaa can be any naturally occurring amino acid
MAAAAFDAYTDKNAIFRRLKAKPENKMCFDCNAKNPTWASVTYGIFLCLDCSAVHRSLGVHITFVRSTNLDSWTPDQLKMMAFGGNNRAHAFFKQHGWTDGGKVEAKYTSRAAELYRQMLNKEVAKSAITDNALPSSPVTVSEASKPSDDFPEFKLSDAPAPPAENLNGKHEPKSPKSAPRSPKAATHPTFATSVKKPIGAKKVGGKTGGLGVRKLTTKPNESLYEQKPEEPKPAIPALTAPTAKGGPSLHSRFEYVDNEQSSDSRTGGSGSRVTGHVAPPKSSDFFQEYGMGNGFQKKSSNASKAQIEETDEARKKFSNAKANFVIXFFGTQNREEKEAQLSLQKFAGSSSISSSDLFGRTNVDDSNLDLSAADLINRISFQASQDLSSLKDIAGETGKKLTSFASNFISDLDRIL

SEQ ID NO: 6286 - protein, 471 aa, Lycopersicon esculentum
MLKMLSKMAMCKSHGQDSSYFIGWQEYEKNPYDPLQNPSGIIQMGLAENQLSFDLIESWLTRNQDVIQFRENGGSMFRDLALFQDYHGLQAFKNVLVSLMAEIRRKKVKFDPKNLVLTAGSTSANETLIFCLAEPGEALLIPTPYYPGFDRDLKWRTGAEIVPIQCYSSNNFRITESALEEAYEQAQKRNLTVKGVFITNPSNPLGTTMSRNELNILITFAMTKNIHIVSDEIYAGTVFDSPKFVSIIEALIDRKLEKSKMWNQVHIVSSLSKDLGLPGFRVGMIYSNNETLIAAATKMSSFGLISSQTQYLLSKILGDRRFIKRYVKQNKKQLIHRREMLASGLANSGIECLDSNAGLFCFVDMRDLLNSNTFEAEMELWKKIISNVGLNVSPGSSCHCSEPGWFRVCFANMSKETLDLAMQRINNFVNFDRDIHRQQPLRFVTGAGSRRRRTIANWVVKFSSGDGRRDR

SEQ ID NO: 6287 - protein, 337 aa, Thiobacillus denitrificans ATCC 25259
MHTGTTLTQFIIEEQRRTAGATGDFTSLLNDVVTACKAISNAVNKGALLGVMGALESENVQGETQKKLDVITNDIMIRSNEWAGHLAGMASEEMDDVYAIPGQYPLGKYLLVFDPLDGSSNVDVNISVGTIFSILKAPVAGRAAKAEDFLQAGTKQVCAGYAIYGSSTMLVLTFGHGTNGFTLDRDVGEFVLTHPAMKIPTETKEFAINASNMRFWEKPVQRYVDECLAGKTGPRGKDFNMRWVASMVAEVHRILTRGGIFMYPKDTKDPSKAGKLRLMYEANPMAFIVEQAGGAATTGYQRILDIAPEGLHQRVPVILGSKTEVDTVTGYHHEKAA

SEQ ID NO: 6288 - protein, 87 aa, Leersia perrieri
KARYVKFHWKPTCGVSCLMDDEATLVGGKNRSHATQDLYDSIAAGNFPEWKLFVQVIDPEEEERFDFDPLDDTKTWPEDEVPLRPVG

SEQ ID NO: 6289 - protein, 342 aa, Bordetella parapertussis 12822
MNLLSPIDIAGIALRNRIAVAPMSRTQADVHGHPAAETAAYYARYARHGAGLVITEALYTAGPAARAYFNQPGLASEAQAEHWRATVRAVHQEGGRVIAQLQHAGKLAEPGLHARPLGPVDGAAQGLSWQTQQPNAPAHAATAEEIERIIEGFALSARLAHYAGFDGVEIHGARGYLVNDFLSAYNVRDDEWGADRARIAEAVLRAVRQSCPLPIGFNYSIYKMDEYRYQPPGSGAEIAALLARLCQAGADILHISSRRVLKPEPWGGLLAQLARAAAPKALMVNGGLATLQDCETALAATQADLVSLARPFLANPDWLARSLAGEPLRAYEPGMEQRPLLD

SEQ ID NO: 6290 - protein, 283 aa, Ralstonia solanacearum
MRRIQHRTQGNAMNDTFTMPAFGLGTFRLTGEAAIDSVRTALELGYRAIDTAQIYANEAEVGQAIAASGVPRRDLFLTTKIWVDNLAADRLIPSLKASLARLRTEQVDLALIHWPSPGGAVPMAEYLGALDEARREGLTRALGVSNFTVALLREAIETVGAAQIATNQIELHPYLQNRKVAAFAQSQGIHVTSYMTLGVGRVLADPVLADIARAHGATPAQVVLAWAMQLGCSVIPSSTRRANLQSNLAARDLRLTGDDMARIGALDRGERIADPAGIAPDWD

SEQ ID NO: 6291 - protein, 764 aa, Anabaena variabilis ATCC 29413
MPMTTIAPEQVNRIVWNQHHDPFEILGSHPIEQNGKNVWVVRAYLPNASAAWVVLPEQRQEYAMQTVHDPHFFECIIETSELSNYQLKTKEGEHERVSYDPYAFRSPRLTDFDLHLFAEGNHHRIYEKLGAHFTEVDGVTGVYFAVWAPNARNVSVLGDFNLWDGRKHQMRKGATGVWELFIPEIGVGEHYKYEIKNFAGHIYEKSDPFGFQQEPRPKTASIVSNLNSYNWSDENWLEQRRHTDPLTQPISVYEVHLGSWLHAASAEPAKLPNGETEPVVIASELNPGARFLTYRELASRLIPYVKELGYTHIELLPIAEHPFDGSWGYQVTGYYAPTSRFGTPEDFMYFVDQCHQNNIGVIVDWVPGHFPKDGHGLAFFDGTHLYEHADSRKGEHKEWGTLVFNYSRNEVRNFLVANALFWFDKYHIDGIRVDAVASMLYLDYCRKEGEWLPNQYGGRENLEAADFLRQVNHLLFSYFPGVLSIAEESTDWPMVSWPTYTGGLGFNLKWNMGWMHDMLDYFSMDPWFRQFHQNNVTFSMWYNHSENFMLALSHDEVVHGKSNIIGKMPGDKWQKLANVRCLFAYMFAHPGKKTMFMSMEFGQWSEWNVWADLEWPLLQFEPHQQLKKFFTELNKLYRSEPALYTLDFAREGFDWIDCSDNRHSVVSFIRREKDTENFVVVVCNFTPQPHSHYRIGVPEKGFYTELFNSDARQYGGSNMGNLGGKWTDDWSMHSRPYSLDLCLPPLGVLILKMDKEKTAKASGS

SEQ ID NO: 6292 - protein, 453 aa, Ashbya gossypii ATCC 10895
MWRARTMASQEEFYRTQIFGTVFEITNRYADLNPVGMGAFGLVCSAVDTYTQQPVAIKKIMKPFSTAVLAKRTYRELKLLKHLRHENLICLEDIFLSPLEDIYFVTELQGTDLHRLLQTRPLEKQFLQYFLYQILRGLKYVHSAGVIHRDLKPSNILINENCDLKICDFGLARIQDPQMTGYVSTRYYRAPEIMLTWQKYNVEVDIWSAGCIFAEMIEGKPLFPGKDHVHQFSIITDLLGSPPKDVIDTICSENTLKFVTSLPHRDPVPFTERFKNLKPDAVDLLEKMLVFDPKKRITAGDALTHPYLAPYHDPTDEPVADAKFDWNFNDADLPVDTWRVMMYSEILDFHQVPDSQINPNDTFDDQVAAATAAAEAARQQQQQKQQQQKQQQQRHQGVEHGAQHVQLQHGAKQLSADPLVGDSNGGIPLNVSAANETLNNFANQAAQYATDFE

SEQ ID NO: 6293 - protein, 90 aa, Oryza coarctata
RDGKARYVKFHWKPTCGVSCLMDDEATLVGGKNHSHATQDLYDSIAAGNFPEWKLFVQVINPEEEERFDFDPLDDTKTWPEDEVPLRPVG

SEQ ID NO: 6294 - protein, 773 aa, Yarrowia lipolytica CLIB122
MPNIIWIPFRETQAVDLITGLGDTIEKQLNQPRDKFTADLKTANDLRNNILNPQPNASYLDHLTKYYAQLTYWTTKFPAGCDSLEFMWYGTLAYTANAAPVISQSLHFERCNLLYNLGSLYSQMGVNEGRQDADGLKMSFNYFQMAAGCFQILIENGLPDLESLNMRGLEYDTICCVRDLMLAQAQECFWQRSLLSGSRNSLVAKLAQQVSLLYDSALAWAQKSPQVRSEWVHHMTCKRQHFLAVAHYRMARDALDGCRYGEEIARLKAALNAIKEGTGKGMLRRYLVESVADDLNGIIDVVTEDLKRAEKDNNLIYLQSVPQTTALAPITPALMVKCTPPVELAKPIEFLTKDKLGLPLFVKLTPFAFHQALVLYSQECDKIVSSIESQLKNCTNSKNQALVEMALPGSLDSVEKPKGIPADIIAHSDQIKSERGLETTREAVKDVQRLAATARQELEAAKAVLDDERSEDEMLRRKNNSGWTRFDSKEAGAHLYTRLAELEQYLADAGASDKLVRGKLDEIDYLLSILNSGRSALENYLPSSVSGVRSPEVKRQVPHLRDLLNNLESLEIKRAQYMDRLSLKQQNDDIEPVLEYHMNKLIREKHANLRLTLADFEPITSKELEKYTVDQDWASEQKELQEEVLEKLDVANKDFRSSLDMNDAAIHRENAIQSLEVAYFSYQEQKDHLDAGRNFYNQLLGEISIFHKNCKQFVYERKMEGASLEHELSSMHLSEHEHSGGHSDTSSTPLAAPRAQRASNLSMWSPEDGIRFG

SEQ ID NO: 6295 - protein, 339 aa, Oryza sativa (japonica cultivar-group)
MKFGAIYEEYLREQQDKYLTKCSHVEYKRLKKVLKKCRVGRSLQEDCPNGDQQEGNNESPDICKCNSCTLCDQMFFTELTKEASEIAGCFSSRVQRLLNLHVPSGFLRYIWRVRQCFIDDQQIMVQEGRMLLNYVTMNAIAIRKILKKYDKIHGSVSGRDFKSKMQTDHIELLQSPWLIELGAFHLNCNSSDIDETVGFLKNEFFKNFSCDLTEARPLMTMAISETMKYEYSLTCPICLDTLFNPYALSCGHLFCKGCACGAASVYIFQGVKSAPPEAKCPVCRSDGVFAHAVHMTELDLLIKTRSKDYWRQRLREERNEMVKQSKEYWDSQAMLSMGI

SEQ ID NO: 6296 - protein, 473 aa, Malus x domestica
MRMLSRNATFNSHGQDSSYFLGWQEYEKNPYHEVHNTNGIIQMGLAENQLCFDLLESWLAKNPEAAAFKKNGESIFAELALFQDYHGLPAFKKAMVDFMAEIRGNKVTFDPNHLVLTAGATSANETFIFCLADPGEAVLIPTPYYPGFDRDLKWRTGVEIVPIHCTSSNGFQITETALEEAYQEAEKRNLRVKGVLVTNPSNPLGTTMTRNELYLLLSFVEDKGIHLISDEIYSGTAFSSPSFISVMEVLKDRNCDENSEVWQRVHVVYSLSKDLGLPGFRVGAIYSNDDMVVAAATKMSSFGLVSSQTQHLLSAMLSDKKLTKNYIAENHKRLKQRQKKLVSGLQKSGISCLNGNAGLFCWVDMRHLLRSNTFEAEMELWKKIVYEVHLNISPGSSCHCTEPGWFRVCFANLPERTLDLAMQRLKAFVGEYYNVPEVNGGSQSSHLSHSRRQSLTKWVSRLSFDDRGPIPGR

SEQ ID NO: 6297 - protein, 488 aa, Arabidopsis thaliana
MRLIVPLRGVIQGRGGLFVGSLIPCCLFYFLQLYLKRRRPPPSDPTDLPRTFSRTNLFSRGNSIGRVRVSSRAVPVAKPSDSPYYIGLERVKTDPYDRITNTDGIIQLGLAESTRWMSENLMESMMQSDDGEFDISSIAMYKPFEGLLELRVAFADFMSRIMGGNVSFDPSNMVITAGGTPAIEVLAFCLADHGNAFLIPTPYYPGFDRDIKFRTGVELIPVHCRSSDNFTVTVSALEQALNQARKRGSKVSGILFSNPSNPVGNILSRETLCDILRFAQEKNIHVISDEIFAGSVYGDKEFVSMAEIAGSGEFDKTRVHIIYGLSKDLSIPGFRAGVIYSFHEDVVNAAKKLMRFSSVPVLVQRILISLLSDVRFIEGYMAAHRQRIRDKHIRFVEGLKQLGIPCAESGGGLYCWVDMSSLLTSYSEKGELELFEKLLTVAKINATPGTACYCIEPGWFRCCFTALADEDIPVIMERIRQLAESFRS

SEQ ID NO: 6298 - protein, 200 aa, Glycine max
MVQSRKFRGVRQRHWGSWVSEIRHPLLKRRVWLGTFETAEEAARAYDEAAILMSGRNAKTNFPVGENQIVGNHSSNTSSSSTTTLSAVLSAKLRKCCKSPSPSLTCLRLDTENSHIGVWQKRAGPRSDSNWIMMVELENKNNDNEGDHHQGPSSSDDSEFPVVVVDVDAQEKVKPEEESTGLDEEQKMALQMIEELLNRN

SEQ ID NO: 6299 - protein, 727 aa, Xylella fastidiosa Temecula1
MSLRILNSLKVALLTLAITTAPALMAKSDSASPQVATPDQTTATKLVYGLLSDSRYAYRLRPLDETMSKDIFKRYLEALDNNKQFFTEADIDNFSAFKAEIPDSIRNGNLKPAFSIFTVYKKRVAERVTYANQLLKQNFDFSGQEKYEYDRSKAPWPASPQDLDDIWRRSIMNDWLRLKLAGKKPEDIRKTLKKRYANLLKTVNELKGEDVFQLYLNAYTNSIDPHTDYFTPRTADAFNQQMSLSLEGIGAQLQKQEDMVIIREVIPGGPTALDGTLKPGDRIVGVGQGKGGPIEDVIGLRIDDVVSKIRGKKDTQVRLEYIPAESGIDGAHRIVTLTRQKVRLAEQAAKGETITIEGSNGDAQRRIGIIKLPTFYEDFEGRRRNLANYTSATRDVAKLLTNFKTDKVDGVVLDLRNNGGGSLDEAIQLTGLFIEQGPVVQVRESGGRVTVNGDRDDKVTWDGPLAVLINRGSASASEIFAGAIQDYGRGLVIGETSFGKGTVQNIVDLDRWPANESRRFGQVKLTIAQFFRISGSSTQHKGVLPDIAFPASVGATEFGESTYENALPWTRIASLQHTQYGNFSPILSKLKKIHISRTANDIEFKWWQEDVHNFSLEKEKKYVILNEAERLAERRKQETQHRERQTIRKNLGLQLDPLSEESDDGLIGNERDIAKDTAREKLADKRPDPLLHESAAILTDTINLLEKDQILSAQVLLQSTTPGHWAN

SEQ ID NO: 6300 - protein, 131 aa, Zea mays
QSDETWQMGDIVHTLTNRRWLEKCVTYAESHDQALVGDKTIAFWLMDKDMYDFMALDRPSTPTIDRGIALHKMIRLITMGLGGEGYLNFMGNEFGHPEWIDFPRGPQRLPSGKFIPGNNNSYDKCRRRFDL

SEQ ID NO: 6301 - protein, 636 aa, Podospora anserina
MLEDPSYNSVVRWSPEGDSFVVLEKFTKTILPKHFKHSNFASFVRQLNKYDFHKVRHNEESGEAPYGRDAWEFKHPEFRADRKDQLDNIRRKAPAPRKPPPTEDAFPASQQIVVLSESLNATNVQIQTLQEQYLELDRTNRLLVAEVLSLQKMLRAQSQASNELISHLNNMEDRRRNSRHSAQSSHSSHSGTNYHQGTLGLLPDGTDEPAPELRRAREILNGVSPDSQADRELERLSMAYHQNGSPAESAGSSVMFTHAGPQTSMNVVHDPFSDPRHLVYPVGQTQGIDPFHADHIHNIPYSRPLSNPNVMTEAPSQISPPPGKEQNGSLWRGKKPQILLVEDDKTCARIGSKFLTNMDCSVETARDGLEAVEKINTDADRFDLVFMDIIMPNLDGVSATAMIRMVTPQIPIIAMTSNIRQEDIQTYFQFAKPFTRDGMVRILKKHLTRMLKDPQSAGVLNDPNDPTSAGNGGGGQQTAGGPGPPTGGYANANMAASMQAAINQAAQVQVKYEQTPIPSPSTTASWHSPGTTMQQVQHQQVQQQQQHASPRLDQGGYMNAVGSGQGVGGMVLTPGGSQRGPGPGQQQQQQYAGYMQAGPGPVTRLPEMGGMGGGAGDDRPEKRQRLYGPGQGGYVG

SEQ ID NO: 6302 - protein, 471 aa, Lycopersicon esculentum
MKLLSDMASCNSHGQDSSYFLGWQEYEKNPYDEIQNPKGIIQMGLAENQLSFDLLESWLAQNPDTAGFKRNGESIFRELALFQDYHGLPDFKNALVQFMSEIRGNKVTFNPNKLVLTAGATSANETLMFCLANPGDAFLLPTPYYPGFDRDLKWRTGAEIVPIQCTSSNGFRITQSALEESYKLAKTRNLRVKGILVTNPSNPLGTTLTRNELELLVSFVAEKGIHLISDEIYSGTVFNSPKFVSVMEVLIENNYMYTEVWDRVHIVYSLSKDLGLPGFRIGAIYSNDAVIVSAATKMSSFGLISSQTQYLLSAMLTDKKFTKKYISENQKRLKKRHAMLVKGLESSGISCLESNAGLFCWVDMRHLLKTNTFEAEIELWKKIVYEVRLNISPGSSCHCTEPGWFRACFANMSEDTLNLAIQRIKSFVDSSDVIGINVDQSNQTNQNTSTSPKKKLFAKWGFRLSFNDRER

SEQ ID NO: 6303 - protein, 75 aa, Zea mays
QSDETWKMGDIVHTLTNRRWLEKCVTYAESHDQALVGDKTIAFWLMDKDMYDFMALDRPSTPTIDRGIALHKMIR

SEQ ID NO: 6304 - protein, 211 aa, Castanea mollissima
MGRGRVEVKRIENKINRQVTFAKRRNGFLKKAYELSVLCDAEVALIIFSNRGKLYEFCSTSSMLKTLERYQKCSYGAVEVNKPGKELEISYREYLKLKARFESLQRTQRHNICWTSFLISKIRNTYLVEANRALTIKLDEISSRNNLRQSWEGGEQSMSYGPQNAHSQSFFQPLDCNPTLQIGYNASGSDQQLSGTTHAQQVNGFIPGWML

SEQ ID NO: 6305 - protein, 200 aa, Arabidopsis thaliana
WAYPEAITVGEDVSGMPTFCIPVQDGGVGFDYRLHMAIADKWIEMLKKRDEDWQMGDIIYTLTNRRWSEKCISYAESHDQALVGDKTIAFWLMDKDMYDFMAVDRPSTPLIDRGIALHKMIRLITMGLGGEGYLNFMGNEFGHPEWLDFPRTHAAPLSRTDTALTTSSALPHTPRHKLRQAAPRRANTQPTGTRAQPDPH

SEQ ID NO: 6306 - protein, 633 aa, Phalaenopsis equestris
MEGCDCIEPQWPADELLVKYQYISDFFIALAYFSIPLELIYFVKKSSFFPYRWVLIQFGAFIVLCGATHLINLWTFTMHSRTLAIVMTVAKVSTAVVSCATALMLVHIIPDLLSVKTRELFLRNKAEELDREMGLIRTQEETGRHVRMLTHEIRSTLDRHTILRTTLVELGRTLDLVECALWMPSRTGLNLQLSHTLNNQIPVGSVVSINLPVVNQVFNSSCAVRIPHTCPLARFQPHTGRYVPPEVVAVRVPLLHLSNFQINDWPELSAKNFAVMVLMLPSDSARKWHVYELELVEVVADQVAVALSHAAILEESMRARDQLMDQNVALDLARREAEMAIRARNDFLAVMNHEMRTPMHAIIALSSLLLETELTPEQRLMVETILKSSNLLATLINDVLDLSKLEDGSFELEVTVFNLHTVFREVVNLIKPIAAVKKLSLIVFLSPDLPSCAVGDEKRLMQTMLNVVGNAVKFTKEGSISITASIAKPDSLRDPRDPEFYPIPSDGHFYLRVQIKDTGCGISPQELPHLFTKFAHAQNGSDKGYNGSGLGLAICKRFVNIMKGHIWPESEGIGKGCTTIFIVKLGISEDPAHRFQHKLLPPIRAGQSEADAFGSKPTPTDLIPLKNRYQRSL

SEQ ID NO: 6307 - protein, 215 aa, Zea mays
PASAHASAHASAHASAHAFAHASAHASAHASAHASAMNALDERFSFLSSSKQIASDMNDEEKVIVFERGDLVFVFNFHPKKTYEGYKVGCDLPGKYRVALDSDALVFGGHGRVGHDVDHFTSPEGVPGVPETNFNNRPNSFKVLSPPRTCVAYYRVDEAGAGRRLHAKAETGKTSPAESIDVKASRASSKEDKEATAGGKKGWKFARQPSDQDTK

SEQ ID NO: 6308 - protein, 471 aa, Clostridium thermocellum ATCC 27405
MFPLGYNYIITLFANNILKGVVNMSKITFPKDFIWGSATAAYQIEGAYNEDGKGESIWDRFSHTPGNIADGHTGDVACDHYHRYEEDIKIMKEIGIKSYRFSISWPRIFPEGTGKLNQKGLDFYKRLTNLLLENGIMPAITLYHWDLPQKLQDKGGWKNRDTTDYFTEYSEVIFKNLGDIVPIWFTHNEPGVVSLLGHFLGIHAPGIKDLRTSLEVSHNLLLSHGKAVKLFREMNIDAQIGIALNLSYHYPASEKAEDIEAAELSFSLAGRWYLDPVLKGRYPENALKLYKKKGIELSFPEDDLKLISQPIDFIAFNNYSSEFIKYDPSSESGFSPANSILEKFEKTDMGWIIYPEGLYDLLMLLDRDYGKPNIVISENGAAFKDEIGSNGKIEDTKRIQYLKDYLTQAHRAIQDGVNLKAYYLWSLLDNFEWAYGYNKRFGIVHVNFDTLERKIKDSGYWYKEVIKNNGF

SEQ ID NO: 6309 - protein, 428 aa, Sorghum bicolor
MSISVNGQSVVPPGFRFHPTEEELLTYYLKKKVASERIDLDVIRDVDLNKLEPWDIQEKCRIGSGPQNDWYFFSHKDKKYPTGTRTNRATAAGFWKATGRDKAIYASGARRIGMRKTLVFYKGRAPHGQKSDWIMHEYRLEPALDVDAAAGSASAHHAAAGAAADHHPYYTSSSPPALPTAIRGAAGDQQAAQEQEGWVICRVFKKKNLVHHGQSSGGGVTAAGSKMASAAAPMEGSPSHCSSVTVISDHTMNKHQAQAMLQHSASDDDALDHILQYMGGGGGKQPDTKPVLLDHHHHHHLAAAATTTTTACSAGGAGLYGKFMKLPPLEHAGGGGGLLPSPAGACDYGAADASGIADWDALDRLAAYELNGLSDASKNMSAFFDEPSATAAFSSSSSSVHAAAVDGDLWSLARSVSALHADLTMNNV

SEQ ID NO: 6310 - protein, 370 aa, Bordetella parapertussis 12822
MSTLFQPLNAGKLRLANRIVMAPLTRNRSPNAVPPPLTATYYAQRASAGLIITEATAISHQGQGYADVPGLYAPEQLAGWRRVTDAVHAAGGTIVVQLWHVGRISHTTLQPGQGAPVAPSAIRAQARTYLVDAQGKGQFADTSEPRALALDELPGIVEDYRRAARAAIDHGFDGVELHAANGYLLDQFLRSGSNHRDDAYGGSIENRARLLLQALDAVCAEVGADRVGIRLSPVTPANDAHDDQPQPLFEYVLRELARRGLAYVHVIEGATGGDRAYQQGPAPFDYAALKAAYRAAGGAGAWMVNNGYDASLAEQKLSSGQADLVAFGKPFIANPDLVARLRQGAALNEGDRDTFYGGGERGYTDYPALA

SEQ ID NO: 6311 - protein, 449 aa, Bdellovibrio bacteriovorus HD100
MNQSRGGRNDPEAQRQVQRIFLEQSRDIHIRVDRGFSILLLIQWVAAIVMGILLTPTTWLGSFSGAVENAFVGLIFGGLFSLPAVYCVYVFPGEKWTRYVVAVSQMCFSILFIHLSGGRIETHFHVFVSLAALAFYKDVGLLGVASFIVITDHILRGCLLPISLYGVAESNQWRWLEHAAWILIEDIILIIGIERIRGELHEMAYSKYQLVQAREEALQLSSIKSTFLSNMSHEIRTPLNSIIGFSDILRDTRLDKDQTDYVQTIQRCSDSLLHIINDVLDISKIENGLLQIDRHKFDVKELHTDIFKIFEAKCQEKNLQLEVDIDESIPAFALGDSHRLRQILMNLVGNAVKFTDKGRVCISLQRQPGSGHYVWKVSDTGRGIRLENMSKLFRSFSQEDVSISRTYGGSGLGLMICKNLVEMMGGDIKVESKLGEGTTFHFTLPLEEA

SEQ ID NO: 6312 - protein, 261 aa, Capsicum annuum
MALEALNSPTGTPTPPPFQFESDGQQLRYIENWRKGKRSKRSRSMEHQPTEEEYLALCLIMLARSGGSVNHQRSLPPPAPVMKLHAPSSSSAAEEEKEKMVYKCSVCGKGFGSYQALGGHKASHRKLVPGGDDQSTTSTTTNATGTTTSVNGNGNRSGRTHECSICHKCFPTGQALGGHKRCHYDGGIGNGNANSGVSASVGVTSSEGVGSTVSHRDFDLNIPALPEFWLGFGSGEDEVESPHPAKKSRLCLPPKYELFQH

SEQ ID NO: 6313 - protein, 509 aa, Ralstonia solanacearum
MSFPSRSLRVSLLALAALTAFHAGAVTLTRDNGAPVGDNQNSQTAGPNGPVLLQDVQLIQKLQRFDRERIPERVVHARGTGAHGVFVASKDISDLTRAKVFTPGEETPVFVRFSSVIHSGHSPETLRDPRGFATKFYTREGNWDLVGNNLPVFFIRDAMKFPDMVHSLKPSPDSNVQDPNRFFDFFSHQPESTHMLTRVYTDYGTPTSYREMDGNSVHAYKFVNAKGEVHYVKFHWKSLQGQKGLSAKEVEAIQGKDFNHMTRDLIANIDKGNYPKWDLYIQVLKPEQLAKFDFDPLDATKVWPDVPEVKVGTMTLNKNPENVFQETEQAALAPSNLVPGIEPSEDRLLQGRIFSYADTQLYRVGTNGLQLPVNRPRTSAANYNQDGDLNAGARKGSVNYQPSAHADLSDAATVKYSQLPVSGTTQQQRIARTQNFKQAGDYYRSLTAKEQANLVSNLAGDLGQVKDDGVKYTMLSYFQKADAGYGRALAQAVKADPARVESLAAKLQD

SEQ ID NO: 6314 - protein, 2799 aa, Ustilago maydis 521
MSIDMTGGAAPTDDDFTKLPIHDRLASKLWKARVSAYEELSKAFPNTSSEDDPIFRQYTRNPDILKSIVVDTNAVAQEKGVDAVRAFVEFGAKPAGSTRELVVPALVEKCLGSTRAGTKNNALQLISFYAEMEDVLGCEPLLADLLDGLKAKQPKVVAGCVTAIMHLVRDFGHKQVSPKPILQRLPDMFAHSDKNVRAEASLLALQLHRYIGAALEPTIDTLKDIQAKELRQQFAEIDAAAASKPLPTRFLLSQREKLQAAAAPISQPGTDAAASISAAQQDHRDDDDDDVDPYDLAEPVNVFGSRDYPADFEEMIVSKKWQERKETLETILKILSSSPKIQPDNRFDGLVDHLALKISKDANINVVLVSCQCLNAMAKGLRDNFARYKDKVVPPIIEKLKEKKPATVEVLAKALDAIFQTVSFSEILEHIFTGIKHKNPAVKTESIRFLVRCLRTTKLAPAKADIKPIGDALVVAMADGSPDVRDAGAAGLGTLMKLIGERPMNIFLDGLDDIKKAKIQDECNTAEVKVKMGAGAGARPPLSSAARPTAPIPASAPSAVTNRAAPPAAVRAKPPSATQAMATGKENQAPRPVARPTPSMAARPIGTRPAAATSSAVSSAPAPARKATPAAAAGSSKVAASATEPVKYRFHPDDAEARAADLIPAAIATQLASSAWKERLAGMTQFNDWLKVEAESVESEIIVRALGKKPGWKESNFQVMAEVYKALQLLANDCPTFSRPSVALSVQPLCDKLGDIKLKTPAGETLVTFAEKTSFGFLLAQALGPLGSLKAPKAIADSVLWVDQTLLEFGTAGVDVRSLIDYLITCLKSANAAVRINATKAIGTLARFLGTALNSFLADLNPQLRTTIEAEIEKAASNPPPAPVRFSDETKAPAGKAAVAGGEDAAGPAAQDNAADEDMLDQLVPRVDLDRLVSAAAIARMGDANWKERKEGLEEVLAVVNANSRLKGNMAELANALKMRCSDSNIMCKSMALDAIAKIATAMNKHFEPQARILAGPVTQVLADAKAPVRASATTALTAIAEQVGAGPLLPGMSTVVEGKTANPMLKQELFGWLAAWFELHPPEKGMDLAPLALPCVQCLDDKLAAVRKASLACLPHIITRAGYKHVMEQANQLKTASKNTAIPLIDAAKIQAQNSARAAGATATAAPAATATVPAPTARVAAVSARTATASPARAAGVGSTSSVAPATSSPRTSAIARPGGIKPPSAVGRSLKAPSSIIARQARLASDSSNGAVPSRNALASANGAASQGAGPGGAMEGSAPLISADTKAKALREKREGKAANWIGADGAPRPELVEVLRQQCDGQLSRGITDSMFSKSHSSEKDYYAALTLLSDFISSPTFAEEQYGLSRQETIERTLANSDLIFKYVSIRLTDNNTSLSLKCLDILEHLVALLSEQQYHMSDYEAACILPCLTAKFGDAKVAFRDRIREIFRKMTFIFPPSKLLTSYLENGLPSKNARVRTECLSEVGYLFSKNGLQVCSPSRTLPVIAKQISDRDANVRTAALSAIGEVYKIIGDEVYKLVGALPGKEMSMLEERLKRTTAPPASVAVAVAKSAGAASTAGRAGPRASVVPSSAPGPSSPGRLSAGAPSSRLARPGSALQQPAAPSAGVRSRLAAPGAARRESAIGLPRAAKPPSVASPRASMLRAPSEAAARATSIIAPGRNKVLADELPEEEDEELSVDQAINLVVNDNFEQSVFAIKHVEAFIQEEEPQLISYVDQIAIVLSKQMQKAFSLDPSDLGNERLRKHLLVANISLFDKDRVWEDGRTLGSYLSRSALIPLLTVLVQQLIQSSFRAEDPSAQNESKYLNIILLRCFSACSLNLLYGACLQMLSEATEDLRELEGDVLETRYEFAKLLIKCLWKIAKRLEDDLSQRKVEPQQLFVDIESFLQTIEPFEWRQRAEDGVPLADVPLRTVKIILSSVVNHFGEEALGMLDMIPQPENSYVYKYLVRMLNFAFGDGGVDEEGDAVGSNAGTRTRTDAKAPSQAVNEADTVVEAQRNIAPEDRGVDKAAVVDEEGDAVGSNAGAGANAPSQAVNAADTVDGAQQNSQNGHAADAAVDEESSIRLAELHAELHEIFKRISDKKLSRQGLQEMYEFRKRYPYLESYIQSLLQTTGPMFQRYIKRVFANYAAEDPDVINAAQPPPVDAYIIALIDTHRTSRQLHSQPVVVHTFAAILLLPSRLLSAEMNVQQSHRIEPGRAVHMMCTCSRAEHRSEDMRPNVQGEHQQYDEHEYDGHGAESKPVQLDQLLQILEHDFTVQLALTLLAQTEAERNFCDIGTVQSDFETLGIDMMIGCVEAVFCDSKESTHGVRGGCERTREHARTGRNDSSMQGPVLVHADTDAVACTEDERLLPVEREQKRGYRLRRMLQVSVHTDHSLAASFAKSSNHSGRKPAFRRAHNDAGRRLRFSRNAGTITEQLGVEDVDHPEDPGCFRILADASMSRAIDIEILDVSAADPSQRPRRRESRTVNRESRIACFVTRGSWFVRAVRTLSECYIASQRMYLFPVSRVVCLFNDSRLYISSPCTLDSPLDCESRIHKTSNSTDQDASYRRDCQLPTQPSARTLYRASLDSVMLRVKDPKISLDFYENVLGMDLIDKHDGGDFTLYFLAYQHQKGITQRGEREAILELTHNHGTENDADFSYHNGNQEPKGFGHLCVAVDDIHKACDRFEKLGVKFQKKLTDGKMKNIAFILDPHTPEAGWLKLTLSLVCLVGATNACSHARACASSVVGNLRNDISSPNRPPQSKSPRPTEDHQCVPALRDPASVLQNVSVA

SEQ ID NO: 6315 - protein, 419 aa, Arabidopsis thaliana
MDSINKNYVDMDEYPVTTELQNRCVNIIARLFNAPLEESETAVGVGTVGSSEAIMLAGLAFKRKWQNKRKAEGKPYDKPNIVTGANVQVCWEKFARYFEVELKEVNLSEGYYVMDPDKAAEMVDENTICVAAILGSTLNGEFEDVKRLNDLLVKKNEETGWNTPIHVDAASGGFIAPFIYPELEWDFRLPLVKSINVSGHKYGLVYAGIGWVVWRAAEDLPEELIFHINYLGADQPTFTLNFSKGSSQIIAQYYQLIRLGFEGYKNVMENCIENMVVLKEGIEKTERFNIVSKDQGVPVVAFSLKDHSFHNEFEISEMLRRFGWIVPAYTMPADAQHITVLRVVIREDFSRTLAERLVADISKVLHELDTLPSKISKKMGIEGIAKNVKEKKMEKEILMEVIVGWRKFVKERKKMNGVC

SEQ ID NO: 6316 - protein, 490 aa, Streptococcus sinensis
RGVDILADTVKVTLGPKGRNVVLEKSFGSPLITNDGVTIAKEIELEDHFENMGAKLVSEVASKTNDIAGDGTTTATVLTQAIVREGIKNVTAGANPIGIRRGIEAAVATAVSALKETAIPVSNKEAIAQVAAVSSRSEKVGEYISEAMEKVGNDGVITIEESKGMETELDVVEGMQFDRGYLSQYMVTDSEKMVADLDNPYILITDKKISNIQEILPLLESILKTNRPLLIIADDVDGEALPTLVLNKIRGTFNVVAVKAPGFGDRRKAMLEDIAILTGGTVITEDLGLELKDATIEALGQASKVTVDKESTVIVEGSGNPEAIANRVVVIKSQIESTTSEFDKEKLQERLAKLSGGVAVIKVGAATETELKEMKLRIEDALNATRAAVEEGIVSGGGTAFVSVLGAVAALELTGDEATGRNIVLRALEEPVRQIALNAGFEGSIVIDRLKNSEAGTGFNAATGEWVNMIEAGIIDPVKVTRSALQNAAQ

SEQ ID NO: 6317 - protein, 450 aa, Kineococcus radiotolerans SRS30216
MTSVLWFRRDLRLSDHPALLAAAADGDVLPLFVIDPALWGPSGDVRRTYLLRSLRSLDAALGGALVVERGDPAVVVDRVAARIGASRVHVTADAGPLGRRRDDAVGRALAAGGRELVRTGTPYAIGPGTLRTGSGSPFQVFTPFSRAWRAHGWPAPADSPGAVRWVGDGEGVDGGHWPDEPDLGGLTLPEAGEDAAHERWHRFLDHALADYDGDRDRPDRDGTSQLSHALKWGELHPRTLLAALRGQSSKGAETYATELCWRDFYADVLWHRPDSAREYYKPQLAGLRYAEPGEQFRAWAEGRTGFPIVDAGMRQMRAVGWVHNRVRMITASFLVKDLHVEWQHGGREFMHWLRDADLASNMHGWQWVAGSGTDASPFFRVFNPVTQGQRFDPDGDYVRRFVPELRHLPGKSVHTPWEAADGYAHGYPERIVDHAHEREVALAEYARVRG

SEQ ID NO: 6318 - protein, 482 aa, Nicotiana glutinosa
MGFISGNKKLLSKIATSDGHGENSAYFDGWKAYENDPFHLTQNPNGVIQMGLAENQLCFDLIQEWVVNNPKASICTAEGAQDFNDIAIFQDYHGLREFRKAVSRFMEKVRGDKVTFDPDHIVMSGGATGAHETLAFCLADPGDAFLVPTPYYPGFDRDLRWRTGVQLFPVVCESFNNFKITKEALESAYEKAQESNIRVKGLLINNPSNPLGTILDRETLKDILRFINDKNIHLVCDEIYAATVFSQPDFISISEVMQEVNGCNENLVHVVYSLSKDLGFPGFRVGIIYSYNDVVVSCARKMSSFGLVSTQTQFLIASMLSDEIFVENFIAKSSVRLSQRHGFFTKGLAQVGISSLKSNSGLFFWMDLRRLLKESTFEAELDLWHIIINEVKLNVSPGVSFHCSEPGWFRVCFANMDDETMRVALRRIKHFVLQRKGLIEVATKKQCRRRRKREISLSFRRLDDFMNSPHSPMSSPMVQART

SEQ ID NO: 6319 - protein, 435 aa, Saccharomyces cerevisiae
MTTNEEFIGTQIFGTVFEITNRYNDLNPVGMGAFGLVCSATDTLTSQPVAIKKIMKPFSTAVLAKRTYRELKLLKHLRHENLICLQDIFLSPLEDIYFVTELQGTDLHRLLQTRPLEKQFVQYFLYQILRGLKYVHSAGVIHRDLKPSNILINENCDLKICDFGLARIQDPQMTGYVSTRYYRAPEIMLTWQKYDVEVDIWSAGCIFAEMIEGKPLFPGKDHVHQFSIITDLLGSPPKDVINTICSENTLKFVTSLPHRDPIPFSERFKTVEPDAVDLLEKMLVFDPKKRITAADALAHPYSAPYHDPTDEPVADAKFDWHFNDADLPVDTWRVMMYSEILDFHKIGGSDGQIDISATFDDQVAAATAAAAQAQAQAQAQVQLNMAAHSHNGAGTTGNDHSDIAGGNKVSDHVAANDTITDYGNQAIQYANEFQQ

SEQ ID NO: 6320 - protein, 490 aa, Gloeobacter violaceus PCC 7421
MIRSLVWFRKGLRLHDNPALLDAARDAARLYPLFIVDPWFVNPERVGVNRMRFLLESLGEIDGNLRRLGSRLIVLQGRPQEVLERVLSRWQIGRLCFERDTEPYARRRDEAIRSMAERVGVRVISPTAHTLYDPDELIELGRGKVPTTYGAFGRLAAKLGEPDAPVASPSHLPPPGELDADYGIPTLAELGYPDPECPSRGIIPPGGEGEGLRRLHVYLSDRQRSAGFAKPDTDPTAFDPPSTTALGAHLKFGCLSARTFYAEVQKVYREVGEHTEPPMSLIGQILWREFFYTVGYATPNYDRIEGNPVCRQIPWDDNPEYLAAWSEARTGFPWIDAAMTQLRTEGWLHHLSRHAVACFLTRGDLWVSWEKGQAVFERLLLDQDWSLNASNWMWLSASAFFNAYYRVYSPISFAKKYDPEGRYVRRYLPKLARVPAEFIYEPWRAPLLVQKQAGCVVGRDYPDPIVDHEQAKACNLERMRLAYEQNAKGG

SEQ ID NO: 6321 - protein, 220 aa, Arabidopsis thaliana
MGQQNLIYSFVARGTVILVEYTEFKGNFTAVAAQCLQKLPSSNNKFTYNCDGHTFNYLVENGFTYCVVAVESVGRQIPMAFLERVKEDFNKRYGGGKATTAQANSLNREFGSKLKEHMQYCVDHPDEISKLAKVKAQVTEVKGVMMENIEKVLDRGEKIELLVDKTENLRSQAQDFRTQGTKIRRKMWFENMKIKLIVLGIIITLILIIILSVCGGFKCT

SEQ ID NO: 6322 - protein, 466 aa, Frankia sp. CcI3
MALHRQASGDRAEETVDVRPHLAPLGEEVVVPRFRMPQESTAPETAYQIVHDELMLDGKARLNMATFVTTWMDSYADRLMAECAPKNMIDKDEYPQTAALEERCVNILADLWHAPDAEHAVGCSTTGSSEACMLAGLAMIRRWRARRRSAGAPADRPNIVMGVNVQVCWEKFARYWDVEARLVPMAPGRTHLTADEAVAHCDENTIGVVAILGSTFDGSYEPVAGIVAALDHLAASGGPDVPVHVDAASGGFIAPFCDPDLVWDFQLDRVVSINTSGHKYGLVYPGVGWVLWRDRAHLPAELVFQVDYLGGTMPTFALNFSRPGAQVVAQYYTLLQLGYKGYRRVAQACRDNARWLAAEVAAMGPFELVSDGSGIPAFAFKLRDDITDYTVFDVSELLRTRGWLVPAYRFPPGLTDLAVLRVVVRHEFSRDLAGLLIADLRRVVNRLAHPGRRTAGDRPGESSFHH

SEQ ID NO: 6323 - protein, 131 aa, Zea mays
  misc_feature (92)..(92): Xaa can be any naturally occurring amino acid
QSDETCKMGDIVHTLTNRRWLEKCVTYVESHDLALVGDKTIAFWLMDKDMYDFVALDRPSTPTIDRGIPLHKMIRLITMGLRGEGYLNFMGXEFGHSEWIHFPRGPKRLTSGKFIPGNNNSYDKCRRRFDV

SEQ ID NO: 6324 - protein, 546 aa, Burkholderia thailandensis
MAAKDVVFGDSARAKMVEGVNILANAVKVTLGPKGRNVVLERSFGGPTVTKDGVSVAKEIELKDKLQNMGAQMVKEVASKTSDNAGDGTTTATVLAQSIVREGMKYVASGMNPMDLKRGIDKAVAAAVEELKKISKPCTTNKEIAQVGSISANSDSSIGDRIAEAMDKVGKEGVITVEDGKSLADELDVVEGMQFDRGYLSPYFINNPDKQVAVLENPFVLLHDKKVSNIRDLLPVLEQVAKAGRPLLIIAEDVEGEALATLVVNNIRGILKTVAVKAPGFGDRRKAMLEDIAILTGGQVIAEETGLTLEKATLAELGQAKRIEVGKENTTIIDGAGEAVNIEARVKQIRTQIEEATSDYDREKLQERVAKLAGGVAVIKVGAATEVEMKEKKARVEDALHATRAAVEEGIVPGGGVALIRARTAIAALTGVNADQNAGIKIVLRAMEEPLRQIVTNGGEEASVVVAAVAAGKGNYGYNAATGEYVDMVEAGVVDPTKVTRTALQNAASVAGLLLTTDAAVAELPKEDAPMPGGMPGGMGGMGMDM

SEQ ID NO: 6325 - protein, 392 aa, Oryza sativa
  misc_feature (213)..(213): Xaa can be any naturally occurring amino acid
SHITNSIRREICTMKLVKHPNVVRLFEVMGSKARIFIVLEYVTGGELFEIIATNGRLKEEEARKYFQQLINAVDYCHSRGVYHRDLKLENLLLDASGNLKVSDFGLSALTEQVKADGLLHTTCGTPNYVAPEVIEDRGYDGAAADIWSCGVILYVLLAGFLPFEDDNIIALYKKISEAQFTCPSWFSTGAKKLITRILDPNPTTRITISQILXRDPWFKKGYKPPVFDEKYETSFDDVDAAFGDSEDRHVKEETEDQPTSMNALELISLNQALNLDNLFEAKKEYKRETRFTSQCPPKEIITKIEEAAKPLGFDIQKKNYKMRMENLKAGRKGNLNVATEVFQVAPSLHVVELKKAKGDTLEFQKFYRTLSTQLKDVVWKCDGEVEGNGAAA

SEQ ID NO: 6326 - protein, 208 aa, Candida albicans SC5314
MYFMKKLLSNQDGSRDLITVVAIAHVHANKTLVLNVLKNIMDKYIEYKREFDSNKSVSGQSSKAKLGEFKLYMNQIIKYEEMNYDSNQHIYNYGSTNENNEDGHPADQINPNQLLLANEEVDEVRQLMLENINKLLSRGDKINSLVDQTDRLNTSSSVFQKRAQQIKRKMWFMKTKFLLSITGGVLLILYLFIGSECGFPAFSHCIRN

SEQ ID NO: 6327 - protein, 425 aa, Glycine max
MESGVVAVNNNINNYESKATSTITIKGILSLLMESIDDENCDGGGSKKRVISLGMGDPTLTTLFHTPNVVEEAVADALQSRKFHGYAPTAGLLQARIAIAEYLSRDLPYQLSRDDVFITCGCTQAIDVSVAMLARPGANILLPRPGFPIYELCAAFRGVEVRHYDLLPEKGWEVDLDAVEALADQNTVALAIINPGNPCGNVYSYHHLEKIAETAKRVGTIVISDEVYGHLAFGSKPFVPMGVFGSTVPVLTLGSLSKRWIVPGWRLGWFVTNDPSGTFREPKVVERIKKYFDLLGGPATFLQAAVPQIIANTEEIFFEKTIDNLRHTADICCKEIEDIPCIFCPYKPEGSMAMMVKLNLSLLEDISDDIDFCFKLAKEESVIILPGTAVGLKDWLRITFAADPSALGEGMRRIKSFYQRHARKL

SEQ ID NO: 6328 - protein, 137 aa, Brassica napus
  misc_feature (101)..(101): Xaa can be any naturally occurring amino acid
  misc_feature (128)..(128): Xaa can be any naturally occurring amino acid
MVQTKKFRGVRQRHWGSWVAEIRHPLLKRRIWLGTFETAEEAARAYDEAAVLMSGRNAKTNFPLNNNNTGDTSEGKTDISASSSSSSLSSILSAKLRKCCXSPSPSLTCLRLDTASSHIGVWQKRAGXKSDSSWVMT

SEQ ID NO: 6329 - protein, 483 aa, Streptococcus pneumoniae R6
MLYFMYRIIERRLSMKKKLVFPNLFWWGAASSGPQTEGQYGKVHENVMDYWFKTHPEDFFDNVGPLVASNFFHTYTEDFHLMKEIGVNSFRTSIQWSRLIKNLETGEPDPKGIAFYNAIIEEAKKNQMDLVMNLHHFDLPVELLQKYGGWESKHVVELFVKFAKTAFTCFGDKVHYWTTFNEPMVIPEAGYLYAFHYPNLKGKGKEAVQVIYNLNLASAKVIQLYRSLELDGKIGIILNLTPAYPRSNSPEDLEASRFTDDFFNKVFLNPAVKGTFPERLVKQLERDGVLWSHTEKELQLMKSNTVDFLGVNYYHPKRVQAQANPEEYQTPWMPDQYFKEYEWPERRMNPYRGWEIFPKAIYDIAMIVKEEYGNIPWFISENGMGVENEARFIDENGVIDDVYRIEFYEEHLRWLHKAIEEGSHCFGYHAWTAFDCWSWNNAYKNRYGFISVDLETQKRTIKSSGRWYRKVSDNNGFEVEIEE

SEQ ID NO: 6330 - protein, 250 aa, x Aranda deborah
MGRGRVELKMIENKINRQVTFAKRRKRLLKKAYELSVLCDAEVALIIFSNRGKLYEFCSSTSMLKTLEKYQKCNFGSPESTIISRETQSSQQEYLKLKNRVEALQRSQRNLLGEDLGPLGSKELEQLERQLDSSLRQIRSTRTQFMLDQLADLQRREQMLCEANKTLKRRFEESSQANQQQVWDPSNTHAVGYGRQPAQHHGEAFYHPLECEPTLQIGYHSDITMATATASTVNNYMPPGWLGQISGSYE

SEQ ID NO: 6331 - protein, 601 aa, Mycobacterium avium subsp. paratuberculosis K-10
MCGVTGEVRLDGRAPDVAAVSAMAAVLTPRGPDAGGAWSQGRVALGHRRLKIIDLTEAGAQPMVDSELGLSIAWNGCIYNYKELRSELSGYGYRFFSHSDTEVLIKAYHRWGDDFVSHLFGMFAFAIVERDSGRVLLGRDRLGIKPLYLTEDSHRVRFASTLPALLAGGGVDTRIDPVALHHYMSFHSVVPAPATILRGVRKVPPASLVAIEPDGKRTVTTYWAPDFTRHADRADWSERDWEDAVLSTLRLAVKRRLVADVPVGCLLSGGVDSSLIVGLLAEAGQHGLSTFSIGFESAGGVKGDEFQYSDIVAQRFETNHHQIRIDSDRMLPALDGAIGAMSEPMVSHDCVAFYLLSQEVARHVKVVQSGQGADEVFAGYHWYPPMGEPAAATLDGAVAQYRRAFFDRDTAGVAQLVGPGILAPGDPSLRFVTEHFAQAGAETGIDRALRLDTTVMLIDDPVKRVDNMTMAWGLEGRVPFLDHELVELAATCPPEYKIAHEGKGVLKQAARRVIPSEVIDRPKGYFPVPALTHLEGPYLDMDRDALYAPTAKERGLFNTDAVDALLANPNGKLTPLRGNELWQIALLELWLQRHGVTGPVA

SEQ ID NO: 6332 - protein, 447 aa, Bacillus halodurans C-125
MSIIQFPKEMKWGVATASYQIEGAINAGGRGASIWDVFAKTPGKVKNGDNGDVACDSYHRYEEDIEIMKDLGVDMYRFSVAWPRIFPNGTGEVSREGLDYYHRLVDRLTENGIQPMCTLYHWDLPQALQEKGGWDNRDTIDAFVRYAEVMFKEFGDKINHWITFNELWCVSFLSNYIGVHAPGNTDLQLATNVAHHLLVAHGKAVQSYRKMGLDGQIGYAPNVEWNEPFSNQMEDAEACKRGNGWFIEWFMDPVFKGAYPSFLVEWFEKKGITVPIEAGDMETIQQPIDFLGINYYTGSVARYKENEGLFDLEKVDAGYEKTDIGWNIYPEGFYKVLYYITEQYGQIPIYITENGSCYNDEPVNGQVKDEGRIRYLSQHLTALKRSMESGVNIKGYMAWSLLDNFEWAEGYSMRFGIVHVNYRTLERTKKDSFYWYKQMIANQFFEL

SEQ ID NO: 6333 - protein, 476 aa, Bacillus cereus ATCC 10987
MQNKIIVMFQKDFRLYDNPALFKATQSGEVVPVYVHDETFSMGSASKWWLHHAIIDVKKQLEALGSTLIIRKGSTEEEILSLIEQLGITAVYWNICYDPDRLQFNQNMKMMLEDKGITCKEFNSHLLLEPWMIKKKDNTEYKVFTPFYNAFQKQVISKPISKVQSIKWGSSLPESLSVTELHLLPTIPWTSHIESIWDPTEEGAYKTCKKFFSSKLASYSEGRDFPNQNAHSMLAPYLSFGQISVRWMYHYLINKSTERQCSLFEKQVNSFIRQLIWREFSYYLLYHYPFTVYKPLNKNFEHFPWNNEEELLTVWQKGETGYPFIDAGMRELWQTGFMHNRARMAVASFLVKHLLIPWQEGAKWFMDTLLDADIANNTMGWQWVAGSGADASPYFRIFNPITQGEKFDKDGEYIRKWVPELKDMPNKYIHKPWEAPEHILQKANIKLGDTYPLPVVDHKAARERALCAYKSMKEFV

SEQ ID NO: 6334 - protein, 154 aa, Carica papaya
MSLIPSFFGNRGSSIFDPSSLDVWDPFKDFPFPSSSISRENSAFVNTSVDWEETPEAHVFRADLPGLKKEEVKVELEDDRVLQISGERHVEKEDKNDTWHRVERSSGKFSRRFRLPENVKMDQVKASMENGVLTVTVPKAEAKKPDVKAIEISG

SEQ ID NO: 6335 - protein, 375 aa, Shewanella sp. MR-4
MRILETIMNKPPIIWLNVTLFSLTFLSAIILVPWYGLAHGYGASEWIAFVVLAFASGLSITAGYHRLWSHKAYKAHPAVRFLYALGGALALQNSALHWASDHRVHHKHVDDNDKDPYSANMGFWYSHIGWMLREYQAQRYHDYQNVRDLQNDRIVMWQHKHYLALVILMNIGLPALLGWFTGNIAGMLLMAGLLRLVVVHHCTFFINSLAHVWGSQPYTDKNTARDNGFLAMLTYGEGYHNFHHIFENDYRNGIKWWHYDPTKWLIKALSWVGLATDLRTSPQERIESARLQMQLLHAKNKVIHLPNADEIIEKIQQEYELMKEHLLEYYQAKKALLEAKRKQLVDQQLLLQVEELKTRFLTQQKSWKSLTASYS

SEQ ID NO: 6336 - protein, 447 aa, Arabidopsis thaliana
MSGSRRKATPASRTRVGNYEMGRTLGEGSFAKAKYAKNTVTGDQAAIKILDREKVFRHKMVEQLKREISTMKLIKHPNVVEIIEVMASKTKIYIVLELVNGGELFDKIAQQGRLKEDEARRYFQQLINAVDYCHSRGVYHRDLKPENLILDANGVLKVSDFGLSAFSRQVREDGLLHTACGTPNYVAPEVLSDKGYDGAAADVWSCGVILFVLMAGYLPFDEPNLMTLYKRICKAEFSCPPWFSQGAKRVIKRILEPNPITRISIAELLEDEWFKKGYKPPSFDQDDEDITIDDVDAAFSNSKECLVTEKKEKPVSMNAFELISSSSEFSLENLFEKQAQLVKKETRFTSQRSASEIMSKMEETAKPLGFNVRKDNYKIKMKGDKSGRKGQLSVATEVFEVAPSLHVVELRKTGGDTLEFHKFYKNFSSGLKDVVWNTDAAAEEQKQ

SEQ ID NO: 6337 - protein, 416 aa, Arabidopsis thaliana
MGLFGTKKIGKYEIGRTIGEGNFAKVKLGYDTTNGTYVAVKIIDKALVIQKGLESQVKREIRTMKLLNHPNIVQIHEVIGTKTKICIVMEYVSGGQLSDRLGRQKMKESDARKLFQQLIDAVDCCHNRGVYHRDLKPQNLLLDSKGNLKVSDFGLSAVPKSGDMLSTACGSPCYIAPELIMNKGYSGAAVDVWSCGVILFELLAGYPPFDDHTLPVLYKKILRADYTFPPGFTGEQKRLIFNILDPNPLSRITLAEIIIKDSWFKIGYTPVYHQLSDSIKDNVAEINAATASSNFINAFQIIAMSSDLDLSGLFEENDDKRYKTRIGSKNTAQETIKKIEAAATYVSLSVERIKHFKVKIQPKEIRSRSSYDLLSAEVIEVTPTNCVIEISKSAGELRLYMEFCQSLSSLLTAEVS

SEQ ID NO: 6338 - protein, 150 aa, Zea mays
  misc_feature (121)..(121): Xaa can be any naturally occurring amino acid
  misc_feature (134)..(134): Xaa can be any naturally occurring amino acid
HLYHPQHILYRQKEQFSDGVGYNWIDGLKSFTEQQVTDEMMNNAAQMFPYNTPVNKEAYYYRMIFERLFPQDSARETVPWGPSIACSTPAAIEWVEQWKASNDPSGRFISSHDSAATDHTXAVSRRWPTAAATXANGTVNGKDVAVAIAV

SEQ ID NO: 6339 - protein, 204 aa, Triticum aestivum
  misc_feature (127)..(127): Xaa can be any naturally occurring amino acid
MVQSKKKFRGVRQRHWGSWVSEIRHPLLKRRVWLGTFETAEEAARAYDEAAILMSGRNAKTNFPVPRSANGEIIVAPAVARDGRGGVGSSSSGAAGASSLSQILRAKLRKCCKTPSPYPSPASDLDXPKKSTLGVWQKARGAPAPNSKLGHEPSRLNKEAGRTAGGPPQRPNGQPRGPGNSFGPSHEHPPPTGLPRSVRPTGRD

SEQ ID NO: 6340 - protein, 155 aa, Codonopsis lanceolata
MALIPSIFGGRRSNVFDPFSHDIWDPFQGLSSALANARDQETAAIANTRIDWKETPEAHVFKADLPGLKKEEIKVEVEDGRVLQISGERSKEQEEKTDTWHRVERSVGKFHRRFRLPENAKVDQVTASMENGVLTVTVPKKEEKEPEVKAIDISG

SEQ ID NO: 6341 - protein, 187 aa, Arabidopsis thaliana
MALISDELYKSMERICKGNYVKVDSLNTKCYKLIKDYQKCIHKLNKYHILLPDCDITSPDCFLYRYTLITFWANNKSVREALQVNKGSIGKWVQCNYKNISYNYDIKSSVAYHMKNSIDGYRSLIYNGDHDMMVPFLATQAWIRSLNYSITDDWKPWMINDQIAGYTRSYSNKMTFATIKASLLVST

SEQ ID NO: 6342 - protein, 547 aa, Escherichia coli
AAKDVKFGNDARVKMLRGVNVLADAVKVTLGPKGRNVVLDKSFGAPTITKDGVSVAREIELEDKFENMGAQMVKEVASKANDAAGDGTTTATVLAQAIITEGLKAVAAGMNPMDLKRGIDKAVTAAVEELKALSVPCSDSKAIAQVGTISANSDETVGKLIAEAMDKVGKEGVITVEDGTGLQDELDVVEGMQFDRGYLSPYFINKPETGAVELESPFILLADKKISNIREMLPVLEAVAKAGKPLLIIAEDVEGEALATLVVNTMRGIVKVAAVKAPGFGDRRKAMLQDIATLTGGTVISEEIGMELEKATLEDLGQAKRVVINKDTTTIIDGVGEEAAIQGRVAQIRQQIEEATSDYDREKLQERVAKLAGGVAVIKVGAATEVEMKEKKARVEAALHATRAAVEEGVVAGGGVALIRVASKLADLRGQNADQNVGIKVALRAMEAPLRQIVLNCGEEPSVVANTVKGGDGNYGYNAATEEYGNMIDMGILDPTKVTRSALQYAASVAGLMITTECMVTDLPKNDAADLGAAGGMGGMGGMGGMM

SEQ ID NO: 6343 - protein, 368 aa, Saccharomyces cerevisiae
MARTITFDIPSQYKLVDLIGEGAYGTVCSAIHKPSGIKVAIKKIQPFSKKLFVTRTIREIKLLRYFHEHENIISILDKVRPVSIDKLNAVYLVEELMETDLQKVINNQNSGFSTLSDDHVQYFTYQILRALKSIHSAQVIHRDIKPSNLLLNSNCDLKVCDFGLARCLASSSDSRETLVGFMTEYVATRWYRAPEIMLTFQEYTTAMDIWSCGCILAEMVSGKPLFPGRDYHHQLWLILEVLGTPSFEDFNQIKSKRAKEYIANLPMRPPLPWETVWSKTDLNPDMIDLLDKMLQFNPDKRISAAEALRHPYLAMYHDPSDEPEYPPLNLDDEFWKLDNKIMRPEEEEEVPIEMLKDMLYDELMKTME

SEQ ID NO: 6344 - protein, 131 aa, Zea mays
LSDEAWKMGDIVHTLTNRRWLEKCVTYAESHDQALVGDKTIAFWLMDKDMYDFMALDRPSTPTIDRGIALHKMIRLITMGLGGEGYLNFMGNEFGHPEWIDFPRGPQRLPSGKFIPGNNNSYDKCRRRFDL

SEQ ID NO: 6345 - protein, 785 aa, Candida albicans SC5314
MNTNLLFIPLKQSSVLDLGDELRQVITNNYFQPASSFNSDLIYITQLRNQVAQIKNVNDELGKTSQDDSILLEYLQVLNTLQNKFSDDCVEFAWFDTLAYGPQGPYRYRSLKIEKLNVIYQIGSLYSQIAISESRHTDIGLKRACHYFQLSAGCFMFINNFLIETIKNKNDPLVLSIPLSMQSSTIQCLEYLMLAQAQETIWQKAINNNSMKDSVVARLSIQTSEYYSKALDFGNSSDLIKLEWINHMKVKKLHFLAAAHLRSSTIAADSFQYGEQVAHLRVASQAVDQALKSKKYVNSLVLEDLQGLADVIKVRLRTAEKDNDLVYLKIVPQEKELKTIIGVSMVKSIIPEAFEQKPESNTEIFKELLPYVIIHVAQAMRERQDEYVQTKFHTPISSLNNMLVKFLIDRDLPSSIDSIQQPENIPDSVIHHSQEILKTGGVDFIDKAFKELDKLKLECNHLLQECETRIDLDRSEDDMLRRKQGSTRWTRKSTDDAAQELIKKVDKMKQYLLQANNGDGFVLKKFYDIKPALDVYSSGYKALSQYIPNSQYIELPEQLSIVISDLRSCLARANTLESERKEFLQTLEIRSRDNSILPKLITEYNSNRSKYQTENGEFNFNAFESVYEKHMKLFDSDIKYIARTRDSQMTLEHEIDSINQKFVQEFKSLQNSSNEKRQQVLQYLETAYEKFLEIINNLTEGSKFYTDFIEKGSAVLQECEEYLYRRRVESRDLELAISNSFQQQQQVQEQNEQLSVPRNYSNDKLISPKTSKPGLWNPNSDIQFS

SEQ ID NO: 6346 - protein, 78 aa, Triticum aestivum
MVGFFRSGNLASRVFDRQFLSPRPGATVNTVRQFYENLVPSYTIYDIDCPRLFVFASSTDEWESYPCGPLSPKTNQRF

SEQ ID NO: 6347 - protein, 157 aa, Brassica napus
MMDGVTGGDSKSGEATTAPPLRNPHPATLLGANALPPPFLSKTYDMVEDPASDAIVSWSPANNSFVVWDPPEFSRSLLPRYFKHNNFSSFVRQLNTYGFRKVDPDRWEFANEGFLRGQKHLLKTISRRKSTHGHGTSSSNTQSHQGSHGFVIFMRRG

SEQ ID NO: 6348 - protein, 131 aa, Zea mays
LSDETWKMGDIVHTLTNRRWLEKCVTYAESHDQALVGDKTIAFWLMDKDMYDFMALDRPSTPTIDRGIALHKMIRLITMGLGGEGYLNFMGNEFGHPEWIDFPRGPQRLPSGKFIPGNNNSYDKCRRRFDL

SEQ ID NO: 6349 - protein, 393 aa, Nicotiana benthamiana
MDGSGQQSDTMMSDAGAEQPPPAAQPVAGMDNIPATLSHGGRFIQYNIFGNIFEVTAKYKPPILPIGRGAYGIVCSALNSETIENVAIKKIANAFDNKIDAKRTLREIKLLRHMDHENIVAIRDIIPPPQREAFNDVYIAYELMDTDLHQIIRSNQGLSEEHCQYFLYQILRGLKYIHSANVLHRDLKPSNLLLNANCDLKICDFGLARVTSETDFMTEYVVTRWYRPPELLLNSSDYTAAIDVWSVGCIFMELMDRKPLFPGRDHVHQLRLIMELIGTPSEAEMEFLNENAKRYIRQLPLYRRQSFTEKFPHVHPDAIDLVETMLTFDPRRRITVEGALAHPYLNSLHDISDEPICMTPFSFDFEQHALTEEQMKELIYRESLAFNPEYQHM

SEQ ID NO: 6350 - protein, 285 aa, Lactobacillus gasseri
MNFHSIEDTYTLNNGVEIPIIGFGTWQTPDGDIAKHAVEVALNAGYRHIDTAAAYGNEKSVGQAIKKSGINRHDLFITTKLWNADHGYQSTKAAIDRSLQNLKVDYLDLYLIHWPNPVAMRDHWAEANAESWRAMEEAVQAGKIRAIGVSNFRKRHLDELLKTAEIKPVVNQIMLNPSDLQSDVVKVNNKLGLLSEAYSPLGTGGLLGNETVKEIASEVGKSPAQVLIRWSLEHGFLPLPKSVHDKYIQANVEVFDFNLNSEQMNKLDSLHGVSGLATDPDTANF

SEQ ID NO: 6351 - protein, 117 aa, Zea mays
  misc_feature (27)..(27): Xaa can be any naturally occurring amino acid
RKHRIVSLVSALLILLALAVSSTRNAXDVPGSENDLHLQELARFAVDEHNKKANALLGFEKLVKAKTQVVAGTMYYLTIEVKDGEVKKLYEAKVWEKPWEKFKELQEFKPVEEGASA

SEQ ID NO: 6352 - protein, 206 aa, Oryza sativa (indica cultivar-group)
MASRRRTLLKVIILGDTGVGKTSLMNQYVNKKFSNQYKATIGADFLTKEVQFEDRLFTLQIWDTAGQERFQSLGVAFYRGADCCVLVYDVNSMKSFDNLNNWREEFLIQASPSDPDNFPFVLLGNKVDVDSGNSRVVSEKKAKAWCASKGNIPYFETSAKDGTNVEEAFQCIVKNALKNEPEEELYVPDTVDVVGGNRAPRSSGCC

SEQ ID NO: 6353 - protein, 608 aa, Ashbya gossypii ATCC 10895
MSNANHHHQQQKMYTGGRNMPHGMHRPGSIPIGQRIGKYQVIKTLGEGSFGKVKLAHHVSTGQKVALKIINKKVLAKSDMQGRIEREISYLRLLRHPHIIKLYDVIKSKDEIIMVIEYAGNELFDYIVQRDKMSENEARRFFQQIISAVEYCHRHKIVHRDLKPENLLLDEHLNVKIADFGLSNIMTDGNFLKTSCGSPNYAAPEVISGKLYAGPEVDVWSSGVILYVMLCRRLPFDDESIPVLFKNISNGVYSIPKFLSQGAANLIKRMLIVNPLNRITIHEIMEDEWFKVDLPDYLVPVDMKADATSKPGTDDERIDEALVAVLANTMSYDKDEIYEALEDPNQTDPTVLEIRDAYLLLKENKSLIDGLRSNKQKLDQLDTFLSQSPPTFESHSQLGPGSGFQAALGGSQHGDQNPHQVKRLASRQRTYQLSFSEQQDEDSTIAILPSSLPQIHRANMVAQGSPAAVKISPLSNKKSKTRWHFGIRSRSYPLDVMGEIYLALKNLGAEWAKPSEEDLWTIRVRWKYDVGTQQNERIPDLMRMVIQLFQIETNNYLVDFKFDGWESSSGNPISSSSTDDEMSTFSAYPFLHLTTRLIMELAVNSQSS

SEQ ID NO: 6354 - protein, 433 aa, Neisseria meningitidis Z2491
MPSETARPLYADTCAAHTLVWFRQNLRIRDNAALCAAVAEGLPVIGIWIDDAETDNPRRAAFYRQSAAELAQGLAGRGIPLYTAASPAELVRLAVRLNIRAVIADESHTFADKLADNALWHELNKHGIALTFVNDRAVFGKTDLIPDGGTAHTDFDRYREVWLDRFSKQPPAGPDLFAAYRQPFPENLSAPPPAALSDGIFLPQNSGETAAWRQWRRFLEQADSYSVLKDFPSRKHTSLMGAYLSAGCISPRLLARESLERRLNAWADNIIRRDFFLQLALQHTDDDPSDGNPEHTLRLTLWQQGRTGIPIIDAAMRCLHKTGSLHPALRRLSADFFCHVLNLPRREGEIWFARQLTDFDAAINQGNWRLAASRHTCPDIAAAAHKTDPDGTFVRRHIPELAHLSADTVHTPWRFACSVDTHGYPAHPVAGIP

SEQ ID NO: 6355 - protein, 229 aa, uncultured Pseudomonas sp.
HFNRENIPERRVHAKGSGAFGTFTVTKDITQYTSAKLFESVGKQTPTFLRFSTVGGERGSADTERDPRGFALKFYTEEGNWDIVGNNTPVFFIRDPLKFPDFIHTQKRLPQSNLKSAQMMWDFWSHSPEALHQVTILFSDRGIPDGYRHMHGFGSHTYSLINAQGERHWVKWHYKTKQGIKNLAPAEAARLAGTDPDYAQRDLFGAIERGDFPKWRVCIQIMTEAQANA

SEQ ID NO: 6356 - protein, 265 aa, Triticum aestivum
  misc_feature (58)..(58): Xaa can be any naturally occurring amino acid
  misc_feature (66)..(66): Xaa can be any naturally occurring amino acid
  misc_feature (92)..(92): Xaa can be any naturally occurring amino acid
MSSSAMEALHALIPEQHQRDVEAAAALSGATSGEEGGHVLQGWAKRNRSPPQRSEEEXNLALCLLXMLSRGGKAARAGPPSPRRSLAPVPAXEFKCSVCGKSFSSYQALGGHKTSHRVKQPSPPADPAAAPLVALPAVAAVLPSAEPATSSTAASSDGTTNRVHRCSICHKEFPTGQALGGHKRKHYDGGVGAAASSTELLAAAAAESEVGSTGYGSSAARAFDLNIPAVPEFVWRPCAKGKMMWEDDEEVQSPLAFKKPRLLTA

SEQ ID NO: 6357 - protein, 190 aa, Anthoceros punctatus
DEHGEVVAEIRRSDLEPYLGLHYPATDIPQASRFLFMKNRVRMIADCFSPPVKVIQSKDLPQPVSLAGSTLRAPHGCHAQYMGNMGSIASLVMAVVINDNDEDFNGRGYQQKGRKLWGLVVCHHTTPRAVPFPLRSACEFLMQVFGLQLNMEVELAAQMREKHILRTQTLLCDMLLRDAPIGIVTQSPNI

SEQ ID NO: 6358 - protein, 516 aa, Methanocaldococcus jannaschii DSM 2661
MMCGINGIIRFGKEVIKEEINKMNKAIKHRGPDDEGIFIYNFKNYSIGLGHVRLAILDLSEKGHQPMGYNVDEDKIIYRDDELDRADIIIVYNGEIYNYLELKEKFNLETETGTDTEVILKLYNKLGFDCVKEFNGMWAFCIFDKKKGLIFCSRDRLGVKPFYYYWDGNEFIFSSELKGILAVKEINKKENINKDAVELYFALGFIPSPYSIYKNTFKLEARQNLIFDLDKREIRKYYYWELPDYKPIYDKKKLIEEGKKLLYDAVKIRMRSDVPVGAFLSGGLDSSTVVGVMREFTDLSKLHTFSIGFEGKYDETPYIKIVVDYFKTQHHHYYFKERDFEELIDKYSWIYDEPFGDYSGFPTYKVSEMARKFVTVVLSGDGGDEVFGGYMTHLNGYRMDFIRKLPKFLRVVGSKLPVKKDLNGIANLYLLKEAFRLSLINPEEFYAESIKEDAIRPEIYKKWTIEKLRYCLNKGDNKLGEALRIFDLLFNTLCDNFLVKVDRASMLTLWKLEVHF

SEQ ID NO: 6359 - protein, 204 aa, Triticum aestivum
HEAFPTPPRSANHRLLLPPPFSPLRSSPPARAFFIRVSGRGMADDDSGSPRGGGGVREQDRFLPIANISRIMKKAVPANGKIAKDAKETLQECVSEFISFVTSEASDKCQKEKRKTINGDDLLWAMATLGFEEYVDPLKIYLQKYRDMEGDSKLTSKSGEGSVKKDIIGAHSGATSSNAQAMVQHGAYAQGMGYMQPQYHNGDT

SEQ ID NO: 6360 - protein, 154 aa, Zea mays
MSLVRRGSVFDPFSVDLFDPFDSVFRSIVPSSSSAAAASETAAFASARIDWKETPEAHVFKADLPGVKKEEVKVEVEDGNVLLISGQRSREKEDKGDKWHRVERSSGQFVRRFRLPENAKTEEVRAALENGVLTVTVPKAEVKKPEVKSIQISG

SEQ ID NO: 6361 - protein, 91 aa, Quercus suber
MSLVPNFFNRRSNVFDPFSLDVWDPFEGFPPLSSHSNFPSETSSFAAAKLDWKETPNAHVFADVPGQKKEEVKVEIEDRRVLQISGERSQD

SEQ ID NO: 6362 - protein, 437 aa, Triticum aestivum
  misc_feature (92)..(92): Xaa can be any naturally occurring amino acid
MPSASSAVPSAAAPGDESQSLAAPKLLLGRYELGGLLGRGASAKVYRARDILTGRDVAIKSFPNPRAGAREGEGSAGSAAIEREAAILSRLXRHRHVVRLHEILGTRKKVHFVLDLAAGGELFSLVDSDGRMTEDLARHYFRQLVSAVRYCHSRGVYHRDIKPENLLLDGDGDLKVADFGLGAIADESLHHTLCGTPAYVAPEILSKQGYHPAKVDIWSCGVVLFVLAAGYLPFNDASLINMYRKIYAGRFRCPNWFSPALRHLLRRILDPNPSTRIDTDGIMEHPWFRHGASGDGELEELMRGHEEEAWFKTEFKEDMARDMTAFDILAFSPGSDLSGLFGAGPGTERVFVGEPAAAVLARVEDAGKKQGHRVRREGKGRAGPVYVEAEAGGIVAKVTVFRIADAVSVVEVVKGHGAEAAAFWSDWLEPAVKPQAV

SEQ ID NO: 6363 - protein, 128 aa, Zea mays
QSDETRKMGDIVHTLTNRRWLEKCVTYAESHDQALVGDKTIAFWLMDKDMYDFMALDRPSTPTIDRGIALHKMIRLITMGLGGEGYLNFMGNEFGHPEWIDFPRGPQRLPSGKFIPGNNNSYDKCRRR

SEQ ID NO: 6364 - protein, 131 aa, Zea mays
QSDETWKMSDIVHTLTNRRWLEKCVTYAESHDQALVGDKTIAFWLMDKDMYDFMALDRPSTPTIDRGIALHKMIRLITMGLGGEGYLNFMGNEFGHPEWIDFPRGPQRLPSGKFIPGNNNSYDKCRRRFDL

SEQ ID NO: 6365 - protein, 270 aa, Spirulina platensis
MTIATETKLKLDWMTIVFMAFLHIGALFVLVPSNFSWAAVGLALFLHWVTGGLGITLGFHRLITHRSFETPKWLEYFLAFCGTLACQGGPIQWVGLHRMHHLYSDQTLDPHDSNKGFWWSHMGWMLREIPADADVPRFTKDINEDPVYLFLQNYFIPIQVALGVVLYLLGGWPLVVWGIFFRIVVVFHCTWFVNSATHKFGYQTYQSNDNSKNCWWVALVTYGEGWHNNHHAFQYSARHGLKWWEIDLTWMTIQLLQFLGLAKKVKLVEN

SEQ ID NO: 6366 - protein, 234 aa, Solanum tuberosum
MAREKIKIKKIDNITARQVTFSKRRRGLFKKAEELSVLCDADVALIIFSSTGKLFDFASTSMKDILGKYKLQSASLEKVDEPSLDLQLENSLNMRLSKQVADKTRELRQMRGEELEGLSLEELQQIEKRLEAGFNRVLEIKGTRIMDEITNLQRKGAELMEENKQLKHKMEIMKGKLPLLTDMVMEEGQSSESIITTNNPDQDDSSNASLKLGGTTAVEDDCSITSLKLGLPFS

SEQ ID NO: 6367 - protein, 467 aa, Listeria monocytogenes str. 1/2a F6854
MLYSEDDKRKQESYRIPLFGSEEESTSIPKYVLKKEPMEPRIAYQLVKDQLMDEGNARQNLATFCQTYMEKEAEILMAETLEKNAIDKSEYPQTAELENRCVNILADLWNAPKDMSYLGTSTVGSSEACMLGGLAMKFRWRNNAEKRGLDIQAKRPNLIISSGYQVCWEKFCVYWDVDMRVVPMDKNHLSLDVDKVFDLVDEYTIGVVGILGITYTGKFDDIQLLDEKVEAYNATNEHQLVIHIDGASGAMFTPFVNPELPWDFRLKNVVSINTSGHKYGLVYPGVGWILWKDKEYLPKELIFEVSYLGGSMPTMAINFSRSASQIIGQYYNFLRYGFEGYREIHEKTKKTALYLAKTVEKSGYFEIINDGANLPIVCYKMKEGLDVEWTLYDLADQLLMKGWQVPAYPLPADLSDTIIQRFVCRADLGYNVAEEFAADFADAIHNLEHARVLYHDKERNDSYGFTH

SEQ ID NO: 6368 - protein, 544 aa, Bacillus cereus ATCC 14579
MAKDIKFSEEARRSMLRGVDTLANAVKVTLGPKGRNVVLEKKFGSPLITNDGVTIAKEIELEDAFENMGAKLVAEVASKTNDVAGDGTTTATVLAQAMIREGLKNVTAGANPMGLRKGIEKAVTAAIEELKTISKPIEGKSSIAQVAAISAADEEVGQLIAEAMERVGNDGVITLEESKGFTTELDVVEGMQFDRGYASPYMITDSDKMEAVLDNPYILITDKKISNIQEILPVLEQVVQQGKPLLIIAEDVEGEALATLVVNKLRGTFNVVAVKAPGFGDRRKAMLEDIAILTGGEVITEELGRDLKSATVESLGRAGKVVVTKENTTVVEGVGSTEQIEARIGQIRAQLEETTSEFDREKLQERLAKLAGGVPVIKVGAATETELKERKLRIEDALNSTRAAVEEGIVAGGGTSLMNVYTKVASIVAEGDEATGINIVLRALEEPVRQIAINAGLEGSVVVERLKGEKVGVGFNAATGEWVNMLESGIVDPAKVTRSALQNAASVAAMFLTTEAVVADKPEPNAPAMPDMGGMGMGGMGGMM

SEQ ID NO: 6369 - protein, 455 aa, Arabidopsis thaliana
MMMNRDILFHQQQQQQMEENMSNLTSASGDQASVSSGNRTETSGSNINQHHQEQCFVPQSSLKRKRNQPGNPDPEAEVMALSPKTLMATNRFICEVCNKGFQRDQNLQLHKRGHNLPWKLKQRSNKDVVRKKVYVCPEPGCVHHHPSRALGDLTGIKKHFFRKHGEKKWKCEKCSKKYAVQSDWKAHAKTCGTKEYKCDCGTLFSRRDSFITHRAFCDALAEESARAMPNPIMIQASNSPHHHHHQTQQNIGFSSSSQNIISNSNLHGPMKQEESQHHYQNIPPWLISSNPNPNGNNGNLFPPVASSVNTGRSSFPHPSPAMSATALLQKAAQMGSTKSTTPEEEERSSRSSYNNLITTTMAAMMTSPPEPGFGFQDYYMMNHQHHGGGEAFNGGFVPGEEKNDVVDDGGGETRDFLGLRSLMSHNEILSFANNLGNCLNTSATEQQQQQHSHQD

SEQ ID NO: 6370 - protein, 76 aa, Zea mays
LSDETWKMGDIVHTLTNRRWLEKCVTYAESHDQALVGDKTIAFWLMDKDMYDFMALDRPSTPTIDRGIALHKMIRL

SEQ ID NO: 6371 - protein, 221 aa, Solanum tuberosum
MVRQKIQIKKIDNLTARQVTFSKRRRGLFKKAQELSTLCDADIGLIVFSATGKLFEYSSSSMMQLIEKHKMQSERDSMDNPEQLHSSNLLSEKKTHAMLSRDFVEKNRELRQLHGEELQGLGLDDLMKLEKLVEGGISRVLRIKGDKFMKEISSLKKKEAQLQEENSQLKQQSQARLNEEGQNVIEQGHSADSITNNRSLVNSHQDYNDSDTSLKLCLAFP

SEQ ID NO: 6372 - protein, 227 aa, Momordica charantia
MGRGKIEIKRIENTTNRQVTFCKRRNGLLKKAYELSVLCDAEVALIVFSSRGRLYEYSNNSIKTTIGRYKKACSDSSATSSVTELNTQYYQQESAKLRQQIQMLQNSNSNLVRHLMGDSLSALTVKELKQLENRLERGITRIRSKKHEMLLAEIEYLQKREIELENENVCIRTKIAEVERLQQANMVSGQELNAIQALASRNFFTPNMMEGGAVTFSHQDKKMLHLG

SEQ ID NO: 6373 - protein, 676 aa, Ralstonia eutropha JMP134
MDQYPRLMAPLSVAGITLRNRIVMGAMHTRLETLDRPHERLAAFYGARARGEAGLILTGGYAPNPAGVFEPGAPLLCERSQLAEHRAITGAVHAAGGHIALQIVHAGRYAKHHLCVGPSAERARINPIAPRELTTEEVWQTIEDFANTAELAWEGGYDGVEIMGSEGYLINQFTAPFTNQRTDEFGGSFEARIRFPLEVLKAIRRRVVDRFLVVYRISAVDLIEGGMTGAEVAELARRVEANGADIINTGVGWHESAVPTIAASVPRSAWAYAIENVKRAVDIPVIASNRINTPDGAEALLSSGCADMVSMARPLLADPDFARKTRVGKAAEINTCIACNQACLDRIFTDRTATCLVNPRAGREIEFMPKPPEGTKRIAVVGGGPAGMSFAINASERGHRVTLFEAGNELGGQLNMARVVPGKNEFNEMLRYFRTRLDGLGVTVHLGRFVKAGELLEAGFDTIVIATGVRPRSPGFPGVDHPKVLSYVDVLARGAAVGQRVAIIGAGGIGFDVAEFLLGDAEESLDPASFLATWGVDPSLSTSGGLSESAETAAPAHARREVHMFQRKPEALGKRLGKSTGWILKSRLKRANVAMASGAVYERVDDDGLHYTIDGKTHVLQVDNVILCAGQESERGLYEALRSSGANVHVIGGADVASELDALRAIDQATRLAMTV

SEQ ID NO: 6374 - protein, 153 aa, Funaria hygrometrica
MALSLFGGRGSSILDPFEFGSVWDPFSVLENGPSRRFASDAHAVANTRIDWRETPEAHVFKADLPGLKKEEVKVQVVEGRTLEISGERKKEEVQKGDTWHRVERAQGSFMRRFRLPEGTNVDEVKAQVQDGVLTVTIPKLQKPKPQVRQIEIA

SEQ ID NO: 6375 - protein, 521 aa, Ashbya gossypii ATCC 10895
MAIGMLRRNSSGTAVSVLQGRVLRTRRLSSVKDGSRFVPAEPMTLADVNENVVKAKYAVRGKIPTRAEELERRLEEHPGSLPFSKIIQANIGNPQQLGQKPLTFYRQVISLMQNPQLLEMPAEWLQQAFKADVVVRARRMLQDAGGSVGAYSASQGVKGYRRTVAQFIERRDGIPANPDNVYLTAGASSAVSCLLSTFCKGPETGVLIPIPQYPLYTATITQNNAVALPYYLNEADGWSTNPDEMERVILDSKKRNIAPKCLVVINPGNPTGSVLSVKDMEAILTLAAKYGIVVIADEVYQDNVFGDAKFHSMRKVLKNLQLREPTLYKNVQLASLHSISKGLSGECGQRGGYMELIGFREELRKVFVKLASISLCPVVTGQALVDLMVGPPSQGDPSYEQYTQETRSIYHELEERSQLLWKTFCSLEGIECNMPQGALYLFPKLHLPQKAIEAAQKLGIPADELYCSELLDETGICTVPGTGFGQIPGTYHVRTTFLPPGTKWIESWKDFHKKFYDKYRD

SEQ ID NO: 6376 - protein, 447 aa, Candida glabrata CBS138
MATNEEFIRTQIFGTVFEITNRYSDLNPVGMGAFGLVCSATDTLTNQQVAIKKIMKPFATAVLAKRTYRELKLLKHLRHENLICLQDIFLSPLEDIYFVTELQGTDLHRLLQTRPLEKQFVQYFHYQILRGLKYVHSAGVVHRDLKPSNILINENCDLKICDFGLARIQDPQMTGYVSTRYYRAPEIMLTWQKYDVEVDIWSAGCIFAEMIEGKPLFPGKDHVHQFSIITDLLGSPPSDVIDTICSENTLKFVTSLPHRDPIPFSERFKTVEPDAVDLLEKMLVFDPKKRITAADALAHPYLAPYHDPTDEPVAEAKFDWHFNDADLPVDTWRVMMYSEILDFHKIGGTDGQIDTSATFDDQVAAATVAAAQAQAHALAQAQMSQNMIDPNQLLNEDGTPVSGSIAENSSNSATTNLNGAAAGMNSASDTINEYANQAVHFANEFQQ

SEQ ID NO: 6377 - protein, 725 aa, Erwinia carotovora subsp. atroseptica SCRI1043
MSAFSEAINSLFSGHYADPFSLLGMHHSSKGLEVRALLPDADAAWVVDASNGRKIVELERVDGRGFFCGLVPNRKHDFHYQLAVTWREETWVIEDPYRFGPLLQDMDIWLLAEGTHLRPYERLGAHLETLDGVEGTRFAVWAPNAQRVSVVGQFNFWDGRRHPMRLRKENGIWELFLPDVKAGQLYKYEMIDSHGSVRLKADPYAFEAQMRPDTASLITPLPEKVPTNEARREANSLRSPISIYEVHLGSWRRHTDNNFWLSYQELANQLIDYVQYMGFTHVELMPINEHPFDGSWGYQPLGLYAPTRRFGTASDFRAFVDALHGAGINVLLDWVPGHFPGDEYGLAQFDGTALYEYSDPREGYHQDWNTLIYNYGRHEVRNYLAGNALFWMERYGIDGLRVDAVASMIYRDYSRSEGEWVPNHYGGKENLEAIAFLRYTNHTLGHAAPAAITLAEESTDYPGVTLPPDCNGLGFHYKWNMGWMHDTLTYMQLDPVHRKHHHDLLTFGMLYAYSENFVLPLSHDEVVHGKRSLLDRMPGDVWQKFANLRAYYGFMWAYPGKKLLFMGCEFAQGREWNHDASLDWHLLDEPEGWHRGVQALVRDLNHYYRQQPSLYQLDFQPQGFEWLVVDDRENSVFAFIRRDEQGNEVLVVSNFTPVPRYGYRIGINQPGGWREVMNTDSVHYNGSDQGNVGTIYSEEWGSHQRQHSLVLTIPPLATLYLVKEA

SEQ ID NO: 6378 - protein, 503 aa, Triticum aestivum
MEAGGKDGNPLKNYRIGKTLGIGSFGKVKIAEHIKTGHKVAVKILNRRKIKNMEMEEKVKREIKILRLFMHPHIIRLYEVIEAPADIYVVMEYVKSGELFDYIVEKGRLQEEEARRFFQQIISGVQYCHRNMVVHRDLKPENLLLDNNCDVKIADFGLSNVMRDGHFLKTSCGSPNYAAPEVISGKLYAGPEVDVWSCGVILYALLCGTLPFDDENIPNLFKKIKGGIYTLPSHLSGPARDLIPRMLVVDPMKRITIREIREHPWFEAQLPRYLAVPPPDTAQQVKKIDEESLVKVISLGFDKNLLVESIHNRLQNEATVAYYLFLDNKSRTTTGYLGAGYQEAMESSFSPITPSETQSPAHGNRQQPYMESPVGLRPHFPADRKWALGLQSRAHPREVMTEVLKALQELNVYWKKIGHYNMKCRWSPPGFPGQENMSHTNYNFSAEPIETDDLGDKLNLIKFELQLYKTRDEKYLLDLQRASGPHLLFLDLCAAFLAQLRVL

SEQ ID NO: 6379 - protein, 297 aa, Leptospirillum ferrooxidans
QIQGYVQTPGIHSPEQIEGWKTVTQRVHQKGGLIYLQLWHVGRISHPDFLGGNLPVAPSAIAPRGMTTYTPTGPKEIPTPRALEISEIHQIVQQYKTAAQNARDAGFDGVEVHGANGYLLDQFLEDSTNLRNDLYGGSLENRARLLFEVMEAVGEVWGSQRVGVRLSPGGTFNDMHDSNPQKTFGYVLQKLSKMDLAYVHLIEPAIPEGEHPTPDLSARFFRPLYSGTLIVAGEYTREKGTQILKSGLADLVAFGRPFLANPDLVERFKKGAALNSFDPATFYGGGVAGYTDYPVLD

SEQ ID NO: 6380 - protein, 479 aa, Bacillus thuringiensis serovar konkukian str. 97-27
MSKVIFPKGFLWGGAIAANQVEGAYVEDGKGLTTVDLLPTGENRWDIMKGNIHSFTPVEGEFYPSHEAIDFYHRYKEDIALFAEMGFKALRVSIAWTRIFPNGDDEKPNEAGLQFYDNLFDELLKHDIEPVVTMAHFDVPIHLVEKYGSWRSRKLVDFFETYAKTIFNRYKDKVKYWMTFNEINMLLHLPFMGAGLAFKEGDNKKQIQYQAAHHQLVASALAVKACHEIIPDAKIGCMLAAGATYPYTCNPDDIQRAMEQDRESFFFIDVQARGAYPGYAKRFFTDNNVTIEMEKEDEAILKEHTVDYIGFSYYASRATSTDPEVLKSITSGNVFGSVENPYLEKSEWGWTIDPKGFRITANQLYDRYQKPLFVVENGLGAIDQLNDEDEVNDAYRIDYLEKHMIEMSEAIQDGVDIIGYTSWGPIDLVSASTGEMKKRYGYIYVDKDNEGKGSLKRSKKDSFNWYKEVIATNGGSLES

SEQ ID NO: 6381 - protein, 892 aa, Methanosarcina mazei Go1
MPDLFKGLFGKKSNELFIILAVGLLFTFFASYFGLFESIVLFVEEYNPRKLGGLLTLSVYLAFALGIFSLRRWMELENALVLQEKTEESLKEKDKRYRALFEHSNDAIIILNGEKVLDLNKKGREAFGLGARELDNISIGSLLSEKDLPAVRDALKTTLENGSACFEMKFRKQNGEVIDVEVSSSFLSLEEGEIQCVARDITTRKKAEKNERESRERLKKIIDNALCGILLVDASTHEIVDANPAAVEAIGLPGHRLTGNVCHKFICPVEEGKCPITDFKQSVDKSERMLLNGKGESFPVLKSVVPVKIGENEYLIESFIDLSERKKTEEELLQAKLAAESANRAKSEFLTNMSHELRTPLTAIIGFSDVMLGGISGEFSEQNKKFLNNIANSGKHLLTLINNILDLSKIEAGKMELEFEMFSVSEVFNDTRAVTSALALKKDISMKYNVDSEILVYADRVRFKQIIYNLVSNAIKFTPDRGSVIVSALKTEDSVRISVSDTGIGISEENQKLLFQPFRQIDASINRHYEGTGLGLALVKKFVNLHGGRVWAESEPGKGSTFEFELPLKCGITSETRINNPDASKKIASSPAEKTVPENHVSDKPAFEKPEREENIKPEANNKSRLPEIIEPSGDSGEKNLVMVVEDDEMAKELLTITLSEAGYRVVTVSSGREALLLARELKPSVITLDIMLPGVSGWDILKNLKHDSATSDIPILVISMNDEKNCSILWGAVDHLIKPVEKERLLSSLQKVKGAINAKSSPRVLIVDDEPTIVELFSSIIKEEGYEPVCAYGGKEAVDKIRNGHPDIIILDLMMPHFTGFDLIKVLKENPETIDIPVIVCTAKELTFEEKDQLNRNVSYIMKKGNITREVLLSVLQKVEDKKFKSKQTNS

SEQ ID NO: 6382 - protein, 322 aa, Colwellia psychrerythraea 34H
MQRLAPALRQDNVPLDLISLIKTILAATKEISFRVSQGHLGDVMGSTLDENIQGEVQKQLDVVANELFKDILLESGFVKAISSEEEDHSVAGDENGKYIVSFDPLDGSSNIDINSLIGTIFSIHEAPKDIAAGDDDMFKQAGDKQVCAGYVLYGPSTMLVMTTGSGTHFYVLDRTHGGFLLVERNVQVPADTQEFAVNMSNQRFWQAPMQNYISDLLAGDTGPREKNFNMRWIAAMVGDIHRVLCRGGIFTYPADSRKPEQPYKLRLMYEANPMAFLLEQAGGLAMTSEGRIMDIEPNSIHQRVEVIMGSKNEVEKCLSYYN

SEQ ID NO: 6383 - protein, 587 aa, Brassica napus
MYRLISSIASKARVARNCTSQIGSRLSSTRNYAAKDIRFGVEGRALMLRGVEELADAVKVTIPPKGRNVIIEQSWGAPKVTKDGVTVAKSIEFKDRVKNVGASLVKQVANRPTQLNRCLGDGTTCATVLTRAIFTEGCKSVAAGMNAMDLRRGIKLAVDTVVTKLKSRARMISTSEEIAQVGTISANGDRELVTDCKAMESVGKEGVITIQDGKTLFNELEVVEGMKIDRGYISPYFITNQKNQKCELEDPLILIHEKKISNLNSMVKVLELALKSQRSLLIVAADLESDALAVLILNKLRAGIKVCAVKAPGFGENRKANMHDLATLTGAQVITEELGMNLEKIDLSMLGNCKKITVSKDDTVFLGWGAGDKKAIGERCEQIRSMVEASESDYDKEKLQERLAKLSGGVAVLKIGGASESEVGEKKDRVTDALNATKAAVEEGIVPGGGVALLYASKELDKLSTANFDHKIGVQIIQNALKTPVYTIASNAGVEGAVIVGKLLESDNPDLGYDAAKGEYVDMVKSGIIDPVKVIRTALVDAASVSSLLTTTEAVVTEIPTKEDASPAMGGGGGGMGGMGGMGGMGF

SEQ ID NO: 6384 - protein, 957 aa, Cryptococcus neoformans var. neoformans B-3501A
MSVQSPLIAVPRKTTTDVDWATPIRHVIAASYGEDPNSYAEECAVLQRCRQDAVRGAGNDQTARDLLYKYFGQLELLELRFAEIKVSFPWNDAFTDKLTTQTSLAFEKASIIHLISSILSSLAQSASRSDPEGLKRAYYNPRATAGMLTYINENFLHAPSTDLSREVVHLLIGIMMAQAAEIFTEKLVEEKKSASLVARSANQTASMYTSVVDEMKEFQGKGVFDRNWLYVLQIKAKLFGSLTQYYKATSDSAAGKHGTALVRLKIANSLIQDAQKQASSFIYTFVAASTPSLPHDAANALNEIVKAHATVCGEAKEQAVKDNDLIYHEVLPSEASLPAIEKLPPAAPITIQDVYGNQEVTKLIGPDIFLRLVPLAVHESASVYSEEKAKLVRAEVDKVELAEGEIQAGLDHLNLPEEIDRWRQFLEGDTNDDVPLSQQLKSLVDSVGDVRQVENDLGRLDGERGACERELRELNGALDAESRECERMRAKYTPNFTQSPSGPQTANLRSNLSANLSALSSASTSDAHLQSLWQSIQPSISLLSSGPSNLERAARDITEGNSQKIDKTVSLLDLDDEEVDRKALGQEEKDALRKAVDDGREKLDRLKKIRAERDEVLRDLKEKIQTDDVSNLLLLNRRSQNVEPQLFASELEKFRPYQTRLAAAVSASRSILQELDMLVAQVHKGTGFREILRKEKDRQRIIRDWEKRLIEAGESYAEIRAGLGKGLSYYDSLRRVIEDLRMEVQRFTNSREQERRNMVSDIETRQRLGGTSPSTGGVVANRGLEERLAALKMEAPPQPPRLGTTSTPNLPPPPGRGSSNVTSSYLPPPPPPKPQSNPYDFSTLAGFGSFATPSVSSPQHVYPSQPQQAYNQQSYIPPQQNPYYPPPPSRPTYASPPFAPQQPPMQSGHSPYAPPPGHAPQPQQPQYPSSQNQQQRQGYEYPGYGQQGGYGGGYGQY

SEQ ID NO: 6385 - protein, 476 aa, Magnetococcus sp. MC-1
MVQHSPTVIVWFRRDLRLSDNPALLAATAMGQVLPVYIHENNQQEGGGGAWRWGLQQALAALNADLQGKLCCYVGDPARLLPEVAHAVGATGVYWNRLYTPQAIKRDRAIKQSLIERGLQVRSFNGSLLWEPWQVLKADKTPYKVFTPYYRRGCLVQDVPRQPMDAPPTVTWATLPAAAPAPSMQALDALLLGDVSWHKKWHGIWSMGEEAAQTRFEHFLSHGLACYDQGRDFPGRDCTSRLSTALQYGLLSPNQVWYGLEHAKADEHSVDKFRSELAWREFAYYQLFHFPSLPHKNFQPKFDHFPWLEDEVALGRWQTGQTGIPIVDAGMRELWQTGVMHNRVRMLVGSFLVKNLLLDWRAGAAWFKDCLVDYDLAINSASWQWVAGCGADAAPYFRIFNPVTQGEKFDRNGTYTRRFVPELANLPDQYLFKPWMAPASILRQAGVRLGQDYPEPLVDLAASRAQALAAFQALKI

SEQ ID NO: 6386 - protein, 384 aa, Haloarcula marismortui ATCC 43049
MLAAASAVIRLASESSAMTALFSPLELRETTVPNRVMVSPMCQYSCDARDGLATDWHRTHLGSRAVGGAGLVMTEATAVEARGRISPEDLGIWSDEHAAALEPITGFISEQGSVPGIQLAHAGRKASIERPWDGHDPLQPDDGGWEVVGPSDDPWPYEDTEAPPTTALDQDGIEAVIDSFRTAAERALDAGFEVAEVHAAHGYLLHQFLSPVTNHREDDYGGDFKGRTRLTREVTAAVRDVWPDDKPVFVRISATDWLPDRDAWTVEDSVRLSDRLADIGADFIDVSGGGIHPESRPDYAGPNYQLQYAEQIRAETESDIAVGAVGGITTPEQAEAVIANDRADMAIVGREHLRDPYFTMTAAKELDATDEIEGPPQYRRAWGF

SEQ ID NO: 6387 - protein, 210 aa, Eucalyptus occidentalis
MVRGKIQLRRIENTTSRQVTFSKRRNGLLKKAYELSVLCDAEVAVIIFSQKGRPYEFSSNSEIQKTIDRYRRSTYDMDTYKTNLDQCILHLKQETTDMERKIELLEVSLRKLSGECLGSCSIDEIQMIGDQLERSLSSIRARKAQLFDDQIQHLQAKERSLKEENAKLLAKCLANPGQSTAHPRAAALHSRSSRSTDVETRLFIGLPELN

SEQ ID NO: 6388 - protein, 227 aa, Eucalyptus occidentalis
MAREKIQIKKITNATARQVTFSKRRRGLFKKAEELSVLCDADVALIVFSSSGKLFEYCSSSMKEILERHHSHSENLGKLDQPSLKLQLVENGDYSRLSKEVAEKGHQLRQMRGEELQGLNIDELQQLEKSLEAGLNRVIEKKGEKIMKEITDLQQKGAKLMEENKRLKQQVTEISGRKTTATDSETIINEEGLSSESITNVCSSSSGPPQEDDSSDISLKLGLPYNG

SEQ ID NO: 6389 - protein, 131 aa, Zea mays
QSDETCKMGDIVHTLTNRRWLEKCVTYAESHDQALVGDKTIAFWLMDKDMYDFMALDRPSTPTIDRGIALHKMIRLITMGLGGEGYLNFMGNEFGHPEWIDFPRGPQRLPSGKFIPGNNNSYDKCRRRFDL

SEQ ID NO: 6390 - protein, 153 aa, Funaria hygrometrica
MALSLFGGRGNSVFDPFEFGSVWDPFTVLESGPSRQLASDVQAVASTRIDWRETPEAHIFKADLPGLTKEEVKVQVLEGRTLEICGERKKEEVQKSDTWHRMERAQGSFMRRFRLPEGTNTDDVKAQVQDGVLTVTVPKVQKPKPQVRQIEIA

SEQ ID NO: 6391 - protein, 128 aa, Arabidopsis thaliana
  misc_feature (8)..(8): Xaa can be any naturally occurring amino acid
  misc_feature (47)..(47): Xaa can be any naturally occurring amino acid
MESKTFWXVTLLLCGTIQLAICRSEEKSTEKTMMLGGVHDLRGNPAXENSGEIESLARFAIQEHIKQQNKILEFKKIVKAREQVVAGTMYHLTLEAKEGDQTKNFEAKVWVKPWMNFKQLQEFKESSS

SEQ ID NO: 6392 - protein, 149 aa, Funaria hygrometrica
MAIYVNRRNNIWNMPDPMDIMMNFFEDTPARSIARDAHALASTNVDWKETPTEHVIKADLPGLKKEEVHVQVEGDRTLSISGQRKHEEVQKTDTWHRVERSSGQFMRKFRLPENANLEQISAQVQDGVLTVKIPKLEKQKPHSRTIEIG

SEQ ID NO: 6393 - protein, 146 aa, Funaria hygrometrica
MALSLFGRGSGSFFDPFDLSLLESGPSRQFARDAHAVPNTQIDWRETPEAQSSKADLPGLKKEEVKVQLVDGKTLEISGERRKEEVHKDDTWHRVERAHGSFLRRFRLPDNSNVEAVEAQVQDGVLTVTIPKIQKPKPQVRQIEIA

SEQ ID NO: 6394 - protein, 147 aa, Thermotoga maritima MSB8
MLLGRREDIFRPFRELQREIDRLFDDFFRTEVRPAKEFFAPDMDVYETDDEVVIEVEIPGIDRKDVKITVEENILKISGEKKLEREQKGKNYYYVERSAGKFERAIRLPDYVDVEKIKAEYKNGVLTIRVPKKEERKKKVIEVEVQE

SEQ ID NO: 6395 - protein, 248 aa, Glycine max
MGRGRVELKRIENKINRQVTFAKRRNGLLKKAYELSVLCDAEVALIIFSTRGKLYEFCSTNSMLKTLERYQKCSYGAVEVSKPGKELESSYREYLKLKARFESLQRTQRNLLGEDLGPLNTKDLEQLERQLDSSLKQVRSTKTQFMLDQLADLQNKEHMLVEANRSLTMKLEEINSRNQYRQTWEAGEQSMPYGTQNAHSQGFFQPLECTPTLQIGSDYRYIPEASEQQLAATTQAQQVNGFIPGWML

SEQ ID NO: 6396 - protein, 592 aa, Streptomyces avermitilis MA-4680
MMTHAGVLGTRFTVWAPNARGVRVCGNFCRWDGAAFPMRSLGSSGVWELFVPGIGEGELYKFEITRPDGTHTVRADPMARRAEVPPATASIVTESSYAWADGAWMAARGERPVHESPFSVYEVHLPSWRPGLTYRQLAEQLPAYVADLGFTHVELLPVAEHPFGGSWGYQVTGFYAPTARLGTPDDFKYLVDALHRAGVGVLMDWVPAHFPRDDWALAEFDGRPLYEPEDPQRAAHPDWGTLEFDYGRKEVRNFLVANAVYWCEEFHIDGLRVDAVASMLYLDYSREEGQWSPNEFGGRDNPDAVAFLQEMNATLYRRVPGVITIAEESTAWDGVTRATHDNGLGFGLKWNMGWMHDSLGYVQHEPVHRKYHHHEMTFSMVYAYSENYVLPISHDEVVHGKQALVSKMPGDWWQRRANHRAYLGFMWAHPGKQLLFMGQEFAQGAEWSPEHGPEWWLLDDEYHSAGDHRGMRDLVRDLNTLYRAEPALWERDTDPSGFAWVVGDAAEDNVFAFLRHAADGTPLLAVSNFSPVVRHDYRLGVPDDIPAWQEALNTDAARYGGSDLICPDPVKPESGEIRLTLPPLATVWLRPA

SEQ ID NO: 6397 - protein, 496 aa, Nicotiana tabacum
MVLSKTASESDVSIHSTFASRYVRTSLPRFKMPENSIPKEAAYQIINDELMLDGNPRLNLASFVTTWMEPECNKLMMDSINKNYVDMDEYPVTTELQNRCVNMIAHLFNAPLGDGETAVGVGTVGSSEAIMLAGLAFKRKWQNKMKAQGKPCDKPNIVTGANVQVCWEKFARYFEVELKEVKLSDGYYVMDPEKAVEMVDENTICVAAILGSTLNGEFEDVKRLNDLLIEKNKETGWDTPIHVDAASGEFIAPFLYPELEWDFRLPLVKSINVSGHKYGLVYAGIGWAIWRNKEDLPDELIFHINYLGADQPTFTLNFSKGSSQVIAQYYQLIRLGFEGYKNVMENCQENARVLREGLEKSGRFNIISKEIGVPLVAFSLKDNSQHNEFEISETLRRFGWIIPAYTMPPNAQHVTVLRVVIREDFSRTLAERLVIDIEKVLHELDTLPARVNAKLAVAEANGSGVHKKTDREVQLEITTAWKKFVADKKKKTNGVC

SEQ ID NO: 6398 - protein, 538 aa, Staphylococcus aureus subsp. aureus MRSA252
MVKQLKFSEDARQAMLRGVDQLANAVKVTIGPKGRNVVLDKEFTAPLITNDGVTIAKEIELEDPYENMGAKLVQEVANKTNEIAGDGTTTATVLAQAMIQEGLKNVTSGANPVGLRQGIDKAVKVAVEALHENSQKVENKNEIAQVGAISAADEEIGRYISEAMEKVGNDGVITIEESNGLNTELEVVEGMQFDRGYQSPYMVTDSDKMVAELERPYILVTDKKISSFQDILPLLEQVVQSNRPILIVADEVEGDALTNIVLNRMRGTFTAVAVKAPGFGDRRKAMLEDLAILTGAQVITDDLGLDLKDATIDMLGTASKVEVTKDNTTVVDGDGDENSIDARVSQLKSQIEETESDFDREKLQERLAKLAGGVAVIKVGAASETELKERKLRIEDALNSTRAAVEEGIVAGGGTALVNVYQKVSEIEAEGDIETGVNIVLKALTAPVRQIAENAGLEGSVIVERLKNAEPGVGFNAATNEWVNMLEVGIVDPTKVTRSALQHAASVAAMFLTTEAVVASIPEKNNDQPNMGGMPGMM

SEQ ID NO: 6399 - protein, 134 aa, Brassica napus
MGSEGPKAITIHVTGFKKFLGVSENPTEKIANNLKSYVEKRGLPSGLSLGSCTVLETAGEGAKSQLYQVLESSVVVSGDNKNTIGTVVWLHLGVNSGSTKFAIERQAVNEAHFRCPDQLGWQPQRLPIVVEDGS

SEQ ID NO: 6400 - protein, 505 aa, Clostridium thermocellum ATCC 27405
MDVTGKSLKRILLSLAVFCILITGPGIACAEEATTQEKEILFSDYFKSMMDMAQDKYKGEITEKQMLEGALKGIFSTMDSYTVYYTVEESQDFFTDINGSYTGIGVVMSEVDGKIVIDKVYPSSPAEEAGIKKGDVIAQVDGKSVENLSLEEVAGLIKGPSGTKVVIGVLRNGTDGVIELEVTRRQIIINPVTHKIEGDIGYIKLESFNSNASKAMEEALKQMDKNNIKKIILDLRDNPGGDVGQAVSIARKFVKKGLITKLDFKSESQKDEEYYSYLEELKYKLVVLVNENSASASEILAGAIQDTGSGILVGTTTFGKGKVQNLYPILTPEAVEKYRKETGETFVNGYDLLEKHGIYPSDEEIIGWVKITTGEYYTPNGRMIDGVGLEPDVYVENEPEGKYKILEGVEKLRKVTKPSLNAQSEDVLNAEKILSALGYDVDTPDNLMDEKTVKAVAEFQRDCGLYSYGVLDFATQQALNDKLDELLLVKNRDKQYEKAVELLEN

SEQ ID NO: 6401 - protein, 57 aa, Glycine max
  misc_feature (4)..(4): Xaa can be any naturally occurring amino acid
  misc_feature (6)..(6): Xaa can be any naturally occurring amino acid
  misc_feature (8)..(8): Xaa can be any naturally occurring amino acid
  misc_feature (15)..(15): Xaa can be any naturally occurring amino acid
  misc_feature (17)..(17): Xaa can be any naturally occurring amino acid
  misc_feature (22)..(23): Xaa can be any naturally occurring amino acid
  misc_feature (26)..(27): Xaa can be any naturally occurring amino acid
  misc_feature (30)..(30): Xaa can be any naturally occurring amino acid
  misc_feature (42)..(42): Xaa can be any naturally occurring amino acid
  misc_feature (45)..(45): Xaa can be any naturally occurring amino acid
LAIXNXAXNEANFRXPXEMGWXXQKXXIVXSDGGISRTRETXLPXVEITKALAEKGI

SEQ ID NO: 6402 - protein, 131 aa, Zea mays
QSDEARKMGDIVHTLTNRRWLEKCVTYAESHDQALVGDKTIAFWLMDKDMYDFMALNRPSTPTIDRGIALHKMIRLITMGLGGEGYLNFMGNEFGHPEWIDFPRGPQRLPSGKFIPGNNNSYDKCRRRFDL

SEQ ID NO: 6403 - protein, 147 aa, Funaria hygrometrica
MDFPLFQILSFPDELEKSLNPQSQKYVRDTKAMVSTAVDVKELPDAYIFVADMPGLKSADVKVQLENDNVLVIGGTRKREEPDPKVKYIRMERNSGSFMRKFTLPQNSNLDKIAASCVNGILTVTVPKIPPPEPAKPRTIEVTMGNQ

SEQ ID NO: 6404 - protein, 507 aa, Xanthomonas campestris pv. phaseoli
MRPGHLMVLALLAPTLIAPPVFAQSVLTRDNGAKVGDNQNSQTAGATGPTLLQDVQLIQKLQRFDRERIPERVVHARGTGVKGEFTATADLSSLTKAKVFSAGEKTPVFVRFSSVVHGNHSPETLRDPHGFATKFYTSEGNWDLVGNNFPTFFIRDAIKFPDMVHAFKPDPRTNLDDDSRRFDFFSHVPEATRTLTLLYSNEGTPAGYRFMDGNGVHAYKLVNAQGEVHYVKFHWKTLQGIKNLDPKQVAAVQAKDYSHLTNDLVGAIKKGDYPKWDLYVQVLKPEDLAKFDFDPLDATKIWPDVPEQKVGQMVLNKNVDNFFQETEQVAMAPANLVPGIEPSEDRLLQGRIFSYADTQLYRIGANGLSLPVNRPRVAVNNGNQDGQGNIGQTTSGVNYEPSRLEPRPQDTAARYSELPLSGTTQQAKITREQNFKQAGELYRSYSKKDRADLVQSFGESLATTDTESKHLMLSFLYKADPEYGTGVTRVAKGDLARVKQLASSLQD

SEQ ID NO: 6405 - protein, 161 aa, Funaria hygrometrica
MDFVVFDTDPFLTTLHQLVHEPGSDLERKIKRQRRNHHDEPRHVTIATPVDVKEIKDAYLFVADVPGLQKTDIEVQVENENVLTMRGKRKLDEKVNEKEEDTKFIRMERSPVKLLRKFTLPSDANADAITANCVDGVLTVTVPKIPPPEPAKSKTVQIAVD

SEQ ID NO: 6406 - protein, 71 aa, Zea mays
QSDETWKMSDIVHTLTNRRWLEKCVTYAESHDQALVGDKTIAFWLMDKDMYDFMALDRPSTPTIDRGIALH

SEQ ID NO: 6407 - protein, 470 aa, Zea mays
  misc_feature (389)..(389): Xaa can be any naturally occurring amino acid
MPNGGGKRWLLLLPLSRWVLLLGSLQLPADGGSGHVVTRMRGFNGPLPFYLETGYVEVDEQQGVQLFYYFVRSERDPYEDPLLLWLSGGPGCSGISGLAYEIGPLKFDARGQGEFPTLLYRPETWTKVSNIIFEDSPVGTGFSYAKSEEGLETGDTKQVKQLVIFLRKWLQDHPRIVMNPLYIAGDSYSGLIIPTLALEIDRSIELGEKIFSGLKGYIAGNPLTGGQFDTDSQIPYFHAMGLVSDELYKNARENCGGKYSAPLNAVCAEAVQAINNCTRDINKQYILDPACPDDDLLSPKTVAETDGTSRLMLESADFLLGSKCAEALYILSYAWGNDDTVQESLGIRKGTIGAWKRYSHALPYNYDIQSVVDYHSRLATKGYRALIYXSGDHDAVVPHVGTQAWIRYLNLTIVDDWRPWYVGGQVAGFTRSYASGLTFATVKGAGHVAPLYKTLECQKMFITWISGNPL

SEQ ID NO: 6408 - protein, 533 aa, Bacillus halodurans C-125
MKDQNQDPNKRSDNETDETLTNRQGHPVTNNQHVRTVGDRGPTTLENYDFLEKISHFDRERIPERVVHARGAGAHGYFESYGTYGDEPISKYTRAKVFTEKGKQTPVFVRFSSVIHGGHSPETLRDPRGFAVKFYTEDGNWDLVGNNLKIFFIRDPLKFPDLVHAFKPDPVTNVQDGERIFDFISQTPEAMHMITFLFSPWGIPANYRMMQGSGVNTYKWVNEEGNAVLVKYHWEPKQGIKNLTQKEAEAIQAKNFNHATLDLYEAIEDGDYPEWELYVQIMSDDAHPELDFDPLDPTKLWYKDQFPWVPVGRMVLNKNPENYFAEVEQAAFGTGVLVDGLDFSDDKLLQGRTFSYSDTQRYRVGANYLQLPINAPKKRVATNQRDGQMEYHVDIGPKQNPHVNYEPSLLNGLKEAKQDGQDHTPYVEGELQRASIDRQNDYGQAGETYRRLSDWERDDLILNLVNTLAPCHEDIQKQMIDHFSQCDPEYGRRVKEGLEKQKGADTHRQPQGGADGDAAMHAAEALGHPSDPY

SEQ ID NO: 6409 - protein, 547 aa, Vibrio parahaemolyticus RIMD 2210633
MAAKDVKFGNDARVKMLEGVNVLADAVKVTLGPKGRNVVLDKSFGAPTITKDGVSVAREIELEDKFQNMGAQMVKEVASKANDAAGDGTTTATVLAQAIVNEGLKAVAAGMNPMDLKRGIDKAVAAAVEQLKELSVECNDTKAIAQVGTISANSDASVGNIIAEAMERVGRDGVITVEEGQALQDELDVVEGMQFDRGYLSPYFINNQEAGSVELENPFILLVDKKISNIRELLPTLEAVAKASRPLLIIAEDVEGEALATLVVNNMRGIVKVAAVKAPGFGDRRKAMLQDIAILTGGTVISEEIGLELEKVTLEDLGQAKRVSITKENSTIIDGAGEEAMIQGRVAQIRQQIEDATSDYDKEKLQERVAKLAGGVAVIKVGAATEVEMKEKKDRVEDALHATRAAVEEGVVAGGGVALIRAASKIVDLEGDNEEQNVGIRVALRAMEAPIRQITKNAGDEDSVVANNVKAGEGSYGYNAATGEYGDMLEMGILDPTKVTRSALQFAASVAGLMITTEAMVTDLPQKESAGMPDMGGMGGMGGMGMM

SEQ ID NO: 6410 - protein, 168 aa, Sinorhizobium meliloti 1021
MNVRDLIPWGRAQGQVPASYRDNDRNPFLALHREMNRLFDDAFRSFETRLPISGFSGFAGGWPSVEVSDRDKEIKVTAELPGLDEKVVELSLSDGVLSLRGEKRAETEDQENQFSERYYGRFERRIALGYEVDESKVNATFRNGVLTVTLPKTEQAQSKAKRIAINGR

SEQ ID NO: 6411 - protein, 546 aa, Leptospira interrogans serovar Lai str. 56601
MAKDIEYNETARRKLLEGVNKLANAVKVTLGPKGRNVVIDKKFGAPTITKDGVTVAKEIELEDPLENMGAQMVKEVSTKTNDVAGDGTTTATILAQSIINEGLKNVTAGANPMSLKRGIDKAVTAAVESIQKRAVKIENKKDIANVASISANNDNTIGNLIADAMDKVGKDGVITVEEAKSIETTLDVVEGMQFDRGYISPYMVTDAESMVATLNDPFILIYDKKISSMKDLIHILEKVAQAGKPLVIISEEVEGEALATIVVNTLRKTISCVAVKAPGFGDRRKSMLEDIAILTGGQVISEDLGMKLENTTLQMLGRANKVTVDKENTTIIEGKGQTKEIQGRIGQIKKQIEDTTSEYDREKLQERLAKLAGGVAVIHVGAATEVEMKEKKARVEDALSATRAAVEEGIVPGGGLTLLKAQEAVGSLKLDGDEATGAKIIFRALEEPIRMITSNAGLEGSVIVEHAKAKKGNEGFNALTMVWEDMIQAGVVDPAKVVRSALQNAASIGSMILTTEVTITDKPDKDAPNPMAGMGGGGMGGMGGMM

SEQ ID NO: 6412 - protein, 121 aa, Glycine max
  misc_feature (95)..(95): Xaa can be any naturally occurring amino acid
  misc_feature (98)..(98): Xaa can be any naturally occurring amino acid
MVQSRKFRGVRQRNWGSWVSEIRHPLLKRRVWLGTFETADEAARAYDEAAILMSGRNAKTNFPVGENQMGNHSSSTSSSSTTTLSAVLSAKLRKXCKXPSPSLTCLRLDTENSHIGVWQKR

SEQ ID NO: 6413 - protein, 1112 aa, Gibberella zeae PH-1
MADIMIPNVRSPLSEASNRINSNHPPQEAHRYKPRHDRPPASTNNPPRASYGHPAAYFSGRPPPTQPQSTGPKPQGNPTLKPPTDMDDDRRHSGASYDSSGSGHSKKNYKTHIGPWQLGKTLGKGSSARVRLCRHNVTHQLAAVKIVNRRMAYLVQDSSLAALSKWDNNLPEQIDGEIRVPMAIEREVAILKLIEHPHIMKIYDIWENRSEVYLILEYIDQGDLFTFINMKGRLSEEVSVYFFRQIISAISYCHSFNICHRDLKPENILISANLKIKIADFGMAALHQTDTHRLNTACGSPHYAAPELLKNRQYRGDKADLWSMGVILFAMLTATLPFDDPDIRVMMSKTKKGQYEMPDYLSPEAEDLIRRMLQVNPDRRITLKEIWRHPLVKKYAYLDNLDDLNSQPPDIRKGFQYTPVPAQDVDSQLVRQLRSMWHTFSENDLKLKLTCDEPNDQKAFYWLLYQYREQQLEDFKPEIAHSTSDYHHMKPGTWKKHPQAASLSKKTTMALTPGNQKGFEVDQVRAVDVEHQLEPPPQDAYYHREARCRPCTAVDKARRMHATRATNEESTSRMSGSVPPYVTEQGSTYQLEMARPFTPDVSELPSTVLPKTKDRHEAQVNTKRASGQAMRIALGSRYASEIFKEELRHFSSNIAKDCDEAFKSSLIEEDSIAGSLTEPDRTQYESTPISFTIDAPDESAPDILDLTAKSFSNRPLPPLPTPLQGHDERSLAPTPIGSRPTTGDSHLEELRAEQVKVAQPVILTRHAERRVVSAPAYHQKSKMNPALPSINETGAISNDKARIVSAPPHTPTKRGVDRIRGIEYLSQVENSIRVVNSPGDESPVKMPKPLNVRKKFCDSEEEEEDVMVKRASKVESTHGRESVDWQDCNSYLTSSDGKRSDSTTTDAPSKKKTFNFNFWKSNKQRDSIMSITKEPDDKEERPSVELSVVGKTNTSTKVSQSRWHESNSGPVRNIEVKQNWLARLFRVKPATDHICMTISRRRARQEVTILLREWRKYGIRDIQVDKQRNIVFARVADKNFLNLKEVSFAAEVITVIEHGKKQPLSIIRFTQERGAASSFYRVVDTMRMMFETRALVISDKNKQKMMIKTLNS

SEQ ID NO: 6414 - protein, 512 aa, Ralstonia eutropha JMP134
MQGADTPAHARPPYRIDHQFDRGLVWFRRDLRSTDHAALHYALKHCREVWCVFVFDRDILDPLLARGLKGDRRVDFIRASLIELDATLRAAGGGLIVMNDSAASAIPALARELGVQAVFANHDYEPDAVARDAAVRDSLAGDARVLFTFKDQVIFERDEILTSQGKPFAVFTPYKNAWLKTIQPFDLRPYPIEPYLHALAPLPSKRLVPLPSLEDLGFAPSNLAEVAMPTGSSGGQALFEEFTSRMGDYGRRRDYPALRGPSYLSVHLRFGTVSIRTLARAAHGAVLRGGADSAGAATWLSELVWRDFYFMILHHHPRVAAGEAFHPAYDIIRWRDGETGDRYFESWRDAATGYPLVDAAMLQIRQSGYMHNRLRMVTASFLVKDLGVDWRRGEHYFADQLNDFDFAANNGGWQWAASTGCDAQPWFRIFNPVTQSEKFDPQGRFIRKYLPQLAALPDKYVHAPWTAPQDVLLAAGVRLGENYPRPLVQHDVARKETLERYAVVKEWRRPEG

SEQ ID NO: 6415 - protein, 537 aa, Buchnera sp.
ARVKMLRGVNVLADAVKVTLGPKGRNVVLDKSFGAPSITKDGVSVAREIELEDKFENMGAQMVKEVASKANDAAGDGTTTATLLAQSIVNEGLKAVAAGMNPMDLKRGIDKAVISAVEELKNLSVPCSDSKAITQVGTISANADEKVGALIAEAMEKVGNDGVITVEEGTVFKNELEVVKGMQFDRGYLSPYFINKPETGIVELENPYILMADKKISNVREMLPILESVAKSGKPLLIISEDLEGEALATLVVNSMRGIVKVAAVKAPGFGDRRKAMLQDISILTGGSVISEELAMDLEKSTLEDLGQAKRVVINKDTTTIIGGVGEKHAIQSRIGQIRQEIQEATSDYDKEKLNERLAKLSGGVAVLKVGAATEVEMKEKKARVEDALHATRAAVEEGVVAGGGVALVRVAGKISTLRGHNEDQNVGIRVALRAMEAPLRQIVSNSGEEPSVVTNNVKDGKGNYGYNAATDEYGDMIDFGILDPTKVTRSALQYAASVAGLMITTECMVTDLPKEDKSSDIGSSPAGGMGGMGGMM

SEQ ID NO: 6416 - protein, 457 aa, Staphylococcus epidermidis ATCC 12228
MAIGVILNRVFRLNNNPLFDYIYSNKESINHCYFIIPTEEFEEEAKKKAQYYYGSIQKFMYELQRYDIEPFLMSYDKLIDFCKKQAIDKVVVAGDIMSYHHEEYDILHQRKRFKQANIQVISLRANHYFNPRKTYNKQGEPYKVFTSFYRKWRPYLMIRDEYDYHLEDISKVVVKSQHKIKEDYHSYGISERDVQNRWSEFLSQDIENYKENREYLPEVLTSQLSIYLAYGMIDIIQVFNDLLQNYDKNEQNYETFIRELIFREFYYVLMTNYPETAHVAFKEKYQQLKWSYNEENFKLWKDGNTGFPIIDAAMEELKTTGFMHNRMRMVVSQFLTKDLFIDWIWGESFFKQKLIDYYAASNVHGWQWSASTGTDAVPYFRMFNPIRQSERFDNNARYIKTYIPRLNQVDAKYLHDTHKFEQQIKGQGVEIGKDYPKQMIDHKESRQRVMSEFKALD

SEQ ID NO: 6417 - protein, 803 aa, Sorghum bicolor
MAAFAVSGAALGGAVRAPRLTGGEEGSLVSRRTGPFLTRAGGARVGGSGTHGAMRAAAASSRKAVVVAEDENDGLASKADSAQFQSDELEVPDVTEETMRDAGVADAQALNRVRVVPPPSDGQKIFQIDPMLQGYKYHLEYRYSLYRRIRSDIDEHEGGSEAFSRSYEKFGFNRSAEGITYREWAPGALSAALVGDFNNWDPNADLMSKNEFGVWEIFLPNNADGTSPIPHGTRVKVRMDTPSGIKDSIPAWIKYSVQAPGEIPYDGLYYDPPEEVKYVFKHPKPKRPKSLRIYETHVGMSSPEPKINTYANFRDEVLPRIKKLGYNAVQIMAIQEHSYYGSFGYHVTNFFAPSSRFGTPEDLKSMIDRAHELGLLVLMDVVHSHASSNTLDGLNGFDGTDTHYFHSGPRGHHWMWDSRLFNYGNWEVLRFLLSNARWWLEEYKFDGFRFDGVTSMMYTHHGLQVTFTGSFNEYFGFATDVDAVVYLMLVNDLIHGLYPEAVTIGEDVSGMPSFALPVQDGGVGFDYRMHMAVADKWIEFLKQSDEAWKMGDIVHTLTNRRWLEKCVTYAESHDQALVGDKTIAFWLMDKDMYDFMALDRPATPTIDRGIALHKMIRLITMGLGGEGYLNFMGNEFGHPEWIDFPRGPQRLPSGKFIPGNNNSYDKCRRRFDLGDADYLRYRGMQEFDQAMQHLEQKYGFMTSDHQYISRKHEEDKMIVFEKGDLVFVFNFHCNNSYFDYRIGCRKPGMYKVVLDSDAGLFGGFGRIHHAAEHFTTDCSHDNRPHSFSVYTPSRTCVVYAPVE

SEQ ID NO: 6418 - protein, 233 aa, Haemophilus influenzae 86-028NP
MLFALPALNDNYIWLYQRENLPLIIVDLPETDKLFAWLDKQNATIEAVLLTHEHEDHTQGVSAFKKRYPTVPIYGPQECEKKGATQVVNEGKILTAHYQIDVIPTGGHTKQHVSFLVDNHLFCGDALFSAGCGRVFTGNYAQMFDGLQRLNTLPDETIVCPAHEYTLGNLAFAETVLVEKSAVEKQRIFVETQRAENKPSLPTTLKLEREINPFLQAKTLEEFTALRKAKDIF

SEQ ID NO: 6419 - protein, 394 aa, Capsicum annuum
MDGPAQQTDTVMAEAAAAQQPAPPSQPVAGIDNIPATLSHGGRFIQYNIFGNVFEVTAKYKPPIMPIGKGAYGIVCSALNSETNEHVATKKIANAFDNKIDAKRTLREIKLLRHMDHENIVAIRDIIPPPQREAFNDVYIAYELMDTDLHQIIRSNQGLSEEHCQYFLYQILRGLKYIHSANVLHRDLKPRNLLLNANCDLKICDFGLARVTSETDFMTEYVVTRWYRPPELLLNSSDYTAAIDVWSVGCIFMELMDRKPLFPGRDHVQQLRLLMELIGTPSEAEMEFLNENAKRYIRQLPLYRRQSFVEKFPHVNPAAIDLVEKMLTFDPRRRLTVEDALAHPYLTSLHDISDEPVCTTPFSFDFEQHALTEEQMKELIYREGLAFNPEYQHM

SEQ ID NO: 6420 - protein, 548 aa, Buchnera sp. N27
MAAKDVKFGNEARIKMLRGVNVLADAVKVTLGPKGRNVVLDKSFGAPSITKDGVSVAREIELEDKFENMGAQMVKEVASKANDAAGDGTTTATLLAQSIVNEGLKAVAAGMNPMDLKRGIDKAAISAVEELKNLSVPCSDSKAITQVGTISANADEKVGALIAEAMEKVGNDGVITVEEGTGLQNELEVVKGMQFDRGYLSPYFINKPETGVVELENPYILMADKKISNVREMLPILESVAKSGKPLLIISEDLEGEALATLVVNSMRGIVKVAAVKAPGFGDRRKAMLQDISVLTGGSVISEELAMDLEKSTLEDLGQAKRVVINKDTTTIIGGVGEKQAIQSRISQIRQEIQEATSDYDKEKLNERLAKLSGGVAVLKVGAATEVEMKEKKARVEDALHATRAAVEEGVVAGGGVALVRVAGKISNLRGHNEDQNVGIRVALRAMEAPLRQIVSNSGEEPSVVTNNVKDGKGNYGYNAATDEYGDMIDFGILDPTKVTRSALQYAASVAGLMITTECMVTDLPKEDKTSDASSSPAGGMGGMGGMM

SEQ ID NO: 6421 - protein, 775 aa, Hordeum vulgare
SKLSLPVSAPRDFTMATAQDGADDLPIYDLDPKFAGFKDHFSYRMKKYRDQKHLIDEHEGGLEEFSKGYLKFGINTENDATVYREWAPAAKEAQVIGDFNNWNGSGHRMTKDNFGVWSIRISHVNGKPAIPHNSKVKFRFHRGDGVWVDRIPAWIRYAIADASKFGAPYDGVHWDPPTSERYVFKHPRPQKPDAPRIYEAHVGMSGEKPEVSTYREFADNVLPRVKANNYNTVQLMAIKEHSYYASFGYHVTNFFAASSRSGTPEDLKYLVDKAHSLGLRVLMDVVHSHASSNMTDGLNGYDVGQNTQESYFHTGERGYHKLWDSRLFNYANWEVLRFLLSNLRYWMDEFMFDGFRFDGVTSMLYNHHGINMSFSGDYKEYFGLDTDVDAVVYMMLANHLMHKLLPEATIVAEDVSGMPVLCRSVDEGGVGFDYRLAMAIPDRWIGYLKNKDDLEWSMSGIAHTLTNRRYTEKCIAYAESHDQSIVGDKTMAFLLMDKEMYTGMSDLQPASPTIDRGIALQKMIHFITMALGGDGYLNFMGNEFGHPEWIDFPREGNNWSYDKCRRQWSLVDIDHLRYKYMNAFDQAMNALDDKFSFLSSSKQIVSDMNEEKKVIVFERGDLVFVFNFHPNKTYDGYKVGCDLPGKYKVALDSDALMFGGHGRVAHDSDHFTSPEGIPGVPETNFNNRPNSFKILSPPRTCVAYYRVEEKAEKPKDGGAAFWGKLLRDTSMLKLLASKDATDGEAISGSEKVSTGDGSVKRGINFVFRSPDKDNK

SEQ ID NO: 6422 - protein, 447 aa, Oryza sativa
MAATKSKAAKKGAPLLGKYELGRLLGRGTFAKVYHARSLAPGADPVAVKVLDKPDLAAAGAGMATRVLREVAAMRRLRHPNVLRLHEVLATRSKVYLVMELAPGGDLLSRLASLPSRRLPEHAARRVFLQLVSALIYCHARGVSHRDVKPQNVLLDAHGNLKVSDFGLAALPDSLRDDGRLHTACGTPAFAAPEVLRRKAYDGAKADAWSCGVILFVLLAGHLPFDDSNIADMCRKAHRREYALPRWVSQPARRLVSRLLDPNPATRLAGAELATHPWFKRSLSLDSQLGSLLGGQPERELAFQAPPPLNAFDIISMSPGLDLSGLFGESKRRREKRFVTTASPERTVERLGQAGAKLGYFMVGKKGVERLPLGGLSGLVAMSMEMSEVSPSMMLVELRLEGGDDGDGDGGAEEFGWEELRAELGDDVVMAWHGCDGGKKDKEGILL

SEQ ID NO: 6423 - protein, 209 aa, Streptomyces coelicolor A3(2)
MAPRIERLVTSGQFSLDGGTWDVDNNVWLVGDDHEVVVIDAAHDADAIAAAVGDRRLTAIVCTHAHNDHVDAAPALAERTGATIWLHRDDLPLWQQTHPDRAPDAWLTDGLVIEAAGADLTVLHTPGHAPGAVCLYDPGLGTVFTGDTLFQGGPGATGRSYSHFPTIIDSIRDKLLVLPPETEVRTGHGDSTTIGAEAPHLEEWIKRGH

SEQ ID NO: 6424 - protein, 130 aa, Zea mays
LSDETRQMSDIVHTLTNRRWLEKCVTYAESHDQALVGDKTIAFWLMDKDMYDFMALDRPSTPTIDRGIALHKMIRLITMGLGGEGYLNFMGNEFGHPEWIDFPRGPQRLPSGKFIPGNNNSYDKCRRRFD

SEQ ID NO: 6425 - protein, 439 aa, Pseudomonas fluorescens PfO-1
MLHLSRLTSLALTIALVIGAPLAFAAQPAPAVAPAGTAATSKAPLPLEELRTFAEVMDRIKAAYVEPVDDKTLLENAIKGMLSNLDPHSAYLGPEDFAELQESTSGEFGGLGIEVGAEDGFIKVVSPIDDTPASKAGIQAGDFIVKINGAPTRGQTMTEAVDKMRGKIGQKITLTLVRDGGTPFDVTLARAVIQVKSVKAQLLESGYGLIRITQFQVKTGEEVSKALAKLRKDNGKKLNGIILDLRNNPGGVLQAAVEVVDHFITKGLIVYTKGRIANSELRFSATGKDESEAVPMVVLINGGSASASEIVAGALQDQKRAVVMGTTSFGKGSVQTVLPLNNDRALKITTALYFTPNGRSIQAQGIVPDIEVRRAKITNEADSDYFKEADLQGHLGNGNGGADKPTGSGGKAKAMPQDDDYQLAQALSLLKGLSITSGR

SEQ ID NO: 6426 - protein, 1123 aa, Solanum tuberosum
MSSSRPSQSSTTSSRSKHSARIIAQTSIDAKLHADFEESGDSFDYSSSVRVTNVAEGEQRPKSDKVTTAYLHQIQKGKFIQPFGCLLALDEKTLKVIAFSENAPEMLTMVSHAVPSVGEHPVLGIGIDIRTIFTGPSGAALQKALGFGEVSLLNPVLVHCKNSGKPFYAIVHRVTGSLIIDFEPVKPYEVPMTAAGALQSYKLAAKAITRLQSLPSGSMERLCDTMVQEVFELTGYDRVMGYKFHDDDHGEVVSEITKPGLEPYLGLHYPATDIPQAARFLFMKNKVRMICDCRAKHVKVVQDEKLPFDLTLCGSTLRAPHYCHLQYMENMNSIASLVMAVVVNDGDEEGESSDSSQSQKRKRLWGLVVSHNTTPRFAPFPLRYACEFLAQVFAILVNKELELENQFLEKNILRTQTLLCDMLMRDAPLGIVSQSPNIMDLIKCDGAALLYKNKIHRLGMNPSDFQLHDIVSWLCEYHTDSTGLSTDSLYDAQFPGALALGDAVCGMAAVRISDKDWLFWYRSHTAAEVRWGGAKHEPGEKDDGRKMHPRSSFKQFLEVVKTRSIPWKDYEMDRIHSLQLILRNAFKDADAVNSNTISIHTKLNDLKIDGMQELEAVTAEMVRLIETASVPIFAVDVDQGVNGWNTKVAELTGLPVDEAIGKHLLTLVEDSSVDTVNKMLELALQGQEERNVEFEIKTHGPSRDSSPISLIVNACASKDVRDSVVGVCFIAQDITGQKSIMDKFTRIEGDYRAIIQNPHPLIPPIFGTDQFGWCSEWNSAMTMLTGWRRDDVMDKMLLGEVFGTQAACCRLKNQEAFVNFGVILNNAITGQESEKIPFGFFARYGKYVECLLCVSKRLDKEGAVTGLFCFLQLASHELQQALHVQRLSEQTALKRLKVLAYIRRQIRNPLSGIIFSRKMLEGTSLGEEQKNILHTSAQCQRQLDKILDDTDLDSIIEGYLDLEMLEFKLHEVLVASISQVMMKSNGKNIMISNDMVEDLLNETLYGDSPRLQQVLANFLLVSVNSTPSGGKLSISQKLTKDRIGESVQLALLEFRIRHTGGGVPEELLSQMFGSEADASEEGISLLVSRKLVKLMNGEVQYLREAGRSTFIISVELAVATKSS

SEQ ID NO: 6427 - protein, 221 aa, Arabidopsis thaliana
  misc_feature (86)..(86): Xaa can be any naturally occurring amino acid
  misc_feature (118)..(118): Xaa can be any naturally occurring amino acid
  misc_feature (127)..(127): Xaa can be any naturally occurring amino acid
MGQQNLIYSFVARGTVILVEYTEFKGNFTAVAAQCLQKLPSSNNKFTYNCDGHTFNYLVENGFTYCVAAVESVGRQIPMAFLERGXEDFNKRYGGGKATTAQANSLNREFGSKLKEHXMQYCVDHPXDEISKLAKVKAQVSEVKGVMMENIEKVLDRGEKIELLVDKTENLRSQAQDFRTTGTQMRRKMWLQNMKIKLIVLAIIIALILIIVLSVCHGFKC

SEQ ID NO: 6428 - protein, 279 aa, Bacillus cereus E33L
MKNLQSTTTLHNGVEMPWFGLGVFKVEEGPELVEAIKSAIKAGYRSIDTAAIYGNEAAVGEGIRAGIEATGISREELFITSKVWNADQGYEETIAAYEESLKKLQLDYLDLYLVHWPVEGKYKDTWRALETLYKEKRVRAIGVSNFQIHHLQDVIKDAEIKPMINQVEYHPRLTQKELQAFCKEQGIQMEAWSPLMQGQLLDNETLQEIAEKHGKTTAQVILRWDLQNGVITIPKSTKEQRIIANADVFNFELTKEDMEKIDALNQNHRVGPDPDNFDF

SEQ ID NO: 6429 - protein, 504 aa, Solanum tuberosum
MSSRGGGIAESPYLRNYRVGKTLGHGSFGKVKIAEHLLTGHKVAIKILNRRKMKTPDMEEKLRREIKICRLFVHPHVIRLYEVIETPTDIYVVMEYVKSGELFDYIVEKGRLQEDEARKIFQQIIAGVEYCHKNMVVHRDLKPENLLLDARRNVKIADFGLGNIMRDGHFLKTSCGSPNYAAPEVVSGKLYAGPEVDVWSCGVILYALLCGTLPFDDENIPNLFKKIKSGVYTLPSHLSPLARDLIPRMLIVDPMKRISVPDIRQHQWFKIHLPRYLAVPPPDARQHLKKLDEEILQQVSRMGLDRDQLLDSLQKRIQDDATVAYYLLYDNRSMASSGYLGAEFQESVDCYSPGLFPNLDLQLSTGNGVSEESLRRPFRKEKMWLVGLQSPANPKEIMNQVLGTLLELNVRWKKIGHYNMKCLWCHDLHLHSMANNHMNDDDHFISNATAISTHLQPQPTVKFEMQLYKTEDEKYLLDLQRISGPQFLFLDFCAGFIRQLEGPQ

SEQ ID NO: 6430 - protein, 323 aa, Sporidiobolus salmonicolor
MVGTTTLNTGASLELVGYGTWQAAPGEVGQGVKVAIETGYRHLDLAKVYSNQPEVGAAIKEAGVKREDLFITSKLWNNSHRPEQVEPALDDTLKELGLEYLDLYLIHWPVAFPPEGDITQNLFPKANDKEVKLDLEVSLVDTWKAMVKLLDTGKVKAIGVSNFDAKMVDAIIEATGVTPSVNQIERHPLLLQPELIAHHKAKNIHITAYSPLGNNTVGAPLLVQHPEIKRIAEKNGCTPAQVLIAWAIVGGHSVIPKSVTPSRIGENFKQVSLSQEDVDAVSKLGEGSGRRRYNIPCTYSPKWDINVFGEEDEKSCKNAVKIK

SEQ ID NO: 6431 - protein, 131 aa, Zea mays
LSDEARQMGDIVHTLTNRRWLEKCVTYAESHDQALVGDKTIAFWLMDKDMYDFMALDRPSTPTIDRGIALHKMIRLITMGLGGEGYLNFMGNEFGHPEWIDFPRGPQRLPSGKFIPGNNNSYDKCRRRFDL

SEQ ID NO: 6432 - protein, 641 aa, Listeria monocytogenes str. 1/2a F6854
MKFNSMFSPIDIGPMKVPNRFVVSPMCNNYANTDGTLSDTSLAYYKERALGGFGLITFEATVVDVRAKGGANKACLYSDHQIASFKRVIDVCHDAGAKISVQLQHAGPEGNSKVSGYPLRAASAIASAAGRNTPEAISREELYELIELYGEAALRAKKAGADAVEVHCAHGYLVSSFLSARTNKRVDEFGGCFENRMRLPRLIIESIRKRVGHSIAILCRINSTDGVDGGLSVQDSATVAAYLEDCGLDGLHVSRSVHIRDEYMWAPTVLHAGFSSDLVTQIKRAVSIPVITVGRFTEPHYAELMVREGRADLVAFGRQSLADPETPNKAAAGKLDELLPCIACLQGCVANMYAGKPITCLVNPLLGRESEAYLPKTPSKKVVVIGGGVGGLYAGWMAGSRGHDVTVYEASDMIGGQMRLAAYPPGKGDLTNMVRSYIKKCEQFDVEIKTNTPVTPELIQEVAPDAVIIATGATPLVLPIPGIEDAGLIHAVDLLDGKEKCGQKVLVVGGGMVGSETAAFLGEAGHDVTVVELRDEVGADVISEHRKFLMRDFDEYKIKSVTNAKVTSFFEDGVTYSLADNKEHRIDGFDSVVLAMGSRAYNPLEETIKKIVPETYVIGDAIRARRALDATKEALDAVLQL

SEQ ID NO: 6433 - protein, 157 aa, Chlamydomonas reinhardtii
MALSNYVFGNSAADPFFTEMDRAVNRMINNALGVAPTSAGKAGHTHAPMDIIESPTAFELHADAPGMGPDDVKVELQEGVLMVTGERKLSHTTKEAGGKVWRSERTAYSFSRAFSLPENANPDGITAAMDKGVLVVTVPKREPPAKPEPKRIAVTGA

SEQ ID NO: 6434 - protein, 348 aa, Solanum tuberosum
ADFGLGNIMRDGHFLKTSCGSPNYAAPEVVSGKLYAGPEVDVWSCGVILYALLCGTLPFDDENIPNLFKKIKSGVYTLPSHLSPLARDLIPRMLIVDPMKRISVPDIRQHQWFKIHLPRYLAVPPPVARQHLKKLDEEILQQVSRMGLDRDQLLDSLQKRIQDDATVAYYLLYDNRSMASSGYLGDEFQESVDCYSPGLFPNLDLQLSTGNGVSEESLRRPFRKEKMWLVGLQSPANPKEIMNQVLGTLLELNVRWKKIGHYNMKCLWCHDLHLHSMANNHMNDDDHFISNATAISTHLQPQPTVKFEMQLYKTEDEKYLLDLQRISGPQFLFLDFCAGFIRQLEGPQ

SEQ ID NO: 6435 - protein, 208 aa, Glycine max
MEAETSNGGGIGGLYVKVMTDDQMELLRQQISVYATICEQLVEMHKAVTTQQDLAGLRLGNLYCDPLMACSGHKITARQRWTPTPLQLQILERIFDEGNGTPSKQKIKDITIELGQHGQISETNVYNWFQNRRARSKRKQLTPAPNVVEPEVESPKEKKTRAEGFQVQPYENSSPHRIKDMYIQSPDIGFDQLLGKIEVASCYSSYFL

SEQ ID NO: 6436 - protein, 247 aa, Gerbera hybrid cultivar
MGRGRVELKRIENKINRQVTFAKRRNGLLKKAYELSVLCDAEVALIIFSNRGKLFEFCSTSNMLKMLERYQNCTYGSMEVDRSTPNAEQSSYKEYMKLKAKYESLQQYQRQLFGEDLGPLSLKELEQLERQLDSTLRQIRSIRTQSMLDRLSELQVKERMWVEANKALQNKLEEVYAENQAGPSWAAGEHHSSYGQEHQHQHQSQGFFQPLDCNSNLQIGYNTVDSSHITASTNGQNLNGLIPGWML

SEQ ID NO: 6437 - protein, 496 aa, Staphylococcus aureus subsp. aureus MRSA252
MDDKQHTTSSDDERAENATSNQDQQTNSSKRVHLKRWQFISILIGTIIITAVITVVAYIFINQKISGLNKTDQANLNKIENVYKILNSDYYKKQNSDKLSKAAIDGMVKELKDPYSEYLTKEQTKSFNEGVSGDFVGIGAEMQKKNDQIMVTSPMKGSPAERAGIRPKDVITKVNGKSIKGKALDEVVKDVRGKENTEVTLTVQRGSEEKDVKIKREKIHVKSVEYKKKGKVGVITINKFQNDTSGELKDAVLKAHKDGLKKIVLDLRNNPGGLLDEAVKMANIFIDKGKTVVKLEKGKDTEAIQTSNDALKEAKDMDISILVNEGSASASEVFTGALKDYNKAKVYGSKTFGKGVVQTTREFKDGSLLKYTEMKWLTPDGHYIHGKGIKPDVTIDTPKYQSLNVIPNTKTFKVGDDDKNIKTIKIGLSALGYKVDNESTQFDQALENLVKAFQQANKLEVTGEFNKETNNKFTELLVEKANKHDDVLDKLINILK

SEQ ID NO: 6438 - protein, 247 aa, Gerbera hybrid cultivar
MGRGRVELKRIENKINRQVTFSKRRNGLLKKAYELSVLCDAEVGLIIFSSRDKLYEFGSVGVMKTLERYQRCCFNPQDNNNERETQSWYQEVSKLKAKFESLQRTQRHLLGEDLGPLSVKELHNLEKQLEGALTQARQRKTQIMVEQMEELRRKERELGDMNKHLKIKVSHELSTFDAEGQGYRAQLPCPWNSGTNNTFTMHPSQSNPMDCQQEPILQIGYNQFMHGEGSSVQRNMVGENGIHGWVL

SEQ ID NO: 6439 - protein, 562 aa, Sinorhizobium meliloti
MPPPLPERRHLICACVGTYCGCGSNPPSGSSPFVPASFFVPAEGTAEPRCGGVSSPRSRAGFSPRIRALISSPVSVSYSSKPSARATNSLTAGPRGGIMLQDYQLIEKLAHQNRERIPERVVHAKGWGAFGSLKITGDISQYTRAKCLQPGAETPMLARFSTVAGEQGAADHERDVRGFALKFYTDEGNWDLVGNNTPVFFIRDPYKFPDFIHTQKRHPKTNLRSATAMWDYWSLSPESLHQVTILMSDRGLPQTPMHMNGYGSHTYSFWNDAGERYWVKFHFKTQQGHKFFTNEEGEAVIGKTREGYQESLFYAIENGEFPRWTVQVQIMPELDVEKTPYNPFDLTKVWPHADYPPVEIGVLELNRNPENYFAEIENAAFSPSNIVPGIGFSPDKVLQARIFSYADAHRYRLGTHYEHIPVNQPRCPVHHYHRDGQMNTYGGIRTGNPDAYYEPNSFNGPAEQPLAKEPPLRIDGDMSRYDHRVGNDDYVQVRALFGLFDEGQKSRLFSNIAAAMGGVPGEIIERQLIHFARVHPEYEAGVRQALKTAHGYEADTISTAAE

SEQ ID NO: 6440 - protein, 146 aa, Medicago sativa
MASDSFTDKNAVFRKLKTKSENKSCFDCNAKNPTWASVTYGIFLCIDCSAVHRSLGVHISFVRSTNLDSWSPEQLKMMSFGGNSRAQVFFRQHGWNGDGKVEAKYTSRAAELYKQLLSKEVAKSMSEEAALSAPPAASSQSAQGAN

SEQ ID NO: 6441 - protein, 357 aa, Candida glabrata CBS138
MGKKIVFNISSDFQLKSLLGEGAYGVVCSAVHKPTGEIVAIKKIVPFDKPLFALRTLREIKILRRFQHENIISIFDIQKPESFEKFNEVYIIQELMQTDLHRVIATQTLTDDHIQYFIYQTLRAIKTLHGSNVIHRDLKPSNILINSNCDLKVCDFGLARIIDSGENGDNEVDKIGMTEYVATRWYRAPEVMLTNAKYSRAMDIWSCGCILGELFLKRPLFPGKDYRHQLLLIFGLIGTPDSSDKSMECIESRRARQYIASLQKYPPVRPLQKAFPGVNPVGVDLLSRMLVFDPRERISADDALAHPYLSTYHVPEDEPAGEPIPPDFFQFDQYKEVLTTKDLKKLLWNEIFHEQAT

SEQ ID NO: 6442 - protein, 547 aa, Myxococcus xanthus
MAAKEIFFHQSAREAILRGVRTLSDAVAVTLGPKGRNVVIEKSFGSPTITKDGVTVAKEIDLENKFENMGAQMVKEVASKTSDKAGDGTTTATVLARAIYEEGLKLVAAGHSPMDLKRGIDKAVEVVVGELKSLSKPTADKKAITQVGTISANGDETIGAIIADAMEKVGKEGVITVEEAKGLETTLDVVEGMQFDRGYVSPYFVTNRERMEAVLEDPYILISEKKVSSMQDMIPLLEQVARSGKPLIIIADDIEGEALATLVVNKIRGVLNVCAVKAPGFGDRRKEMLQDIAVLTGGTVVSEDLGHKFETLTLTDLGRAKRVTVDKDNTTVVDGVGTKAAIEGRIKLIRTQIDSVTSDYDREKLQERLAKLVGGVAVINVGAATETEMKEKKARVEDALHATRAAVEEGIVPGGGVAYLRALPALEKLKPGGEQDFGVAIIRRALQEPLRKIASNAGVEGAVVINKVREGTGAFGYNARTEVYEDLEKAGVIDPTKVERTALQNAASVASLLLTTEAMVAERPKGKAKGGGAGAGMPDYGGDDMDY

SEQ ID NO: 6443 - protein, 398 aa, Kluyveromyces lactis NRRL Y-1140
MSFMNFEPKPLADTDIFKPIKIGNTELKHRVVMPALTRMRALHPGNVPNPDWAVEYYRQRSQYPGTMIITEGAFPSAQSGGYDNAPGVWSEEQLAQWRKIFKAIHDNKSFVWVQLWVLGRQAFADNLARDGLRYDSASDEVYMGEDEKERAIRSNNPQHGITKDEIKQYIRDYVDAAKKCIDAGADGVEIHSANGYLLNQFLDPISNKRTDEYGGSIENRARFVLEVVDAVVDAVGAERTSIRFSPYGVFGTMSGGSDPVLVAQFAYVLAELEKRAKAGKRLAYVDLVEPRVTSPFQPEFEGWYKGGTNEFVYSVWKGNVLRVGNYALDPDAAITDSKNPNTLIGYGRAFIANPDLVERLEKGLPLNQYDRPSFYKMSAEGYIDYPTYEEAVAKGYKK

SEQ ID NO: 6444 - protein, 143 aa, Manihot esculenta
VYREWAPAAQEAQVIGDFNGWIGSNHRMEKNEFGVWSINIPDSGGNPAIHHNSRVKFRFKHGDGVWVDRIPAWIRYATVDPTNLQPYDGVYWDPPPPERYQFNYPRPPKPQAPRIYEAHVGMSSSEPRINTYREFADDVLRRI

SEQ ID NO: 6445 - protein, 711 aa, Bacillus halodurans C-125
MDKDQQGTESSENKKNEQLEPFKVDHKNTKLTTNQGVRVSDTDDSLKAGDRGPTLMEDFHFREKMTHFDHERIPERVVHARGFGAHGYFQVYEPMTEYTKASFLQDPNVKTPVFVRFSTVVGSRGSADTVRDVRGFATKFYTEDGNYDLVANNIPIFFIQDAIKFPDVVHALKPEPHNEIPQASAAHDTFWDFVVSNTETAHMIMWLLSDRAIPRSFRMMEGFGVNTFRFVNEQGKARFVKFHWKPKLGVHSLVWDEAQKLAGKDPDFHRRDLWEAINMGEYPEYELGVQMIEEEDEFSFDFDILDPTKFWPEEMVPVKLIGKMTLNRNQDNFFAETEQVAFHAGNVVPGIDFSNDPLLQGRLFSYLDTQLLRLSGPNFHEIPINRPIAPVNNNQRDGFHRMTIDKGAVSYSPNTLRNNSPEPASDQEHGYVHYMEKVEGQKIRRRSESFNDHFSQATLFWNSLSTAEKQHLIKAFHFEVGSVKDKNLKQRVVEMFNQVDGKLAAEIAKGIGVNPPTTPGGTGVTASSPAVSQENTIKLARTRKVAVLIDHGFAFDEVSQVVTALQSAGLGVDLVSKQLGMISSAEGEQLEANKSFATTGAIMYDALYIGGGAQSISSLNLYSESKTFVDEAFKHAKTIGATNEGIELLIAAQVQGITFAGPDSNDHVVNDLGIITIQTDKDFKAFTDEMIHAIAQHRHWMREFKDGKLSG

SEQ ID NO: 6446 - protein, 548 aa, Buchnera sp. 150
MAAKDVKFGNEARIKMLRGVNVLADAVKVTLGPKGRNVVLDKSFGAPSITKDGVSVAREIELEDKFENMGAQMVKEVASKANDAAGDGTTTATLLAQSIVNEGLKAVAAGMNPMDLKRGIDKAVISAVEELKNLSVPCSDSKAITQVGTISANADEKVGALIAEAMEKVGNDGVITVEEGTGLQNELEVVKGMQFDRGYLSPYFINKPETGVVELENPYILMADKKISNVREMLPILESVAKSGKPLLIISEDLEGEALATLVVNSMRGIVKVAAVKAPGFGDRRKAMLQDISVLTGGSVISEELAMDLEKSTLEDLGQAKRVVINKDTTTIIGGVGEKQAIQSRISQIRQEIQEATSDYDKEKLNERLAKLSGGVAVLKVGAATEVEMKEKKARVEDALHATRAAVEEGVVAGGGVALVRVAGKISNLRGHNEDQNVGIRVALRAMEAPLRQIVSNSGEEPSVVTNNVKDGKGNYGYNAATDEYGDMIDFGILDPTKVTRSALQYAASVAGLMITTECMVTDLPKEDKTSDASSSPAGGMGGMGGMM

SEQ ID NO: 6447 - protein, 431 aa, Thermus thermophilus HB27
MTENAEKFLWGVATSAYQIEGATQEDGRGPSIWDAFAQRPGAIRDGSTGEPACDHYRRYEEDIALMQSLGVRAYRFSVAWPRILPEGRGRINPKGLAFYDRLVDRLLASGITPFLTLYHWDLPLALEERGGWRSRETAFAFAEYAEAVARALADRVPFFATLNEPWCSAFLGHWTGEHAPGLRNLEAALRAAHHLLLGHGLAVEALRAAGARRVGIVLNFAPAYGEDPEAVDVADRYHNRFFLDPILGKGYPESPFRDPPPVPILSRDLELVARPLDFLGVNYYAPVRVAPGTGTLPVRYLPPEGPATAMGWEVYPEGLHHLLKRLGREVPWPLYVTENGAAYPDLWTGEAVVEDPERVAYLEAHVEAALRAREEGVDLRGYFVWSLMDNFEWAFGYTRRFGLYYVDFPSQRRIPKRSALWYRERIARAQT

SEQ ID NO: 6448 - protein, 537 aa, Buchnera sp. 168
ARVKMLRGVNVLADAVKVTLGPKGRNVVLDKSFGAPSITKDGVSVAREIELEDKFENMGAQMVKEVASKANDAAGDGTTTATLLAQSIVNEGLKAVAAGMNPMDLKRGIDKAVISAVEELKNLSVPCSDSKAITQVGTISANADEKVGALIAEAMEKVGNDGVITVEEGTVLKNELEVVKGMQFDRGYLSPYFINKPETGVVELENPYILMADKKISNVREMLPILESVAKSGKPLLIISEDLEGEALATLVVNSMRGIVKVAAVKAPGFGDRRKAMLQDISVLTGGSVISEELAMDLEKSTLEDLGQAKRVVINKDTTTIIGGVGEKQAIQSRISQIRQEIQEATSDYDKEKLNERLAKLSGGVAVLKVGAATEVEMKEKKARVEDALHATRAAVEEGVVAGGGVALVRVAGKISNLRGHNEDQNVGIRVALRAMEAPLRQIVSNSGEEPSVVTNNVKDGKGNYGYNAATDEYGDMIDFGILDPTKVTRSALQYAASVAGLMITTECMVTDLPKEDKTSDASSSPAGGMGGMGGMM

SEQ ID NO: 6449 - protein, 222 aa, Solanum macrocarpon
MVRQKIQIKKIDNLTARQVTFSKRRRGLFKKAQELSTLCDADIGLIVFSATGKLFEYSSSSMMQLIEKHKTQSERDNMNGSEQLKSSNLQSEKKTYAMLSRELVEKNRELRQLHGEELQGLGLDELMKLEKLVEGGISRVLKIKSDKFTREISSLKKKEAQLQEENSQLKHQSQARLNEEGQNAIEQGHSADSITNNRSLVSSHQDYDDSDTSLKLGLGFPY

SEQ ID NO: 6450 - protein, 537 aa, Buchnera sp.
ARVKMLRGVNVLADAVKVTLGPKGRNVVLDKSFGAPSITKDGVSVAREIELEDKFENMGAQMVKEVASKANDAAGDGTTTATLLAQSIVNEGLKAVAAGMNPMDLKRGIDKAVISAVEELKNLSVPCSDSKAITQVGTISANADEKVGALIAEAMEKVGNDGVITVEEGTVFKNELEVVKGMQFDRGYLSPYFINKPETGVVELENPYILMADKKISNVREMLPILESVAKSGKPLLIISEDLEGEALATLVVNSMRGIVKVAAVKAPGFGDRRKAMLQDISVLTGGSVISEELAMDLEKSTLEDLGQAKRVVINKDTTTIIGGVGEKQAIQSRISQIRQEIQEATSDYDKEKLNERLAKLSGGVAVLKVGAATEVEMKEKKARVEDALHATRAAVEEGVVAGGGVALVRVAGKISNLRGHNEDQNVGIRVALRAMEAPLRQIVSNSGEEPSVVTNNVKDGKGNYGYNAATDEYGDMIDFGILDPTKVTRSALQYAASVAGLMITTECMVTDLPKEDKTSDASSSPAGGMGGMGGMM

SEQ ID NO: 6451 - protein, 252 aa, Gentiana triflora
MDSQNQEIESSNSRKSGRGKIEIKRIENKTNRQVTFCKRRSGLLKKAYELSVLCDAEVALIVFSSSGRLYEYANNSAKGTIERYKKACGDSTSAGSVSEANIQFYQQEANQLRKNIRDIQSSNRHILGEGLDELSFKQIKNLEGRVEKGIARVRSRKNELLAAEIELMKKREIELQNANLYLRAKQITENDQQRVQAEQQQMNFMPASDYQTNNNNIASEPNYQEVHNFIPVNFLDHNQHYSSQDPTALQFV

SEQ ID NO: 6452 - protein, 459 aa, Helicobacter pylori J99
MVLLTMTKRLFKGLLAISLAVSLHGGEVKEKKPVKPVKEDPQELAAKRVEAFSRFSNVVTEIEKKYVDKISISEIMTKAIEGLLSNLDAHSAYLNEKKFKEFQAQTEGEFGGLGITVGMRDGVLTVIAPLEGTPAYKAGVKSGDSILKINNESTLSMSIDDAVNLMRGKPKTSIQITVVRKNEPKPLVFNIVRDIIKIPSVYVKKIKDTPYLYVRVNSFDKNVTKSVLDGLKANPNIKGVVLDLRGNPGGLLNQAVGLSNLFIKEGVLVSQRGKNKEENLEYKANGRAPYTNLPVVVLVNGGSASASEIVAGALQDHKRAIIIGEKTFGKGSVQVLLPVNKDEAIKITTARYYLPSGRTIQAKGITPDIVIYPGKVPENENKFSLKEADLKHHLEQELKKLDDKTPISKEADKDKKSEEEKEVTPKMINDDIQLKTAIDSLKTWSIVDEKMDEKVPKKK

SEQ ID NO: 6453 - protein, 536 aa, Buchnera sp. 389
ARVKMLRGVNVLADAVKVTLGPKGRNVVLDKSFGAPSITKDGVSVAREIELEDKFENMGAQMVKEVASKANDAAGDGTTTATLLAQSIVNEGLKAVAAGMNPMDLKRGIDKAVISAVEELKNLSVPCSDSKAITQVGTISANADEKVGALIAEAMEKVGYDGVITVEEGTGLQNELEVVKGMQFDRGYLSPYFINKPETGVVELENPYILMADKKISNVREMLPILESVAKSGKPLLIISEDLEGEALATLVVNSMRGIVKVAAVKAPGFGDRRKAMLQDISVLTGGSVISEELAMDLEKSTLEDLGQAKRVVINKDTTTIIGGVGEKQAIQSRISQIRQEIQEATSDYDKEKLNERLAKLSGGVAVLKVGAATEVEMKEKKARVEDALHATRAAVEEGVVAGGGVALVRVAGKISNLRGHNEDQNVGIRVALRAMEAPLRQIVSNSGEEPSVVTNNVKDGKGNYGYNAATDEYGDMIDFGILDPTKVTRSALQYAASVAGLMITTECMVTDLPKEDKTSDASSSPAGGMGGMGGM

SEQ ID NO: 6454 - protein, 1065 aa, Cryptococcus neoformans var. neoformans B-3501A
MSRVPSGSQQPQYTQQPLYHPSSVHSQSTPIQQTHQQYHPHTGQPMTFQGDAHAYSYDRQSQINTWQANPGAAGSMEYHSAVAGSSRGADPYQPYSQSHRSSPSQSVTASRTQPASAQQYTPWAPVQTSATTPSSRGGGVKLEDLMSSDSRAGGKNQPLSGIPLSVSASFDTRSQFSAGPQGASAEKEKDKERDKATQQQGPSEFIKKLYKMLEEEQAQYGNSRTKKGEKGKRGSVGWGANGTSFVVWDMNDFTTKILPQTFRHSNFSSFVRQLNKYGFSKIKHVDAGTGSIKENIWEFQHPNFQAGGKSDLESIKRKPVAPKKANNQEGDENSPRHIGLSNEDQTRMHLMEDRINMLEDALAKSRSEADEARMREMAMMGLVRDMIGHIAASESEAIGSPAATTGHSPRVLHLLKSLDNLARAYPPEMYHSNIARQPTTMPYTPAQPQSHQSFLNAAYNPAFSGNSVGGAAQAQASPHTDGTGSRGSFSGPSTGEIKPPASSSRLRAASNAGAAPSGSVNASVPLASQPTGNPPAGPVARAEDPAEDVIEIPNQMQDMYGGESVGIAPLFVETPAWLTEGTTVPLTMYRKQSDGQVLKAVYQAFAAGGKLPAGEGQDEDGNAIASGSSTSAAEIMAGSSQMGLQQSYGAGSSTSTGIPLPMEGSPSSESSSRKGKGKKSRGTSLKEQRESKLKPHWAQTPRILVVEDDIVYRTLSKKFLQKFGCETETVENAQGAVDKMNGTKYDLVLMDIFFGPNMDGRKATSLIRQFNNYTPIISMTSNAQPQDVDSYYQSGMNDILAKPFTKNHLFTILDKHLVHLRHAQLYERLIPLGVGVPPLSDQHVQEALAVSAANLQNTNGQLQLENGPTAETQNEQQDSNGELELGIRNPLAGSGWSDEAYQLVLAQFLQTGVMPDITTISAVSSSPNPNGIDGTIGTSIVFGESSGFSRKRSIEAISDDNWDGQAQTSASVQAQAQAQAQAQAQAQAQAQAQAQAQAQAQTQAQVQNTIMQGDQQQGMSLQMPMNVGMGMEVNMGNMPESGMMNQDISNGSDGREAKRARGMAG

SEQ ID NO: 6455 - protein, 279 aa, Staphylococcus epidermidis ATCC 12228
MTNDVQILNNGYPMPAVGLGVYKIADEQMEEVVRTALDAGYRAFDTAYFYGNEKALGSALKHSNVERDELFITSKLWNDYQGYDQTIEYFNKSLDNLGLDYLDLFLIHWPCENDQLYIESYKALEHLYEEGKIKAIGVCNFKIHHLEKLMKETKITPQVNQIELHPYFNQQDVQDFCDEHDIKVTAWMPLMRNKGLLDDPVITDIAHRYDKTPAQIVLRWHLAHNRIIIPKSQTPKRIKENFDIFDFNLELTDVAEIDSLNKNARQGKDPDDVSIGDLK

SEQ ID NO: 6456 - protein, 119 aa, Brassica napus
MFFTSRLLSLPRRNMVLSRTSIDSNDTVSSTFGSRYDLIALPTYHIGDSSILVDAAYHIIKYDLMRASNPRLNLVSFVTTCMESTCDKLIMDFINRSYVDMDQYPVITELNKRCLNMIT

SEQ ID NO: 6457 - protein, 249 aa, Gentiana triflora
MDYPPRQEFDSSSSRKSGRGKIEIKRIENATNQQVTFCKRRSGILKKAYELSVLCDAEVALIVFSTRGRLYEYASSSVRGTIERYKKACADTTNSGSISEANTQFYQQQSNKLRKDIKEIQKANRNMLGEGVESIQPKDLKKIEGNLERAIGKIRTRKNELLFAEIELMQKREMELQNANLYLRAKIAENERATTDPHMNLMPASASEYHHHQSMASHSFDDVRSFIPVNLLEPNQHYSRQDPTALQLV

SEQ ID NO: 6458 - protein, 311 aa, Magnaporthe grisea 70-15
MTDITSYKFNHTMLKVKDPKASIAFYKHLGMDLLSEYKVPDHKLELYFVAGDSAISASHGTHQSDREGVLELSYSYGIENTSGGDQEPRGLRPVCLSVDNVKTTCKALCDAGYRINCNSEEETAHVLDPDGFWIKLIAHRSLGRIDDTATADCKGSKVHHTMIGVRDKNVSRKFYEQVFGMTWKYEQHSTQAGRDRFLLGCGKPHTSGPSVDISKPDVKCEGLLELLCSEDTKNKDGMEHHNGNLEPDDPGHICISVDDVHAACERLESLGVQWQKRLMDGPFRVAFVHDPDGNLIEIIQNEMYKPVKHEA

SEQ ID NO: 6459 - protein, 579 aa, Phaseolus vulgaris
MCGILAVLGCSDSSQAKRVRVLELSRRLKHRGPDWSGLHQYGDCYLAHQRLAIVDPASGDQPLFNEDKTIAVTVNGEIYNHEELRKQLPNHTFRTGSDCDVIAHLYEEHGENFVDMLDGIFSFVLLDTRDNSFIVARDAIGVTSLYIGWGLDGSVWISSELKGLNGDCEHFESFPPGHLYSSKEREFRRWYNPPWFSEAIPSAPYDPLALRHAFEKAVIKRLMTDVPFGVLLSGGLDSSLVAAVTARYLEGTNAAKHWGTKLHSFCVGLEGAPDLKAAREVADYIGTVHHEFHYSVQDGIDAIEDVIYHIETYDVTTIRASIPMFLMSRKIKSLGVKWDICGEGSDEIYGGYLYFHKAPNKEEFHQETCRKIKALHKYDCLRANKSTFAWGLEARVPFLDKEFIEVAMNVNPEYKMIKKEEGRIEKWVLRRAFDDGEHPYLPKHILYRQKEQFSDGVGYGWIDGLKGHAEKHVTDRMMLNAANIFPFNTPTTKEAYYYRMIFERFFPQDSARLSVPGGPSVACSTAKAVEWDAAWSNNLDPSGRAALGVHASAYGNQVKAVEPEKTIPKMEVSPLGVAI

SEQ ID NO: 6460 - protein, 620 aa, Nostoc sp. PCC 7120
MTFFTTRYLRGGYCMKIGAHYLGNGECEFTVWSPTLNSVAVQILKPEEKLIPLKAQGEGYWQIKVNDVYPGTLYRYQLNDQEAFADPASQYQPEGVHGASQVVDHKFEWTDKTWSGISLESMIFYELHVGTFTPEGTFTTIIPRLPELRELGINAIELMPIAQFPGDDHIEPDLAYRNWGYDGVYPFAVQNSYGSPADLKNFVNACHENGIAVVLDVVYNHFGPEGNYMGQFAPYFTRTYKTPWGNAMNFDDAYSQGVRNYFIQNALYWLGEFHIDGLRLDAIQAIYDLGAKHFLWELAEAVHNFSQGGTWKRHLIAESDLNNPQIIRPVESGGYGLDAQWSDDFHHALHALLTGDRQGYYQDFGKCADLAKAYADTFVYDWRYAPHRKRFHGISCRDRPLSQFSVCIQNHDQIGNQMQGERLSERISFAGLKLAAGAVLLSPYLPLLFMGEEYGETAPFIYFVSHSDLDLIQAVRAGRKEEFEAFHYAEDPPDPESAETFLRCKLNWELRHQGQHKVLWDWYRQLIHLRKTHPALLNYDRDNIEATSDEDKQIVVVRRWCESREVILAMNFNTSPVSLVLTIEKSARKLLDSADSEGFETLSVGEEVVLQPTSLVLYEV

SEQ ID NO: 6461 - protein, 244 aa, Gentiana triflora
MGRGKVELKRIENKINRQVTFAKRRNGLLKKAYELSVLCDAEVALIIFSNRGKLYEFCSGSSTTETVERYQRYTYGLQDAGHPSDDPQNSYQEYVKLKARVEVLQGYHRNFLGEDLGSLSCKELEHLEHQVETSLKQVRSTKTSFMLDQVADLQRKEEMLAEENKALRGKLDERANQVPLRLSWEGRQQAPTGYNNVPAHTQGFFQPLGLNSTLQMGYNQGGAEGNYNVHAGNNINGFMPGFMN

SEQ ID NO: 6462 - protein, 548 aa, Buchnera aphidicola (Myzus persicae)
MAAKDVKFGNEARIKMLRGVNVLADAVKVTLGPKGRNVVLDKSFGAPSITKDGVSVAREIELEDKFENMGAQMVKEVASKANDAAGDGTTTATLLAQSIVNEGLKAVAAGKNPMDLKRGIDKAVISAVEELKNLSVPCSDSKAITQVGTISANADEKVGALIAEAMEKVGNDGVITVEEGTGLQNELEVVKGMQFDRGYLSPYFINKPETGIVELENPYILMADKKISNVREMLPILESVAKSGKPLLIISEDLEGEALATLVVNSMRGIVKVAAVKAPGFGDRRKAMLQDISILTGGSVISEELAMELEKSTLEDLGQAKRVVISKDTTTIIGGVGEKHTIQSRISHIRQEIQEATSDYDKEKLNERLAKLSGGVAVLKVGAATEVEMKEKKARVEDALHATRAAVEEGVVAGGGVALVRVAGKTSNLRGQNEDQNVGIRVALRAMEAPLRQIVSNSGEEPSVVTNNVKDGKGNYGYNAATDEYGDMIDFGILDPTKVTRSALQYAASVAGLMITTECMVTDLPKEDKSSDSNSSPAGGMGGMGGMM

SEQ ID NO: 6463 - protein, 453 aa, Arabidopsis thaliana
MSGSRRKATPASRTRVGNYEMGRTLGEGSFAKVKYAKNTVTGDQAAIKILDREKVFRHKMVEQLKREISTMKLIKHPNVVEIIEVMASKTKIYIVLELVNGGELFDKIAQQGRLKEDEARRYFQQLINAVDYCHSRGVYHRDLKPENLILDANGVLKVSDFGLSAFSRQVREDGLLHTACGTPNYVAPEVLSDKGYDGAAADVWSCGVILFVLMAGYLPFDEPNLMTLYKRVRICKAEFSCPPWFSQGAKRVIKRILEPNPITRISIAELLEDEWFKKGYKPPSFDQDDEDITIDDVDAAFSNSKECLVTEKKEKPVSMNAFELISSSSEFSLENLFEKQAQLVKKETRFTSQRSASEIMSKMEETAKPLGFNVRKDNYKIKMKGDKSGRKGQLSVATEVFEVAPSLHVVELRKTGGDTLEFHKVCDSFYKNFSSGLKDVVWNTDAAAEEQKQ

SEQ ID NO: 6464 - protein, 922 aa, Pseudomonas fluorescens PfO-1
MQEKGVLKKLGIKGRVLLLTLLPTSLMALVLGGYFTWTQQSDLQTQLMQRGEMIAEQLAPLVAPAMGHGDAELLERIATQSLEQPDVRAVTFLAPDRSPLAHAGPTMLNQAPSGDSAHLLRRSGNDATRYLLPVFGKHRNLAGELIPQESDRLLGWVELELSHNGMLLRGYRSLFASLLLIGAGLAGAALLALRMGRTINRPLSQIKQAVAQLKDGHLETRLPPLGSQELDELASGINRMAGTLQNAREELQHSVDQATEDVRQNLETIEIQNIELDLARKEALEASRIKSEFLANMSHEIRTPLNGILGFTHLLQKSELTPRQLDYLGTIEKSADSLLGIINEILDFSKIEAGKLVLDHIPFNLRDLLQDTLTILAPAAHAKQLELVSLVYRDTPLSLVGDPLRLKQILTNLVSNAIKFTREGTIVARAMLEEENDDSVQLRISIQDTGIGLSNQDVRALFQAFSQADNSLSRQPGGTGLGLVISKRLIEQMGGEIGVDSTPGEGSEFWISLNLPKTRDDAEDLPAAPLLGRRVAVLENHELARQALQHQLEDCGLDVTPFNTLESLTNGVTGAHQTDQAIDLAVLGITSNDMPPERLNQHIWDLEHLGCRVLVLCPTTELTLYHLSVPNPHSQLQSKPACTRKLRRALSDMVNPRQSRSEPGEPLSSRAPKVLCVDDNPANLLLVQTLLEDMGAKVLAVESGYAAVKAVQSESFDLVLMDVQMPGMDGRQSTETIRQWESERHCTPLPIVALTAHAMANEKRALLQSGMDDYLTKPISERQLAQVVLKWTGLALRNQAPDRGGESLLGNQELPILDHEEGLRLAAGKADLAADMLAMLLASLEADREAIRTARDHQDQNALLERVHRLHGATRYCGVPQLRAACQRSETLLKQDDPKASAALDELERAINRLAAQAKISA

SEQ ID NO: 6465 - protein, 625 aa, Musa acuminata
MDGCDCIEPQWPADELLIKYQYISDFFIALAYFSIPLELIYFVKKSSFFPYRWVLIQFGAFIVLCGATHLINLWTFALHSRTLAIVMTVAKVSTAVVSCATALMLVHIIPDLLSVKTRELFLKNKAEELDREMGLIRTQEETEGNVRMLTHEIRSTLDRDTVLKTTLVELGRTLDLKDCMLWMPSHSGTSLQLSHTLHHQIPTGSAVPINLPVVNQIFSSNHAMIIPHTCRLARIWPLSVRHVPPEVAAVRVPLLHLSNFQISDWSELSTKSYAVMVLILPSDSGRKWHVHELELVEVVADQVAVALSHAAILAESMRARDLLTEQNVALYLARQEAELAIRARNDFLAVMNHEMQTPLHATITLSSLLLETELSPEQRSMVETVLKSSSLLATLINDILDLSRLEDGRLELEIGDFNLHSVFREVMNFIKPIRAVKKLQVSLMLSPDLPLYAIGDEKRLMQIMLNVAANAVRFTKEGDISLTASVARTDYLREFRALDFYPVASDGHFYLRVTIKDTGCGISHQDLPNLFTKFSQSQNVSSQGYSGNGLGLAICERYVSLMQGHIWVESDGIGKGCTATFVVRLRLCENPDGSQQKILPLPWKKQTQKFSSSRGMPTDPGGLFD

SEQ ID NO: 6466 - protein, 466 aa, Glycine max
  misc_feature (411)..(411): Xaa can be any naturally occurring amino acid
MTSRSGQGSSGGGSSRTRVGKYELGRTLGEGNFAKVKFARHVETRENVAIKILDKEKLLKHKMIAQIKREISTMKLIRHPNVIRMYEVMASKTKIYIVLEFVTGGELFDKIARSGRLKEDEARKYFQQLICAVDYCHSRGVFHRDLKPENLLLDANGVLKVSDFGLSALPQQVREDGLLHTTCGTPNYVAPEVINNKGYDGAKADLWSCGVILFVLMAGYLPFEETNLSALYKKIFKAEFTCPPWFSSSAKKLINKILDPNPATRITFAEVIENDWFKKGYKPPVFEQANVSLDDLDSIFSDSTDSQNLVVERREEGPMAPVAPVTMNAFELISKSQGLNLSSLFEKQMGLVKRETRFTSKCSADEIISKIEKAAGPLGFDVKKNNCKLKIQGEKTGRKGHLSVATECCFXILEVAPSLYMVELRKSEGDTLEFHKFYKNLATGLKDIVWKAEPIDEEKDGANPSK

SEQ ID NO: 6467 - protein, 684 aa, Botryotinia fuckeliana
MMEKGGDMAGPSANNSSDFVSIHTQHTCTFSRRDGANIEISSLTDVSFTGPKIIQVRKYLVRMLEDPTYESIVRWGEAGESFVVLENEKFTKQILPKHFKHSNFASFVRQLNKYDFHKVRQNNEDNTQSPYGQNAWEFKHPEFQANKKDSLDNIRRKAPAPRKVAQSNEETYPAHAQQQMDLLGNQLAATQQQLQGLSRSYQDLAQLNIMLLQQVVDAQKFIKNHEGVMHGLVGHLFSQDAQRRNGRAPGLSNGAGPNMLGRPTEDGHPSTPLLQARSLLGQLSAENFPSKELEQMSHDYHLRQDYSTPPNDPGGLVSMPPISESVTAPSAGYSMDKSELDNLVYPVGAIVGIDPIDQQHVNNIPYALPPQGLMPRDSMPPAELMPQPPRAPGPRKKGMVSIWGERKPRILLVEDDQVCARIGTKFLESFECGVDIARDGLEAVSKINLGAENHFDLILMDIIMPHLDGVSATVCIREIRANIPIIAMTSNIRTDDIEMYFRYGMNDVLPKPFTKEGMMKALEKHLAHFRKDAPSIGFSSPGPMSHPGGFVTPTQSQSHPPLGLNMGQLTATQSIVDDTASGKSPQTATSWQSPIQLPGGSPVVTSAPGSYMQPTNGMRDPSYSVTPTHPHSQSGFAPPLSGLGNQRPPHRRGISDISGASTPDGNSDQKRQRMYAPPGNYQQG

SEQ ID NO: 6468 - protein, 634 aa, Bipolaris oryzae
MPPKRKSNGIPHNVKSANKYTDASGNAPNKRSRIAKPLDKASTNSAPLIDAIVRNSKNGAPGDAVKKEEGNFDHSRPEERAGIVDRQYYPAEMSNERCAMYNANEIPRPIAILEKTLKDTKQRRDKIQSGNENGHGDAVMHWFKRDLRVRDNTGLSKAAELAKSKGIGLVAVWIMSPQDWEAHLVSPPKCDFELRSVQLLKQELEELDIPLYIETVHERKNIKKRLVEMALEWNVKSVFCNLEYEPDELRREERLVRMMLEKGINMDPQHDDCVVPPGSLKTGTGKQYAVYTPWYRAWIAYLHAHPHLLNERSMPEKNPTGFREKFTKLFDSRVPDLPDCKSLTAEEKERFHHLWPAGEAAAIDRLERFLTEKVIKYKDTRNFPALNSTGRISAHHAAGTLAARTSVRMARDINSVKKLDGGKEGIKGWIGEVAWRDFYRHVLVHWPYVCMNKPFKYEYTNIEWEYNDAHFEAWTQGRTGYPIVDAAMRCLKHTGYMHNRLRMITASFLAKHLLLDWRLGEQYFITHLIDGDFASNNGGWGFSASTGVDPQPYFRIFNPWTQSEKFDEQGEFIRLWVKELEDVQGAAIHNPYQAKGEAAKIAKKNGYPEPIVEHKFARERCLARYKAGIGRETA

SEQ ID NO: 6469 - protein, 283 aa, Listeria monocytogenes str. 4b H7858
MKTVKLNNGVEVPILGFGTYQITDAAEAEQAVKDAIETGYRHIDTAQSYMNEEAVGRGIVASGVDRKELFITTKIWVENVSYKGVMSSFDRSLKRLGLDYIDLLLIHQPFNDVYGAWIAMEELQASGKIRAIGVSNFSPDRVIDLAAFNEVTPQVNQIEVNPFQQQAANLAVLRKEGVAIEAWAPFAEGKNDIFNNPVLTKIGAKYGKSAAQVILRWLVEQDIIVLAKSVKPERMAQNLAIFDFELTEADKGEIASLDQGESQFFSHADPEMVKWMASRKLNV

SEQ ID NO: 6470 - protein, 286 aa, Listeria monocytogenes str. 1/2a F6854
MILPGNGTIPYIGLGVFQVTEQEFIAGAVEKAIEVGYRLFDTAAVYNNEAIVGQAIASSAVSREELFISSKVWNGDLGYDETLFAFERTLRNLKLDYLDLYLIHWPVAGKYRDSWRAMERLHDEKLIKSIGVANFKQHHLSDLLVAANEKPVLNQVETHPLLPQNDLRKYLVEQNIAHAAWSPLAKGILMQNPVITEIAKKHQASVDQVILQWHLNRNTIIFPKSITSSRIEENSRLSYFQLDASDMEKIDRLETGKRVGPDPDDLEYFLSSIERERAYLASENEE

SEQ ID NO: 6471 - protein, 495 aa, Zea mays
ITMDPTKFRPSSSHDTTVTTTNAGAPVWNDNEALTVGPRGPILLEDYHLIEKVAHFARERIPERVVHARGASAKGFFECTHDVTSLTCADFLRAPGVRTPVIVRFSTVIHERGSPETIRDPRGFAVKFCTREGNWDLLGNNFPVFFIRDGIKFPDVIHAFKPNPRSHVQEYWRVFDFLSHLPESLHTFFFLFDDVGVPSDYRHMEGFGVNTYTFVSAAGKAQYVKFHWKPTCGVRCILTHEEAALVGGRNHSHATQDLYDSIAAGSFPEWTLYVQVMDPDTEEQYDFDPLDDTKTWPEDLLPLRPVGRLVLDRNVDNFFNENEQLAFGPGLVVPGIYYSDDKMLQCRVFAYADTQRYRLGPNYLMLPVNAPRCAHHNNHYDGAMNFMHRDEEVDYYPSRHAPLRQAPPVPIPARPVVGKRQKETIQKPNDFKQPGERYRSWDANRQERFVRRFADSLGHPKVSQELRSIWIDLLSKCDASLGMKIATRLNMKPNM

SEQ ID NO: 6472 - protein, 396 aa, Bartonella koehlerae
LGQAIVQEGVKAVAAGMNPMDLKRGIDAAVDEVVANLFKKAKKIQTSAEIAQVGTISANGAAEIGKMIADAMEKVGKEGVITVEEAKTAETELEVVEGMQFDRGYLSPYFVTNAEKMVTDLDDPYILIHEKKLSNLQSLLPVLEAVVQSGKPLLIIAEDVEGEALATLVVNKLRGGLKIAAVKAPGFGDRRKAMLEDIAILTSGQVISEDIGIKLENVTLDMLGRAKKVNISKENTTIIDGAGQKSEISARVNQIKVQIEETTSDYDREKLQERLAKLAGGVAVIRVGGATEVEVKEKKDRVDDALNATRAAVEEGIVAGGGTALLRAANALTVKGSNPDQEAGINIVRRALQAPARQIATNAGEEAAIIVGKVLENNADTFGYNTATGEFGDLIA

SEQ ID NO: 6473 - protein, 279 aa, Bacillus cereus ATCC 14579
MKNLQSKAVLNNGVEMPWFGLGVFKVEEGPELVEAVKSAIKAGYRSIDTAAIYGNEKAVGEGIRAGIEATGIAREELFITSKVWNADQGYETTIAAYEESLKKLGLDYLDLYLVHWPSEGKYKDTWRALETLYKEKRVRAIGVSNFQIHHLQDVMKDAEIKPMINQVEYHPRLTQKELQAFCKEQGIQMEAWSPLMQGQLLDNETLQEIAEKHGKTTAQVILRWDLQNGVITIPKSTKEHRIIANADVFNFELTKEDMEKIDALNQNHRVGPDPDNFDF

SEQ ID NO: 6474 - protein, 302 aa, Zea mays
  misc_feature (292)..(292): Xaa can be any naturally occurring amino acid
MSNAASTTPLLAHYKMGKFDLSHRVVLAPLTRERSFGNVPQPHAILYYQQRATKGGLLIAEATGVSDTAQGYKDTPGIWTKKQVEAWKPIVDGVHAKGGIFFCQVWHVGRVSNHTFQPNGQAPISSTDKPIKPATRADGIGLAKVSTPRRLTTDEIPLVIDDFRVAARNAIEAGFDGVEIHGAHGYLIDQFLKDQVNDRTDKYGGSLENRCRFALEVVQAVADEVGADKIGIRLSPFASYSDASDSNPEALGLYMAQALNKLEILYCHMVEPRMVNIGEKLETPHSLRAMRXAFRGTFIVAG

SEQ ID NO: 6475 - protein, 164 aa, Triticum aestivum
TGATTIMRSDLVYDCGQSLNPAVDLGQVEGAFVQGVGFFTNEDYATNADGLVVHDGTWTYKIPTVDTIPKQFNVELISSARENKRVLSSKASGEPPLLLAASVHCAMREAIRAARTDFSVNSPLTFQMDVPATMADVKELCGLDVVERHLQSLSSAAEVPTPVA

SEQ ID NO: 6476 - protein, 118 aa, Candida glabrata CBS138
MGNTTEDDIDKQIELREQDRWLPINNVARLMKNTLPETAKVSKSAKECMQECVSEFISFVTSEASDRCAQDRRKTINGEDILISLHALGFENYAEVLKIYLAKYRQQQALKNNYEEDS

SEQ ID NO: 6477 - protein, 222 aa, Physalis peruviana
MVRQKIQIKKIDNLTARQVTFSKRRRGLFKKAQELSTLCDADIGLIVFSATGKLFEYSSSSMMQLIEKHKMQSERDNMDSVEQLQSSNLQSEKKTHAMLSREFVDKNRELRQLHGEELQGLGLEELMKLEKLVEGGISRVLKIKGDKYMREISSLKKKEAQLQEENSQLIHQSQARLNEGGQNVIEQGHSADSIANNLSLVNSHQDYDDSDTSLKLGLAYPY

SEQ ID NO: 6478 - protein, 443 aa, Zea mays
MEDAMAADGKSVLQGRYELGRVLGHGNFGRVHAARDLRTGRSVAVKVVAKDKLERAGMAEQIKREIAVMKMVSHPNIVELHEVMATRSKIYLALELVRGGELFSRIARAGRVREDVARCYFRQLVAAVDFCHGRGVFHRDLKLENLLLDEVGNLKVADFGLSALAGHARSDGLLHTACGTPSYVAPEVLGGKGYDGAKADLWSCGVILYVLLVGSLPFHEDNLMVMYRKMQRGEFLCPPWVSADARKLIGELLDPDPSTRITVARLVETPWYRKPLPVLPPLNLKEPTPDARRATSDKEEPEVLNAFHLISFSEGFDLSPLFDQGRGGGVGRSSAGGIRFVTREAASSVVSRLESLVTGRGANMRVTKSGSRGVRLEAVSRGRSGARLAVAAEIFSVAPSVLLVDVKKDGGDTMEYRSFCSEELRPALKDIVWASSQDTPGAA

SEQ ID NO: 6479 - protein, 207 aa, Fusobacterium nucleatum subsp. nucleatum ATCC 25586
MRVKCFHLGAYGTNCFLAYDENNIAYFFDCGGRNLEKVYEFISEHNLDLKYIVLTHGHGDHIEGLNDLASHYPEAKVYIGEEDKDFLYNSELSLSDAIFGEFFKFKGEIHTVKESDMVGDFKVIDTPGHTIGSKSFYYEKDKILISGDTLFRRSYGRYDLPTGSLEMLCHSLKKLSKLPDETVVYNGHTDNTTIGEERRFLERVGIL

SEQ ID NO: 6480 - protein, 222 aa, Physalis peruviana
MVRQKIQIKKIDNLTARQVTFSKRRRGLFKKAQELSTLCDADIGLIVFSATGKLFEYSSSSMMQLIEKHKMQSERANMDSLEQLQSSNLQSEKKTHAMLSREFVDKNRELRQLHGEELQGLGLEELMKLEKLVEGGISRVLKIKGDKYMREISSLKKKEAQLQEENSQLIQQSQARLNEEGQNVIEQGHSADSIANNLSLVNSHQDYNDSDTSLKLGLAYPY

SEQ ID NO: 6481 - protein, 246 aa, Glycine max
  misc_feature (19)..(19): Xaa can be any naturally occurring amino acid
MEFPTEAILSEGSISQKKXGRGKLEIRGIENTTNRQVTFCKRRNGLLKKAYELSVLCDAEVALVVFSSRGRLYEYANNSVRGTIERYKKACAASTNAESVSEANTQFYQQEASKLKRQIRDIQNLNRHILGEGLSSLSLKELKNLESRLEKGLSRVRSRKHETLFADIEFMQKREIELQNHNNFLRAKIAENERAQQRQQDMIPGTECESTIPNSQSYDRNFFPVNLIDSNNNQYSRQDQTALQLV

SEQ ID NO: 6482 - protein, 731 aa, Mycobacterium tuberculosis H37Rv
MSRSEKLTGEHLAPEPAEMARLVAGTHHNPHGILGAHEYDDHTVIRAFRPHAVEVVALVGKDRFSLQHLDSGLFAVALPFVDLIDYRLQVTYEGCEPHTVADAYRFLPTLGEVDLHLFAEGRHERLWEVLGAHPRSFTTADGVVSGVSFAVWAPNAKGVSLIGEFNGWNGHEAPMRVLGPSGVWELFWPDFPCDGLYKFRVHGADGVVTDRADPFAFGTEVPPQTASRVTSSDYTWGDDDWMAGRALRNPVNEAMSTYEVHLGSWRPGLSYRQLARELTDYIVDQGFTHVELLPVAEHPFAGSWGYQVTSYYAPTSRFGTPDDFRALVDALHQAGIGVIVDWVPAHFPKDAWALGRFDGTPLYEHSDPKRGEQLDWGTYVFDFGRPEVRNFLVANALYWLQEFHIDGLRVDAVASMLYLDYSRPEGGWTPNVHGGRENLEAVQFLQEMNATAHKVAPGIVTIAEESTPWSGVTRPTNIGGLGFSMKWNMGWMHDTLDYVSRDPVYRSYHHHEMTFSMLYAFSENYVLPLSHDEVVHGKGTLWGRMPGNNHVKAAGLRSLLAYQWAHPGKQLLFMGQEFGQRAEWSEQRGLDWFQLDENGFSNGIQRLVRDINDIYRCHPALWSLDTTPEGYSWIDANDSANNVLSFMRYGSDGSVLACVFNFAGAEHRDYRLGLPRAGRWREVLNTDATIYHGSGIGNLGGVDATDDPWHGRPASAVLVLPPTSALWLTPA

SEQ ID NO: 6483 - protein, 387 aa, Bacillus anthracis str. A2012
  misc_feature (343)..(343): Xaa can be any naturally occurring amino acid
MGENHDKQRQSLLGKDFNENGERNEQAILHSQTVGSRGPVLEQDSVLHEALQEFIHEKILERPVHVKGFGAFGYFQTIYPMSEHTKLSFLQHSNEKVPVMVRFSLAVSTKGTPDTARNVRGFSTKFYTKEGIFDLLCNHIPVFSVRDPMRFPETIQALSPSPKNNLLDPNRFWSFVARAPESIHFVVHLYSDNGTAKSFRRIPGHSVNTYVWRNAEGNRKYVKYHWYPFEGVQSITNEEANKLAAENPDYSGKDLYDAIANGKPVEYGLYVQLMDPKDEAHLSYDPLDDTKAWDEKAYPLIPVGKMVLNKNPENYMEQVEKVAFSPSNLLNGAELSDDKMLQXRANIYSDSQRRRIGPEFRKLAINQQQDWTPANQITSGDGRYVER

SEQ ID NO: 6484 - protein, 239 aa, Solanum macrocarpon
MAREKIKIKKIDNITARQVTFSKRRRGLFKKAEELSVLCDADVALIIFSATGKLFDFASTSMKDILGKYKLQSASLEKVEQPSLDLQLENSLNMRLNKEIADKTRELRQMRGEELEGLSLEELQQIEKKLEAGFNRVLEIKSTRIMGEITNLQRKGAELMEENKQLKQKMEIMKKGKLPLVTEMVMEDGQSSESIITSNNVCSSNSGPPPDQDDSSKIGGNAVEDDCSITSLKLGLPFS

SEQ ID NO: 6485 - protein, 333 aa, Alkalilimnicola ehrlichei MLHE-1
MDQSRMTLGRFLAQQCPQDEKGKALALLLRQVGDSCRRIADAVAGGALREMTGAADNVNVQGEEQKKLDVFANDVLIEGCNWGGTVAGMASEEEDDIYTLPEGEPRGPWLLLFDPLDGSSNIDVNVSVGTIFSVLPAPDTGRDPVNEDLLQPGHRQVAAGYAVYGPSTVLVLTLGDGVYAFTLDRGQGEWFLTSSKMKVPEQTAEFAINCSYQRIWPAPIKRYIEECLDGEEGPRGKRFNMRWIASMVADLHRIFTRGGVFLYPADEKRPNGRLRVLYEINPMSMLMEQAGGEAFTGKERALDLQPEALHQRSGLMLGSREEVEVLRRYYAEQ

SEQ ID NO: 6486 - protein, 420 aa, Thermus thermophilus HB27
MGPLLVWHRGDLRLHDHPALLEALARGPVVGLVVLDPNNLKTTPRRRAWFLENVRALREAYRARGGALWVLEGLPWEKVPEAARRLKAKAVYALTSYTPYGRYRDAKVQEALPVPLHLLPAPHLLPPDLPRAYRVYTPFARRFLGVEAPLPAPEALPKGPEEGEIPREDPGLPLPEPGEEAALAGLRAFLEAKLPRYAEERDRLDGEGGSRLSPYFALGVLSPRLAAWEAERRGGEGARKWVAELLWRDFSYHLLYHFPWMAERPLDPRFQALPWQEDEALFRAWYEGRTGVPLVDAAMRELHATGFLSNRARMNAAQFAVKHLLLPWKRCEEAFRHLLLDGDRAVNLQGWQWAGGLGVDAAPYFRVFNPVLQGERHDPEGRWLKRWAPEYPSYAPKDPVVDLEEARRRYLRLARDLARG

SEQ ID NO: 6487 - protein, 152 aa, Zea mays
MSLVRRSNVFDPFSMDLWDPFDTMFRSIVPSAVSTDSETAAFASARIDWKETPEAHVFKADLPGVKKEEVKVEVEDGNVLVISGQRSREKEDKDDKWHRVERSSGQFVRRFRLPENAKVDQVKAGLENGVLTVTVPKAEEMKREVKAIEISG

SEQ ID NO: 6488 - protein, 210 aa, Sophora affinis
YDRVMAYKFHEDDHGEVIAEITKPGLEPYLGLHYPATDIPQAARFLFMKNKVRMIVDCHAKHVKVLQDEKLPFDLTLCGSTLRAPHSCHLQYMANMDSIASLVMAVVVNDSDEDGDSSDAVQPQKRKRLWGLVVCHNTTPRFVPFPLRYACEFLAQVFAIHVNKEIELEYQLIEKNILRTQTLLCDMLMRDAPLGIVSQSPNIMDLVKCD

SEQ ID NO: 6489 - protein, 439 aa, Arabidopsis thaliana
MEENMSNLTSASGDQASVSSGNRTETSGSNINQHHQEQCFVPQSSLKRKRNQPGNPDPEAEVMALSPKTLMATNRFICEVCNKGFQRDQNLQLHKRGHNLPWKLKQRSNKDVVRKKVYVCPEPGCVHHHPSRALGDLTGIKKHFFRKHGEKKWKCEKCSKKYAVQSDWKAHAKTCGTKEYKCDCGTLFSRRDSFITHRAFCDALAEESARAMPNPIMIQASNSPHHHHHQTQQNIGFSSSSQNIISNSNLHGPMKQEESQHHYQNIPPWLISSNPNPNGNNGNLFPPVASSVNTGRSSFPHPSPAMSATALLQKAAQMGSTKSTTPEEEERSSRSSYNNLITTTMAAMMTSPPEPGFGFQDYYMMNHQHHGGGEAFNGGFVPGEEKNDVVDDGGGETRDFLGLRSLMSHNEILSFANNLGNCLNTSATEQQQQQHSHQD

SEQ ID NO: 6490 - protein, 170 aa, Sophora affinis
YDRVMAYKFHEDDHGEVISEVTKPGLEPYLGLHYPATDIPQASRFLFMKNKVRMIVDCRAKHVKVLQDKKIPFDLTLCGSTLRAPHSCHLQYMENMNSIASLVMAVVINDNDEDGDSSDAVQPQKRKRLWGLVVCHNTTPRFVPFPLRYACEFLAQVFAIHVNKELELEY

SEQ ID NO: 6491 - protein, 495 aa, Staphylococcus xylosus
MSNNKKLTSLFGAPVSDRENSMTAGPRGPLVMQDWYFLEQMAHFDREVIPERRMHAKGSGAFGTFTVTNDITQYTSASIFSEVGKQTEMFARFSTVAGERGAADAERDIRGFALKFYTDEGNWDLVGNNTPVFFFRDPKLFASLNHAVKRDPRTNMRSAQNNWDFWTSLPEALHQVTILMSDRGIPKGYRNMHGFGSHTYSMYNDKGERVWVKFHHRTQQGIENLQPDEAAKIIADDRESSQRDLFEAIENKDYPKWKTYIQVMTEEQARNHKDNPFDLTKVWYKGDYPLIEVGEWELNRNPDNYFQDVEQAAFAPTNIVPGIDFSPDKMLQGRLFSYGDAQRYRLGVNHWQIPVNQPKGVGVENICPFSRDGQMRILDNNQGGGTHYYPNSDGSFEDQPEFKKPGLKVEGEAYEYDFRQDDDNYFEQPGRLFRLQSKEQQERIFENTANEMQGTTLEVQHRHIRHCYKADSEYGKGVARALGVDINDVDLEIKD

SEQ ID NO: 6492 - protein, 165 aa, Zea mays
  misc_feature (101)..(101): Xaa can be any naturally occurring amino acid
MDGRMFGLETPLMVALQHFLDVPDGDAGAGGDKASGAAAGGGPTRTYVRDARAMAATPADVKELPGAYAFVVDMPGLGTGDIKVQVEDERVLVISGERRRXEREDAKYLRMERRMGKFMRKFVLPDNADMDKISAVCRDGVLTVTVEKLPPPEPKKPKTIEVKVA

SEQ ID NO: 6493 - protein, 681 aa, Arabidopsis thaliana
MSGSVSGCGSGGCSIVWFRRDLRVEDNPALAAAVRAGPVIALFVWAPEEEGHYHPGRVSRWWLKNSLAQLDSSLRSLGTCLITKRSTDSVASLLDVVKSTGASQIFFNHLYDPLSLVRDHRAKDVLTAQGIAVRSFNADLLYEPWEVTDELGRPFSMFAAFWERCLSMPYDPESPLLPPKKIISGDVSKCVADPLVFEDDSEKGSNALLARAWSPGWSNGDKALTTFINGPLLEYSKNRRKADSATTSFLSPHLHFGEVSVRKVFHLVRIKQVAWANEGNEAGEESVNLFLKSIGLREYSRYISFNHPYSHERPLLGHLKFFPWAVDENYFKAWRQGRTGYPLVDAGMRELWATGWLHDRIRVVVSSFFVKVLQLPWRWGMKYFWDTLLDADLESDALGWQYITGTLPDSREFDRIDNPQFEGYKFDPNGEYVRRWLPELSRLPTDWIHHPWNAPESVLQAAGIELGSNYPLPIVGLDEAKARLHEALSQMWQLEAASRAAIENGSEEGLGDSAEVEEAPIEFPRDITMEETEPTRLNPNRRYEDQMVPSITSSLIRPEEDEESSLNLRNSVGDSRAEVPRNMVNTNQAQQRRAEPASNQVTAMIPEFNIRIVAESTEDSTAESSSSGRRERSGGIVPEWSPGYSEQFPSEENRIGGGSTTSSYLQNHHEILNWRRLSQTG

SEQ ID NO: 6494 - protein, 594 aa, Arabidopsis thaliana
MVHSKKFRGVRQRQWGSWVSEIRHPLLKRRVWLGTFDTAETAARAYDQAAVLMNGQSAKTNFPVIKSNGSNSLEINSALRSPKSLSELLNAKLRKNCKDQTPYLTCLRLDNDSSHIGVWQKRAGSKTSPNWVKLVELGDKVNARPGGDIETNKMKVRNEDVQEDDQMAMQMIEELLNWTCPGSGSIAQEISIVVIMILMKACDKGDFDLVSHTSLRSHQNSQTSENTPPSPPQNHRRKRGKNITNMGKGGSLSEGVIKNIIISYTYVAIWIFLSFTVIVYNKYILDKKMYDWPFPISLTMIHMSFCSTLAFLLIKVFKFVEPVSMSRDTYLRSVVPIGALYSLSLWLSNSAYIYLSVSFIQMLKALMPVAVYSIGVLFKKEGFKSETMMNMLSISFGVAIAAYGEARFDVWGVILQLGAVAFEATRLVMIQILLTSKGITLNPITSLYYVAPCCLAFLFIPWIVVEFPILRDTSSFHFDYLIFGTNSFCAFALNLAVFLLVGKTSALTMNVAGVVKDWLLIAFSWSVIKDTVTPINLFGYGIAFLGVAYYNHAKLQALKAKEAQKTAQQVDEETGRLLEEREGNEGGRKNEPED

SEQ ID NO: 6495 - protein, 739 aa, Glycine max
MESCNCIDPQVPADDLLMKYQYISDFFIALAYFSIPLELIYFVKKSAVFPYRWVLVQFGAFIVLCGATHLINLWTFRIHSRTVAVVMTTAKVLTAVVSCATALMLVHIIPDLLSVKTRELFLKNKAAELDREMGLIRTQEETGRHVRMLTHEIRSTLDRHTILKTTLVELGRTLALEECALWMPTRTGLELQLSYTLRQQNPVGYTVPIHLPVINQVFSSNRAVKISPNCPVARLRPYAGKYMPGAVVAVRVPLLHLSNFQIYDWPEVSTRSYALMVLMLPSDSARQWHVHELELVEVVADQVAVALSHAAILEESMRARDQLIEQNVALDLARREAETAIRARNDFLAVMNHEMRTPMHAVIALSSLLQETDLTAEQRLMVETILKSSNLLATLINDVLDLSRLEDGSLQLEAATFNLHSLFREVLNLIKPVASVKKLSLTSHVASDLPMYAIGDEKRLMQTILNVVGNAVKFSKEGCISITAFVAKPESFRDARIPDFLPVPSDNHFYLRVQVKDSGSGINPQDIPKLFTKFAQNQSLTRNPAGSGLGLAICRRFVNLMEGHIWVESEGIGKGCTVTFIVKLGIPDRSNEFKLPFVPKVPGNHGSTNFAGLKVLVMDDNGVSRTVTKGLLMHLGCDVTTASSSEECLRVVSLEHEVVFMDVCTGLDGYELAVRIHEKFTKHQDRPLIVALTGNTKKVTKENCMRVGMDGLILKPVSVDKMRGVLSELLERRVLFESV

SEQ ID NO: 6496 - protein, 249 aa, Physalis peruviana
MAREKIKIKKIDNITARQVTFSKRRRGLFKKAEELSILCDADVALIIFSSTGKLFDFSSSSMKDILGKYKLQSANLDKVDQPFLDLQLENSLNVRLRKQVADKTRELRQMKGEELEGLSLEELQQIEKRLEAGFNRVLEIKGTRIMDEIANLQRKGAELMEENKKLKQKMEMMKLGKLPLLTDMDCMVMEEGQSSDSIITTNNVCSSNTGPPPEDDSSNASLKLGCNNGLAPVDDDCSITSLKLGLPLS

SEQ ID NO: 6497 - protein, 1139 aa, Triticum aestivum subsp. spelta
MSSSRSNNRPACSRGSSARSKHSERVVAQTPVDARLHAEFEGSQRHFDYSSSVSALNRSGASTSSAVSAYLQNMQRGRYIQPFGCLLAIHPESFALLAYNENAAEILDLTPHAVPTIDQRDALAVGADVRTLFRSQSAVALHKAAVFGEVNLLNPILVHARTSGKPFYAILHRIDVGLVIDLEPVNPADVPVTAAGALKSYKLAAKAISRLQSLPSGNLSLLCDVLVREVSELTGYDRVMAYKFHEDEHGEVIAECRRSDLEPYLGLHYPATDIPQASRFLFMKNKVRMICDCAASPVKLIQDDNLSQPISLCGSTMRAPHGCHAQYMANMGSIASLVMSITINEDDDEDGDTGSDQQPKGRKLWGLVVCHHTSPRFVPFPLRYACEFLLQVFGIQLNKEVELASQAKERHILRTQTLLCDMLLRDAPVGIFTQSPNVMDLVKCDGAALCYQNQIMVLGSTPSEGEIKKIVAWLLECHDGSTGLSTDSLLEAGYPGASALGEVVCGMAAIKISSKGFIFWFRSHTAKEIKWGGAKHEPGDADDNGRRMHPRSSFRAFLEVVKWRSVPWEDVEMDAIHSLQLILRGSLQDEDANDNNARSIVEAPSDDIKKIQGLLELKIVTNEMVRLIETATAPILAVDIVGNISGWNNKVAEITGLPTTEAIGMLLVDLVEGDSVEVVKQMLNSALQGTEEQNLEIKLKTMHQQESKGPVVLMVNACCSRDLSDKVVGVCFVAQDLTGHKMVMDKYTRIQGDYVAIVKNPNELIPPIFMINDLGSCLEWNEAMQKITGIKREDAIDKLLIGELFTLHDYGCRVKDQVTLTKLSILMNTVISGQEPEKLAFGFFNTDGKYMESLLTANKRTDAEGKITGALCFLHVASPELQHALQVQKMSEQAATHSFKELTYIRQELKNPLNGMQFTRKLLEPSDLTEEQRQLFASNVLCQEQLKKILHDNDLEGIEQCYMEMNTVEFNLEEALNTVLMQGMSVSKEKQISLDRDWPVEVSSMYLYGDNLRLQQVLADYLACTLQFTRPAEGPIVLQVIPKKEHIGSGMQIAHLEFRLVHPAPGVPEALIQEMFRHGPGVSREGLGLHISQKLVKTMSGTVQYLREAESSSFIVLVEFPVAQLNSKRSRPSTSKSNF

SEQ ID NO: 6498 - protein, 340 aa, Shewanella sp. ANA-3
MAQYYAQRASAGLIITEATQISDDSQGYSFTPGVYTEAQIDGWQKVTAAVHQAGGKIFNQIWHVGRVSHPIFQQGAAPIAPSAITPVGTKVWIVDEQHPEGQMVDCPEPREMTQADIDRVVADFANAGANAVAAGFDGIEIHGGNGYLIDQFLRTNSNHRTDAYGGTPEKRIRFLLEVVEAVSAQIGADKVGVRLAPYVTFKDMACPEIVDTILLAAKHLSALGVAYLHLSEADWDDAPQVPESFRIELRKVFKGSIIVAGRYDVERGNEVIEKGYADLVAFGRAFIANPDLPYRLANQLPLSPFDKGPLFGGSAAGYTDYPSYQAAMRAVFRSSDDEVA

SEQ ID NO: 6499 - protein, 98 aa, Dianthus caryophyllus
MATVGGIKDSGGSSAISLEIDELAKFAVDHYNSIENALLEFPRVVNTKEQVVAGTIYYITLEATDGGVKKLYEANVWVKPGVNFKEVQVFKYVGDAFG

SEQ ID NO: 6500 - protein, 247 aa, Physalis peruviana
MAREKIKIKKIDNITARQVTFSKRRRGLFKKAEELSILCDADVALIIFSSTGKLFDFSSSSMKDILGKYKLQSANLDKVDQPFLDLQLENSLNVRLRKQVADKTRELRQMKGEELEGLSLEELQQIEKRLEAGFNRVLEIKGTRIMDEIANLQRKGAELMEENKKLKQKMEMMKLGKLPLITEMECMVMEEGQSSDSIITTNNVCSSNTGPPPEDDSSNASLKLSCNNGLAPVDDDCSITSLKLGLS

SEQ ID NO: 6501 - protein, 1099 aa, Magnetospirillum magnetotacticum MS-1
MTTPAPLHRLLQRQLARASRGREGGAPDFETLLRLISDSYEEHDKERRLSDRSARLMEEELRAANQESRRQAKAHLQAILNTVGEGIVIADQTGTVVSVNPALLSIFGYERDEVIGNNIDMLIPLAALKAAGSSGMERIFDLGRESMALRRGGTSFPIELAAGDLTPTGSAQFVVIMRDISERKRIEREMAESEERFRDFAQSTSDWFWEMGPDLRFTGFSGQFTEHTRALPSHYVGHTRDEMISDDTPMEARLQNLADMEARRPFRDFVYHTKNMDGPGRFLRVNGKPVFDPSGEFKGYRGTASDITEEIEAADRLKASQAEIERLAERNNSILESVDDGIVGIDLNGRATFVNRAAAKLLDFEPAELVGSDILPLMALDMETAESLYQILLRLADSIRDDTASFKRRDGSPLPVEYIASPVMDKGNQVGVVLGFRDITQRRLVERQLREAKEAAEAGNRTKSEFLATMSHEIRTPMNGVIGMTGLLLDTKLTEEQRHFAETIRDSGESLLTVINDILDFSKMEAGKLDLDYTEFELVPLVESVVDILAPRAHAKGIEIASLIDPRLRMLVRSDPGRLRQVLMNLGGNAVKFTEKGGVSIEVTLLERPGAQPMVHFDVRDTGIGIPPEAQGRLFSMFMQVDASTARRYGGTGLGLAICRRLAELMGGEVGLESQPGKGSRFWMSVPMELLAPQSAAPPDLTGHRVLVVDDNPVNCDVIERQLRAFGVEVHACLDAGSGMGELTRAAAMGTPWEVAVIDSQMPVVTGSEMVRMMRAIPMLGGSRIIVTSSQGMPAEQQDGQPAIDAFLHKPLRQSTLLDTIGRVLGLSGPEEQPAAPAEEHNAPDSTAKRLRILVAEDNPVNQQVALGLLRKLGHTVDVVGDGAEALEAVRLLPYDVVLMDVQMPEMDGLEATRAIRSLASAAARIPIVAMTANAMRGDDQMCFDAGMDGYISKPIDRHKLAEALAKYSGAPEPKPAEPTSAQDSKAVDLDVLDALAADIEADTVVEILVKFMEDARTRHANAAVAAPEGDLEKVRREAHTIKGAAASLGLMAVRDACLALEQAARAGEGVAPLVVQLHDRIEALPGQLSTTAYALPPS

SEQ ID NO: 6502 - protein, 332 aa, Solanum tuberosum
DLPLKFPQRDLVIYEMHVRGFTNHESSETKYPGTYLGVVEKLDHLKELGVNCIELMPCHEFNELEYYSYNSVLGDSKFNFWGYSTVNFFSPMGRYSSAGLSNCGLGAINEFKYLVKEAHKRGIEVIMDVVFNHTAEGNENGPILSFRGIDNSVFYTLAPKGEFYNYSGSGNTFNCNNPMVRQFIVDCLRYWVTEMHVDRFRFDLASILTRSSSSWNAVNVYGNSIDGDVITTGTPLTSPPLIDMISNDPILRGVKLIAEAWDCGGLYQVGMLPHWGIWSEWNGKYRDMVRQFIKGTDGFSGAFAECLCGSPNLYQKGGRKPWNSINFVCAHD

SEQ ID NO: 6503 - protein, 198 aa, Sophora affinis
YDRVMAYSFHEDDHGEVVSEIRRSDLEPLLPVLHYPATDIPQAARFLFQQNRVRMICDCHAKPVNVIQSEELRQPLCLVNSTLRSPLGCHTQYMANMGSIASLVMAVIVNGNDTTRLWGLLVCHHTSPRYVPFPVRYACEFLMQAFGLQLYMEIQLASQMAEKRLLKTQTLLCDMLLRDAPFGIVTQSPNIMDLVKCD

SEQ ID NO: 6504 - protein, 336 aa, Pseudomonas fluorescens PfO-1
MSRVTLSRYLIEQTRSNNTPADLRFLIEVVARACKEISHAVSKGALGGVLGSMGTENVQGEVQKKLDVLSNEILLEANEWGGHLAGMASEEMDNAYQIPGKYPKGAYLLVFDPLDGSSNIDINAPVGTIFSVLRCPNEYLSQNEALDEKAFLQPGTQQVAAGYAIYGPQTMLVLTLGHGVKGFTLDREMGSFVLTHEDITIPESTQEFAINMSNQRHWEAPVQRYVSELLAGEEGPLKKNYNMRWVAAMVADVHRILTRGGLFMYPRDSREPSKPGKLRLMYEANPMSFLVEQAGGASTDGHQRILDIKPEGLHQRVAVFLGSKEEVARATAYHKE

SEQ ID NO: 6505 - protein, 482 aa, Listeria monocytogenes EGD-e
MSNTKFPDGFMWGGATAANQFEGGYNLGGKGLACADLFTGGTHTEPRRITAQLEESTFYPSHEAVDFYHHYKEDIKLMAEAGFKVFRMSINWTRIFPTGKEAEPNEEGLQFYEDVFNELKKHQIEPLVTIAHFDIPLALTNEVNGWASRDLIDYYLHFCEVIFKRYKHLVKHWLTFNEINTATMEIGNYLSLGIRHAEGDFLHQKDDPKVRYQALHHQFVASAKAVKLGHSINPDFMIGCMIAYMPRYPRTCEPSDVLLAKQTEAMHSHFCGDVHVKGYYPFYAKTFFKDNGIELEFDPEDEQILREGTVDFYTFSYYLTLCASNDPAYKNSGKSVIGGAENPYLKTNDWGMQTDPVGLRIALNDLYTRYNIPLMVVENGLGAFDKLEDDGTINDPYRIDYFKEHILQMHKAIQDGVDLIGFTIWGCIDLVSASTGEMAKRYGIIYVDKYDDGTGDYSRKKKASYYWYKDVISSNGEIGLEE

SEQ ID NO: 6506 - protein, 375 aa, Arabidopsis thaliana
MVMMKKMKGSQSFRQRLLLSTLSSTPISIDEIRADETIPGLRPHEVNLLRLLEIVTDDPVVDINETGTRLKYKPGTIVGGKNLVHSCSLSRSIGYYLEPLLLLGLFGKKPLSIRLKGITNDPRDASVDTFRSTTLNIIKRFGVPAEDLELKIEARGVAPNGGGEVLLTVPNIKTLSAVHWVEEGMVKKIRGTTFSTRVTSDFEHSMRFAARGIFNNLLPDVHIFQDHRAGAQAGKSPGYGISLAAETTTGCFISADTTVSCERPDETGELDVEKKERSPAEDTGVEVASWLLQEIEKGGVVDSTHQGLLFLLCALSEQDVSKVRVGTLSPYAVETLRNIKEFLGVKFAIKPDPLTGTVILKCTGSGLINLSRKLS

SEQ ID NO: 6507 - protein, 492 aa, Arabidopsis thaliana
MDPYKYRPASSYNSPFFTTNSGAPVWNNNSSMTVGPRGPILLEDYHLVEKLANFDRERIPERVVHARGASAKGFFEVTHDISNLTCADFLRAPGVQTPVIVRFSTVIHERGSPETLRDPRGFAVKFYTREGNFDLVGNNFPVFFIRDGMKFPDMVHALKPNPKSHIQENWRILDFFSHHPESLNMFTFLFDDIGIPQDYRHMDGSGVNTYMLINKAGKAHYVKFHWKPTCGVKSLLEEDAIRVGGTNHSHATQDLYDSIAAGNYPEWKLFIQIIDPADEDKFDFDPLDVTKTWPEDILPLQPVGRMVLNKNIDNFFAENEQLAFCPAIIVPGIHYSDDKLLQTRVFSYADTQRHRLGPNYLQLPVNAPKCAHHNNHHEGFMNFMHRDEEVNYFPSRYDQVRHAEKYPTPPAVCSGKRERCVIEKENNFKEPGERYRTFTPERQERFIQRWIDALSDPRITHEIRSIWISYWSQADKSLGQKLASRLNVRPSI

SEQ ID NO: 6508 - protein, 312 aa, Triticum aestivum
  misc_feature (127)..(128): Xaa can be any naturally occurring amino acid
  misc_feature (132)..(132): Xaa can be any naturally occurring amino acid
  misc_feature (139)..(139): Xaa can be any naturally occurring amino acid
  misc_feature (214)..(214): Xaa can be any naturally occurring amino acid
  misc_feature (244)..(244): Xaa can be any naturally occurring amino acid
  misc_feature (262)..(262): Xaa can be any naturally occurring amino acid
  misc_feature (287)..(287): Xaa can be any naturally occurring amino acid
  misc_feature (300)..(300): Xaa can be any naturally occurring amino acid
  misc_feature (303)..(303): Xaa can be any naturally occurring amino acid
MATVRQSNGHGEAAAANGKSNGHAAANGKSNGHAAAAADWNFAGGEDGILARTGAKNSIRAIRYKISASVEESGPRPVLPLAHGDPSVFPAFRTAVEAEDAVAAALRTGQFSCYAAGVGLPAARRAXXEHLXQGGPYEXSADDIFLTAGGAQAIEVIIPVLAQTVGANILLPRPGYPNYEARAAFNKLEVRHFDLIPEKGWEIDIRLRWESIAXDKNTTAMLIINPNIPCGSVYSLTSIWAKSXEVGKKLRILVIADKCYGXLVLGIPHFIPWVSSRQFPCLVHKAXSKSLVMPGMALLXVAXHPTNFRNKL

SEQ ID NO: 6509 - protein, 160 aa, Citrullus lanatus
IIAKGHYTERAAASLLRTIVQIVHTCHSMGVIHRDLKPENFLLLSKDEDSPLKATDFGLSVFYKQGEVFKDIVGSAYYIAPEVLKRRYGPEVDIWSVGVMLYILLCGVPPFWAESEHGIFNAILRGHIDFTSDPWPTISPAAKDLVRKMLNSDPKQRLTA

SEQ ID NO: 6510 - protein, 136 aa, Brassica napus
  misc_feature (75)..(75): Xaa can be any naturally occurring amino acid
VDPRVRSKAFVSVTFLIVTLLLCRTIQSRSCRLDEKTTEKTMILGGVHDLRGNQNSGEIENLARFAIQQHNNREXQNKVLEFKKIVKAREQVVAGTMYYLTLEANEGGQAKNFEAKVWVKPWMNFKQLQEFKESSS

SEQ ID NO: 6511 - protein, 475 aa, Arabidopsis thaliana
  misc_feature (338)..(338): Xaa can be any naturally occurring amino acid
  misc_feature (374)..(374): Xaa can be any naturally occurring amino acid
MAAAVSTVGAINRAPLSLNGSGSGAVSAPASTFLGKKVVTVSRFAQSNKKSNGSFKVLAVKEDKQTDGDRWRGLAYDTSDDQQDITRGKGMVDSVFQAPMGTGTHHAVLSSYEYVSQGLRQYNLDNMMDGFYIAPAFMDKLVVHITKNFLTLPNIKVPLILGIWGGKGQGKSFQCELVMAKMGINPIMMSAGELESGNAGEPAKLIRQRYREAADLIKKGKMCCLFINDLDAGAGRMGGTTQYTVNNQMVNATLMNIADNPTNVQLPGMYNKEENARVPIICTGNDFSTLYAPLIRDGRMEKFYWAPTREDRIGVCKGIFRTDKIKDEDIVTLVDQFXSLLVMEQENVKRVQLAETYLSQAALGDANADAIGRXLSTVKQRKRSPPRKPAYEKLMEYGNMLVMEQENVKRVQLAETYLSQAALGDANADAIGRGTFYGKGAQQVNLPVPEGCTDPVAENFDPTARSDDGTCVYNF

SEQ ID NO: 6512 - protein, 467 aa, Listeria monocytogenes str. 1/2a F6854
MTSVMWFRRDLRVSDNKALYHACKEDDLLLLFQVNPAQFITGSPSHQAFFASVAHFKQEVDKTALLQIMFGEPVECLKQLKETLPSWDKVYFNRDETGYGAERDEAAKTFFDEQEIEVQAFHDSYLHSAEEVKKSPTEYYKIFTPYYKKWREEIKETPFKVTLKADNIRKENLFPKYEEQFAEMTCDLPILDSGEKTANTRLANFIKHDVADYDKARDFPELDKTSHLSRYLRTGEISVRTIWQALQENEATEGRAIFEKELCWRDFYNMIYVSFPNQKNEPIQENYRFIEWENNREFFKAWQDGKTGFPLVDAAMRQLKETGWMHNRLRMVTASFLTKDLLIDWRFGEKYFQQMLIDYDPASNIGGWQWAASTGTDAVPYFRIFNPTTQSQKFDPTGKFIRKYVKELANLPDKYIHQPEKMSEIEQKEYGLLLGKDYPFPLIDHKERRKLAIARYEFSKEHYRGNI

SEQ ID NO: 6513 - protein, 1282 aa, Gibberella moniliformis
MVDDAALAAAASIVASIAPDPRLPNSIPVGVASQVQLPGPDTPAKRKLELELQNLALRVGKLESQASATSPFPETPNEVIDTLFGEEAQAVAVRPKPKVFHAQGSLHSPHLPSYQLTEEALEGLREHVDDQSKLLDSQRQELAGVNAQLLEQKQLQERALEILEQERIATLERELWKHQKANEAFQKALREIGEIVTAVARGDLTMKVRMNTVEMDPEITTFKRTINAMMDQLQIFASEVSRVAREVGTEGLLGGQARIGGVDGTWKELTDNVREIASVTTAVAHGDLTKKIERPARGEILQLQQTINTMVDQLRTFASEVTRVARDVGTEGMLGGQADVGGVQGMWNDLTVNVNAMANNLTTQVRDIIKVTTAVAKGDLTQKVQADCRGEIFELKSTINSMVDQLQQFAREVTKIAREVGTEGRLGGQATVHDVEGTWRDLTENVNGMAMNLTTQVREIAKVTTAVAKGDLTKKIGVEVKGEIAELKNTINQMVDRLGTFAVEVSKVAREVGTDGTLGGQAQVANVEGKWKDLTENVNTMASNLTVQVRSISTVTQAIANGDMSQKIKVEANGEIQVLKETINNMVDRLSSFCYEVQRVAKDVGVDGKMGAQADVGGLDGRWKEITTDVNTMASNLTTQVRAFSDITNLATDGDFTKLVDVEASGEMDELKRKINQMISNLRDSIQRNTQAREAAELANKTKSEFLANMSHEIRTPMNGIIGMTQLTLDTDLTQYQREMLNIVNNLANSLLTIIDDILDLSKIEARRMVIEEIPYTLRGTVFNALKTLAVKANEKFLDLTYKVDSSVPDYVIGDSFRLRQIILNLVGNAIKFTEHGEVSLTIKESMGQNNVRPGEYAVEFVVEDTGIGIAQDKLDLIFDTFQQADGSMTRKFGGTGLGLSISKRLVNLMGGDLWVNSEHGKGSEFHFTCLVKLAPDDAALIEQQIRPYRGHQVLFVDKAQSQNATSIKPMLEKIGLKPVVVDSEKSPALTRLQSGGSLPYDAILVDSIDTARRLRAVDDFKYLPIVLLAPVVHVSLKSCLDLGITSYMTTPCKLIDLGNGMIPALENRATPSLADNTKSFEILLAEDNTVNQRLAVKILEKYHHVVTVVGNGWEAVKAVQSKKFDVILMDVQMPIMGGFEATGKIREYERGIGSHRTPIIALTAHAMMGDREKCIQAQMDEYLSKPLQQNHLIQTILKCATLGGPLLEKNRERELALHAETKSKHKEGGQGLLRPTLESRSFTSREPLLGNGKESPAILTTDEDPLARARLDLSDMRSLTN

SEQ ID NO: 6514 - protein, 184 aa, Oryza sativa (japonica cultivar-group)
MLRRRGFCCCSGAPAAAAAALLLLAVAAAAPRAAGFHLGGDESVLVRGMLAAIRREQAEAEDAARFAVAEYNKNQGAELEFARIVKAKRQVVTGTLHDLMLEVVDSGKKSLYSAKVWVKPWLDFKAVVEFRHVGDSQSQSATAADDNAGQDTADPTVASRNDLHNTENNKVSVVLSTFSQTYSV

SEQ ID NO: 6515 - protein, 327 aa, Yarrowia lipolytica CLIB122
MADQKEVDLDSVIDRLLEVRGSRPGKQVQLMEHEIRYLCTKAREIFIQQPILLELEAPIKICGDIHGQYYDLLRLFEYGGFPPEANYLFLGDYVDRGKQSLETICLLLAYKIKYPENFFILRGNHECASINRIYGFYDECKRRYNIKLWKTFTDCFNCLPIAAIIDEKIFAMHGGLSPELNTMEQIRRVMRPTDIPDVGLLCDLLWSDPDKDITGWNENDRGVSFTFGPDVVLRFLQKHDMDLICRAHQVVEDGYEFFSKRHLVTLFSAPNYCGEFDNAGAMMSVDESLLCSFQILKPAEKKQKFVYSGMGGGRPVTPPRKQKKAGK

SEQ ID NO: 6516 - protein, 441 aa, Arabidopsis thaliana [sequence omitted]

SEQ ID NO: 6517 - protein, 424 aa, Hordeum vulgare
MVVTVAATGPDTAETLHSTTFASRYVRDQLPRYRMPENSIPKEAAYQIISDELMLDGNPRLNLASFVTTWMEPECGKLIMDSVNKNYVDMDEYPVTTELQVCWEKFARYFEVELKEVKLTEGYYVMDPKKAVEMVDENTICVAAILGSTLTGEYEDVKLLNDLLVEKNKETGWNVPIHVDAASGGFIAPFLQPELEWDFRLPLVKSINVSGHKYGLVYPGVGWVIWRSKDDLPEELIFHINYLGADQPTFTLNFSKGASQIIAQYYQLIRLGFEGYKHIMENCKLNAAVLKEGIDATGRFDVLSKADGVPLVAIRLKDSTNFSVFDISENLRRFGWIVPAYTMPADAEHVAVLRIVIREDFNRSLAQRLLADINKIIGELDAHAVHAIKLSTAAAGGDGASKSAVDAATEAFKDLAGKKKAGVC

SEQ ID NO: 6518 - protein, 581 aa, Neurospora crassa
MCGIFACHNHPDVAKFKPTALKLSKAIRHRGPDWSGSVTCHNTILCHERLSIVGVESGAQPLTNADESIAVAANGEIYNHRLIRKHLKNPYHFKTTSDCEVIIPLYLEHGVDAPKHLDGMFSFVLYDKKQDRTIAARDPIGITTLYKGYNSQEPGTVYFASELKSLHPVCDKIEAFPPGHVFDSLTGETTRYFEPSWWDEKKCPQTPLDLKLLRETLEKSVRKRLMAEVPYGVLLSGGLDSSLVAAIAQRESLRLRKLAEEQAALNQEVDPEAQDKGEGLVGIDDENKLSTVTFLPQLNSFSIGLPGSPDNKAALEVAKFLGTKHHVMTFTIEDGLNALSDVIYHLETYDVTTIRASTPMYLLSRKIKAMGIKMVLSGEGSDEIFGGYLYFHGAPNKEEFHEECVRRVKNLHLADCLRANKSTSAWGLEARVPFLDKEFLEVALNIDPQEKMITKEKLEKYILRKAFDTKDQPEGAYLPDNILYRQKEQFSDGVGYGWIDALKDQAELQVTDEMMKNPKPEWGDDIPDTKEAYWYRCMFDEHFPPSCASTVMRWTPKWVKQTDPSGRAISIHQAKYDHVDE

SEQ ID NO: 6519 - protein, 235 aa, Solanum tuberosum
MAREKIKIKKIDNITARQVTFSKRRRGLFKKAEELSVLCDADVALIIFSATGKLFDFASTSMKDILGKYKLQSASLEKVDEPSLDLQLENSLNMRLSKQVADKTRELRQMRGEELEGLSLEELQQIEKRLEAGFNRVLEIKGTRIMDEITNLQRKGAELMEENKQLKHKMEIMKKGKFPLLTDMVMEEGQSSESIITTNNPDQDDSSNASLKLGGTTAVEDECSITSLKLGLPFS

SEQ ID NO: 6520 - protein, 368 aa, Vigna radiata var. radiata
QMGLAENQLTSDLVEDWILNNPEASICTPEGINDFRAIANFQDYHGLAEFRNAVAKFMARTRGNRITFDPDRIVMSGGATGAHEVTAFCLADPGEAFLVPIPYYPGFDRDLRWRTGVKLVPVMCDSSNNFVLTKEALEDAYEKAREDNIRVKGLLITNPSNPLGTIMDRKTLRTVVSFINEKRIHLVCDEIYAATVFSQPGFISIAEILEDETDIECDRNLVHIVYSLSKDMGFPGFRVGIIYSYNDAVVNCARKMSSFGLVSTQTQYLLASMLNDDEFVERFLAESAKRLAQRFRVFTGGLAKVGIKCLQSNAGLFVWMDLRQLLKKPTFDSETELWKVIIHEVKINVSPGYSFHCTEPGWFRVCFA

SEQ ID NO: 6521 - protein, 784 aa, Ralstonia metallidurans CH34
MLHLSAAYFVTPFALLAAMMLVVARCWRNARQASAKMAELKAERTLFQSLLDSSPNAVLVVSHEHRILKVSEPYARLCGVSTEDLIGKPLVHSHTTSRFLDLGGLLELTLLRMDGNERSDLITLGIPEQSVRTFRVNATQCRSEDGVFSGTAIVLTDISEQVAAQHRVDQTSAAMDDITDALSVTFFQLCRESNGHIWLPWVKGMQNTTLNWSAERMMRDGGGILPNLDASEKTLFIGAVDQSIATQQPMDVTVRLTSDNRWVHIASGNPRVGPNGATLWYAYAMDVTEMQRYNTLLATASREAEAATEAKSRFLATMSHEIRTPLATVIASLDLLRESELSTHQREELDLADHSAKLLLEILGDILDFSRIEAGEMKLEQAPIDLRLIIEDVLRIQARQIEKKGVILDFYVEAGLAATLLGDAVRLRQIVLNLVGNATKFTLQGSIVVRALLIADHPETQTIQLEVSDTGIGIPAEKQAALFKAFSQADVSTTRRFGGSGLGLSICSRLVQAMGGAVVLTSTPGVGSTFRVELTLPVVERSTRMVEFAKTHIAIDVSRADDAAVFREHAVALGMQLAPLDCLNPSDIAVIDEDAASDKVPVGVLTIPYGKKHGNLSGPPIWWSEFRAACLDAVLRDTHRFPAQGQDVTATPPISDSLAGLTSLPILVAEDHTPFQIVIRRQIEKLGLACDVVSDGKEALAAIRNKQYGMILTDCHMPYMDGYELTSAIRASEAQGQRLPIVALSADASDEQRHRGRAAGMDDFLLKPLKLPELRACIQRWVLR

SEQ ID NO: 6522 - protein, 470 aa, Escherichia coli K12
MKAFPETFLWGGATAANQVEGAWQEDGKGISTSDLQPHGVMGKMEPRILGKENIKDVAIDFYHRYPEDIALFAEMGFTCLRISIAWARIFPQGDEVEPNEAGLAFYDRLFDEMAQAGIKPLVTLSHYEMPYGLVKNYGGWANRAVIDHFEHYARTVFTRYQHKVALWLTFNEINMSLHAPFTGVGLAEESGEAEVYQAIHHQLVASARAVKACHSLLPEAKIGNMLLGGLVYPLTCQPQDMLQAMEENRRWMFFGDVQARGQYPGYMQRFFRDHNITIEMTESDAEDLKHTVDFISFSYYMTGCVSHDESINKNAQGNILNMIPNPHLKSSEWGWQIDPVGLRVLLNTLWDRYQKPLFIVENGLGAKDSVEADGSIQDDYRIAYLNDHLVQVNEAIADGVDIMGYTSWGPIDLVSASHSQMSKRYGFIYVDRDDNGEGSLTRTRKKSFGWYAEVIKTRGLSLKKITIKAP

SEQ ID NO: 6523 - protein, 252 aa, Prunus microcarpa
AHYKSEADVGNAIAEAIQSGLVKREELFITSKASNHGHVVEACKNSLKKLQLDYLDLYLVHYPLATKHSGVGTTASLLDENKVLDIDVTVSLETTWHDMEKTVDLGLVRSIGLSNYELFLTRDCLSYAKIKPQVSQFETHPYFQRESLVRFCKKHGVIPMAHTPLGGATANVKAFGSISPLEDPVLIGLAKKYQKSVAQIALRWNLERGTPVIPKSSKVERLKENLEVLNFKLEKEDIELINTIDKKSRTTL

SEQ ID NO: 6524 - protein, 162 aa, Arabidopsis thaliana
  misc_feature (87)..(87): Xaa can be any naturally occurring amino acid
  misc_feature (112)..(112): Xaa can be any naturally occurring amino acid
TPIAAVPDGSIILDQLASHSTAFAVEQFSDDVGYSWIDGLKDHAAQNVNDKMMSNAGHIFPHNTPNTKEAYYYRMIFERFFPQNSAXRLTVPGGATVACSTAKAVDQLASHXWSTNMDPSGRAAIGVPLSAYDGKNVALTIPPLKAIDNMPMMMGQGVVIQS

SEQ ID NO: 6525 - protein, 252 aa, Prunus lusitanica
AHYRSEADVGNALAEAFETGLVKREELFITSKASNHGHVVEACKNSLKKLQLDYLDLYLVHYPLATKHSGVGTTASLLDENKVLDIDVTVSLESTWHDMEKTVSLGLVRSIGLSNYELFLTRDCLSYAKIKPQVSQFETHPYFQRETLVRFCRKHGVCPMAHTPLGGATANVKAFGSISPLEDPVLRALAKKYKKSVAQIALRWNLDRNTPVIPKSSKIERLKENLEVLNFKLEKEDIELINTIDKKSRTTL

SEQ ID NO: 6526 - protein, 252 aa, Prunus virginiana
AHYKSEADVGNALAEAFDTGLVKREELFITSKASNHGHVVEACRNSLKKLQLDYLDLYLVHYPLATKHSGVGTTASLLDENKVLDIDVTVSLESTWHDMEKTVSLGLVRSIGLSNYELFLTRDCLSYAKIKPQVSQFETHPYFQRETLVRFCRKHGVCPMAHTPLGGSTANVKSFGSISPLEDPVLHGLAKKYKKSVAQIALRWNLDRNTPVIPKSSKIERLKENLEVLNFKLEKGDIELINTIDKKSRTTL

SEQ ID NO: 6527 - protein, 275 aa, Gibberella moniliformis
MLEDPAHQDVARWGKDGDTFVVVENEKFTRSILPKHFKHSNMASFVRQLNKYDFHKVRQTNDSGSAANGANTLEFKHPNFRVGSKDDLDNIRRKAPAPRRTQATEDFTTSHHISVMTEQLTATQQQVQQLQELFTEVSQTNRLLVNEVLTLQKMLNAQKQSQHEMLNYLSPSNNRHQQSMHLNVGTSPLDGSDDSAPELRRARELLSSVTPDQIADRELERLQGVYGSPADSAVVIPQASMPMMHDPMNDINRYPVYPVGQTVGIDPFHSDHIHK

SEQ ID NO: 6528 - protein, 378 aa, Listeria monocytogenes str. 1/2a F6854
MEESPQNEPNKVEKDEEQKSKPGNGYIKMKLFPFIMLLFAFVFVTALVTTIVMSLGDDKQVKVSIPERKEFTKLYDVYDEITSKYYKDTNSTTMIDGAISGMVNSLDDPYSTFMSKKESSEFNDTISASFEGIGAEIQEKDGAIVIVSPIKNSPAEKAGLRPQDIITQVDGKSVKGDTATEATQKIRGEKGTKVTLTIQRSNEDKPFDVTITRDEIPIETVYKEMGSDKIAHVTISTFSETTYDELEKALKSLEKDGMKGLVLDLRGNPGGLLDQAVSISSLFVPDGKIVVQEQDKDGDKSAIKADSSSHGDYKVKVPTTMLIDGGSASASEILAAAAKESGGIKLVGTKSFGKGTVQTATTLSDDSTLKLTVAKWLT

SEQ ID NO: 6529 - protein, 702 aa, Mesorhizobium loti MAFF303099
MAKQASKLAGTAATIHDQKLQRGEGGELHQTASGSTAVLTTAQGGPVSDDQNSLRIGARGPTVLEDFHFREKIFHFDHERIPERVVHARGYGAHGYFETYESLAKYTRADIFQRAGEKTPAFVRFSTVAGNKGSADLARDVRGFAVKLYTQEGNWDIVGNNMPVFFIQDAIKFPDLIHAAKAEPNSDFPQAQTAHDNFWDFISLTPESMHMIMWAMSDRAIPRSLRFMEGFGVHTFRLLNAKDESTFVKFLWKPKLGLQSVAWNEAVKINGADPDFHRRDLWDAIHAGNFPEWELQLQLFDQAFADSFDFDILDPTKLIPEEVLPPIAVGRLVLDRMPDNFFAETEQVAFMTQNVPPGVDFSNDPLLQGRNFSYLDTQIKRLGSTNFTHLPINAPKCPFHTFQQDGHMAMRNPVGRANYQPNSWDEGPRESPQKGFRSFAEAEAGPKARLRAESFADHYSQARQFYISQHPVEQGHIASALTFELSKVHTPVIRERIVSHLLNIDDALARKVADALGLKAMPKPADAGAPTRTDLPASDALSILKNGPGRFEGRKLGILVTDGTDAALLNALKQALTKAGAKFEIIAPKVGGAKASDGSWMDAQQMIAGAPSVLYDAIALLAAKPAMAGLLRESTARDFVADAFAHCKFIGFVEAAAPLLDKAGVVEDEAVIPLASAKDVAGFITRLGDLRLWAREPKVKLG

SEQ ID NO: 6530 - protein, 525 aa, Streptococcus criceti
MAKDIKFSADARSAMVRGVDVLADTVKVTLGPKGRNVVLEKSFGSPLITNDGVTIAKEIELEDHFENMGAKLVSEVASKTNDIAGDGTTTATVLTQAIVREGLKNVTAGANPIGIRRGIERAVATAVEGLKAIAQPVSGKEAIAQVAAVSSRSEKVGEYISEAMEKVGNDGVITIEESRGMETELDVVEGMQFDRGYLSQYMVTDNEKMVADLDNPYILITDKKISNIQDVLPLLEEVLKTSRPLLIIADDVDGEALPTLVLNKIRGTFNVVAVKAPGFGDRRKAMLEDIAILTGGTVITEDLGLELKDASIASLGQAAKITIDKDSTVIVEGAGQADAIAERVNVIKSQLETTTSDFDREKLQERLAKLSGGVAVIKVGAATETELKEMKLRIEDALNATRAAVEEGIVAGGGTALVNVIEKVASLDVKGDEATGRNIVLRALEEPVRQIARNAGYEGSVIIEKLKASAVGTGFNAADGSWVDMVEAGIIDPVKVSRSALQNAASVASLILTTEAVVADHPEEK

SEQ ID NO: 6531 - protein, 215 aa, Beta vulgaris subsp. vulgaris
MAAPPARARADYDYLIKLLLIGDSGVGKSCLLLRFSDGSFTTSFITTIGIDFKIRTIELDGKRIKLQIWDTAGQERFRTITTAYYRGAMGILLVYDVTDESSFNNIRNWIRNIEQHASDNVNKILVGNKADMDESKRAVPTAKGQALADEYGIKFFETSAKTNLNVEEVFFSIARDIKQRLADSDTRQEAQPSITIKPADQSGNQAAAKSACCGS

SEQ ID NO: 6532 - protein, 484 aa, Vigna radiata var. radiata
MGFKAMDQTPLLSKMAIGDGHGESSPYFDGWKAYDQNPFHPTDNPNGVMQMGLAENQLTSDLVEDWILNNPEASICTPEGINDFRAIANFQDYHGLAEFRNAVAKFMARTRGNRITFDPDRIVMSGGATGAHEVTAFCLADPGEAFLVPIPYYPGFDRDLRWRTGVKLVPVMCDSSNNFVLTKEALEDAYEKAREDNIRVKGLLITNPSNPLGTIMDRKTLRTVVSFINEKRIHLVCDEIYAATVFSQPGFISIAEILEDETDIECDRNLVHIVYSLSKDMGFPGFRVGIIYSYNDAVVNCARKMSSFGLVSTQTQYLLASMLNDDEFVERFLAESAKRLAQRFRVFTGGLAKVGIKCLQSNAGLFVWMDLRQLLKKPTFDSETELWKVIIHEVKINVSPGYSFHCTEPGWFRVCYANMDDMAVQIALQRIRNFVLQNKEVVVSNKKHCWHSNLRLSLKTRRFDDITMSPHSPLPQSPMVKATN

SEQ ID NO: 6533 - protein, 806 aa, Oryza sativa
MALSTAQTGESMHSSTFASRYVRTALPRFRMPEKSIPKDAAYQIINDELMLDGNPRLNLASFVTTWMEPECDKLMMAAINKNYVDMDEYPVTTELQNRCVNMIAHLFNAPIGDDETAVGVGTVGSSEAIMLAGLAFKRKWQNRMKAEGKPHDKPNIVTGANVQVCWEKFARYFEVELKEVKLTQGYYVMNPEKAVEMVDENTICVAAILGSTLNGEFEDVKMLNDLLTAKNAETGWNTPIHVDAASGGFIAPFIYPELEWDFRLPLVKSINVSGHKYGLVYAGVGWVIWRNKEDLPDELIFHINYLGADQPTFTLNFSKGSNQIIAQYYQLIRLGFEGYKDIMQNCRDNATVLREGIEKTGHFDVVSKDSGVPLVAFSLKDSSRYTVFEVAESLRRFGWIVPAYTMPADAEHVAVMRVVIREDFSRGLAERLITDLTKTVADMDAHAVKKAAAEPAKKTVREIEKEVTTYWRSFVARKKSSLWEDEGNGGSGGPRCCSSSSPSQLPVRSSTARESLDHISINCTGGVGATSGCRSVHSRRSAPTRRARLLVPAQPRLCLDSPDWRQSAAGREWEQERDDGDDRRGSWLASESWWFVGDDATAAAATRVRREKRRACAGAGGAGGDGAARAPPSSSSASTRAAASTPGGGMRGSRMHYLRYYDAAFDAVDAAGLLETRPARAKVEEMFAREIRNAVAFEGAERFERHESFAGRRRRMEDGGGLQWGSKAEEKCLLPSSSLARRPRRQPSPPVSLRPDGSLPPAVAAAPLVLPLPRASAAEPPRCAPMPPTAAPLVLPPPLPTEKERI

SEQ ID NO: 6534 - protein, 257 aa, Synechocystis sp. PCC 6803
MDIHRLPALADNYIFLLHDRQRNQAAVVDPAEAKPVLDCLETLGADLVTIYNTHHHGDHVGANRELLAKYPNLEVYGGVEDQGRIPGQTVFLRDGDRLSFADREATVYFVPGHTRGHIAYYFAPGSGETIGDLFCGDTIFAGGCGRLFEGTPAQMVQSIGKLRQLPDQTRLWCAHEYTLGNLKFALTVDPSNKDLQERFQTVQGDRQRGQATIPSWLGTEKRTNPFLRWDNPAIQARVGMTEPARVFGKLRGMKDNF

SEQ ID NO: 6535 - protein, 807 aa, Haemophilus somnus 129PT
MNKFVSQSTIDTFFDGKHADPFSVLGMHETSNGIEVRVLLPDAEKVFVLSKETKNVLCELSRVDERGFFAGVVPNTHSFFAYQLEVYWGNEAQVIEDPYAFHPMINELDNWLLAEGSHKRPYEILGAHFTECDNVAGVNFRLWAPNAKRVSVVGDFNYWDGRRHPMRFHQSSGIWELFLPKVSLGQLYKFELLDCHNQLRLKADPYAFSSQLRPDTASQIGALPEIVSMTEKRRKANQADQPISIYEVHLGSWRRNLENNFWLDYDQIAEELIPYVKDMGFTHIELLPLSEFPFDGSWGYQPIGLYSPTSRFGTAEGFKRLVNKAHKAGINVILDWVPGHFPSDTHGLVAFDGTALYEHADPKEGYHQDWNTLIYNYGRHEVKNYLASNALYWMERFGLDGIRVDAVASMIYRDYSREDGQWIPNQYGGRENLEAIEFLKQTNHLLGTEIPGVVSIAEESTSFAGVTHPPYEGGLGFHFKWNMGWMNDTLSYMKKDPIYRQHHHSQMTFGMVYQYSENFILPLSHDEVVHGKCSLLGKMPGDAWQKFANLRAYYGYMWGYPGKKLLFMGNEFAQGREWNYQESLDWYLLDEFHGGGWHKAVQDYVRDLNHIYQKNAPLFELDTDPQGFEWLVVDDYQNSVFVFERRSKKDERIIVISNFTPVLRQNYRFGVNIAGEYMEILNSDAQQYMGSNSTNTSKIVTEDIESHNKAQSISIDIPPLATVYLKLHKVKKVRKMRKTSKVEDTAVKTEKKIAKGKTTRTKKTVADTVSEATEVKPKKTVTKRAVVKKVKNAEVIAESTSVENNVS

SEQ ID NO: 6536 - protein, 311 aa, Triticum aestivum
MATHFVLNTGAKIPSVGLGTWQSDPGVVGEAVYAAVKAGYRHIDCARAYNNEKEVGLALKKLFEEGVVKREDLFITSKLWCGHHAPEDVPEALGDSLNDLQLDYLDLYLIHWPFKIKKGTSIGNPENFLPPDIPATWGAMEKLHDAGKARAIGVSNFSSKKLGDLLAVARVPPAVDQVECHPTWQQSKLHSFCQSTGVHLSAYSPLGSPGSTWMNGNVLKEPVVVSIAEKLGKTPAQVALRWNIQMGHSVLPKSVSEERIKQNLAVYDWSIPEDLLAKFSEIKQARLLMGNFIVNKDSVYKTHDELWDGEI

SEQ ID NO: 6537 - protein, 372 aa, Arabidopsis thaliana
MENGEAKQSVPLLTPYKMGRFNLSHRVVLAPLTRQRSYGNVPQPHAAIYYSQRTTPGGFLITEATGVSDTAQGYQDTPGIWTKEHVEAWKPIVDAVHAKGGIFFCQIWHVGRVSNSGFQPNGKAPISCSDKPLMPQIRSNGIDEALFTPPRRLGIEEIPGIVNDFRLAARNAMEAGFDGVEIHGANGYLIDQFMKDTVNDRTDEYGGSLQNRCKFPLEIVDAVAKEIGPDRVGIRLSPFADYMESGDTNPGALGLYMAESLNKYGILYCHVIEARMKTMGEVHACPHTLMPMRKAFKGTFISAGGFTREDGNEAVSKGRTDLVAYGRWFLANPDLPKRFQVDAPLNKYDRPTFYTSDPVVGYTDYPFLESTA

SEQ ID NO: 6538 - protein, 334 aa, Bradyrhizobium japonicum USDA 110
MSIADAEFAQAKTAQSAPTAAKPQLPPGVVTEGPLVKAKLRESYLLLGILYVGAVAGIIWAVTQGVGKVELFTFAWMFALTTFGIGAGMHRLFVHRSFRTGPIMRVFFCAIAQMAVQGSIAKWVANHRRHHLYADDVGDPHSPQFDGFGNRYVSALKGFLHAQGSWVFDQATTDNEYYAKDILADPIAMFFVRTRWVWYGMSAVFIPGFIGYVFGGVHTMIGCVLFSGLLRAYLLILVSQLTGSVCHAYGYRRFEVDDASTNEFVTTILTFGEGLHNNHHRFPRDAYISHAWWEIDLNGLIILGMEKIGLVHDVFHASHRQLERASEAQAASTR

SEQ ID NO: 6539 - protein, 340 aa, Pichia anomala
MSHKASDEHHVDTDLITLSRFILTSQQKVAAQATGELTLLLNSLQFAFKFIANNIRKAELVNLMGLAGASNSTGDAQKKLDVIGDEIFINAMKASGNVKVLVSEEQEDLIVFDGPGNYAVVCDPIDGSSNIDAGVSVGTIFGIYKLLPGSKGSIKDVLRPGTEMVAAGYTMYGASAHLMLTTGQGVNGFTLDASLGEFILTHPNLTISDEKHIFSVNEGNTTYWTPEVQQFIADLKKPQFNGKPYSARYIGSMVADVHRTLLYGGLFAYPADAKSKAGKLRILYECFPMAFLFEQAGGKAVTDNGDRILELKPKAIHDRSGIWLGSKVEIDRFLKATGKI

SEQ ID NO: 6540 - protein, 434 aa, Cattleya bicolor
MSKVFGIEAPLSKIALSKAHGEDSPYFAGWKAYEENPYDAMNNPNGVIQMGLAENQLSFDLLEEYLEQHPDAFGWGSDLSGFRENALFQDYHGLQTFRKAMASFMEKIRGGRSKFDPNRIILTAGATAANELLTFILANPGDAILVPTPYYPGFLRDLQWRTGVTIFPVHCDSSNGFQLTLSSLEKAYADAKASNFKVKGLLITNPCNPLGTTASFSLLQDIILFISDKNIHLISDEIYSGSVFSSTNLFSISDLITDAVSEQIHIVYSLSKDLGLPGFRVGALYSYNDRVVKTARRMSSFSLVSSQTQKLLAFMLSDEEFTVRYIEKNRERLTERYELVVEGLKEARIECLKGEAGLFCWVNMEELMEEKTMEEELKLWKVIVEELKLNITPGSSCCCSEPGWFRVCFANMSRETLEVALRRLKDFAQKKDCR

SEQ ID NO: 6541 - protein, 250 aa, Glycine max
  misc_feature (192)..(192): Xaa can be any naturally occurring amino acid
  misc_feature (218)..(218): Xaa can be any naturally occurring amino acid
  misc_feature (232)..(232): Xaa can be any naturally occurring amino acid
  misc_feature (234)..(235): Xaa can be any naturally occurring amino acid
YIWLRRNSDIVGMKKDGISVFRELALFQDYHGLPALKNELVDFMAKIRENGIKFASEKLVLTAGATPANEILMFCLADPGEAFILPTPYYPGFDRDLKWRTGVEIVPMHCSSSNGFRITSSALEQAYQQAQKLNLKIKGVLVTNPSNPLGITMTKTELNHLVDFAIDKNIHIISDEIYSGTVFDSPKFVSIXEVVNERITTVNNNSITSIWNRIHIVXGFSKDLGIPGFSCXEXXLQHETVVAAATKMSS

SEQ ID NO: 6542 - protein, 478 aa, Bacillus licheniformis ATCC 14580
MIHQRLRPFPDHFLWGSASAAYQIEGAWNEDGKGLSVWDVFTKIPGKTFKGSNGDIAVDHYHRFKEDVALMAEMGLKAYRFSVSWPRIFPQGRGEANESGLRFYDDLINELLAHDIEPVLTLYHWDLPQALMDEYGGFESRRIIEDFNAYCVTLYKRYGGRVKYWVSLNEQNYNFNHGFITAMHPPGVKDRKRFYEANHIAFLANAKAIDSFRRYVPDGKIGPSFAYSPAYPLSSRPDDILAFENAEEFTNYWWLDMYCRGTYPDIPLKYLKEKGWAPTIEDGDMELLAKGKPDFVGVNYYQTITYEMNPLDGVSEGKMNTTGQKGSNQETGMPGLYKTKRNPHLETSNWDWAIDPIGLRIGLRRISSRYGLPLFITENGLGEFDKVENDGTIHDDYRIAYLRAHLEQCRQALNDGVDLIGYCSWSFTDLLSWLNGYQKRYGFVYINRDEENVKDLKRIKKDSFYWYQNVIQTNGEEL

SEQ ID NO: 6543 - protein, 450 aa, Methylococcus capsulatus str. Bath
MSRYEFPERFLWGAATSAYQVEGSPLADGAGPSNWHRFCRQPGRILNGDTGDTACDHYRRFREDVALMKALGLSAYRFSIAWSRIFPEGKGRINWRGIAHYQALVETLLEHGIRPMATLHHWDLPAALEDLGGWANRDSAGWFADYAHTVIRALGNEIDLWATLNEPWVIMDAGYVSGVHPPGHRSLKDAPWVTHNLLRAHALAVQAFRADGRGQIGLVVNLEPKYALTDSRDDRAAAERAHAYMNRQYLDPVLHGAYPDELAEISALHWPSFESEDLRVIQEPIDYLGINYYTRAVVRHDPSGGPLEVTAVPQRGVEHTEMGWEVYPQGLKDVLAWVKARYGDIPLYITENGAAFADPEGENGRIDDTRRIAYYRSHLRALHEAIAQGVDVRGYFAWSLLDNFEWTYGYARRFGLVQVDPLTQRRIPKASAGFYAEVAQTNGAVLDRDY

SEQ ID NO: 6544 - protein, 488 aa, Listeria monocytogenes EGD-e
MTDRKNLTTNQGVPVGDNQNSMTAGRKGPTLIEDYVLIEKLAHFDRERVPERVVHARGAGAHGKFVTKKSMKKYTMAKFLQEEGTETEVFARFSTVIHGQHSPETLRDPRGFSVKFYTEEGNYDFVGNNLPVFFIRDAIKFPDVIHSLKPDPRTNIQDGNRYWDFFSLTPEATTMIMYLFSDEGTPASYREVRGSSVHAFKWINEEGKTVYVKLRWVPKAGIVNLSTEQASQIQAKEFNHASRDLYEAIENGDYPEWDLYVQVLDPKDLDSFDFNPLDATKDWFEDVFPYEHVGTMTLDRNPDNIFAETESVGFNPGVLVRGMLPSEDRLLQGRLFSYSDTQRHRVGPNYLQLPINSPKAPVANNQRDGHMPFKQQTSSINYEPNSYDTEPKENPAFIEPEQEIRGDISGRLIAEKPNNFGHAKEVWDRYSNAERAALVKNIVDDWSQVREDIKIRNLRNFYQVDPEFASRVAAGTGINLEEHVTDLK

SEQ ID NO: 6545 - protein, 370 aa, Arabidopsis thaliana
  misc_feature (259)..(259): Xaa can be any naturally occurring amino acid
METKQSIPLLMPYKMGPFNLSHRVVLAPLTRSRSYGNIPQPNAKLYYTQRTTPGGLLISESCVVSETSLGYPDLPGLWNRDQVEAWKPIVDAVHSKGGIFFCQIWHGGRVFHQDQPNGEAPVSSTDKPLMCKNMYGGQFKPPRRLRSDELPAIVNDFRIAARNAIEAGFDGVEVHGAHGYLIDQFLKDKVNDRSDQYGGSLENRCRFALEVIEAVVNEIGSDRVGIRLSPFADYMESGDSNPEALGLYLVQAMNKHGMXVVYGHMVEPRMKTLEGIFECTESLTPMRKAFKGTFIVAGGYSREDGNKAVEEGRTDLVAYGRPFLANPDLTRRFELNEPLNRYDRSTFYTSDPVVGYTDYPFLETTDTTTA

SEQ ID NO: 6546 - protein, 305 aa, Arabidopsis thaliana
MSLSASEKEENNKKMAADKAEMGRKKRAMWERKWKRLDIVKAFASLFVHFLCLLAPFNFTWPALRVALIVYTVGGLGITVSYHRNLAHRSFKVPKWLEYFFAYCGLLAIQGDPIDWVSTHRYHHQFTDSDRDPHSPNEGFWFSHLLWLFDTGYRVEKCGRRTNVEDLKRQWYYKFLQRTVLYHILTFGFLLYYFGGLSFLTWGMGIGVAMEHHVTCLINSLCHVWGSRTWKTNDTSRNVWWLSVFSFGESWHNNHHAFESSARQGLEWWQIDISWYIVRFLEIIGLATDVKLPSESQRRRMAMVR

SEQ ID NO: 6547 - protein, 182 aa, Oryza sativa
  misc_feature (31)..(31): Xaa can be any naturally occurring amino acid
  misc_feature (64)..(64): Xaa can be any naturally occurring amino acid
  misc_feature (112)..(112): Xaa can be any naturally occurring amino acid
  misc_feature (119)..(119): Xaa can be any naturally occurring amino acid
MSLIRRSNVFDPFSLDLWDPFDGFPFGSGGXSSGRCFPSFPRGDSSETAAFAGARIDWKETPEXHVFKADVPGLKKEEVKVEVDDGNILQISGERIKEQEEKTDKWHRVERXSGKFLRXFRLPENTKPEQIKASMENGVLTVTVPKEEPKKPDVKSIQITGLEHWANLKRFICGFKCIDHLC

SEQ ID NO: 6548 - protein, 338 aa, Burkholderia fungorum LB400
MALQRRTTLTKYLIEQQRETNNLPADLRLLIEVVARACKAISYHVSKGALGDALGTAGSENVQGEVQKKLDILSNEILLEANEWGGNLAGMASEEMEQFFPIPANYPKGEYLLVFDPLDGSSNIDVNVSIGTIFSVLRCPDGQQPTEQSFLQPGTQQVAAGYAVYGPQTVLVLTTGNGVNCFTLDRELGSWVLTQSDMRIPVETREYAINASNERHWYPPVQQYIGELKDGKEGSRQSDFNMRWIASMVADVHRILNRGGIFMYPADKRTPDKPGKLRLMYEANPMAFIVEQAGGAATNGEKRILDIQPKSLHERVAVFLGSKNEVDRVTRYHLETKK

SEQ ID NO: 6549 - protein, 339 aa, Clostridium acetobutylicum ATCC 824
MKIFEAYTIKNMCLKNRIVMPPMCMYSSDNTGNINDFHLVHYTTRSIGGVGFIIVEATGITPNGRISDKDLGIWSEKHAEGLSFLVKEVKKYGSKIAIQLNHSGRKYEGTSGEPVAPSALAFDENSKTPKELTKNEIKEIILAFKAAAKRAEKAGFDAIEIHGAHGYLINQFLSPLSNFRDDEYGGSTENRTRFLKEVLEAVREVWPKEKPILLRVSAEDYRGGSGITPNEMVNIINIVKDLIDVVDVSSGGVAPAHINLYPGYQVKLSEVIKNECNVPTIAVGLICDINMVEEILSNNRADLVALGRELLRNPYFVLSSARLKNINIDFPKPYERAFN

SEQ ID NO: 6550 - protein, 209 aa, Orchis italica
MGRGNTEIKRIENSTNRQVTFSKRRSGIIKKAREISVLCDAQVSLVIFSSLGKLSEYCSPSTTLSKMLERYQQNSGKKLWDATHENLSAEIDRIKKENDTMQIELRLKGEDLNSLTPKELIPIEEGLQNGLTSVREKQMDFLKMLKKNERMLEEENKRLKYLLQHQQLAIEGSMRELEISYHQKDPEYADQMPMTFRVQPFQPNLHGNN

SEQ ID NO: 6551 - protein, 252 aa, Prunus emarginata
AHYKSEADVGNALAEAFETGLVKREELFITSKASNHGHVVEACKNSLKKLRLDYLDLYLVHYPLATKHSGVGTTASLLDENKVLDIDVTVSLETTWHTMEKTVYLGLVRSIGLSNYEFFLTRDCLSYAKIKPQVSQFETHPYFQRESLVRFCKKHGVTPMAHTPLGGATANVKAFGSISPLEDPVLLGLAKKYKKSVAQIALRWNIERDTAVIPKSSKVERLKENLEVLNFKLEKEDIELINTIDKKSRTTL

SEQ ID NO: 6552 - protein, 545 aa, Oceanobacillus iheyensis HTE831
MAKDLKFSEDARRAMLRGVDTLADAVKVTLGPKGRNVVLDKKFGSPLITNDGVTIAKEIELEDAFENMGAQLVSEVASKTNDVAGDGTTTATVLAQAMIREGLKNVTSGANPVGIRRGIEKAVELAVQELKGISQPIESKEAISQIAAVSSGDEEVGQLIAEAMERVGNDGVITIEESKGFNTELEVVEGMQFDRGYASPYMVTDQDKMEAVLEDPYILITDKKIGNIQEVLPVLEQVVQQGKPLLMIAEDVEGEALATLVVNKLRGTFNAVAVKAPGFGDRRKAMLEDIAVLTGAEVITEDLGLDLKSASIDQLGRASKVVVTKENTTVVEGSGDPEAISSRVAQIRAQAEESTSDFDKEKLQERLAKLAGGVAVIKVGAATETELKERKLRIEDALNSTRAGVEEGMVPGGGTALVNIHRQVSELTLEGDEATGASIVLRALEEPVRQIVHNAGLEGSIIVERLKGEKVGIGYNAATDEWVNMVEAGIVDPTKVTRSALQNAASVAAMFLTTEAVVADKPEENGGAGGGMPDMGGMGGMGGMM

SEQ ID NO: 6553 - protein, 427 aa, Prochlorococcus marinus str. MIT 9312
MNSSFNKLLTFKTLITALMIIVIYTNFLLIERVDALSDSKQLVLDAWTLVNEGFYDPDKFDEIQWKRIRQKTLQKQIETSEEAYSAIEDMLRPLEDPYTRILRPKDYELLKSSNFGSEINGVGLQLGEDDDSKKVKVISTLGGSPAEEAGIVSGEFIEKVDGISSEVLGLANTASKLRGESGTKVLVQISSEAGEIREVDLERRSVDLRPVRTKRLRDDSHTIGYLRITQFSESVPKKVEEALQELKEKEVEGLILDLRNNSGGLVSSGIAVADSLLSERPVVETKNRNGIKDAIISQKETFFDGPMVTLVNKGTASASEILAGSLQDNSRSILMGEQTYGKGLIQSLKSLGEDSGIAITVASYLTPKGNNIQGQGMKPDKLLDLPDATEYGSADDKWVKNAELFLDSLLEKEEVSSQTSELSNEEV

SEQ ID NO: 6554 - protein, 252 aa, Prunus emarginata
  misc_feature (193)..(193): Xaa can be any naturally occurring amino acid
AHYKSEADVGNALAEAFETGLVKREELFITSKARHHGHVVEACKNSLKKLQLDYLDLYLVHYPLATKHSGVGTTASLLDENKVLDIDVTVSLESTWHDMEKTVSLGLVRSIGLSNYELFLTRDCLSYAKIKPQVSQFETHPYFQRETLVRFCRKHGVCPMAHTPLGGATANVKAFGSISPLEDPVLRALAKKXKKSVAQIALRWNLDRNTPVIPKSSKIERLKENLEVLNFKLEKEDIELINTIDKKSRTTL

SEQ ID NO: 6555 - protein, 155 aa, Pisum sativum
IIPRVFGTGRRTNAFDPFSLDLWDPFQNFQLARSATGTTNETAAFANAHIDWKETPEAHVFKADLPGVKKEEVKVEIEEDRVLKISGERKTEKEDKNDTWHRVERSQGSFLRRFRLPENAKVDQVKAAMENGVLTVTVPKEEVKKPEAKPIQITG

SEQ ID NO: 6556 - protein, 252 aa, Prunus emarginata
SSLQSEADVGNAIAEAIQSGLVKREELFITSKASNHGHVVEACKNSLKKLRLDYLDLYLVHYPLATKHSGVGTTASLLDENKVLDIDVTVSLETTWHDMEKTVSLGLVRSIGLSNYELFLTRDCLSYAKIKPQVSQFETHPYFQRESLVRFCKKHGVTPMAHTPLGGATANVKAFGSISPLEDPVLLGLAKKYKKGVAQIALRWNIERDTAVIPKSSKVERLKENLEVLNFKLEKEDIELINTIDKKSRTTL

SEQ ID NO: 6557 - protein, 555 aa, Photobacterium profundum SS9
MCSVFGILDIKSDPSALRATALEMSKKMRHRGPDWSGIYSSDKAILVHERLAIVDLNSGEQPLYNQDKTHILAVNGEIYNHKELSAEFAPDYPFQTESDCEIILALYKEKGPELLDYLNGIFGFILYDAVEDAYLIGRDHIGIIPLYQGYDEHGNYYIASEMKALVPICKTISEFPPGSFLWSKKGEPTRYYKRDWMEFETVADAPTDKVALKEALESAVKRQLMTDVPYGVLLSGGLDSSIISAITKKFAARRIEDDEKSQAWWPTLHSFAVGLEDAPDLKAAKIVADSIGTVHHELTYTIQEGIDAIRDVIYHIETYDVTTIRASTPMYLMSRKIRAMGIKMVLSGEGADEVFGGYLYFHKAPNKREFHEETVRKLLALNMFDCARANKSMAAWGIEARVPFLDKEFLEVAMRINPEDKMCGNGKMEKHILRECFEDHLPESVAWRQKEQFSDGVGYSWIDSLKEVAEAKVTEQQLETASFRFPYNTPTTKEGYMYREIFDELFPLESAAKCVPGGPSIACSSAKAIEWDESFKNSADPSGRAIAAVHNEAYK

SEQ ID NO: 6558 - protein, 227 aa, Capsella rubella
RGKIEIKRIENTTNRQVTFCKRRNGLLKKAYELSVLCDAEVALIVFSSRGRLYEYSNNSVKGTIERYKKAISDNSNTGSVAEINAQYYQQESAKLRQQIISIQNSNRQLMGETIGSMSPKELRNLEGRLERSITRIRSKKNELLFSEIDYMQKREVDLHNDNQILRAKIAENERNNPSISLMPGGSNYEQLMPPPQTQPQPFDSRNYFQVAALQPNNHHYSSAGGRQ

SEQ ID NO: 6559 - protein, 226 aa, Capsella bursa-pastoris
RGKIEIKRIENTTNRQVTFCKRRNGLLKKAYELSVLCDAEVALIVFSSRGRLYEYSNNSVKGTIERYKKAISDNSNTGSVAEINAQYYQQESAKLRQQIISIQNSNRQLMGETIGSMSPKELRNLEGRLERSITRIRSKKNELLFSEIDYMQKREVDLHNDNQILRAKIAENEKNNPSISLMPGGSNYEQIMPPPQTQPQPFDSRNYFQVAALQPNNHHYSSAGRQ

SEQ ID NO: 6560 - protein, 227 aa, Oryza sativa (japonica cultivar-group)
MSLHTVVHHKFTTGVCEAGEEEGVGDRRPATDHVAAGEGAVCGRPGAERRPLVAFSLKDRSLHDEFEIDMLRRFGWIVPAYTMPPDAMVLRFVIREEFSRTLAERLVLDIEKVMCQLDALPSRLMPPVPPAPPSVSMGAHRAPPRRRAPHGPPLHSMDLALRVDLLSAGGRHASPSPPPLAGAIEAPPSSSPASHCWPQQTHSRREQRERNEMGDKRGKERRLMWQC

SEQ ID NO: 6561 - protein, 226 aa, Capsella bursa-pastoris
RGKTEIKRIENTTNRQVTFCKRRNGLLKKAYELSVLCDAEVALIVFSSRGRLYEYSNNSVKGTIERYKKAISDNSNTGSVAEINAQYYQQESAKLRQQIISIQNSNRQLMGETIGSMSPKELRNLEGRLERSITRIRSKKNELLFSEIDYMQKREVDLHNDNQILRAKIAENERNNPSISLMPGGSNYEQIMPPPQTQPQQFDSRNYFQVAALQPNNHHYSSAGRQ

SEQ ID NO: 6562 - protein, 247 aa, Vibrio vulnificus YJ016
MSLSITHEKSLIDNYIWILFDKSKAIVIDPGESEKIINFLDKNNLTLEFIFLTHGHCDHTKGVFSLKEKFPNASLFVPIGLELGLGESIIKEGDELNLLNSTFNVLELPGHTDNHIGIMYKDNLFCGDVLFSAGCGRVGSNYKDMYLSLKKIKSMDDKTKIYFSHEYTLDNLKFAHYIDPKNKNIINYIEVFKEKPDTVSAPTTLLLEKEINPFLRLSENIDIKNKINNEFDAFVYLRKLKDKFNSI

SEQ ID NO: 6563 - protein, 482 aa, Brevibacterium flavum
MNANVRVFILNSLAMNDPQRPPTLLWFRDDLRLSDNAALKWAADHGPVIGLFIDETINRSIGAAARWWREQSLNALAQDLSFYGVPLLRRTGNPLEILPKIVSEMEVKAVTWNRRYHQPLCEVDATLKKNLRDQGIEVHSHPGFLLTEPWEVSTATGTPYKVFTPFSKAAWEVARGHAYETVKNNVTVPSHLTGPEGVELPIPEMEQPFWATTLVKECAPGEKNASEKLFDFLEHLQDYPQARDSLARSATSKLSAHLRFGEISIHRVWAETAAIDSEGTELFLKELLWRDFAWHRLYALPHMDTQNVRMQFNRFGWSWDPSEKDKLNTPSTPLIPTKADQFHEDLAAWRAGKTGIPLVDAGMRELWATGSMHNRVRMVVASFLTKNLQIHWRHGEEWFWETLVDADPASNAFNWQWAAGSGDDASPYFRIFNPVTQAKKFDPDETYIRRWVPEYGTPSYPDPIVDLKESRQIALDAYSAIK

SEQ ID NO: 6564 - protein, 542 aa, Oryza sativa (japonica cultivar-group)
MAEAEAEAAGAGAGAGPARRTTRVGRYELGKTIGEGSFAKVKVARDTRTGDTLAIKVLDRNHVLRHKMVEQIKREISTMKLIKHPNVVQLHEVMASKSKIYMVLEYVDGGELFDKIVNSGRLGEDEARRYFHQLINAVDYCHSRGVYHRDLKPENLLLDSHGALKVSDFGLSAFAPQTKEDGLLHTACGTPNYVAPEVLADKGYDGMAADVWSCGIILFVLMAGYLPFDDPNLMTLYKLICKAKVSCPHWFSSGAKKFIKRILDPNPCTRITIAQILEDDWFKKDYKPPLFEQGEDVSLDDVDAAFDCSEENLVAEKREKPESMNAFALISRSQGFNLGNLFEKEMMGMVKRETSFTSQCTPQEIMSKIEEACGPLGFNVRKQNYKMKLKGDKTGRKGYLSVATEVFEVAPSLHMVELRKTGGDTLEFHNFYNNFSSELKDIVWKSESDAKAAKKREYKNAESYDIDSCWRKQRWDAKWICKCKWELGHHNHSCCQYSSASFFVMLEMKIYPPFEAPVILPSFFASSVLSASIIYGHGVRYF

SEQ ID NO: 6565 - protein, 524 aa, Solanum tuberosum
MFKSNNVTARLFERQICTPAPGTSIHRARRFYENIVPSYTIYDVECPDHSFRKFTDDGLYLVSFSRNHQDLVVYRPTWLTFSCKEEDCDTHDLPLKARKFESFFTQLYSVTLASSGELICKDFFLYMESNQFGLFATSTAQIHDAPPTGGAIQGVPSVEKITFHLLRLEDGAILDERVFHNDYVNLAHSIGAFLYDDLLAIVSLRYQRIHILQIRDSGDLVDVRAIGEFCREDDELFLNSNSQVLVNHVGNGFHHSLPESETSFLSGIKQRLLSFIFRGIWNEETDQTMRVQCLKKKFYFHFQDYIDLIIWKVQFLDRHHLLIKFGSVDGGVSRNADSHPSFFAVYNMETTEIVAFYQNSADELYFLFELFSDHFHVSSKSSLHMNFMSSHSNNIHALEQLRCTKNKATNFSQFVKKMMASLPFSCQSQSPSPYFDQSLFRFDEKLISAIDRHRQSTDHPIKFISRRQPNILKFKMKPGPEAGSTDGRTKKICSFLFHPILPLALSVQQTLFLQASVVNIHFRR

SEQ ID NO: 6566 - protein, 150 aa, Bradyrhizobium japonicum USDA 110
MRYLHTMLRVRNLDVALKFYQDALGLKEVRRIENDKGRFTLVFLCSADDLEALKKQPQTRGAPLVELTYNWDEEKYGEDRFFGHLAYEVDDIYATCEKLMKAGVTINRPPRDGNMAFVRSPDLHSIELLQKGEPKAPQEPWSSMPNTGHW

SEQ ID NO: 6567 - protein, 486 aa, Neurospora crassa
MSSSNSRRLNIDNINPHVRAAKYAVRGELAVKSEEFRAALLRGTSDIPFSQVISANIGNPQQLDQKPITFFRQVLSLLENPLLLEHEDVLINHLGYKTDVIERAKWFLKNVGSVGAYSASNGAPAIRQHIAEFLERRDGFPANWQDIYLSAGASSGVNTLLHIICADEKSGILVPIPQYPLYTASLSILNATCVPYLLDESKNWGTDINTIKESYQKAKDAGVDTRAIVIINPGNPTGASLSEEDIRAVLEFARQERLVVLADEVYQTNVFIGEFISFKRVLRQLQKENPDGKYDCVELASLHSISKGMVGECGHRGGYFELVNFDPEVQAEIYKFVSIMLCAPVIGQCLVELMVNPPKPGEPSYELYEKEYRGIYEGMRERANALHKAFEQMEGVECGAPQGAMYLFPTINLPPKAAEAAAKEGRTPDEFYCMKLLEATGVCVVPGSGFGQKEGSLHFRTTFLAPGTEWVGSIVKFHKEFMDQYR

SEQ ID NO: 6568 - protein, 349 aa, Sinorhizobium meliloti 1021
MSGATLEAYLASCTARGDDLSRDVAAVIQRLAKAALDIRKLVNQGALGTAFNGTHGGSNTDGDLQKDLDILCDDQFLTCLQGAPVACYASEELENPVLLDPSARLAVAIDPLDGSSNIDNNVSIGTIFSVLPAAKGPDVDPSQSFLQPGNRQLAAGFFIYGPQTALVLSLGKGTEIFIFSSRLGCFVEAYKSAIIPERAHEFAINMSNYRHWEEAIRLYVDDCLAGSEGPRERDFNMRWIASLVAETYRILIRGGIFLYPADGRKGYSQGRLRLVYEANPIAFIIENAGGAATTSIDRILDLVPENLHQRVPLVFGSRREVARITRYHVDPNMIGERAPLFGKRGLFRA

SEQ ID NO: 6569 - protein, 607 aa, Bacillus thuringiensis serovar konkukian str. 97-27
MCGITGWVDWKEDLSNQHVILKKMANRIQHRGPDAEGFWFSPRAAFAHRRLIVIDPEGGTQPKTFRAGDYTYALTYNGEIYNFRELREQLRKCGHLFETHSDTEVLLHAYLEWKEDCVQHLNGIFAFALWDDQKQRLFLARDHLGVKPLFYTERNNSIIFGSEIKALLAHPSVPAEIDADGINEIFGLGLFRTPGCGVFKHIQEVRAGHSITFTRDKKVVTKYWNLESKIHTDSIEDTSSRILSILQDTVKRQLIADVPLVCMLSGGLDSSGITALAGKEFAAENKTLHTYSVDFVNSAKDFELTFARTGLDAPWVKRVSEHVGTSHHDIIVNAEELANHLFVPLRAKDLPSAGEMETSLYLLFCEMKKDATVALSGESADEVFGGYPWFHQEELLYVDKFPWLTNWKTTSPLLLHEVSNQCNLENYIDTRFQEAILEVPTLEGESKKSAKQRQMFYLFLTRFLPFLLDRKDRMSMAVGFEVRVPFCDYRLVEYLWNVPFNIKSIDNIEKGILRRALKPALPDDVRNRRKSAYPTSQDPHYLQTIRNLTLEMCSNKNSPIFSLINHSTLLAIADGSNKEINNFEARSAMEYMLQVNEWLKTYHIHIA

SEQ ID NO: 6570 - protein, 827 aa, Geobacter metallireducens GS-15
MVLQKQASSIKARLLRINLLLLGVTSLVIVLVVNVAQKRLALNDAGRDAERILVRYLAIHAYINKELKPRLLDFTASLRDKDYFDPVWMSSTYAVREIDKIFQSRHGKGYYYKECAINARSPRNEADPFEREFLERASHNPAVTTFNGVREIDGKLFFVAMARGEAMEKSCLLCHSNPETAPGGLVRTYGPNRSFSRHENELVSAISIRIPLSEAYAEANSFSLRLSALLLAVIASFFAIKNWFFGRVVLSPLASVTESARRIAHDRRYLGEQIPLGRDREMNELAASFNVMSTELHAFINNLEEKVEEKTAELVQAREEAEEANRVKGEFLATMSHEIRTPMNAIIGINQLLQETHLSQQQRRLVDDSSNAAESLLTIINDILDFSRVEARRLELSDEALELRSFVESLRRLFAVKAERENISLSILVGDEAPQFICGDPARLRQVLTNLLSNAIKFTPTGGRVTLAADADPAGGNLLFTVSDTGIGIEKDKHERIFEMFRQADSSTTRNYGGTGLGLAITRGLVELMGGTIEVESEAGKGAVFRVLLPLRPATGPPADKTAGEELSDSVLPSLSVLVVEDNELNRTVAIGLLTALKQRVAAVANGREAVDALRDGTYDLVLMDISMPEMDGIEATRAIRRGDAGEKARAIPIVALTAHALKDDRDRFLAAGMSDYLSKPLIRGELQRMLLRIAGERGELPPEERCPMRDAPDEGSPFDLEFQQSQFHDAGIGDCLAEVLSIFAQSTATECERMEEYLATGKYAELAAAAHSVKGAAATIGAPHVSRYAADVETAARKSDGVAVARTIPLLRREVRRVEAAVGEMS

SEQ ID NO: 6571 - protein, 176 aa, Zea mays
MADAPASPGGGGGSHESGSPRGGGGGGGGSVREQDRFLPIANISRIMKKAIPANGKIAKDAKETVQECVSEFISFITSEASDKCQREKRKTINGDDLLWAMATLGFEDYIEPLKVYLQKYREMEGDSKLTAKSSDGSIKKDALGHVGASSSAAQGGAYNQGMGYMQPQYHNGDISN

SEQ ID NO: 6572 - protein, 452 aa, Mesoplasma florum L1
MLKFPKNFHIGASMSAMQTEGKGITEIGDLTFDAYFKENPELFYHGVGPDLTSDITRHYKDDIEKFKYIGLDSVRTGFSWARLFPDGINLNKEAVKFYHDYIDEYLKNDIEIIMTLFHFDMPLWAHELGGWESREVIEKFISYCEFVFKEYGSKINYFVTFNEPLVPVFEGYVGKMHYPAKDSPKEAVAQAYGIFLAHAKAVKLFKELKIDSKIGVVYNWNFTFPFSDSAEDKISAEIYDAYVNRGPLNIMYNGNINPIIIKTLEEYNITPFHTSEEIEIIKQTEIDFLGVNYYFPCRVKTNENVKNRWALDQMHIEIPADAKINPFRGWEIYPEGLYDISIAIKKELNNIPWYIAENGMGVENEDRFRNENGQIDDDYRIEFLETHMSELKRGLDAGSNCFGYHIWAAIDCWSFRNAYKNRYGLIEVDLKDQSRKFKKSAYWYKELIENKE

SEQ ID NO: 6573 - protein, 499 aa, Aspergillus nidulans FGSC A4
MTTRTTVPNASQRALSTAAVRCLTLDNINSNVKAAKYAVRGELAVKAEEYRVRLAQGDKTLPFDSVIFANIGNPQQLDQKPITFFRQVLSLMENPLLLSNKDALRTSFGYQDDVIERAEKLLAEVQSVGAYSHSQGAPLIRESVAKFIEERDGFPADPQSLYLTGGASSGVNTILNVICNGPNAGVLVPIPQYPLYTATLSLLNAQCVPYHLEEQKAWGTDIGTIKKSLEQAKAAGTDVRAIVVINPGNPTGASLSPADIKSVLDIAAEEKLVVIADEVYQTNVFIGEFTSFKKRLRELQQEVPGKYDNVELVSLHSTSKGMVGECGHRGGYFELVGFDPLVAAQVYKFISIMLCPPVIGQCLVELMVNPPKEGEPSHELYQKEYNGIREGLRQRAFALYEAFQRMEGVECQEPQGAMYLFPTISLPPKAIEAAAAENRAADEFYCLRLLDATGVCVVPGSGFGQKENTLHFRTTFLAPGTDWVERIVKFHSEFMAKYK

SEQ ID NO: 6574 - protein, 213 aa, Sinapis alba
MVRGKTQMKRIENATSRQVTFSKRRNGLLKKAFELSVLCDAEVSLIIFSPKGKLYEFASSNMQDTVDRYLRHTKDRVSSKPVSEENMQHFKHEAANMMKKIEQLEASKRKLLGEGIGSCSIEELQQIEQQLEKSVKCVRARKTQVFKEQIEQLKQKEKALAAENEKLAEKWGSHEIEVWSNKKQESGRGDEESSPSSEVETQLFIGLPCSSRK

SEQ ID NO: 6575 - protein, 418 aa, Triticum aestivum
  misc_feature (355)..(355): Xaa can be any naturally occurring amino acid
MIGGGGGGALRRVGKYEVGRTIGEGTFAKVKFAQNTETGESVAMKVLDRSSILKHKMVDQIKREISIMKLVRHPNVVRLHEVLASRKKIFIILEFITGGELFDKIIRHGRLSEADARKYFQQLIDGVDFCHSKGVYHRDLKPENLLLDSQGNLKISDFGLSAWPAQGAALLRTTCGTPNYVAPEVLSHKGYDGALADTWSCGVILYVLLAGYLPFDEVDLTTLYGKIETAEYSFPAVFPSGAKSLIRRILDPSPDTRIRIEEIRKDEWFKKDYEPVREVENEEVNLDDVNAAFDDPEEDNQHTFDDEAGPLTLNAFDLIILSQGLNLSALFDRRQDYGQLHNRFLSRKTSKCYIXSSMEVVAQSMGVKTHIRHYKMRVGGSKCEQDLAISQLCLKFLKLPHPPLWWELERSAGRFFRV

SEQ ID NO: 6576 - protein, 644 aa, Chlamydia trachomatis D/UW-3/CX
MMRFARFCLLVLTLFPQLAFSAEPLRRQDVRKTVDKLVEHHIDTQQISPYILSRSLEDYVRSFDSHKAYLTQDEVFSHAFSEEATRPLFKQYQEDNFSSFKELDTCIQQSISRAREWRSSWLTDSIRVIQDAMSHTIEKKPSAWASSIEEVKQRQYDLLLSYASIYLEDAAKNRYQGKEHALVKLCIRQIENHENPYIGINDHGYRMSPEEEANSFHVRIIKSIAHSLDAHTAYFSQEEALSMRAQLEKGMCGIGVVLKEDIDGVVVKEVLAGGPADKTGSLRVGDIIYRVNGKNIENTPFPGVLDSLRGSPGSSVTLDIHRQNNDHVIQLRREKILLDSRRVDVSYEPYGNGIIGKITLHSFYEGENQVSSEQDLRKAIRELQEKNLLGLVLDIRENTGGFLSQAIKVSGLFLTNGVVVVSRYADGSVKRYRTISPQKFYDGPLAVLVSKSSASAAEIVAQTLQDYGVALIVGDQQTYGKGTIQHQTITGSNSQEDFFKVTVGRYYSPSGKSTQLEGVKSDIVIPSRYAEDKLGERFLEYALPADQYENVINDNLGDLDINIRPWFQKYYSPHLQKPELVWREMLPQLAHNSQERLEKNKNFEIFVQHLKKTNKQDRSFGSNDLQMEESVNIVKDMILLKSIS

SEQ ID NO: 6577 - protein, 212 aa, Haemophilus influenzae 86-028NP
MNIEIIPVTAFQQNCSLIWDDDKNAAIIDPGGEAERLIQRIEELDLNLKVILITHGHLDHVGAAMQLKQHFGVEIWGSNEKDKFLFESLPEQAQRFGLPNIEAFLPDRWFNQEGEILKLDGFNFEILHLPGHTPGHIGFIEHEKKVAFTGDVLFQGGIGRTDFPRGDYETLISSIRTKLLPLNDDLIIIAGHGSYTTIGQEKRSNPFLNSKS

SEQ ID NO: 6578 - protein, 216 aa, Arabidopsis thaliana
MGRGKIEIKRIENSTNRQVTFCKRRNGLLKKAYELSVLCDAEVALIVFSTRGRLYEYANNNIRSTIERYKKACSDSTNTSTVQEINAAYYQQESAKLRQQIQTIQNSNRNLMGDSLSSLSVKELKQVENRLEKAISRIRSKKEIELDNENIYLRTKVAEVERYQQHHHQMVSGSEINAIEALASRNYFAHSIMTAGSGSGNGGSYSDPDKKILHLG

SEQ ID NO: 6579 - protein, 226 aa, Capsella bursa-pastoris
RGKIEIKRIENTTNRQVTFCKRRNGLLKKAYELSVLCDAEVALIVFSSRGRLYEYSNNSVKGTIERYKKAISDNSNTGSVAEINAQYYQQESAKLRQQIISIQNSNRQLMGETIGSMSPKELRNLEGRLERSITRIRSKKNELLFSEIDYMQKREVDLHNDNQILRAKIAENERNNPSISLMPGGSNYEQIMPPPQTQPQQFDSRNYFQVAALQPNNHHYSSAGRQ

SEQ ID NO: 6580 - protein, 224 aa, Camelina sativa
RGKIEIKRIENTTNRQVTFCKRRNGLLKKAYELSVLCDAEVALIVFSSRGRLYEYSNNSVKGTIERYKKAISDNSNTGSVAEINAQYYQQESAKLRQQIISIQNSNRQLMGETLGSMSPKELRNLEGRLERSITRIRSKKNELLFSEIDYVQKRESDLHNDNQLLRAKIAENERNHPSISLMPGGSNYEQLMPPPQTQPFDSRNYFQVAALQPNNHHYSSAGRQ

SEQ ID NO: 6581 - protein, 695 aa, Haemophilus influenzae 86-028NP
MVMKFKMSKNVICYAWLSVCLSSAIPAFAVQPTLKPSDISIPAISEESQLATKRATTRLTQSHYRKIKLDDDFSEKIFDRYIKNLDFSHNTFLQSDIDELRQKYGTKLDEQLSQGDLSAAFDIYDVMMKRRYERYTYALSLLDKEPDLNGQDQIEIDREKAAAPQTEADANKLWDARVKNDIINLKLKDKKWSEIKAKLTKRYNLAIRRLTQTKADDIVQIYLNAFAREIDPHTSYLSPRTAKSFNESINLSLEGIGTTLQSEDDEISIKSLVPGAPAERSKKLHPGDKIIGVGQATGDIEDVVGWRLEDLVEKIKGKKGTKVRLEIEPAKGGKSRIITLVRDKVRIEDQAAKLTFEKVSGKNIAVIKIPSFYIGLTEDVKKLLVKLENQKAEALIVDLRENGGGALTEAVALSGLFIADGPVVQVRDAYQRIRVHEDDDATQQYKGLLFVMINRYSASASEIFAAAMQDYRRGIIIGQNTFGKGTVQQSRSLNFIYDLDQSPLGVLQYTIQKFYRVNGGSTQLKGVAADINFPEIIDAKEYGEDKEDNALAWDKIPSASYTEVGNIDYIDNAVNILNEKHLARIAKDPEFVALNEELKVRNERRDRKFLSLNYKMRKAENDKDDARRLKDLNERFKREGKKALKDIDDLPKDYEAPDFFLKEAEKIAADFVIFNSDQKINQANGLSEAKTESKK

SEQ ID NO: 6582 - protein, 151 aa, Brassica napus
MFSSGNVTSRVFERQIRSSPPGASVNRARKFYENLVPSHTLYDVECPDHCFRKFTEDGLFLISFSRNHQELVVYRPSWLTYTSVSDDTLPPLPRRASRFDSFFTQLYSVNLASANELICKDFFLYFPSRRFGLFATSTAQIHDSAPFPPPV

SEQ ID NO: 6583 - protein, 228 aa, Lepidium squamatum
RGKIEIKRIENTTNRQVTFCKRRNGLLKKAYELSVLCDAEVALVVFSSRGRLYEYSNNSVKGTIERYKKAISDNTNTGSVAEINAQYYQQESAKLRQQIVSIQNSNRQLMGETIGSMSPKELRNLEGRLERSITRIRSKKNELLFAEIDYMQKREVDLHNDNQLLRAKIAENERNNPSISLMPGGSNYEQIMPPPQTQPQPQQFDSRNYFQVAALQPNNHHYSSAGRQ

SEQ ID NO: 6584 - protein, 230 aa, Lepidium squamatum
RGKIEIKRIENTTNRQVTFCKRRNGLLKKAYELSVLCDAEVALVVFSSRGRLYEYSNNSVKGTIERYKKAISDNTNTGSVAEINAQYYQQESAKLRQQIVSIQNSNRQLMGETIGSMSPKELRNLEGRLERSITRIRSKKNELLFAEIDYMQKREVDLHNDNQLLRAKIAENERNNPSISLMPGGSNYEQIMPPPQTQPQPQSQSFDSRNYFQVAALQPNNHHYSSADRQ

SEQ ID NO: 6585 - protein, 226 aa, Lepidium phlebopetalum
RGKIEIKRIENTTNRQVTFCKRRNGLLKKAYELSVLCDAEVALIVFSSRGRLYEYSNNSVKGTIERYKKTKSDNSNTGSVAEINAQYYQQESVKLRQHIVSIQNSNRQLMGETIGSMSAKELKNLEGRLERSIARIRSKKNELLFAEIDYMQKREVDLHNDNQLLRAKIAENERNNPSISLMPGGSNYEQIMPPPQTQTQPFDSRNYFQVAALQPNNHHYSSAGRQ

SEQ ID NO: 6586 - protein, 349 aa, Oryza sativa
LVRHPNIVQLYEVMATKTKIYFVLEHVKGGELFNKVQRGRLKEDAARKYFQQLICAVDFCHSRGVYHRDLKPENLLLDENSNLKVSDFGLSALADCKRQDGLLHTTCGTPAYVAPEVINRRGYDGAKADIWSCGVILFVLLAGYLPFHDKNLMDMYKKIGKAEFKCPSWFNTDVRRLLLRILDPNPSTRISMDKIMENPWFRKGLDAKLLRYNLQPKDAGLLALSTGLDLSGMFEESDKKESKFTSTSTASTIISKIEDIAKGLRLKLTKKDGGLLKMEGSKPGRKGVMGIDAEIFEVTPNFHLVELKKTNGDTLEYRKVLNQEMRPALKDIVWAWQGEQPKQQQQPTC

SEQ ID NO: 6587 - protein, 330 aa, Debaryomyces hansenii CBS767
MNVDTDIITLTRFILQEQQKEAPNATGELSLLLNSLQFAFKFIAHNIRRAELVNLIGISGSANSTGDVQKKLDVIGDEIFINAMKSSNNVKVLVSEEQEDLIVFEGGGRYAVCTDPIDGSSNIDAGVSVGTIFGIYRLKEDSQGSIKDVLRKGTEMVAAGYTMYGASAHLMLTTGQGVNGFTLDTQLGEFILTQPHLTIPKTRAIYSVNEGNSHYWADSAKQYIADLKKPQEDGKPYSARYIGSMVADIHRTILYGGIFAYPADSKLKNGKLRILYECFPMAMLMEQAGGAAINDKGERILEILPKGIHDKSGIWLGSTGEVDRYLTYLK

SEQ ID NO: 6588 - protein, 280 aa, Listeria monocytogenes str. 4b F2365
MTLSFSDTYRLNNGIEMPRHGFGVYKLTDEARMRTALETAVDVGYRLFDTASFYHNEKELGDFFASSGLKRDEFFVTTKMWNTEQGYDETLRAFEKSQKKLQLDKIDLYLVHWPKQDTFFDTWRAVEKLYDEGLVRAIGVSNFEAHHLDRLRTSANVLPVVDQLETHPHFPNHLLHRYLEELHIVHQAWSPLGRGGVLQEQILIDLAEKYGKSPAQIVLRWHLQNNISIIPKSETPSRIRENAAIYDFELSEADMRQVERLNTGERVSHAPDVMYVRSEI

SEQ ID NO: 6589 - protein, 275 aa, Bacillus thuringiensis serovar konkukian str. 97-27
MHIPTTTLHNGVKMPLIGLGVYKAKEGDEVKQAVKTALEVGYRSIDTATVYENESGVGEAVRESGIPREDIFITTKVWNDDQGYEETLEAFEKSLKKLQMDYVDLYLIHWPIRGKYVDTYRALEKLYEEGKVRAIGVSNFHKHHLELLLPNCKIKPMVNQVELHPMLTQFELRNFCQGEQIQMEAWSPLMRGGEVFQHPIIQAIATKYEKTPAQVILRWDIQSGIVTIPKSVTPSRIQENFSIFDFSLTEEEMTEINTLNRNLHVGTNPDKYDTL

SEQ ID NO: 6590 - protein, 542 aa, Rhizobium leguminosarum
MAAKEIKFSTEAREKMLRGVDILANAVKATLGPKGRNVVIDKSFGAPRITKDGVSVAKEIELEDKFENMGAQMVREVASKTSDIAGDGTTTATVLAQAIVKEGAKAVTSGMNPMDLKRGIDLAVAAIVAELKANARKISNNSEIAQVGTISANGDAEIGRFLAEAMEKVGNDGVITVEEAKTAETELEVVEGMQFDRGYLSPYFVTNADKMRVEFEDPYILIHEKKLSNLQSMLPVLEAVVQSSKPLLIIAEDVEGEALATLVVNKLRGGLKIAAVKAPGFGDRRKAMLEDIAILTAGTVISEDLGIKLESVTLDMLGRAKKVSIEKENTTIVDGSGAKTDIEGRVAQIKAQIEETTSDYDREKLQERLAKLAGGVAVIRVGGSTEVEVKEKKDRVDDALHATRAAVEEGILPGGGVALLRAVKALDAVKTANGDQRVGVDIVRRAVEAPARQIAENAGAEGSVIVGKLREKSEFSYGWNAQTGEYGDLYAQGVIDPAKVVRTALQDAASIAGLLVTTEAMIAEKPKKDAPPPMPAGPGMDF

SEQ ID NO: 6591 - protein, 544 aa, Rhizobium leguminosarum
MSAKEIRFSNDARDRLLRGVELLNNAVKVTLGPKGRNVVIDKAYGAPRITKDGVSVAKEIELADKFENMGAQMVREVASKTNDLAGDGTTTATVLAASIFREGAKLVAAGMNPMDLRRGIDLGVTAVVKEIKARAMKVKSSSEIAQVGTIAANGDAAIGEMIAKAMDKVGNEGVITVEEARTAETELDVVEGMQFDRGYLSPYFVTNAEKMRVELEDPYILVHEKKLGSLQAMLPILEAVVQTGKPLLLISEDVEGEALATLVVNKLRGGLKVAAVKAPGFGDRRKAMLEDIAVLTSGQMISEDLGIKLDNVTLDMLGHAKRVLIDKESTTIIDGSGEKAAIQARIQQIKAQIEETTSDYDKEKLQERLAKLAGGVAVIRVGGATETEVKEKKDRIDDALNATRAAVEEGIVPGGGVALLRAKSALTGLTGENADVTAGISIVLRALEAPIRQIADNAGFEGSIVVGKLAGSNNHNQGFDAQTETYVDMIEAGIVDPAKVVRTALQDAGSIAALLITAEVMIADIPARDSAPAAGNGGMGDMGY

SEQ ID NO: 6592 - protein, 585 aa, Magnetospirillum magnetotacticum MS-1
MCGIAGLMTPGGPPDETVLDKLADALAHRGPDGRGRHVQGNVGLVQNRLSIIDLEGGRQPILDGQGNAIVANGEVYNYLELKSDMAGQAFATGSDCEPPLHLYRHQGPAFARSLRGMYALAIHDGKAEKLILCRDPFGIKPLYLAEGSPGLAFASEPQALLAAGLVKPELDPVALAELLQLQFTTGTRTIFKGIRRLAPGETVVAEEGCVAESRRLPALPAGGPNEGGLDQLLDQLDDTLTESVELHQRSDVPYGMFLSGGIDSSVVLALMARLNPRGILAFTAGFPGTKVHDEREHARDLARAVGARHVEVEFTQSDFWALLPQVAAAMDDPAADYACLPTFKLAQEARKEVKVILSGEGGDELFGGYGRYRHAMRPWPLTKSMRRKGTFDGLDVLRDGILSHWRHGMKLAERVEAMPGRTRLQVAQAVDCADWLPNDLLAKADRCLMANGIEGRVPFLDPVVAAFAFRLPDHLKVRKGLGKWILRRWLETALPASRPFEKKRGFTVPVAEWIAARPEIGHLVAHQPGIEEICHPGKVKRLFKDCTKDTGFACWTLLFYALWHQRHVLGKIPDGDAFSALAERI

SEQ ID NO: 6593 - protein, 656 aa, Bradyrhizobium sp. BTAi1
MCGIAGLFRPGGADDSALAGIVGRMTAALAHRGPDASGSWVSGRQGIALGQRRLAILDLSEAGAQPMHSACGRYTITFNGEIYNHLDLRAELEDAAAAPNWRGHSDTETLLAAIRQWGLVPALQRLIGMFAFALWDAETRQLILARDRFGEKPLFYGWSGADLVFGSELKALAAHPGWAPSLDRAALTDFMRYSYVPAPATIWRDVRKLPPASFVAFVADAGPGTSPTAQSYWSLRDTVVAAQGDRISGESEAIARLEQLLSTAVKRQCLSDVPLGAFLSGGVDSSTIVALMQAQASQPVRTFSIGFAEGGYNEAEDARKVAQHLGTDHTELYVDARTAMEVVPKLPRIYDEPFADSSQIPTHLVAQLARRHVTVALSGDAGDELFGGYNRHVWGSALQARLGRVPMPLRRAIGAALGAIAPEPADTLLNMLQPVLPARLRVRHAGDQVAKLARIVAADGFDGLYRTLCSIDQDPRATVVAGEERASWAASEMKQLRGQISLLDRMTLADSLSYLSDDILQKVDRAAMAVALETRVPFLDRDVVEFSTRVPASMKVRDGRGKWLVRQVLYRHVPADMIDRPKTGFSIPLDAWLRGPLKSWAGDLLSPARLKRQGLFAPTRVTRMFEEHLSRRHNHAYWLWNVLMAEAWYDEWGRAG

SEQ ID NO: 6594 - protein, 532 aa, Schizosaccharomyces pombe
MQTPSSASAESEKDSGNTYVGPWLLGRTLGQGNLAKVKLGKHFQTNEKVALKMVYNDELEDKDTWKRLQREVTILRQLHHPNIITLYQVFRVPKYTVLALEYMDTDLHSMVVKHNRLDECTTRKIFRQIVHAIDYCHLHRVAHRDLKLENILLNKDLVVKLTDFGLSNFMLDGSFLSTSCGTPHYAAPEVIQGRYYDGCDVDVWGCGILLYLMLVGEFPFEDVTISNVLSRVCKGIYTIPSFVSSSASDLIRQMLMVLPTSRIKVAEIMQHPWFIADLPTHSRLPSRTSSFSSKHRSVTFSPPDLAILFDPSITSPSSSVGQIPQPTDHSALSPSKPMSISGTESPNPDPASLCYSSYEDLYSATSWHSDMAESSGFLDPTDIPPIPSNVETLRSSLPQRHASFMNKVYNHPLSRPPAPNRLRSLRWHYGIQTAKNPIEVLRKLCEALLELGARFRPCDEESFLKENKYKVFSCITCHNSPVYLVIELFSIGPSASVIDIRFSSSDDSIKYTSSYSPMPFLEVVKQLILKIA

SEQ ID NO: 6595 - protein, 545 aa, Porphyromonas gingivalis W83
MAKEIKFDMESRDLLKKGVDALANAVKVTLGPKGRNVILSKTYGAPHITKDGVSVAKEIELECPFENMGAQLVKEVASKTNDDAGDGTTTATILAQSIIGVGLKNVTAGANPMDLKRGIDKAVKAVVTHIAGMAKEVGDDFQKIEHVAKISANGDENIGSLIAEAMRKVKKEGVITVEEAKGTDTTVEVVEGMQFDRGYISPYFVTNTDKMEVQMENPFILIYDKKISVLKEMLPILEQTVQTGKPLLIIAEDIDSEALATLVVNRLRGSLKICAVKAPGFGDRRKAMLEDIAILTGGTVISEETGLKLENATMDMLGTAEKVTVDKDNTTIVNGAGNKEGIASRITQIKAQIENTTSDYDREKLQERLAKLAGGVAVLYVGAASEVEMKEKKDRVEDALSATRAAIEEGTVPGGGTAYIRAIAALEGLKGENEDETTGIEIVKRAIEEPLRQIVANAGKEGAVVVQKVKEGKDDFGYNARTDVFENLYTTGVIDPAKVTRVALENAASIAGMFLTTECVIADKKEDNPAAPAMPGGMGGMGGMM

SEQ ID NO: 6596 - protein, 350 aa, Pseudomonas aeruginosa UCBPP-PA14
MATLFDPIVLGDLELPNRIVMAPLTRCRADEGRVPNALMAEYYAQRADAGLILSEATAVTPMGVGYPDTPGIWSDDQVRGWSNVTKAVHAAGGRIFLQLWHVGRISDPLYLNGELPVAPSAIAAEGHVSLVRPKRPYVTPRALDTEEIADIVEAYRQGAERAKAAGFDGVEIHGANGYLLDQFLQDSTNKRTDRYGGSIENRARLLLEVTDAAISVWGAQRVGVHLAPRADSHDMGDSNRLETFSHVARELGKRGIAFICAREAQADDSIGVALKKAFGGPYIANEQFTLDSANAILAKGDADAVAFGVPFIANPDLVERLRQGAELNPPRPETFYTGGTEGYLDYPTLA

SEQ ID NO: 6597 - protein, 534 aa, Streptococcus oralis
MSKEIKFSSDARSAMVRGVDILADTVKVTLGPKGRNVVLEKSFGSPLITNDGVTIAKEIELEDHFENMGAKLVSEVASKTNDIAGDGTTTATVLTQAIVREGIKNVTAGANPIGIRRGIEAAVAAAVEALKNNAIPVANKEAIAQVAAVSSRSEKVGEYISEAMEKVGKDGVITIEESRGMETELEVVEGMQFDRGYLSQYMVTDSEKMVADLENPYILITDKKISNIQEILPLLESILQSNRPLLIIADDVDGEALPTLVLNKIRGTFNVVAVKAPGFGDRRKAMLEDIAILTGGTVITEDLGLELKDATIEALGQAARVTVDKDSAVIVEGAGNPEAISHRVAVIKSQIETTTSEFDREKLQERLAKLSGGVAVIKVGAATETELKEMKLRIEDALNATRAAVEEGIVAGGGTALANVIPAVADLELTGDEATGRNIVLRALEEPVRQIAHNAGFEGSIVIDRLKNAEVGTGFNAATGEWVNMIEEGIIDPVKVSRSALQNAASVASLILTTEAVVANKPEPAAPAPAMDPS

SEQ ID NO: 6598 - protein, 228 aa, Eruca sativa
RGKIEIKRIENTTNRQVTFCKRRNGLLKKAYELSVLCDAEVALIVFSSRGRLYEYSNNSVKGTIERYKKAISDNSNTGSVAEINAQYYQQESAKLRQQIISIQNSNRQLMGETIGSMSPKELRNLEGRLDRSVNRIRSKKNELLFAEIDYMQKREVDLHNDNQLLRAKIAENERNNPGMISLMPGGSSNYEQIMPPPQTQPQTFDSRNYFQVAALQPNNHHYSSAGRE

SEQ ID NO: 6599 - protein, 771 aa, Azoarcus sp. EbN1
MRIVCIGGGPAGLYFALLMKKLNPAHEIAVVERNRPYDTFGWGVVFSDATMDNMREWDPVTAEAIQVAFNHWDDIELHFKDHTIRSGGHGFVGIGRKKMLNILQARCEELGVELVFDRDVESDSEFPDADLIIASDGINSRIRNKYAEVFKPDIVTRPNRYIWLGTNQLFDAFTFLFEKTEHGWFQAHVYKFDDTTTTFIVECPEHVWLAHGLDKAGQEQSIEFCQKLFGKYLDGHRLMTNARHLRGSAWLNFQRVKCEQWHHDNGRSHVVLMGDAVHTAHFAIGSGTKLALEDAIELTRLFRDEGDTPEHIPAVLERYQAARNIDVLRLQNAAWNAMEWFEVCGARYCDTLEPEQFMYSMLTRSQRISHENLRLRDATWLEGYERWFANNAGLPVKAGEAPPPMFTPFTLRGLTLANRVVVSPMAMYSADDGSANDFHLVHFGARALGGAGLLYTEMTCVSPDARITPGCAGMYKPEHVNAWKRVVDFVHANSGAKMGIQLGHAGRKGATKLAWEGIDEPLEAGGWPLMSASPLPYLPHSQVPREMTRDDMERVRDDFVRATKMAFEAGFDILELHCAHGYLLSSFLSPLTNRRRDDYGGGHENRVRFPLEVFRAMRAAWPSNRPMSVRLSCHDWFPGGNTADDAVAFARLFRDAGADLIDCSSGQVWKGDRPVYGRMYQTPFADRIRNEAGIPTVAVGALYEADHANSIIAAGRADLCAIARPHLADPAWTLHEAAKIGFDDVAWPKQYLSARSQYETNLRREGGAPDK

SEQ ID NO: 6600 - protein, 231 aa, Eruca sativa
RGKIEIKRIENTTNRQVTFCKRRNGLLKKAYELSVLCDAEVALIVFSSRGRLYEYSNNSVKGTIERYKKAISDNSNTGSVAEINAQYYQQESAKLRQQIISIQNSNRQLMGETIGSMSPKELRNLEGRLDRSVNRIRSKKNELLFAEIDYMQKRSLQEVDLHNDNQLLRAKIAENERNNPGMINLMPGGSSNYEQIMPPPQTQPQTFDSRNYFQVAALQPNNHHYSSAGRE

SEQ ID NO: 6601 - protein, 226 aa, Guillenia flavescens
RGKIEIKRIENTTNRQVTFCKRRNGLLKKAYELSVLCDAEVALIVFSSRGRLYEYSNNSVKGTIERYKKAISDNSNTGSVAEINAQYYQQESAKLRQNIISIQNSNRQLMGETIGSMSAKELRNLEGRLDRSINRIRSKKNELLFAEIDYMQKREVDLHNDNQLLRAKIAENERNHPSMSLMPGGSNYEQIMPPPQTQSQPFDSRNYFQVAALQPNNHHYSSAGRQ

SEQ ID NO: 6602 - protein, 397 aa, Rickettsia sibirica 246
MLSKLNKPALFALIFYPIFIISLVVKYSFDYGIGLTEVIFIIASYYINNITVGIGLHRLWSHNAYKINKYAEFVLIMLSAGTLQGPALSWASNHYKHHRYTDQDQDPHTPLKFDNKFLGFMWSHIGWMLVGSGSYKSIDRITWAKHGKNNLLKWQLKYYWQIAAFMNIVVPLFIGYLVGGTMQSAYAGFLFMGLGRFLQQQATFCVNSLCHFAGSKKYYKGTAGDIWWMALFLLGENWHNYHHAFPSDYRNGAKWYHFDVHKWIIFLMSKIGLASELERTTKVRIQAKMQETLSYLSEKQKQKLTLMQTKIDHLLENLCLKIKELEESSITIKEQFKKSFVEIQESLKNLAEQVSAATQITEKSSEKLLKIINKKIIDAEQSIYKLYNKLNTLKVSN

SEQ ID NO: 6603 - protein, 632 aa, Bacillus licheniformis ATCC 14580
MCGFVGVFNHRPSSETAAQEELIKQMNEMIVHRGPDDDGYYHDEHVGFGFRRLSIIDVENGGQPLSYEDDSYWIIFNGEIYNYIELKDELLSKGYEFKTDSDTEVLLATYRHYKQEAASKLRGMFAFLIWDKKEQLLYGARDPFGIKPLYFTKTDGHVYFASERKSLMAVDADLELNEKALQQYTSFQFVPEPETLDKKVQKVESGHQFTVRPGEDIQFKTYWKVQFKPVQTEEDKLVQEVRDAIFDSVKVHMRSDVPVGSFLSGGIDSSFIVSVAKQFHPNLKTFSVGFEHEGFSEVDVAKETADKVGVENFSAIISPEEYMNELPKIVWHLDDPLADPAAIPLYFVAKEAKKQVTVVLSGEGADELFGGYNIYREPLSLKPFERIPSPLKKMLLRVASAMPEGMKGKSFLMRGCTPLEDRYIGNAKIFEEGMKSKLLRQYDSNLSYCDVTKPYFEESRSYSEINKMQYVDIHTWLRGDILLKADKMTMANSLELRVPFLDKVVFEAASKIPEELKTKNGTTKYLLRKAAEGIVPEHVLNRKKLGFPVPIRHWLKNEMHDWAVNIIKESETDAYIHKDYVLQLLEDHCANKADNSRKIWTVLIFMIWHSIFVEKRFVPEELNHQPKEVIIV

SEQ ID NO: 6604 - protein, 471 aa, Legionella pneumophila str. Paris
MTIALVWFRQDLRLTDNPAFIEACSHHEIVIPLYIYDDKCSVLGQAQAWWLHHSLIALGKSLNQQGLSLVLRKGDPQEIILELVAQYGVESVYWNRCYEPQVIARDKKIKLALGEREIKVQSFNGNLLHEPWTIKNKNGDFFKVFTPYWKQCRQILNIPSPFMLTKRPRGIEITSDDLGKWKLLPAINWAARFSEYWTPGEEGAQKKLDEFIVHHLSGYKRERDFPAKNATSRLSPHLHFGEISPWVILRALELAKLEQTCDLASVEHFLSELGWREFSVYLLYHFPKLDCENFRKEFDAFPWQNDEQLLTCWQKGMTGYPIIDAGMRELWATGYMHNRVRMIVASFLTKDLLIDWRSGAQWFLDTLVDADLANNSASWQWVAGCGADAAPYFRIFNPVLQSQKFDPDGIYIRQWIPELAQLNSQSIHQPWTDADANSIFLGKKYPKPIIDHQEARTKALSYYQQIKKGMD

SEQ ID NO: 6605 - protein, 226 aa, Thlaspi arvense
RGKIEIKRIENTTNRQVTFCKRRNGLLKKAYELSVLCDAEVALIVFSSRGRLYEYSNNSVKGTIERYKKAISDNSNTGSVAEINAQYYQQESAKLRQQIISIQNSNRQLMGETIGSMSPKELRNLEGRLDRSITRIRSKKNELLFSEIDYMQKREVDLHNDNQLLRAKIAENERSNPSMNLMPGGSNYEQLMPPPQTQSQPFDSRNYFQVAALQPNNHHYSSAGRQ

SEQ ID NO: 6606 - protein, 226 aa, Thlaspi arvense
RGKIEIKRIGNTTNRQVTFCKRRNGLLKKAYELSVLCDAEVALIVFSSRGRLYEYSNNSVKGTIERYKKAISDNSNTGSVAEINAQYYQQESAKLRQQIISIQNSNRQLMGETIGSMSPKELRNLEGRLDRSITRIRSKKNELLFSEIDYMQKREVDLHNDNQLLRAKIAENERSNPSMNLMPGGPNYEQLMPPPQTQSQPFDSRNYFQVAALQPNNHHYSSAGRQ

SEQ ID NO: 6607 - protein, 66 aa, Solanum tuberosum
QTQNAHLEFVEVLNVKEQVVAGMMYYITLVATDDGYKKIYKTKIWVKEWENFKEVQEFKQIVYATK

SEQ ID NO: 6608 - protein, 154 aa, Medicago sativa
AVKMLLIPWKWGMKYFWDTLLDADLESDILGWQYISGSLPDGHELERLDDPEIQGTKYDSEGEYVRQWLPELARIPTEWIHHPWNAPPTVLRASGVELGQNYPKPIIDIDLAREQLTQAIFKMWEDEAASKSSTSENKHEVVDDSENLSIPKFS

SEQ ID NO: 6609 - protein, 140 aa, Kluyveromyces lactis NRRL Y-1140
MSSWLSESQQFGAVFTFGGCLFFLFGIFTFFDRALLAVGNILFLLGVLLMIGPHKTLKFFTRPTKRRGTLFLVFGIFMILCKWTFLGFIIESLGIVGLFGDFFGVILQLLRSIPIIGPVLSHPTIAPVLDRIAGVSVLPV

SEQ ID NO: 6610 - protein, 1349 aa, Candida albicans SC5314
MPHSRQPSISSSIMSQSNHNHPQKIGPWKLGKTLGRGATGRVLLATHQTTGQKAAVKVVSKSELQDEETEKNGDGLPYGIEREIIIMKLLTHPNVLRLYDVWETSKALYLVLEYVEGGELFDLLVERGPLPEVEAIKYFRQIILGTAYCHALGICHRDLKPENLLLDSQLNVKLADFGMAALESNGKLLETSCGSPHYAAPEIVSGLKYHGAASDVWSCGVILFALLTGRLPFDDENIRNLLLKVQAGNFEMPVDEVSREARDLIARMLEVDPMRRISTEKILRHPLLTKYPMSNEDLISEKSLPHPQTGYKSLGSVRNIDKQILSNLTILWNDRPEEEIVDCLLKDGSNPEKTFYALLMRYKHNQEDNTNNNSPKKSTSFNNKVVRSGSKYSLNGTPRRKRASHISVSRPTSFQYKSNPGAGATANRNSVARHSVASSANNSPRKSPYKSPYRSPYRSPYKSPSKRYSYNQSPTKSPYGRRSNSQRQFENEPLKAKPRNIYNEIVDAQSNFSLPPSLPPSLPSKDSRYMIDEPNQPQLQQPALSQVPENPIVDESPDLMQSAKISSGKRNSIIGKNNNNSNSNKRMSKRKSIRASMTTGLKRNSITMKLLSTYAKLSGDDDWEYMDKQTKRTSATFAALCDKIFNQEDYDEEDEQLVDPEEKEAKEYERLMELERKKHEAELKARRELEKKKRRQKRRSILSSKKLSIIVKNDADPNNSEQELVDEGIKQPKRQSKNLTALRALSEGNHASEELTLEDVENLKRRSASQPVPKRRQTPVLTRRPVSRLDPLWQAHENEQLDRAKDALEQEWRDSQKRSSTVSRKKVNRESMISVMDDIVEEDQGRVNRRSTRNTYYERERDYELPEPTVEDSNLTDDYMTEIRKSRLLNSQLNVRDPLNEKRKSEPKTLISNVQIPSVTRKSRNFTTSNKRLSVLSMYSTKESYRDLNSIINSPDENPEQHQNMNKPALRTSIADRLDKAGLAEPEYETETDGEDKVSVIDLDDHLADRRTSYYDGSGKRASRASTTKRYNVHSSSGQRPKSKVPDLPKNDYDDTFVSNSDEVHKRQYKSMVSDESSASDDVFDKIKLPDGKSTKSSIDELANGTSTSGHRKPKIRHSQPGPEMLIPHLNGGIESSQPMSKVRGNNSSGHDDSVPPPPPAHKVNKKPLDDKTNFPPPEVDPKRKGSFFRKLSWGSKKTIENNTNAATNTTTQQQLPSPAESKEEKPKSSFFRWFSSSNTPSAAEIRKFNTILPKHEMSTALFALLNSWSNFGLKDLRNDQVGYYITGAISKHNSFNLKSCKFRIKINQRDFNQKSEIVCVRVKGSKVTTDTLFSEIEKVLLKEGVLDK

SEQ ID NO: 6611 - protein, 163 aa, Bradyrhizobium japonicum
MALRELIPWNNGSRNLPARRTEVDNPFLSLHREMNRLFDDVFRGVDIGQFAPPATMGWPSVEFNETDKEVKVIAELPGIEQKDVEVELADGVLTISGEKKSETKDKERRFSERYYGRFERRIPVDDVDQDKVAASFKDGILTVTLPKSPTEQRKVKRIAINGK

SEQ ID NO: 6612 - protein, 220 aa, Zea mays
MGQQSLIYAFVARGTVVLAEYTEFTGNFTTIASQCLMKLPASNNKFTYNCDGHTFNYLVEDGFTYCVVAVESVGQQIPIAFMDRVKEDFTKRYGGGKAATAAANSLNREFRLKLKEHMQYCVDHPEEVSKLAKVKAQVSEVKGVMMENIEKVLDRGEKIELLVDKTENLRSQAQDFRQQGTNVRRKMWLQNMKIKLIVLGIIIALILIIILSVCHGFKCH

SEQ ID NO: 6613 - protein, 277 aa, Streptomyces coelicolor A3(2)
MSSKVPPIILNNGVEMPQLGFGVWQVPDDDAQTAVALALEAGYRSIDTAAIYGNEEGTGRAIAASGLAREDLFVTTKLWNSDQGYDSTLRAFDTSMAKLGLEYLDLYLIHWPMPAKERYVDTYKAFEKLLADGRVRAIGVSNFLPEHLERLTAETSVIPAVNQIELHPHLQQHAAREVHAEQGIATEAWSPLGSGKGILDIPAIVAIAQKHGRTPAQVVLRWHLQLGNVVIPKSVTPSRIKENIDVFGFSLDTEDLAAISALNEDRRLGSDPADVNS

SEQ ID NO: 6614 - protein, 474 aa, Streptococcus pyogenes SSI-1
MGIFPKDFLWGGAVAANQVEGAFEADTKGLSVQDVLPNGGLGEWTDSPTSDNLTLEAIDFYHRYKEDIALFAEMGFKVFRTSIAWSRIFPNGDDDQPNEAGLQFYDDLFDELLNYGIEPLVTLSHYETPLHLAKAYNGWTDRRLIGFFERFAQTVMERYKDKVKYWLTFNEVNSILHMPFTSGGIMTEKEKLSLQDLYQAIHHELVASASVTKLAHEINPDVKVGCMILAMPAYPMTSDPRDILAAHAFENLNLLFSDIHVRGKYPSYIKSYFKENGIEIVFEDGDKELLAEHTVDFLSFSYYMSVTQAHNPEAYTSGQGNILGGLSNPYLESSEWGWQIDPIGLRLVLNQYYDRYQIPLFIVENGLGAKDQLVQTADGSMTVHDDYRIDYMSQHLVQVAKAIEDGVEVMGYTAWGCIDCVSMSTAQLSKRYGFIYVDRNDDGTGQLTRYKKKSFDWYRQVIQTNGRYLEDNFS

SEQ ID NO: 6615 - protein, 1122 aa, Arabidopsis thaliana
MSGSRPTQSSEGSRRSRHSARIIAQTTVDAKLHADFEESGSSFDYSTSVRVTGPVVENQPPRSDKVTTTYLHHIQKGKLIQPFGCLLALDEKTFKVIAYSENASELLTMASHAVPSVGEHPVLGIGTDIRSLFTAPSASALQKALGFGDVSLLNPILVHCRTSAKPFYAIIHRVTGSIIIDFEPVKPYEVPMTAAGALQSYKLAAKAITRLQSLPSGSMERLCDTMVQEVFELTGYDRVMAYKFHEDDHGEVVSEVTKPGLEPYLGLHYPATDIPQAARFLFMKNKVRMIVDCNAKHARVLQDEKLSFDLTLCGSTLRAPHSCHLQYMANMDSIASLVMAVVVNEEDGEGDAPDATTQPQKRKRLWGLVVCHNTTPRFVPFPLRYACEFLAQVFAIHVNKEVELDNQMVEKNILRTQTLLCDMLMRDAPLGIVSQSPNIMDLVKCDGAALLYKDKIWKLGTTPSEFHLQEIASWLCEYHMDSTGLSTDSLHDAGFPRALSLGDSVCGMAAVRISSKDMIFWFRSHTAGEVRWGGAKHDPDDRDDARRMHPRSSFKAFLEVVKTRSLPWKDYEMDAIHSLQLILRNAFKDSETTDVNTKVIYSKLNDLKIDGIQELEAVTSEMVRLIETATVPILAVDSDGLVNGWNTKIAELTGLSVDEAIGKHFLTLVEDSSVEIVKRMLENALEGTEEQNVQFEIKTHLSRADAGPISLVVNACASRDLHENVVGVCFVAHDLTGQKTVMDKFTRIEGDYKAIIQNPNPLIPPIFGTDEFGWCTEWNPAMSKLTGLKREEVIDKMLLGEVFGTQKSCCRLKNQEAFVNLGIVLNNAVTSQDPEKVSFAFFTRGGKYVECLLCVSKKLDREGVVTGVFCFLQLASHELQQALHVQRLAERTAVKRLKALAYIKRQIRNPLSGIMFTRKMIEGTELGPEQRRILQTSALCQKQLSKILDDSDLESIIEGCLDLEMKEFTLNEVLTASTSQVMMKSNGKSVRITNETGEEVMSDTLYGDSIRLQQVLADFMLMAVNFTPSGGQLTVSASLRKDQLGRSVHLANLEIRLTHTGAGIPEFLLNQMFGTEEDVSEEGLSLMVSRKLVKLMNGDVQYLRQAGKSSFIITAELAAANK

SEQ ID NO: 6616 - protein, 424 aa, Dechloromonas aromatica RCB
MAKPPRRKIRMKHVKKSAKLANVCYDIRGPVLQKAKQMEEEGHKIIKLNIGNLAAFGFDSPEEIQQDMIRNLPNAAGYTDSKGIFAARKAIMHYTQQKGIKGVTLEDIYVGNGVSELIVMAMNALLDAGDEVLVPAPDYPLWTAAISLSGGTPKHYLCDESKGWLPDLDDIRSKINAHTKAIVLINPNNPTGALYPDDLLYEIIDIARQHHLTIYADEVYDKVLYDDVKHTSIASLAEDVLMITFNGLSKNYRSCGYRAGWMVVSGDKRHAKDYIEGLDMLASMRLCANAPGQHGIQTALGGYQSINDLIKDGGRLRRQRDIAHELITAIPGVTCVKPKAALYMFPRLDPKIYPIKNDQQFISELLQEEKVLLVQGTGFNWPHPDHFRLVFLPHEDDLREAVARIARFLENYRKRHNTNQLIKD

SEQ ID NO: 6617 - protein, 491 aa, Gibberella zeae PH-1
MSLPADFKWGFATASYQIEGAIDKDGRGPANWDTFCAQAGKIADGSSGVTACDSYNRTAEDISLLKSLGSKAYRFSICWSRIIPLGGRNDPINQAGIDHYRKFVDDLLDAGITPFITLFHWDVPDELDRRYGGLMNREEFPLDYERYARVMFEAIPRCKNWITHNEPWCSAILGYSTGSNAPGRCSDRNKSDVGDSSTEPWIVGHNLLVAHGRAVKIYREEFKPKNGGEIGITLNGDATYPWDPKDPRDIEAAERKIEFAISWFADPIYFGDYPASMRAQLGDRLPTFTPEEKALVLGSNDFYGMNHYTANYVKHREGEAAPEDFVGNLELHFWNHRGDCIGEETQSTWLRPCAQGFRDLLVWISKRYGFPRMYVTENGTSIKGENDMPREKILQDDFRVQYYDDYVRAMADASRLDGVDIHGYFAWSLLDNFEWAEGYETRFGVTYVDYENDQKRYPKKSAQHLKPLFDSLIKKEENGLNGVGKVKAGQT

SEQ ID NO: 6618 - protein, 334 aa, Frankia sp. EAN1pec
MADIQRAAGISDLDTGDARPAPRRKTLSSPYLHRLQRRHFLLFDIIPILGTIAALGFLTVHPFGFTELGLLASMWLLTGLGVTVGYHRLFTHRTFRTTRGVSSVLAVLGSMAGQGGMVSWVALHRRHHECSDRAGDPHSPNLAGGGLRGRLRGLAHSHFLWMRRHEYPNIAHYAPDLLRDRALARIGRRYDHWVLLGLLIPTLVGGLVYWSWAGAVSGLLWGGLVRIFVLEHIIWSINSFLHMFGTRAFDSRENSRNGGVFGLLTLGESWHHNHHAFPESPSFGLAWHRLDPGYWLIRTLAACGLAWDLKVPSTERIAARRVPRTAGTAAGPAT

SEQ ID NO: 6619 - protein, 392 aa, Pseudomonas aeruginosa UCBPP-PA14
MWFNGFLDLSPWQLVAVTLVLTHITIVSVTVYLHRYSAHRALDLHPALQHFFRFWLWLTTGMNTREWTAIHRKHHAKCETVEDPHSPVHKGLFTVLRAGAELYKAEAKNQDTLRIYGKNCPDDWIERNLYSRFPIGGVVLMALIDLALFGALGLTVWAVQMAWIPFWAAGVVNGLGHAVGYRNFECRDAATNLVPWGILIGGEELHNNHHTYPNSAKLSVKKWEFDLGWAWIKLFSFLRLARVARVAPIAHRVEGKHSLDMDTAMAILNNRFQIMAQYRKLVIAPLVKQEVAKADESVRHLFRRAKRLLSRETSLLQDRHHVRIDSMLAHSQALKVIYEKRLALQQIWAKTSANGHDMLAAIKDWVHEAEASGIQSLKEFAAQLKTYSLRPA

SEQ ID NO: 6620 - protein, 225 aa, Eruca sativa
GRGKIEIKRIENTTNRQVTFCKRRNGLLKKAYELSVLCDAEVALVVFSSRGRLYEYSNNSVKGTIERYKKAISDNTNTGTVAEINAQYYQQESAKLRQQIISIQNSNRQLMGETIGSMSPKELRNLEGRLDRSINRIRSKKNELLFAEIDYMHKREVDLHSDNQLLRTKIAENERNNPSMNLTPGGYEQIMQPSQTQSQPFDSRNYFQVAALQPNNHHYSSAGRQ

SEQ ID NO: 6621 - protein, 492 aa, Zea mays
MDPYKHRPSSGSNSSFWTTNSGAPVWNNNSALTVGQRGPILLEDYHLIEKLAQFDRERIPERVVHARGASAKGFFEVTHDVSHLTCADFLRAPGVQTPVIVRFSTVVHERGSPETLRDPRGFAVKFYTREGNFDLVGNNMPVFFIRDGMKFPDMVHAFKPNPKTNLQENWRIVDFFSHHPESLHMFTFLFDDVGIPLNYRHMEGFGVNTYTLINRDGKPHLVKFHWKPTCGVKCLLDNEAVTVGGTCHSHATKDLYDSIAAGNYPEWKLYIQTIDLDHEDKFDFDPLDVTKTWPEDIIPLQPVGRMVLNKNVDNFFAENEQIAFCPAIIVPGIHYSDDKLLQTRIFSYADTQRHRLGPNYLMLPVNAPKCAHHNNHHDGFMNFMHRDEEVNYFPSRFDPARHAEKVPIPPRVLTGCREKCIIQKENNFKQAGERYRSFDPARQDRFIQRWVDALTDPRVTHEHRTIWISYWSQCDAALGQKLASRLNLKPSM

SEQ ID NO: 6622 - protein, 229 aa, Guillenia flavescens
RGKIEIKRIDNTTNRQVTFRKRRNGLLKKAYELSVLCDAEVALIVFSSRGRLYEYSNNSVKGTIERYKKAISDNSNTGSVAEINAQYYQQESAKLRQQIVSIQNSNRQLMGETIGSMIPKDLKTLESKLDKSITRIRSKKNELLFAEIDYMQKRSLQEVDLHNDNQLLRAKIAENERNNPSMNLMPGGSNYEQIMPLPQTQSQPFDSRNYFQVAALQPNNHHYSSAGRH

SEQ ID NO: 6623 - protein, 470 aa, Staphylococcus aureus subsp. aureus COL
MTKTLPEDFIFGGATAAYQAEGATNTDGKGRVAWDTYLEENYWYTAEPASDFYDRYPVDLELSEKFGVNGIRISIAWSRIFPNGYGEVNPKGVEYYHKLFAECHKRHVEPFVTLHHFDTPEVLHKDGDFLNRKTIDYFVDYAEYCFKEFPEVKYWTTFNEIGPIGDGQYLVGKFPPGIKYDFEKVFQSHHNMMVAHARAVKLFKDGGYKGEIGVVHALPTKYPFDPSNPEDVRAAELEDIIHNKFILDATYLGKYSRETMEGVQHILSVNGGKLNITDEDYAILDAAKDLNDFLGINYYMSDWMRGYDGESEITHNATGDKGGSKYQLKGVGQREFDVDVPRTDWDWMIYPQGLYDQIMRVVKDYPNYHKIYITENGLGYKDEFIESEKTVHDDARIDYVRQHLNVIADAIIDGANVKGYFIWSLMDVFSWSNGYEKRYGLFYVDFETQERYPKKSAYWYKELAETKEIK

SEQ ID NO: 6624 - protein, 226 aa, Guillenia flavescens
RGKIEIKRIENTTNRQVTFCKRRNGLLKKAYELSVLCDAEVALIVFSSRGRLYEYSNNSVKGTIERYKKAISDNSNTGSVAEINAQYYQQESAKLRQQIVSIQNSNRQLMGETIGSMIPKDLKTLESKLDKSITRIRSKKNELLFAEIDYMQKREVDLHNDNQLLRAKIAENERNNPSMNLMPGGSNYEQIMPLPQTQSQPFDSRNYFQVAALQPNNHHYSSAGRH

SEQ ID NO: 6625 - protein, 1124 aa, Pisum sativum
MSTTRPSQSSNNSGRSRNSARIIAQTTVDAKLHATFEESGSSFDYSSSVRVSGSVDGDQQPRSNKVTTAYLNHIQRGKQIQPFGCLLALDEKTCKVVAYSENAPEMLTMVSHAVPSVGDHPALGIGTDIRTVFTAPSASALQKALGFAEVSLLNPILVHCKTSGKPFYAIIHRVTGSLIIDFEPVKPYEVPMTAAGALQSYKLAAKAITRLQSLASGSMERLCDTMVQEVFELTGYDRVMAYKFHEDDHGEVIAEIAKPGLEPYLGLHYPATDIPQAARFLFMKNKVRMIVDCNAKHVKVLQDEKLPFDLTLCGSTLRAPHSCHLQYMANMDSIASLVMAVVVNDSDEDGDSADAVLPQKKKRLWGLVVCHNTTPRFVPFPLRYACEFLAQVFAIHVNKEIELEYQILEKNILRTQTLLCDMLMRDAPLGIVSQSPNIMDLVKCDGAALFYRNKLWLLGATPTESQLREIALWMSEYHTDSTGLSTDSLSDAGFPGALSLSDTVCGMAAVRITSKDIVFWFRSHTAAEIRWGGAKHEPGDQDDGRKMHPRSSFKAFLEVVKARSVPWKDFEMDAIHSLQLILRNASKDTDIIDLNTKAINTRLNDLKIEGMQELEAVTSEMVRLIETATVPILAVDVDGTVNGWNIKIAELTGLPVGEAIGKHLLTLVEDSSTDIVKKMLNLALQGEEEKNVQFEIKTHGDQVESGPISLIVNACASKDLRENVVGVCFVAQDITAQKTVMDKFTRIEGDYKAIVQNPNQLIPPIFGTDEFGWCCEWNAAMIKLTGWKREEVMDKMLLGEVFGTQMSCCRLKNQEAFVNFGIVLNKAMTGLETEKVPFGFFSRKGKYVECLLSVSKKIDAEGLVTGVFCFLQLASPELQQALHIQRLSEQTALKRLKVLTYMKRQIRNPLAGIVFSSKMLEGTDLETEQKRIVNTSSQCQRQLSKILDDSDLDGIIDGYLDLEMAEFTLHEVLVTSLSQVMNRSNTKGIRIANDVAEHIARETLYGDSLRLQQVLADFLLISINSTPNGGQVVIAASLTKEQLGKSVHLVNLELSITHGGSGVPEAALNQMFGNNVLESEEGISLHISRKLLKLMNGDVRYLKEAGKSSFILSVELAAAHKLKG

SEQ ID NO: 6626 - protein, 593 aa, Mesorhizobium sp. BNC1
MQEGMGAIVHGNGVAFRVWAPHADAVSVVGTFNDWSDEAAPMTAEDGGFWYADLPSAKPGDEYRFLIRNGEKRLSRIDPYARAVTNSVGNGIIVEQQDDWHEAEFETPPWNELVIYEMHIGTFHRPQDNELGTFDDATERLAHLKRLGINAVQIMPAMEFAGDISWGYNPAHIFAIESSYGGPAAFKAFINAAHKQGIAVILDVVYNHFGPSDLDLWQFDGWSEDDKGGIYFYNDWRSDTPWGDTRPVYGRGEVRQFIRDNALFWLEEYHLDGLRFDMTLYIRNVRGDEGDEGDAIPEGWSLLQWVNSEIRERLPGRITIAEDLRNKAEITGAVDEGGAGFGAQWDSEFVHPIRETLIAPDDESRHMGTVAHALGHSYNGDPFQRVVYTESHDEVANGKARIPHEIAPGDPSHWAAQKRSTLGAALMLTAPGIPMLFQGQEFLQGEWFQDTVPLDWDQSEEFKGIVRLYRDLIRLRRNQMSVTSGLLGRNTRIFRVDEEKKLIAFHRWVEGGPRDDVVVVANFSHQAYASYRMGFPRQGLWNLRLNTDWSGYSPDFGSFESHDVVAEAVECDGLSWSGEVAIGPYTALVFSQD

SEQ ID NO: 6627 - protein, 712 aa, Methylobacillus flagellatus KT
MKNKTEKVKSQLAGSTAPDKKNTTAKTRDLESYKSDATGQPLRTNQGVKIADNKNSLRAGSRGPSLLEDFILREKITHFDHERIPERIVHARGVGAHGYFESYADHSSLTKAGFLGEKGKQTPVFVRFSTVQGPRGSADTVRDVRGFAIKFYTEEGNFDLVGNNIPVFFIQDAIKFPDFVHAVKPEPHNEIPTGASAHDTFWDFVSLQPESAHAVIWAMSDRAIPRSLRAMQGFGVHTFRLINAKGVAKFVKFIWTPKQGVLSLVWDEAQKIAGKDPDFHRRDLGESIELGNYPEWEFGVQIIDEQDEHSFDFDILDPTKIVPEELVPITPLGKLVLNRNPDNFFAETEQIAFCPGHIVPGLDFSNDPLLQGRLFSYTDTQLSRLGGPNFHEIPINKPVCPFHNNQRDALHRTTIHKGQAAYEPNSIDGGWPQETPPAAKDGGFESYYERIDAHKVRERSASFKDHFSQPRLFYKSLSATEQLHIAEAYSFELGKVKRQHIRERVVNEILSNIDLGLAGTVAQKLGIPAPKKPTIKVPEPSLKQSSALSQMKLTPQDLQGKKIAALVFDGLSAKAIRPLLDWAQQHSIALQLLGPTSAPVKTSEGKSLAVDGSIKGEPSILFDAAIVPDIPTDHTALLDNGQAVHFILETFKHLKPLALTGPGASLIKALHLEEDAGLLQAKDFSAVREQFERALLAHRVWEREKKAERIPA

SEQ ID NO: 6628 - protein, 302 aa, Haloarcula marismortui ATCC 43049
MKRPQQSADMAPEQNGTTTVPTLGFGTYRTGGYKCYNAVKNALDCGYTHIDTAMAYENEAAVGRAIEQSSVDREDIFLTTKIKGYPEMVEYERLIEAAKGCLERLGTEYLDLLLVHWWNPLADMEETFNALNTLVDDGLVGQIGVSNFSIKELKQAMRLSDAPIATNQIEYHPYWGDEELVRFCQDNDVTVTAYSPLAEGRAVEDDVLRSIGDRYGKSAAQVSIRWLIQQENVVTIPKAATPKHIEANIDVFDFELTDRDMRRIRKLKPPFWYRENREGGSIYEARSVLGNFVPDSLYNRIA

SEQ ID NO: 6629 - protein, 326 aa, Candida albicans SC5314
MKLATEIDFKLNNGKTIPALGLGTVASKDPKDVKDQVITAVKAGYRHIDTAWFYGTEKYIGEALQELFAEGIIKREDLFITTKFWPSYWANPEKSLDESLKDLQLDYVDLFLQHWPICLHGDENGLPKIPKDENGELIYDDDPTPNGTKYIDVYHKLEDILETTTKVRSIGVSNYSIPKLRQLLPKVKKHIPVCNQIEYHPQLPQQDLVDYCTKNNILISCYSPVGSYGAPVLKIPLVKQLAEKYQVTENEIADAYNILNGRVTLPRSSNLERIKTIIRLPHLTKEELDELYQVGVKDPQRYICDPWGYGIGFRWWKGDTLSKEFD

SEQ ID NO: 6630 - protein, 189 aa, uncultured bacterium
MDIDFKKLAPWNWFKKEQEEQQSTASLPVQRNDLPVAGGPVSPILQLHREIDRLFDDAFRGFGFPTLAMPRWPSDWPGMLKPALDIQETDKQYKIALEVPGIEEKDIQITLDNDVLLVRGEKRQEQETKDGGFHRVERSYGSFQRALNLPADANQDTIKAAFKNGVLTITMDKREASTPKQGRSIPING

SEQ ID NO: 6631 - protein, 1171 aa, Oryza sativa (japonica cultivar-group)
MASGSRATPTRSPSSARPAAPRHQHHHSQSSGGSTSRAGGGGGGGGGGGGGAAAAESVSKAVAQYTLDARLHAVFEQSGASGRSFDYTQSLRASPTPSSEQQIAAYLSRIQRGGHIQPFGCTLAVADDSSFRLLAYSENTADLLDLSPHHSVPSLDSSAVPPPVSLGADARLLFAPSSAVLLERAFAAREISLLNPLWIHSRVSSKPFYAILHRIDVGVVIDLEPARTEDPALSIAGAVQSQKLAVRAISRLQALPGGDVKLLCDTVVEYVRELTGYDRVMVYRFHEDEHGEVVAESRRNNLEPYIGLHYPATDIPQASRFLFRQNRVRMIADCHAAPVRVIQDPALTQPLCLVGSTLRSPHGCHAQYMANMGSIASLVMAVIISSGGDDDHNISRGSIPSAMKLWGLVVCHHTSPRCIPFPLRYACEFLMQAFGLQLNMELQLAHQLSEKHILRTQTLLCDMLLRDSPTGIVTQSPSIMDLVKCDGAALYYHGKYYPLGVTPTEVQIKDIIEWLTMCHGDSTGLSTDSLADAGYPGAAALGDAVSGMAVAYITPSDYLFWFRSHTAKEIKWGGAKHHPEDKDDGQRMHPRSSFKAFLEVVKSRSLPWENAEMDAIHSLQLILRDSFRDSAEGTSNSKAIVNGQVQLGELELRGIDELSSVAREMVRLIETATVPIFAVDTDGCINGWNAKVAELTGLSVEEAMGKSLVNDLIFKESEETVNKLLSRALRGDEDKNVEIKLKTFGPEQSKGPIFVIVNACSSRDYTKNIVGVCFVGQDVTGQKVVMDKFINIQGDYKAIVHNPNPLIPPIFASDENTCCSEWNTAMEKLTGWSRGEVVGKLLVGEVFGNCCRLKGPDALTKFMIVLHNAIGGQDCEKFPFSFFDKNGKYVQALLTANTRSRMDGEAIGAFCFLQIASPELQQAFEIQRHHEKKCYARMKELAYIYQEIKNPLNGIRFTNSLLEMTDLKDDQRQFLETSTACEKQMSKIVKDASLQSIEDGSLVLEKGEFSLGSVMNAVVSQVMIQLRERDLQLIRDIPDEIKEASAYGDQYRIQQVLCDFLLSMVRFAPAENGWVEIQVRPNIKQNSDGTDTMLFLFRFACPGEGLPPEIVQDMFSNSRWTTQEGIGLSICRKILKLMGGEVQYIRESERSFFHIVLELPQPQQAASRGTS

SEQ ID NO: 6632 - protein, 365 aa, Shigella flexneri 2a str. 301
MSSEKLYSPLKVGAITAANRIFMAPLTRLRSIEPGDIPTPLMAEYYRQRASAGLIISEATQISAQAKGYAGAPGIHSPEQIAAWKKITAGVHAENGHMALQLWHTGRISHASLQPGGQAPVAPSALSAGTRTSLRDENGQAIRVETSMPRALELEEIPGIVNDFRQAIANAREAAFDLVELHSAHGYLLHQFLSPSSNHRTDQYGGSVENRARLVLEVVDAGIEEWGADRIGIRVSPIGTFQNTDNGPNEEADALYLIEQLGKRGIAYLHMSEPDWAGGEPYTDAFREKVRARFHGPIIGAGAYTVEKAETLIGKGLIDAVAFGRDWIANPDLVARLQLKAELNPQRAESFYGGGAEGYTDYPTL

SEQ ID NO: 6633 - protein, 672 aa, Escherichia coli K12
MSYPSLFAPLDLGFTTLKNRVLMGSMHTGLEEYPDGAERLAAFYAERARHGVALIVSGGIAPDLTGVGMEGGAMLNDASQIPHHRTITEAVHQEGGKIALQILHTGRYSYQPHLVAPSALQAPINRFVPHELSHEEILQLIDNFARCAQLAREAGYDGVEVMGSEGYLINEFLTLRTNQRSDQWGGDYRNRMRFAVEVVRAVRERVGNDFIIIYRLSMLDLVEDGGTFAETVELAQAIEAAGATIINTGIGWHEARIPTIATPVPRGAFSWVTRKLKGHVSLPLVTTNRINDPQVADDILSRGDADMVSMARPFLADAELLSKAQSGRADEINTCIGCNQACLDQIFVGKVTSCLVNPRACHETKMPILPAVQKKNLAVVGAGPAGLAFAINAAARGHQVTLFDAHSEIGGQFNIAKQIPGKEEFYETLRYYRRMIEVTGVTLKLNHTVTADQLQAFDETILASGIVPRTPPIDGIDHPKVLSYLDVLRDKAPVGNKVAIIGCGGIGFDTAMYLSQPGESTSQNIAGFCNEWGIDSSLQQAGGLSPQGMQIPRSPRQIVMLQRKASKPGQGLGKTTGWIHRTTLLSRGVKMIPGVSYQKIDDDGLHVVINGETQVLAVDNVVICAGQEPNRALAQPLIDSGKTVHLIGGCDVAMELDARRAIAQGTRLALEI

SEQ ID NO: 6634 - protein, 649 aa, Chlamydia muridarum Nigg
MKRLARFCLLALTLFPQLAFSSAPLRQQDVRKTVEKLVEHHIDTKHISPHILSRSLEDYARSFDSHKAYLTQDEVLTYVFSEKATHSLFKQYQEDNFASFRELHTCIQQSISRVREWRTVWLSDAVRVIQDASSHTIPKKPTTWGSSIEEVKQRQYELLLSYASIYLEDATKNRYQGKEHALVRLCIRQIENHENPYIGINDHGLKMSLEEEANSFHIRIIKSIAHSLDAHTAYFSKEEALSMRAQLEKGMCGIGVVLKEDIDGVVVKEVLPGGPADKTGSLRVGDIIYRVNGKNIENTPFPGVLDSLRGLPGSSVTLDIHRQNNDHVVQLRREKILLDSRRVDVSYEPYGDGIIGKITLHSFYEGENQISSEQDLRRAIRELQEKNLLGLVLDIRENTGGFLSQAIKVSGLFLTNGVVVVSRYADGSVKRYRTISPQKFYDGPLAVLVSKSSASAAEIVAQTLQDYGVALIVGDKQTYGKGTIQHQTITGNNSQEDFFKVTVGRYYSPSGKSTQLEGVKSDIVIPSRYAEDNLGERFLEYALPADQYENVLNDNLGDLDIHIRPWFQKYYSPHLQKTELTWREMLPQLVENSQQRLEKNKNFEIFVQHLKKTDKQEQSFGSNDLQMEETVNIVKDMILLQTSLRSPAQ

SEQ ID NO: 6635 - protein, 764 aa, Silicibacter sp. TM1040
MRIACLGGGPAGLYFGISMKLRDPSHEVTVIERNRADDTFGWGVVLSDETLDNLAANDAKSAESIRSHFAYWDDVALLFKGTRQVSSGHGFCGIGRKKLLILLQERARELGVKMQFETEVQSAEDYRKDYDLVVASDGLNSRTRSLYADTFKPDVDTRLCNFVWLGTHQTFKDAFTFIFEETEHGWVWAHAYQFDDDTATFIVECTQETFDAFGFGSMSQQESIKTCEEIFKDHLGGHALMTNANHIRGSAWIRFPRVLCEKWSHENVVLMGDAAATAHFSIGSGSKLALESAIALADLLHEKPDLQSAFDEYEDQRRLEVLRLQSAARNSMEWFERVERYLDLDPVQLNYSMLTRSQRISHENLRERDKDWLESAERWFMDQAGAPKDAPLRAPMFAPFRLREMDLKSRIVVSPMAQYKAKDGSPTDWHLVHYGERAKGGAGLVYTEMTCVSPEGRITPGCPGLYAPEHEAAWSRITDFVHAETDAKICCQIGHSGRKGSTQLGWDEMDAPLPEGNWDIVSASAIPWSGQNATPREITRAEMDEVRDQFVRAAQMADRAGFDMIELHAAHGYLISSFLSPVSNQRGDDYGGSLENRLRYPLEVFAAMRAVWPEGKPMSVRISANDWVGEDGVTPDEAVQIARAFWEAGADLIDVSAGQTTTEAKPVYGRMFQTPFSDQIRNEAGICTMAVGNIFEADHANSILMAGRADLVAVGRPHLSDPYWTLHEGSKIGDRAAPDWPLPYLAGRDQSWRLADKEAETLRA

SEQ ID NO: 6636 - protein, 783 aa, Oryza sativa
IRLEKVKTNFSVPATARKNKTMVTVVEEVDHLPIYDLDPKLEEFKDHFNYRIKRYLDQKCLIEKHEGGLEEFSKGYLKFGINTVDGATIYREWAPAAQEAQLIGEFNNWNGAKHKMEKDKFGIWSIKISHVNGKPAIPHNSKVKFRFRHGGGAWVDRIPAWIRYATFDASKFGAPYDGVHWDPPACERYVFKHPRPPKPDAPRIYEAHVGMSGEEPEVSTYREFADNVLPRIRANNYNTVQLMAIMEHSYYASFGYHVTNFFAVSSRSGTPEDLKYLVDKAHSLGLRVLMDVVHSHASNNVTDGLNGYDVGQNTHESYFHTGDRGYHKLWDSRLFNYANWEVLRFLLSNLRYWMDEFMFDGFRFDGVTSMLYHHHGINKGFTGNYKEYFSLDTDVDAIVYMMLANHLMHKLLPEATIVAEDVSGMPVLCRPVDEGGVGFDFRLAMAIPDRWIDYLKNKEDRKWSMSEIVQTLTNRRYTEKCIAYAESHDQSIVGDKTIAFLLMDKEMYTGMSDLQPASPTINRGIALQKMIHFITMALGGDGYLNFMGNEFGHPEWIDFPREGNNWSYDKCRRQWSLVDTDHLRYKVVPKYINYMNAFDQAMNALEEEFSFLSSSKQIVSDMNEKDKVIVFERGDLVFVFNFHPNKTYKGYKVGCDLPGKYRVALDSDALVFGGHGRVGHDVDHFTSPEGMPGVPETNFNNRPNSFKVLSPPRTCVAYYRVDEDREELRRGGAVASGKIVTEYIDVEATSGETISGGWKGSEKDDCGKKGMKFVFRSSDEDCK

SEQ ID NO: 6637 - protein, 464 aa, Listeria innocua Clip11262
MLYSKENKESYLEPVFGSSAEDRDIPKYTLAKEPLEPRIAYRLVKDELLDEGSARQNLATFCQTYMEDEATKLMSETLEKNAIDKSEYPRTAELENRCVNIIADLWHAPKDQKFMGTSTIGSSEACMLGGMAMKFAWRKRAEKLGLDIYAQKPNLVISSGYQVCWEKFCVYWDIDMRVVPMDKDHMQLNTDQVLDYVDEYTIGVVGILGITYTGRYDDIYALNEKLEEYNSKTDYKVYIHVDAASGGFFTPFVEPDIIWDFRLKNVISINTSGHKYGLVYPGIGWVLWKDESYLPEELIFKVSYLGGEMPTMQINFSRSASHIIGQYYNFLRYGFEGYRTIHQKTSDVAQYLAHAVEQTGYFDIYNDGSHLPIVCYKLKDDANVKWTLYDLADRLQMRGWQVPAYPLPKNLENIIIQRYVCRADLGFNMAEEFIQDFQASIQELNNAHILFHDTQQSGVHGFTH

SEQ ID NO: 6638 - protein, 274 aa, Triticum aestivum
  misc_feature (220)..(220): Xaa can be any naturally occurring amino acid
  misc_feature (248)..(248): Xaa can be any naturally occurring amino acid
  misc_feature (264)..(264): Xaa can be any naturally occurring amino acid
NKFVQKSRLVPVRNSRDIVDPRVRGFGVNTYTLISRDGKAHLVKFHWKPTCGVKCLLDDEAVTVGGTCHTHATKDLTDSIAAGNYPEWKLFIQTIDADHEDKFDFDPLDVTKTWPEDIIPLQPVGRMVLNKNIDNFFAENEQLAFCPAITVPGIHYSDDKLLQTRIFSYADTQRHRLGPNYLMLPVNAPKCAHHNNHHDGLMNFMHRDEEVNYFPSRFDXTRHAEQYPIPPRVLSGCRGECIIEKETXFSAAGEKYRSFDPGRXDRFLKRWFDA

SEQ ID NO: 6639 - protein, 273 aa, Gloeobacter violaceus PCC 7421
MTAQSPATQATPISWVFVGFMAFIHLGALAALWQFSWSALALAIFLHWALGCLGITLGFHRLLSHRSFTVPKPLEYFLALLGTLCLQGGPVLWVAHHRLHHAHSDTEADPHDSNRGFWWSHWGWMFYMPEERLNFDHYSRYAKDLARDPVHRFLNRNMIPLQLAFAALLYLLGGWPFVLWGIFVRLVVVFHCTWLINSACHQWGYRSHQTDDHSTNLWWAAILAYGEGWHNNHHAMPRSARHGLAWWEIDVTWSVIWILSKLGLARNVQLPTS

SEQ ID NO: 6640 - protein, 243 aa, Glycine max
MEDPNQAPEGSSQKKMGRGKIEIKRIENTTNRQVTFCKRRNGLLKKAYELSVLCDAEVALVVFSTRGRLYEYANNSVRATIERYKKANAAASNAESVSEANTQFYQQESSKLRRQIRDIQNLNRHILGEALGSLSLKELKNLEGRLEKGLSRVRSRKHETLFADVEFMQKREIELQNHNNYLRAKIAEHERAQQQQSNMNMSGTLCESLPSQSYDRNFFPVNLIASDDQQQYSRQDHTALQLV

SEQ ID NO: 6641 - protein, 50 aa, Triticum turgidum subsp. durum
MTVEKLLEYGHMLVQEQDNVKRVQLADTYMSQAALGDANQDAMKTGSFYG

SEQ ID NO: 6642 - protein, 594 aa, Cytophaga hutchinsonii
MNQAILYRGPDHSDFVSFQFKQQQIFIGNNRLKIIDRNTLSNQPYNSIDKRYSLTFNGAIYNYKELKQQLPAMEWQTESDTEVLLNWMIVHGLSGLPELNGMFAFAFYDRQQHALIIARDPSGIKPLYYYNDDDYFIASSEIKGILASGLVKKEFNSNQVSHYLQFKYVPKPFTFYKNIFELNEATFIKIDEYDFKIKRFESPSVIKPNTLTNQQLIETCDQLIENAVKHHLVADVPVGLYLSGGIDSTLLLSKIRKLGHLNFPTFTIANSSREQAFGTRDFEFARLASKLYNSDHHEVSVHAEMLQDLPAFVSMIDQPIGDSALFLTHILSKEAGQHVRVALNGAGADELFAGYNRHSAYKSYLNNLLHKNLAITLIKSTYNILPDGGNHSLKKVFRLWNKFTGMMDVDPIKTCHNFSSSEYFIEKNTSIEVDDKSYEDLSYYLYYCLRNDRTKYLISDILALTDKMTMRSSIEARVPYLDQELRRFVESLDPSVLLKNGRKWILKEVLLRNGGETFLNRPKEGFGMPFGYWLKLPVNKNFVEKLTNKNHPIYEWVPYQTIKNLVDWHLGSKRDCSSELWSVLLLMHWYEKEF

SEQ ID NO: 6643 - protein, 2310 aa, Schizosaccharomyces pombe
MSLYKSLDVAIDYAISQLGEFQFQPIRTQSNPSSLLSACLVRAVHVETRRKVIFKFSQQTFKLENEYFLLRQLSSHPNGRNYAIAPAYILLLNETLGALIYDDPGPNILDEWLGNPNPLDLKLFLKFALGVSYVLCFLHEKKIVHGEIRLDTFHYDLNAPIHAKLLTIGSSVSPIRFTLSSLNWKRLYQVQNICHKLQFFSPEQIGNVGRPLDSRSDIYSLGILFYVILTKQYPWGGQSMRIVQSIHMRQFPSVLPRRPDAFPALDQLIQKMTAKSMNSRISSATDLCYTIVELMQEFSTITSSPLLDQKLLSINKPQQEKLKFPKLLLTNSSDYVRIFHELVAFSSKRDLLTSAKRVDKLPKQHLFKYRPVDNEATYCQVVTVTGEKGSGKSNLLNAVADEARKFGYFAMSSFKGHHFSPYSAIFKCVSLIMQQTLREEKQLVTDYFTSLWEFLGFQLIYMGELFEYVPELNSLLSPKYNLHCKRENYFKLKKRDPQQFRSASGRLGFMVCLLEILSFTSRVRPVIIILDELHLADHPSLSLIIGMISHRLPILLILAWDEPVMFKDFSKCLHEAPYAMVTDIRMNLFDRKNITEFLDSTLESPTQALGPLVLLMQKLSKGNPLVLKSLLLIAFANNGFAFHPKSSSWTYDLPVINRSFEALSSYDIPPLLASLLDALLPARCIEFLLWAALLVEPFPFELLRLITTSMHLFIPKEEILDFPLNVLQFDNDNESCQFSETFFREGILSKISLRRAESMHAQIAKELITGTAKEFYDIRTVHHILKGLGVIKKFDNTKPYILALKESADALMQFGSYEYATELLKSCLFLLPRNFWNSKLYTRKDLISIHISLAMCYWWSKDHENAIKVLKNPKLSSSNVYDYLPAFRLLTKIEYYKYQSLRSIDKAQELLSNLGLKLKEPTDDVLREFYDRLSTKFLECDFLVKQSEPLDRKRIDAISVILSECGFVLFNFSQPYYYYFSFLLAEMYLRYGNPSLRYSVMFLASYCFVTRRKPEFLLRISQVDSDLFVIKDRSAVAHAELIYWGLKRELCSTETGSAVTLESILLQCVMFGDKIYGAYCLACLMAQRVFRGDHIHQLLLDQENSETLLLLWDCEPPFTYYLMLIRNSLLALFGLTNNDDPNNILTTKQRTQKDLHDKLTSKKVPCTFCCWYYAGIIFLNTLFHHYEYVMSIAQEVRKLVDGKLYERYYLITRSFIGVAALQLLFYKKNISEFEREKVEDVAHWAQSSLSEMAKCFHAELYKLWVCLLEGLRQRNLGNYMEALRLFEKVTSMGASVFSPIEFPFVLELIGEFYYGRGHKFLAKSYITRALSCLKNIGCYGVENKLRSRYSDLISDVESRGTTVVSIATTTGDYAEKLKLLRNQDINDFSLGLASYSDIFDKPLVTLPVKKSSAVDESENDFYDRNDEESFDIVSLVSVIKCGQLLSSKLRLGPLLTTVIKLVIEYSQAKHAAIILKDASNYTLAAHGNVEKAESFEPPVILSQSDVKIPDSLLSEVFDHCRIVSLYTVSASQDAELLRWLQEEHDMDFFAIIPLQFKESVIGALYLCLSRRAIRTGNVTFLKLLSQQIAISVSNALLFQSLRRTITDNVTLIELQRLSYQRYKAIEEKCITLLDSLPCIVWTLDSDIGEIEYTNASKRNYFGVPEDCHDSLSWKTFIHPDHHHQFQEKLLNLKTLELGDIELLLRMEDGNYHWHLCRGLSFKEDANAKKWIVVCIDINDEKEAREAAMHAVNLKTNFLANMSHELRTPFSSFYGMLSLLSDTKLNEEQYDIVSTAKQSCTSLVQIIDDLLNFSELKSGKMKLEPDKVFDVEENIADCIELVYPSLSSKPVQISYDIYPNVPALLAGDSAKLRQVITNLLGNSVKFTTEGHILLRCMAIDEEINAEENQCKLRFEIEDTGIGLKEEQLKLLFNPFTQVDGSTTRIYGGSGLGLSICLQICKIMDGDIGVQSVYGEGSTFWFHVQLRNVTSKLSQKHFEESHERFANIRQSLKNAKILVVKSFTTSRSIFRSLFSLAVVDTTTIYSDIEQQLIDSLDKRQPYDFLCIEAASGQTEQIITQILSNQKLNKVLLIVLLPSIQRTKVRSDGDPFITSLNKNQSRIFCFREPIRISKLLQNFPALLSKWSTPTKLVEPSQFRASPRKVDQAVVLSSEEKEILQKKYALIAEDNLIARKLLTKQLSNLGFQVHAAVDGVELVKMYEAKQFGFYSVIFADYHMPIRDGAEAVMDIRAYERENNCSTPIPVIALTADIQKSAKQRCLEVGMNFYLTKPFTQKQLVNAVREFVLLEKSAR

SEQ ID NO: 6644 - protein, 736 aa, Podospora anserina
MASYLPSMEKVQHAVLGPRGGDKVADLQKETKEMSDKARLTTDYGVKQTSADDWLKIVNNDKTGPMLLEDPFARERIHRFDHERIPERVVHARGSGAFGKFKLFESAEDVTFAPILTDTSRETPIFIRFSTVLGSRGSADTVRDVRGFAIKFYTQEGNWDIVANNIPVFFIQDAIKFPDVIHAGKPEPHNEVPQAQTAHNNFWDFQYNHTEATHMFMWAMSDRGIPRSYRMMQGFGVNTFTLINAKGERHFVKFIFTPELGVHSLIWDEALKLAGQDPDFHRKDLWEAIENGVFPKWKFGIQVIPEADEHKFDFDILDATKIWPEDLVPVRYIGEFELNRNPDEFFPQTEQVAFCTSHIVPGIGFSDDPLLQGRNFSYFDTQLSRLGINWQELPINRPVCPVMNFNRDGAMRHTITKGTVNYWPNRFEKVKPATHEEGGYVEYAEKVAGIKARARSAKFKEHFAQAQLFWNSMSAVEKNHIINALGFELDHCEDPVVYERMVTRLADIDLGLAQTVAEMVGGEPPKEASRPNHGRKAPGLSQTEFPGSKPTIASRRIAILVADGYDQVAYSAAYAAISAGLAIPLVIGTKRSKIVAAGGAGSTTPHHHLEGFRSTMVDAIFIPGGVDSIRALSKNGRALHWIREAFGHLKAIGATGEAVDLVNKAIGLPAVSVSESAEVQDSYGVVTMRETKPGSLSEAVDIVKAGAGFMEKFFHNIAQHRCWARELDGLHSQVAY

SEQ ID NO: 6645 - protein, 744 aa, Nocardia farcinica IFM 10152
MSGPEDPADRRHGEVPAPRRDIPRPLVERRDLMLLAAGTHRDPHTVLGAHPHPDGTVVRVLRPHAAKVSVRVGGVDHPLDSVGYGVFAAVLPHPELMDYRIVTEYPGGPTVIAADGFRFLPTLGELDLHLIGEGRHEHLWHVLGAHPRRYTTLDGPVSGTSFAVWAPNARGVTVIGDFDGWSGNTAPMRALGTSGVWEVFVPDVGSGTKYKYRVHGADGRVVDHADPLAFATELPPATASVVTGSDYTWQDAQWLERRRSTDPTRSPMSVYEVHLGSWRPGLGYRELAEQLADYVRAAGYTHVELLPVAEHPFGGSWGYQVTSYYAPTARFGSPDDFRAFVDHLHGAGIGVLLDWVPAHFPRDEWALARFDGTPLYEHPDPRRGEQLDWGTYVFDFGRNEVRNFLVANARFWIEEFHIDGLRVDAVASMLYLDYSRGENWEPNIHGGRENLEAVAFLRELNDVVHRAHPGVVTIAEESTTWPGVTRGTEVGGLGFTMKWNMGWMHDTLGFLARDPIHRSWHHNEITFSLVYAWSENYVLPISHDEVVHGKGTLWTRMPGDDFAKAAGVRALLAYMWAHPGKQLLFMGQDFGQFREWSHDRGLDWGELDNPLHRGIATAVRDLNRVYRATPALWSQDTTPGGYAWIEADDRDRNVLAFLRYGSDGSTVACVFNFSGALHGEYRVGLPIAGEWTEILNTDAADYGGSGVGNYGVVRTEEIPWHGRPVSATVALAPNSAVWLAAPRA

SEQ ID NO: 6646 - protein, 218 aa, Eustoma grandiflorum
MGRGKIDIKRIENNTNRQVTFCKRRNGLLKKAYELSVLCDAEVALIIFSSRGRVYEYANNNIKSTIDRYRKATSDASTVFTTQEINAQFYQQESKKLRQQIQVLQNSNRHLMGEGLSSLNVKELKQLESRLERGISRTRSKKHEMILAEVEYLQKREIQLEQENACIRSKIAEQERLQELSMMPPGQDYNAMQAYLAQNFMQVNGLMEGPPVYSMLHK

SEQ ID NO: 6647 - protein, 315 aa, Glycine max
MNDMKVRSGLCVWPNVRQLCFRKGILYGFMRLFSTPLKTLRGASRSLRVAQFCSVANMSSSLQIELVPCLKDNYAYLLHDVDTGTVGVVDPSEAVPVIDALSRKNRNLTYILNTHHHHDHTGGNVELKARYGAKVIGSGTDKKRIPGIDIHLNDGDKWMFAGHEVRVMDTPGHTQGHISFYFPGSGAIFTGDTLFSLSCGKLFEGTPQQMLSSLKKIMSLPDNTNIYCGHEYTLNNTKFALSIEPENEELQSYAAQVAYLRSKGLPTIPTTLKMEKACNPFLRTSSAAIRQSLNIAATANDAEALGGIRQAKDNF

SEQ ID NO: 6648 - protein, 406 aa, Oryza sativa (japonica cultivar-group); identical to SEQ ID NO: 115

SEQ ID NO: 6649 - protein, 428 aa, Bacillus cereus ATCC 14579
MEVYTMKFPHDFLFGAASASYQVEGAWNEDGKGVTNWDEFSKIPGKTYNGTNGDVAVDHYHRYKEDVRLMAEMGLESYRFSISWARILPTGDGKVNEKGIEFYNNLIDECLKYGIVPFVTLYHWDLPLPLEKDGGWTNKRTAEAFVKYAETCFKAFGDRVKHWITFNETVMFCGLGYLKGAHPPGIQNDVPKYFQATHYVFYAHAKTVAVYKQLKQYGEIGITHVFLPAYSVDDQKENIQAANHANEYETYWYYDPILKGEYPSYVVQQLKEKGWTPNWTVEELEIIKQNAEENDFIGLNYYQPIRVERYDMDIKSEEHSRENSTLAPGNPSFDGFYRTVKMDDKTYTKWGWEISPEGFLEGLHMLKARYGDIKMYVTENGLGDEDPIIDGEIVDVPRIKFIEAHLKVMKRAIEEGINLKRLLCMVSD

SEQ ID NO: 6650 - protein, 394 aa, Pisum sativum
MEGGGGAPAADAVMEDAAPQQQEPQQQAAMGIENIPATLSHGGRFIQYNIFGNIFEVTAKYRPPIMPIGKGAYGIVCSAHNSETNEHVAVKKIANAFDNKIDAKRTLREIKLVRHMDHENVVAIRDIVPPPQREVFNDVYIAYELMDTDLHQIIRSNQALSEEHCQYFLYQILRGLKYIHSANVLHRDLKPSNLLLNANCDLKICDFGLARVTSETDFMTEYVVTRWYRAPELLLNSSDYTAAIDVWSVGCIFMELMDRKPLFPGRDHVHQLRLLMELIGTPSEADLGFLNENAKRYIRQLPLYRRQSFQEKFPHVHPEAIDLVEKMLTFDPRQRITVENALAHPYLTSLHDISDEPVCTTPFSFDFEQHALTEEQMKELIYREALAFNPEYQQ

SEQ ID NO: 6651 - protein, 369 aa, Candida albicans SC5314
MENNNTIPALFQPIKISDSITLPNRIGVSPMCMYSSSPTDNQATSFHFVHYGSFAVRGPALIILESIFVSENSGLSIHDLGLWNDDQAHSLRKIVDFIHDQDGICCIQLNHAGRKIVEGVPFQQIQHGWQEHCVGPSTEPFSDSHNTPRELTVNEINSIVEDFANAAWRAVEISKFDAIEIHCANGCLIHQFLSKLTNKRADQYGGSFENRVRFLLQIIENIKRKIETPIFLKFPMSDNCSDPEAWSTEDALKLADLVIDLGVKVIDVTSGGNVAHCKSRYLLNDDKQLPSQVPLARKLKSHIRNRCLIACSGGLDRDIFKLDEFIANGDFDIALIGKGFLKNTGLISRIADQLQAQFRTAPQYKLALS

SEQ ID NO: 6652 - protein, 365 aa, Bordetella bronchiseptica RB50
MTMASIFSPYELGELILPNRVVMAPMTRARTLDTVPAQSMALYYAQRASAGLIVTESAQVSAQGRGYLCTPGIHTPEQVAAWRNVTDAVHRAGGRIFIQLWHVGRLSHTSLLPDGGSPVGPVSVAAAHTLVQAYGHDGRPAQVPASPPAALDIAGIRRIVADFRAAAENAARAGFDGVEIHAGNGFLFEQFINAGLNTREDQYGGPSIANRLRLLLETVDAVSAVIGRQRVGVRISPFAHAGDLHEFDSEKASWLGLAGALCQRRIAYLHASHLGQAGFQRDMRKAFGGTFMLAGGFTAQTAQAALDAGEADLVVFGRPFIANPDLVERMRHGWPLAEAGKHAFYGGDDRGYTDYPRYAAAQPAA

SEQ ID NO: 6653 - protein, 143 aa, Brassica napus
MADTPSSPAGDGGESGGGSVREQDRYLPIANISRIMKKALPPNGKIGKDAKDTVQECVSEFISFITSEASDKCQKEKRKTVNGEDLLWAMATLGFEDYLEPLKVYLARYRELEGDNKGSGKSGDGSNRDAAAGGVPNEDMPSW

SEQ ID NO: 6654 - protein, 327 aa, Saccharomyces cerevisiae
MSSLVTLNNGLKMPLVGLGCWKIDKKVCANQIYEAIKLGYRLFDGACDYGNEKEVGEGIRKAISEGLVSRKDIFVVSKLWNNFHHPDHVKLALKKTLSDMGLDYLDLYYIHFPIAFKYVPFEEKYPPGFYTGADDEKKGHITEAHVPIIDTYRALEECVDEGLIKSIGVSNFQGSLIQDLLRGCRIKPVALQIEHHPYLTQEHLVEFCKLHDIQVVAYSSFGPQSFIEMDLQLAKTTPTLFENDVIKKVSQNHPGSTTSQVLLRWATQRGIAVIPKSSKKERLLGNLEIEKKFTLTEQELKDISALNANIRFNDPWTWLDGKFPTFA

SEQ ID NO: 6655 - protein, 462 aa, Zea mays
MVSDGARGLLGAYELGRTLGEGNFGKVKQARHRGSGGQFAVKIMERARVLSQRADEQICREIATLKLLAHPNVVRLHEVAASKTKIYMVLELVNGGELLDRIAASEGKLPEQEARRLFQQLVDGVSYCHEKGVCHRDLKLENVLVDRKGNIKISDFGLSALPQHLGNDGLLHTTCGSPNYIAPEVLQNRGYDGSLSDIWSCGVILYVMLVGHLPFDDRNIVVLYQKIFKGDAQIPEWLSPGARNLLRRILEPDPAERIAMAEIKAHPWFQEHYVPVLPPYDDDDDHDSVKQIGAGSKTTHHINAFQLIGMASSLDLSGFFEEEDVSQRKIRFTSAQPPEDLFAEIERSATDMGFHVHRGHSKLRLTRNCDRSKNQKNPMSSSSSSFLVCTEVFELSPSLYVVELNKSHGDPALYRQLCQRICGDLGVLEMDQIFGTRPPVADDLAGLALALERRSATPLVAL

SEQ ID NO: 6656 - protein, 481 aa, Oryza sativa
MPSHQPVAGMSAVDPAYLSSQPSAASKPHPQEPVRNKAYDPKKPHITETPMTKKNWYKHVNWLNVILIVGIPMCGLVAAYWTPLYLKTAIWAVAFYFATGLGITAGYHRLWAHTSYSASLPLKIFLAAVGGGAVEGSIRWWARDHRAHHRYTDTDKDPYSVRKGLLYSHFGWMLMKQNPKRIGRTDISDLNDDAVVVWQHKNYLKVVLFMGLIFPTLVAGLGWGDWLGGFVYAGILRIFFVQQATFCVNSLAHWLGDQPFDDRNSPRDHVITALVTLGEGYHNFHHEFPSDYRNAIEWHQYDPTKWSIWMWKQMGLAYDLKQFRSNEIEKGRLQQQQKKLDQKRSKLDWGVPLEQLPVMEWDDYVDQAKNGRGLIAVAGVVHDVTDFINDHPGGKAMIKSGIGKDATAMFNGGVYYHSNAAHNLLSTMRVGVIRGGMEVEIWKRAHGENKDFIKDAAGNRIVRAGAQVTKVVEPPASAGTA

SEQ ID NO: 6657 - protein, 513 aa, Arabidopsis thaliana
MGNSFGCSASGERLVSAARDGDFVEAKMLLDCNPCLAKYSTFGGLNSPLHFAAAKGHNEIVGLLLENGADVNSRNYCGQTALMQACRYGHWEVVQTLLLFRCNVTRADYLAGRTALHFAAVNGHARCIRLVLADFLPSDKLNSLPETGVVTAKNKSEQSALSKFVNKAADGGITALHMAALNGLFDCVQLLLDLEANVSAVTFHYGTSMDMIGAGSTPLHYAACGGNLKCCQILLARGARKMTLNCNGWLPIDIARMWSRHWLEPLLSPNSDVVIPAFPHSNYLSLPLLSILNIAREFGLQSATIGDEVDICAVCLERTCTVAAEGCEHQLCVRCALYLCSSSNVPSVTVGPPGSIPCPLCRHGITAFKRLPSSLTREMKLPMSLGFCAPCMLHTGDTTDQSSPTCPPTEQRSSKTRAASVSSDIFCPVTCSPFPSVNIPMCTCNEGTCPNFETHGTERHSEEHVESSPSRTTTEQEKIEEGQRLGKTTTCSSMFWGRRSCSRENQCNSEINA

SEQ ID NO: 6658 - protein, 244 aa, Vitis vinifera
MGRGRVELKRIENKINRQVTFAKRRNGLLKKAYELSVLCDAEVALIIFSTRGKLYEFCSSSSMLKTLERYQKCSYGAVEVSRPSKELEQSSYREYLKLKSKFEALQRTQRNLLGEDLGPLNTKELEQLERQLETSLKQVRSTKTQFMLDQLSDLQNKEQVLVESNKALTRKLDEISVKNHLQLSWESGEQSMPYGHQQAQSQGFFQPLECNPTLQIGYNPAGSSQLSAPSNAQNVNGFIPGWML

SEQ ID NO: 6659 - protein, 726 aa, Podospora anserina
MKRLLTWATLVGSMSAVTKAACPFADPNYHLAKRDEGASQQTENILEEYEVDDSNAYMSSDVGGPMEDQNSLKAGYRGSTLMEDWIFRQKIQHFDHERIPERAVHARGAGAHGTFTSYADWSNITAASFLGGAGKKTPVFVRFSTVAGSRGSADTARDVHGFATRFYTDEGNFDIVGNNIPVFFIQDAIRFPDLIHSVKPSPDNEVPQAATAHDSAWDFFSQQPSTMHTLFWAMSGNGIPRSYRHMDGFGVHTFRFVTDDGNSKLIKWHFKTKQGKASLVWEEAQVLAGKNADFHRQDLWDAIESGNGPEWELSVQIVDEEKALAFGFDLLDPTKIIPEELAPLVPLGIMKLDRNPTNYFAETEQVMYQPGHIVRGVDFTEDPLLQGRLFSYLDTQLNRNQGGPNFEQIPINRPVSPVHNNNRDGAGQMLIHKNVYPYTPNTLNGGYPLQANQTHGKGFFTAPNRIVDGKLVRALSPTFDDHWSQPRLFYNSLTRVEQQFLINAIRFEASHLKNEQVKKNVLEQINRVSNDVAKRVAVALGLEAPAPDPAFYHNNVTAGLSIFNGTLPTIATLRVGVLASSFNDGSLAQARELKEQLSKEGVVVTVVGEVLKEGVDQTYSAADATGYDAVVVTDGAEGLLTGGKNSPLFPAGRPGQILVDSYRWGKPVAAVGENSGQALEQTVGVSRGQDEGVVVGEGVEQVVKGVEEGLRVFRYLGRFPVDEGAE

SEQ ID NO: 6660 - protein, 232 aa, Lilium longiflorum
MGRGKIEIKRIENTTNRQVTFCKRRNGLLKKAYELSVLCDAEVALIVFSSRGRVYEYSNNSIKQTIDRYKKACDSSNSNSLIQVNSQQYFQQESAKLRHQIQILTNANRHLVGEALSSLTVKELKQLENRLERGLTRIRSKKHELLFAEIEFSQKREVELQSDNMYLRAKIAENERTQAAIVQARAEFDALPTFDSRNFYQVNNMLEAPPHYHHQDQTALHLGYEAKDDSVP

SEQ ID NO: 6661 - protein, 242 aa, Vitis vinifera
MGRGRVELKRIENKINRQVTFAKRRNGLLKKAYELSVLCDAEVALIIFSNRGKLYEFCSSSSMLKTLERYQKCNYGAPETNVSTREALELSSQQEYLKLKARYEALQLSQRNLLGEDLGPLSTKELESLERQLDVSLKQIRSTRTQYMLDQLTDLQRKEHMLNEANKTLKQRLLEGTQVNQLQWNPNAQDVGYGRQQAQPQGDGFFHPLECEPTLQIGYQPDPITVAAAGPSVNNYMPGWLP

SEQ ID NO: 6662 - protein, 403 aa, Pseudomonas syringae pv. tomato str. DC3000
MQFNKSNKLANVCYDIRGPVLKHAKRLEEEGHRILKLNIGNPAPFGFEAPDEILQDVIRNLPTAQGYSDSKGLFSARKAVMQYYQQKQVEGVGIEDIYLGNGVSELIVMSMQALLNNGDEVLVPAPDYPLWTAAVALSGGSPVHYLCDEQANWWPDLEDIKAKITPNTKAMVIINPNNPTGAVYSREVLLGMLELARQHNLVVFSDEIYDKILYDDAVHICTASLAPDLLCLTFNGLSKSYRVAGFRSGWIAISGPKHNAQSYIEGIDILANMRLCANVPSQHAIQTALGGYQSINDLILPPGRLLEQRNRTWELLNDIPGVSCVKPMGALYAFPRIDPKVCPIFNDEKFVLDLLLSEKLLVVQGTAFNWPYPDHFRVVTLPRVDELEQAIGRIGNFLKGYRQ

SEQ ID NO: 6663 - protein, 447 aa, Prochlorococcus marinus subsp. marinus str. CCMP1375
MFNLTFKNCPNNSNKNLRNLILSFFIIISPALSAPQKIHSLIEDSPKEVMDQVWQIIYRDYMDSTGKYDQKEWFKVRRKMLSNKYDNYSQAYESIRVMLSSLEDPYTRFLEPKEFNEMRIDTSGELTGIGIQISIDEKNNDVLVISPIEGTPAFQAGIKAKDKIISIDGTLTKGMSIENVVKLIRGKKGTEVKLGISRDNQFFKLTLVRARIEIRTVVSRINKSSSGNHFGYIRLKQFSANAAKEMRKALISLERNDPDAYIIDVRGNPGGLLEASIDISRQLLDKGVIVSTKTKDGITDVRRARGNALTHKPIAILVNEGSASASEILSGAIQDNKRGILIGKKTFGKGLVQSVRPLVDGSGLTVTVAKYLTPRGTDIHKYGIVPDIEVELKSIKGNRFSSIDLGTEKDSQYSVAESALIRLLKKFQDKKAYLPNSSNFEVAISSK

SEQ ID NO: 6664 - protein, 783 aa, Pseudomonas syringae pv. tomato str. DC3000
MDISLKNRLSFKQARLAVLIGFALGTLLSVAQIAIDYASEDASINREIGSLLEIIQNPASRIAYNIDAELAQELTLGLLHSPAVVSARLTDNNDTVLASVERATATGRYRVLSDWLFGESRQFQEKLHLDHLPDETIGTLYLTVDTFAFGSHFLQRAEITLLNGFVRSLALAGILTILFYATLTKPLVRVIRDLSSRDPRTVDQAKITCPPYHEKDEIGVLVATFNRQFETMSSEFSRRRAAEDRLTDHLNELENIVSARTNELKSSNMRLRESNEELQIARSTALDMANARSAFLAHMSHEIRTPLNGLLGMLALSLDSPLGAEQRQQLMIAHDSGKVLVELLNDILDMSKFDAGHLEIERIPFDLGGLIEDTANLLSQNAAPSVELTCLIAPDFPAMVTGDPTRVRQIVSNLLSNALKFTRFGRVDVRLTHHQDAASGEHRVRIEVRDTGIGIAQDAQAKIFQPFTQAETAITRQYGGTGLGLALTNNLCEAMHGTLSIQSQSGFGSQFCAELPLPVHVPAVAQNPLRGRVTVVSSAGSGLVELLGSLLPFWGVDLKRRSIDDSPDDLDLDNAPDLVITDCPECLFAIRPTTPVPILLVTAYGNFMPGEQVAALAPLQQQARPLARNALYHALRRVLNQEDTGKRDTLALDQPTRRVARVLLVEDNPVNQLVAKGILSKLGCEVIISSHGGEALEQLEHGHFDLVLMDCNMPVMDGYQATRQIRSSGRWPNLPIVALTANAMPDERERCKAAGMNDYLAKPFRRAELAGILDQWIPVTDDR

SEQ ID NO: 6665 - protein, 127 aa, Glycine max
  misc_feature (18)..(18): Xaa can be any naturally occurring amino acid
  misc_feature (115)..(115): Xaa can be any naturally occurring amino acid
  misc_feature (119)..(120): Xaa can be any naturally occurring amino acid
RVSYVGPPPKDALVYLIXANEILYSLHPNIITIAEDATFYPGLCEPTSQGGLGFDYYVNLSGPDMWSTFLESVPDHEWSMTKIVNTLVSNREHADKMLMYAENHNQSISGRGSFXEILXXEIDENSN

SEQ ID NO: 6666 - protein, 627 aa, Bacillus licheniformis ATCC 14580
MAGVSASDIKAHLFHEGRLYESYRFFGAHQTEQDGRQGFRFCVWAPHAKEVRIAGTFNGWSGVLHRMEKRHQEGIWELFIPGIGEGELYKYEMITAANETKLKADPYAFFSEVRPKTASVTYQLAGYQWGDRKWQKKKQQKAVYEKPISIYELHIGSWKKKADGRFFTYRELSETVIPYVKEHGFTHIELMPLTEHPFDRSWGYQTTGYYSPTSRYGEPHDLMYFIDQCHQHEIGVIMDWVSGHFCKDDHGLYLFDGMPLYEYKHEHDRENWEWGTANFDLGKREVHSFLISNALYWIEMYHIDGFRVDAVANLLYWPNRPQPEANGFAIEFIQTLNEQVFAKDPHFLMIAEDSTDWPLVTHPTYEGGLGFNYKWNMGWMNDVLTYMEASPEQRKHLHHLVSFSLMYAYSENYILPFSHDEVVYRKKSLLHKMPGDYWQKFAQYRLLISYFMMHPGKKLLFMGGEFAQFDEWKDEEELDWFLDDFDMHRKARMFTKEALHLYKKSRILYENDHRQQGFEWIDVNNAEQSIVSFIRYGKQPGEALIIVCNFTPSVYHEYRVGVPFQTEYIEVLNSDDAKYGGSHQINPKRLQARKGVLHGKPYSISMTVPPLGAAVFRAVKKRGAKKG

SEQ ID NO: 6667 - protein, 478 aa, Lactobacillus sakei
MTNQLTTNEGQPWADNQHSQTAGQRGPVLIQDYQLLEKLAHFNRERIPERVVHAKGAGAKGYFKVTKDMSAYTKAAVFSGVGKKTPLITRFSQVAGEAGYPDTYRDVRGFAVKFYTEEGNYDIVGNNTPVFFVNDPLKFPDFIHSQKRDPRTHARSQDMQWDFWSLSPESVHQVTILMSDRGIPASYRMMHGFGSHTFKWVNAQGEQFWVKYHFKTNQGIHNLSNELADELAGKDTDYLQNDLFDAIETGDYPSWTVAVQLVPYEDGLNYPQDIFDVTKVISQKDYPLIEIGQMVLDENPTNNFEDIQELAFSPANLVPGIEASPDKLLQGRLFGYKDAERYRLGANYEQLPVNRPKVPVHNYERDGAMAQNQATGVNYEPNSQDGPTEVPAAKIHGDQLSGTTGNFSADPDYYSAAGKLYRLLSADEQTRLIENIRMNLGQVTKPEIQIREVKQFYQADPEYGRRVATSVKLRFSSV

SEQ ID NO: 6668 - protein, 159 aa, Nicotiana tabacum
MSLIPSFFDGRRSNIFDPFSLNIWDPFEGFPFSGTVANIPTSTRETAAFSSARIDWKETPESHVFKVDLPGIKKEEVKVEVEEGRVLQISGERSREQEEKNDKWHSMERSSGKFLRRFRLPENIKMEEIKATMENGVLTVTVPKMEEKKPEVKAIDISG

SEQ ID NO: 6669 - protein, 525 aa, Triticum aestivum
  misc_feature (519)..(519): Xaa can be any naturally occurring amino acid
MAAIKPPPPDRPPQAARLPSPSSSSSAVAAAKRGATGSRGLLMGRYELGRVLGKGTFAKVYHARHVQTGESVAIKVLDREKAVRSGLVSHIKREIAVLRCVRHPNIVHLFEVMATKTKIYFVMELVRGGELFSRVSKGRLKEDIARRYFQHLISAVGFCHTRGVFHRDLKPENLLVDEAGNLKVSDFGLSAVAEPFQPEGLLHTFCGTPAYVAPEVLARRGYEGAKADIWSCGVILFVLMAGYLPFHDQNLMAMYRKVYKGEFRCPRWFSKDLTSLIMRFLDTNPSTRITLPEVMESRWFKKGFRPVKFYIEDDQLYNVIDAENDMLDLGLPDPLPQPLLPPPSSPSPQEVDGDDSGSESDASVVSCPATSSFEERHRLRGPLPRPASLNAFDIISFSRGFNLSGLFEEKGDEVRFISSEPMSGIITKLEEIANVKSFAVRKKDWRVSLEGTREGVKGPLTICAEIFELTPSLVVVEVKKKAGDKEEYDDFCNKELKPGMQHLVHQMAPVPITPTISEXAERPSR

SEQ ID NO: 6670 - protein, 518 aa, Magnetospirillum magnetotacticum MS-1
MGAGFVLAVSLLAHPASAGWVAGEAERTIAFGFDAIVERHLQPVTAQTIALDGLRGLAEIDPQLGVTLDQGRLRLSTTERVVADFPAAPPDDTVGWARITVNAALEASQVSERLRDADAERLYQAVFEGALGKADLFSRYAGAKEAREHRSNRSGFGGIGIKFDLIDGEVRIVEVVDDGPAAKLGLRSGDVITAIDGEAVKGLDRADISNRLRGAVATELVLSLRRGSQMLQFTLRRSLIVPQTVSSSVAGGIAHFKITSFNQRTAYSLENQLKEIRDRLGAGLQGVVLDLRGNPGGLLDKAVAVVDLFVTEGTIISTKGRHPAAANAFEAKPGDIGEDLALVVLVDGRSASAAEIVASALQDAGRAVVVGTNSYGKGTVQTVVRLPNDGEITLTWSRFHAPSGYALHGLGVLPVLCTGGTGQTAAQMVEAAGRGLFPGKPTETLAVWRGTGIEDTELRHRLRDTCPPVRLGDSKLEMELADRLLSNRAAYARALAASAPSRGLEALQTRPSPETGSH

SEQ ID NO: 6671 - protein, 754 aa, Lycopersicon esculentum
MGSLLRMNRLLSSIVESCNCIIDPQLPADDLLMKYQYISDFFIALAYFSIPVELIYFVKKSAVFPYRWVLVQFGAFIVLCGATHLINLWTFNMHTRNVAIVMTTPKALTALVSCITALMLVHIIPDLLSVKTRELFLKKKAAQLDREMGIIRTQEETGRHVRMLTHEIRSTLDRHTILKTTLVELGRTLALEECALWMPTRTGLELQLSYTLRHQNPVGLTVPIQLPVINQVFGTNHVVKISPNSPVARLRPAGKYMPGEVVAVRVPLLHLSNFQINDWPELSTKRYALMVLMLPSDSARQWHVHELELVEVVADQVAVALSHAAILEESMRARDLLMEQNVALDLARREAEMAVRARNDFLAVMNHEMRTPMHAIIALSSLLQETDLTPEQRLMVETILKSSNLLATLINDVLDLSRLEDGSLQLDIGTFNLHALFREVHSLIKPIASVKKLFVTLSLSSDLPEYVIGDEKRLMQILLNVVGNAVKFSKEGNVSISAFVAKSDSLRDPRAPEFFAVPSENHFYLRVQIKDTGIGITPQDIPNLFSKFTQSQALATTNSGGTGLGLAICKRFVNLMEGHIWIESEGLGKGSTAIFIIKLGIPGRANESKLPFVTKLPANHTQMSFQGLKVLVMDENGVSRMVTKGLLTHLGCDVTTVGSRDECLRVVTHEHKVVIMDVSMQGIDCYEVAVVIHERFGKRHGRPLIVALTGNTDRVTKENCMRVGMDGVILKPVSVYKMRSVLSELLEHGVVLES

SEQ ID NO: 6672 - protein, 546 aa, Bradyrhizobium sp. BTAi1
MSAKDVKFGVEARDRMLRGVDILANAVKVTLGPKGRNVVLDKSFGAPRITKDGVTVAKEIELDDKFENMGAQMVREVASKSADAAGDGTTTATVLAQAIVREGAKAVAAGMNPMDLKRGIDLAVEAVVADLVKNSKKVTSNDEIAQVGTISANGDSEIGKFLADAMKKVGNEGVITVEEAKSLETELDVVEGMQFDRGYISPYFVTNADKMRVEMDDAYILINEKKLSSLNELLPLLEAVVQTGKPLVIVAEDVEGEALATLVVNRLRGGLKVAAVKAPGFGDRRKAMLQDIAILTGGQAISEDLGIKLENVNLSMLGRAKKVMIDKENTTIVNGAGKKADIEARVAQIKAQIEETTSDYDREKLQERLAKLAGGVAVIRVGGATEVEVKERKDRVDDAMHATRAAVEEGILPGGGVALLRASEQLKGLRTKNEDQKTGVEIVRKALSAPARQIAINAGEDGSVIVGKILEKEQYAYGFDSQTGDYVNMVSKGIIDPTKVVRTAIQNAASVASLLITTEAMVAELPKKNAGGPAMPPGGGMGGMDF

SEQ ID NO: 6673 - protein, 474 aa, Campylobacter coli RM2228
MKKLTNDFGNIIADNQNSLSAGAKGPLLMQDYLLLEKLAHQNRERIPERTVHAKGSAAYGEIKITADLSAYTKAKIFQKGEVTPLFLRFSTVAGEAGAADAERDVRGFAIKFYTKEGNWDLVGNNTPTFFIRDAYKFPDFIHTQKRDPRTHLRSNNAAWDFWSLCPESLHQVTILMSDRGIPASYRHMHGFGSHTYSFINDKNERFWVKFHFKTLQGIKNLSNKEAAELIAKDRESHQRDLYNAIENKDFPKWKVQVQILAEKDADKLGFNPFDLTKIWPHSVVPLMDIGEMILNQNPQNYFNEVEQAAFSPSNIVPGIGFSPDKMLQARIFSYPDAQRYRIGTNYHLLPVNRARSEVNTYNVAGAMNFDSYRNGAAYYEPNSYEESPKEDKSYLEPDLVLKGNAQRYAPLDDDFYTQPRALFNIMNQNQKEQLFENIAASMEGVEEKIITRALGHFEKISPDYAQGIKKALGK

SEQ ID NO: 6674 - protein, 417 aa, Rubrobacter xylanophilus DSM 9941
MWRTGITKRKRGRGPLVRVLLLAALLVAVGYGAYEYGKSQSPAGLSGPDRESLRLYAEALDAVRDGYVDREAIDPKKQTYGAIEGMLDSLGDEGHTRFLTPEERRENEQGLSGDYVGIGVQLEDRDGRVVVASPIEGSPADRAGIESGDVLVAVNGRSVSGQELDRIADRVKGPEGTRVKITVLRDGEERTFYLERAEIESPAVSWAMVPGTGVAHIRLSSFSDDSARELRAAFEEARLDGAERFVLDLRDNPGGRLEQAVEMAGFFLEPGSVVYIRRDASGERTPVRADGEAQLAEVPLAVLVNGGSASSAEILAGALRDNDRATVIGQRTFGTGTVLSEFVLSDGSAILLGVAEWLTPDGDFIRDTGIEPDIRVGLDEGEEPLSPSQTEGLSREEISRRDPQLWRAVRELAGGRV

SEQ ID NO: 6675 - protein, 223 aa, Vitis vinifera
MGRGKIEIKRIENTTNRQVTFCKRRNGLLKKAYELSVLCDAEVALIVFSSRGRVYEYSNNNIKSTIDRYKKASSDSTNGGFTMEINAQYYQQESAKLRQQIQMLQNSNRHLMGDSLASLTVKELKQLENRLERGITRIRSKKHELLLAEIEYLQKREIELENESVYLRTKIAEVERLQQANMVSTHEFNAIQALVSRNFFQPNMIEGGSTGYPLHDKKVLHLG

SEQ ID NO: 6676 - protein, 532 aa, Glycine max
  misc_feature (117)..(117): Xaa can be any naturally occurring amino acid
MGRDAPLTPSLFLQTLFPSLFLSLNPTFSLSKTLHHSPLPSDPSPVSLQFPPNTAGPHLLPFSRLLMSSAAGAPDRRASPPRVAAGAPTRPPLKRHLAFITKPPFAPPDEYHSFSSXAPAAPPMKPVVVRSPYIMKRKSGMNDSEGESLAQKWSNSPGYTNVSNVTNNSPFKTPVSAKGGRTQKAKASKGRSCPPTPISNAGSPSPLTPASSCRYDSSLGLLTKKFINLVKHAEGGILDLNKAAETLEVQKRRIYDITNVLEGIGLIEKKLKNRIHWKGIESATSGDVDGDISLLKAEVEKLSLEEQGIDDQIREMQERLRNLSENENNQKCLFVTEEDIKDLPCFQNETLIAIKAPHGTTLEVPDPEEAVDYPQRRYRIILRSTMGPIDVYLISQFEEKFEEVNGAELPMIPLASSSGSNEQLMTEIVTAECSGKELEPQTQLSSHAFSDASQEFAGGMMKIVPSDVDNDADYWLLSDADISITDMWRTDSSVDWNGVDMLHPDFGVISRPQTPSSGFAEVPSTAANSIQK

SEQ ID NO: 6677 - protein, 400 aa, Exiguobacterium sp. 255-15
MAGVVWYRKDLRVDDHEALTRACEEEKIVRAVFVRQTADGRGKQQMTFEEETLQSLNEHLVQLGIELTILQGETVEQLTSFIQPEDVVYFHRMTGEYEARQEQEVQKRFNTRMYETQTLHLRDDIGSDELKRVFTAFRKRVEQDGRFAEPIEAPGNIQYIELPQTRGGYDPRTAFPFIGGEAAGRNRLAAYLEQPIFTYKETRNGFNVDDSSKLSAWLANGSLSPRRVMAELQRTEQEHGANESTYWLYFELLWRDFFHLTMRETGHRLFRSNGLKDGRLTWKTDQAAIDSWMAGETGEPFVDAFMREIKDTGWMSNRGRQITASYLIHDLKQDWRIGARYFEQQLIDYDVASNYGNWAYIAGVGNATRTPRFNPEFQQQKYDPNRALIRRWMSSETTEK

SEQ ID NO: 6678 - protein, 1403 aa, Nostoc punctiforme PCC 73102
MVKQRRYHWLKAVIFFRKRKLLALLLGIFFSISVVLLWQRLSIQTPGLLKPVVLITGLLVVTLTLSICFALAIKVNNQQIALINQDLTHRILEQKQVEITLRASENRLRQLLETVKVIPWELDLKTWRFIYVGPQAVDLLNYAIADWYEENFWINHLHPHDKEKSVRFRQEATARCENHELEYRMLAADGRVVWLRDVVSVVEEAGTLTTLRGFMFDITDLKQVEETLRLRERALAATSNGIIIADARLPYNPIIYVNCAFEKITGYTAADVIGQNCRFLQRTDSQQPALNELRSSLQAGTSCKVILRNYSKDGVLFWNELCISPIHDENGKLSHFIGIQTDISQRKQAEASLRRQALTFENMHDGVIITDLGGNIIDWNPAAQSMFGYTKAEILAKHISILHRPEVAATLSAKILEKINQQARWSGEIHFLCKDGSQAICETTVVSLQDEQGETVATVGINHDITENKRAKEALQRQLHRTLLLEQITQEIRQSLDTSKIFETAATQIGKAFKADRCLIHSYISDPTPRIPLVAEYNTLPGYCSMLKLEVPMTNNPHAEQMMAQESAIASPDVYADPLLQAAEPICRKIELKSMLSIRTSYQGEPNGAIGLHQCSYFRQWTPDEIELLEAVAAQLGIALAQAQLLEQETHRREELTLKNFALEQAKRQAEAANRAKSEFLAMMSHEIRTPMNAVIGMTDLLLDTDLTPQQQDFVETVRSSGDALLTIINDILDFSKIESGKLELEEQPFDLRACVEQAISLLAPKAAQKNIELVYLIQPQVPTQIVGDMTRLRQVLMNLLNNAIKFTERGEVVLSVELGAGDSVKQGENSSPLHPSLVRLRPSLREAAPTTTLRTSSRQARPSASSESPIQIQFAIKDTGIGITPEKIERLFHPFTQADVSMTRRYGGTGLGLVISKRLSKMMGGTLWVESQGIVGGNPSPRWKSRKSLSSPYSSQGSTFYFTITAQVPAVPEAEFSNSPMQLQGKRLLIVDDNLTNCQIISLQAESWEMETYAAKSAKEALAQLAQGIQFDIAILDMEMPAMDGITLARQIRRQSGCQNLPLVILTSLGREETFSDFGDVEFAASLSKPIKQSQLYDVITRVLGNQPSEASITDFPLVDRHLTHPLPLRILLAEDTIVNQKVALLMLQKIGYSADVVTNGVEVLKALQKQPYDLVLMDVHMPEMDGLETARRICQEWKVGFRPHIIAITANAMRGDREVCLAAGMDDYISKPIQLQKLAQALSKCPRQRSLEVTPIVKQDRVRYLELQPLQNIFQEGQNQTLKSDKIDAKILQSLRDIVRGDRVVFAELIKCYLTETLRLVQDISTAIATRDAQTIWKAAHQLKSSSGSIGAIALAQLCKVLEAQGRSSELENTIELLPQLYQEYEQVKTALEKELAKETP

SEQ ID NO: 6679 - protein, 351 aa, Clostridium acetobutylicum ATCC 824
MKKLFTEINIKNLKIKNRVCIPPMVVPVAEDGYVTSSNVERYKELAKGGPGLIIQEATCINEDGKLAEKQIGIWSDDQVEGLRKIVDAVHEEGCPIFVQIHHAGVVGISEEPLCPSPYEFNGYGRKVVGREMTLEDIKSVQNDYIEAARRAYEAGYDGIELHGCHGYLICQFLNKRVNKRNDEYGKNPENFVIEILEGIRKVTPKEFIVGIRLGGFEPAIEDGIHYAKIFEQQGIDFLDVSYGFSNGQEINVGEDYKYSNAVYAAERIKKEVSVPVFAVDGINSGDMAEAILNETNVDLVDIARGALINPNWANDAREGKDTGKCLRCSKCAWFGLSKACPGRAIFSRNNA

SEQ ID NO: 6680 - protein, 253 aa, Rumex acetosa
MEFSNELSRDMEDGSPQRKMGRGKIEIKRIENVTNRQVTFCKRRNGLLKKAYELSVLCDAEVALIVFSSRGRLYEYANHSVKATIERYKKTCSDSTGVTSVEEANAQQEAAKLRNQIRTLQNQTRNTSRNLMGEGLTSMNMKDLKNLETRLEKGISRVRAKKNELLFGEIEFMQKKEIELHNNNQFLRAKIAESERSQQSMNLMPGSSSGEQHYELMPQSQAGPFDSRNFFQVSDLQPDERYSCQNQTPLQLV

SEQ ID NO: 6681 - protein, 844 aa, Arabidopsis thaliana
MMLASQSEAQLNRDFYKESCPSLFLVVRRVVKRAVAREPRMGASLLRLFFHDCFVNGCDGSLLLDDTPSFLGEKTSGPSNNSVRGFEVIDKIKFKVEKMCPGIVSCADILAITARDSVLLVSTSTLLLFVMSYIDACGPGWSVKLGRRDSTTANFAAANSGVIPPPITTLSNLINRFKAQGLSTRDMVALSGAHTIGRAQCVTFRNRIYNASNIDTSFAISKRRNCPATSGSGDNKKANLDVRSPDRFDHGFYKQLLSKKGLLTSDQVLFNNGPTDSLVIAYSHNLNAFYRDFARAMIKMGDISPLTGSNERNKEEKGPLGADREIYTLNSTKFLRGLFIFGIETQKWWRMCPPITRGLAARAHEVMTHELPPTLSYLWIKLLGQGTFAKVYYGRSILTNQSVAIKMIDKEKVMKVGLIEQIKREISVMRIARHPNVVELYEVMATKTRIYFVMEYCKGGELFNKVAKGKLRDDVAWKYFYQLINAVDFCHSREVYHRDIKPENLLLDDNENLKVSDFGLSALADCKRQDGLLHTTCGTPAYVAPEVINRKGYDGTKADIWSCGVVLFVLLAGYLPFHDSNLMEMYRKIGKADFKAPSWFAPEVRRLLCKMLDPNPETRITIARIRESSWFRKGLHMKQKKMEKRVKEINSVEAGTAGTNENGAGPSENGAGPSENGDRVTEENHTDEPTNLNAFDLIALSAGFDLAGLFGDDNKRESRFTSQKPASVIISKLEEVAQRLKLSIRKREAGLFKLERLKEGRKGILSMDAEIFQVTPNFHLVEVKKSNGDTLEYQKLVAEDLRPALSDIVWVWQGEKDELTSQQETEYQQQQQQEQQEQEEPLKF

SEQ ID NO: 6682 - protein, 554 aa, Colwellia psychrerythraea 34H
MCSIFGILDIKTGADALRPTALECSRLLRHRGPDWSGIYHSDNAILVHERLSIVDTEHGAQPLYNGDKSNVLAVNGEIYNHKALASALNVDYEFQTASDCEVILPLYEEFGVEFVDKLQGMFAFIVYNEKDNSYLIARDHIGIIPLYTGYDSEGNFYVASEMKALMPICKTVEEFPPGHILDSRVGKLQQYYKRNWQEYAAIKDNTTSTTKIREALEESVKSHLMTDVPYGVLLSGGLDSSLISAITQKFAARRIEDNDLAEAWWPKVHSFACGLAGSPDLIAAQTVADSIGTIHHSVVFTEQEGIDALKEVIYHLETYDVTTIRASTPMYLMARKIKAMGIKMVLSGEGADEIFGGYLYFHKAPNAQEFHEELNRKLDRLHKFDCLRANKSMSAWGIEARVPFLDKNFMDVAMRINPEDKLCGNGKMEKAILRESFEGYLPKEILWRQKEQFSDGVGYSWIDGLKAHVESLVTEQQLENAHIRFPVNTPDNKEGYYYRTVFEDKYPLATAADCVIGGKSVACSTEEALAWDESFQNNADPSGRAVLSVHNESY

SEQ ID NO: 6683 - protein, 623 aa, Gibberella zeae PH-1
MEKVNNFHAIMKMGNVRAISLTFDRNYMSTLFLKVANNCYPTPTMDPSYQSSETLFEGLPIDTLGNGLSASAVKSGIDRLLEHDIEPEHNLGRIHDRCVETLGAVWGSSCNDKPTGCAASGSSEAILLGILAMKRKWETENGGMASSNGSALNLITGSHAHVAVTNAAKANDIEIRSVPVRPEGNYSFDPSKMQGLLDRFTRHFDPIEDTSTVLDNYEQSHGHSIPIHVDAASCDFVAPFNGGKCSRWDFSVPRVISINASGHKFGLTAAALGWIIWRDQRFLSSDMLHESPYLSGHHGLPTLRYSQPSSSVLIQYYYLAHLGRKGFENIIQALLQRSSALSRTLEGTGIFACISESHRTAANTLPVVVFRVNSAVREQRPKFNEQWISDQLFHKGYSVPCSKLPIDGEDIEVLRVVIVLKVILVDKAVITRLAYDHVEIAIEDETGHLHIRKYEQYYKTIGVELRQNQHPPSTHYCERLQSPDHLRVIMSNRHVPTRRLKSGVLFSAPDDILRVPSDESTRRPKRKKFNNIRKMIPGVRKKGVGEEMALDASPALGHQESIAMFAKFVDPSSYGSSNHPNNPPVSSQKKETLCLSVLKVSLTATVEGTLAHMVLKQSFYNPL

SEQ ID NO: 6684 - protein, 478 aa, Bacillus thuringiensis serovar konkukian str. 97-27
MKRRVAIIGMVVAFLIGAGGMFAGMSLFGVNPAEVTQTISSGNASTAQGNLAKINEAYALIDSRYVEDVKDEKLVEGAIQGMLSTLKDPYSTYMDKETAKQFSESLDPELEGIGAEVNKTDGKLIIVSPIKGSPAEKIGIKPNDQILSVDGNSVKDLSREEAVLKIRGKKGTTVAIEIKRAGVADPIVFKIKREKIPIFTVFSSVKQESGKDIGYMQITSFAENTAKEFKDQLKELEKKNIKGLVIDVRGNPGGYLNSVEEILGEIMTDKKPMLQVEQRNGEKKKFSTELKERKPYPISVLIDNGSASASEILAGALKEGEGYDLIGEKTFGKGTVQQAVPFKDGSNIKLTMFKWLTPDGNWIHKKGIKPTVEVKQPDYYHATPIQIEKTLSYNANDVQVKHAQEMLKSLGYVPGREDGYFSKETESALKAFQNANKMEATGQLDKKTAEAIQTKIIEKIRSGENDLQLQSALKLMAK

SEQ ID NO: 6685 - protein, 332 aa, Gibberella zeae PH-1
MSFGRTVTLNSGWKIPQIGYGTWQAAPGEVGNGVYEALKAGYRHLDLAKIYQNQREVGEGIKKALSEVPGLKREDIFITGKLWNNKHRPEEVAGALDDTLEELGLEYIDLWLIHWPVAFKNGNQLFPLKEGDDGKTALDQEVTLSQTWEAVTKLPKEKVRSIGVSNFNKEMLEQIIKDTGVTPAMNQIERHPRLPQPELVKYLQEKGIFLTAYSAFGNNSWGEPLLINTPEVKAIAERLSKSKGKEVTPAQVILAWSTLDNHVVIPKSVTPARIRSNFEEVELDEEAVKELSKFGEKPQRFNIPKTYKPDWDINVFDDEKEKSATHQVVLKL

SEQ ID NO: 6686 - protein, 114 aa, Arabidopsis thaliana
  misc_feature (68)..(68): Xaa can be any naturally occurring amino acid
  misc_feature (74)..(74): Xaa can be any naturally occurring amino acid
MCSYSIASAISRISPLIRFVKPYSTGFSFITCACNSTRRPKRFDQLCVFSMASEARESPAFNPGLSSXRDEATXGYILQQTMFRIKDPKASLDFYSRVLGMSLLKRLDFSEMKF

SEQ ID NO: 6687 - protein, 173 aa, Brucella melitensis 16M
MSEPIGSPCVFKQRAHGQQNSATKEKTMRYLHTMVRIRDIDESLDFYVNKLGLEEIRRIENEKGRFTLIFLAAPSDTDRARAERAPELELTYNWDPETYTGGRNFGHLAYMVDDIYATCEKLKSAGVTINRPPRDGHMAFIKSPDGISIELIQKGERLAPQEPWASAENIGTW

SEQ ID NO: 6688 - protein, 803 aa, Yersinia pestis
MMTANYLSAQNFSPNIKTVAVAGEEPLMMAFAIRPDLPELKTIIDKVIESIPPEEFDNLTSEWSTFKPKPISFDESSLDNELLMIALKISSGLLLVFGLYLCYLVFNKRRQAKLLHARLLQQESIINALPFAVFIRTASGELAVYNSHFADVHSDKLYDMLNQTHEPAHWPMTSPLDREIDKYCRSVLLNRKPQLVDLSVEIKGDIRDIFLWIIPLNNAEQGVLGGWLDISQRKTVERQLEAARVEAESANRTKSTFLATISHELRTPMYAIMGLLELEIRSNRPVEKDTLVTVSKSAQSLMLLLDDIIDSAKIEAGQLSIHPTAVDFHQEMERMFTLYQPIANERGLRFSGWLDDHIPPLLMADMLRVRQVMGNLLGNALKFTEQGSVSVDITWEPSDEQHGVMNIDITDTGIGISPAAQATLFQPFSQANEGKSPRFGGSGLGLWICHQLIHKMGGKIALESQLGKGTSLLITLPLNIATADDLAQDAAITHVDDERLNQLRNLRILVVDDLPANRQLLQQQLAFIGIEQVVTAENGAKACQILQHNNFDVVITDCSMPVMDGYELAAHIRQDPALKDLIVIGCTADAREESAARCIDAGMNACMIKPVAIDTLQATLLRKDIVSQISNTNHSQSTEDNDRGGNQSNLSEKNTAQQENAPAIHSTTITSSVNRLAAAQNKLRTLSGGNPAVELQLLQSLLESNLQDAVTLTQLYRQLCVEDEDVVETVDTAETVDTADTVEDGETRGPGSTVGRHSTAGSDHIPHADIYKQMASLVHRIKGSVQLIDAQELVASCVKFESQ

SEQ ID NO: 6689 - protein, 492 aa, Nicotiana glutinosa
MDPYKYRPSSAFNSPFCTTNSGAPEKNNNSYLTVGARGLVLLEDYHLVEKLANFDRERVPERVVHARGASAKGFFEVTHDITHLTCADFLRAPGVQTPVIVRFSTVIHERGSPETLRDPRGFAVKFYTREGNFDLVGNNFPVFFIRDGMKFPDMVHALKPNPKSHIQENWRVLDFFSHVPESLHMFTFLFDDIGIPQDYRHMDGSGVHTFTLINKAGKSTYAKFHWKPTCGVQSLLEDEAARVGGANHSHATQDLYDSIAAGNYPEWKLFIQTMDPSHEDRFDFDPLDVTKTWPEDILPLQPVGRLVLNKNIDNFFNENEQLAFCPSIVVPGVYYSDDKMLQTRIFSYSDTQRYRLGPNYLQLPANAPKCAHHNNHYDGSMNFMHRDEEIDYFPSRYDPVRHAEKYPIPSTMCTGKREKCVILKENNFKQPGERYRSFTPDRQERFIRRWVEALSDPRITHEIRSIWISYWSQADKSLGQKLASRLNVRPSI

SEQ ID NO: 6690 - protein, 384 aa, Legionella pneumophila str. Paris
MMFGFLNMTVWGYLLTGFVLTHITTTAVTIYLHRYQTHRALTLHPLVSHFFRFWLWLTTGMTTAEWVAIHRKHHANTDMEGDPHSPQVFNIRKVFWQVPELYREASKDKDMIKKYSYGTPNDWIERKLYSPHANKGIFLMLALNLFLFGIPGLTLWAIQMMWIPLVAGVVNGIGHYWGYRNHESSDSSTNVFPWGLLIAGEELHNNHHTFASSAKFSIKWWEFDLGWFYIRCLSFLKLAKVKKLPPKLIIDKNKSHIDVDSVKAILGNRFQVISDYYKLVIFPTLRDMQYRIKNRDLKNARHLLKKPNEQLSHADQLRLKTLLKQHDNLQAVHNYRELLQQIWLKTSLSNKDLLNLIQKWCSQAEESGLLVLRQFASQLKSYSL

SEQ ID NO: 6691 - protein, 190 aa, Triticum aestivum
  misc_feature (113)..(113): Xaa can be any naturally occurring amino acid
  misc_feature (157)..(157): Xaa can be any naturally occurring amino acid
STHASGPTRPSTHASVGPPVRPRLPPRARKGVMQMLNAIIRNERDGILVPVPQYPLYSAAISLFGGSLVPYYLEEEANWGLDLVSTRQSVAEARSKGITVRAMVIINPGNPTXGQCLSEANIRELLNFCYQENLGLLADEVYQQNVYQDERPFISAXRKVMFDMGPPVSREVQLILPYGSKDIGMWLVGL

SEQ ID NO: 6692 - protein, 470 aa, Geobacillus kaustophilus HTA426
MEQRSKQPITYRFPAGFWWGSATSATQIEGAANEGGKGKNIWDHWYEQEPHRFFQGVGPEVASDFYHRYKEDIALMKEIGHNSFRFSISWSRLIPDGVGEVNPEAVRFYNAVIDELLANGIEPFVNLYHFDMPLAMQTIGGWENREVVDAYARYASLCFQLFGDRVKTWFTHNEPIVPVEGGYLYDFHYPNVVDFRRAVQVAYHTMIAHAKAVAAFRRAAIPDGKIGIILNLTPSYPRSQHPADVKAAHIADLLFNRSFLDPAVKGEYPQDLIELLDEYGFLPVTKANDRELIKENTIDLLGINYYQPRRVKAKENMPNPDAPFLPERFFDYYAMPGRKMNPYRGWEIYEKGIYDILINIKENYGNIECFISENGMGVEGEERFRDESGMIHDDYRIEFIREHLKWVHRAIEEGVNVKGYHLWTFMDNWSWTNAYKNRYGLVAVDLENGLKRTIKKSGYWFKSLAENNGF

SEQ ID NO: 6693 - protein, 732 aa, Kineococcus radiotolerans SRS30216
MSSEAPSSAPTPRPVDADDLARAAAGAHWSPHSVLGVHPHGDALTYRVLKPFASAVTVVTEDGTRVGLVHEYDGVWVGVLPGAGVGDYRVEVTYPGAEPALLDDPYRFLPTVGEVDLHLIGEGRHEELWNVLGAHVRHWEGPMGPVEGTSFAVWAPAARAVRVVGDHNHWSGREHAMRSLGSSGVWEIFLPGVGVGSRYKYEILGADGHWRQKADPMARASEVPPATASVVTESTYTWNDAEWLEQRAARSAQDGPVSVYEVHLGSWKQGLSYTELATELVDYVSAAGFTHVEFLPVMEHPFGGSWGYQVTGYFAPTSRFGSPDELRHLIDALHQAGIGVIIDWVPGHFPKDEFALAKFDGTALYEHPDPRLGEHMDWGTYIPNFGRSEVRNFLVASGLYWLEEFHADGLRVDAVASMLYLDYSRNAGEWVPNRHGGRENLEAIAFLQEANATAYKRTPGIMMIAEESTAFPGVTAPTSAGGLGFGLKWNMGWMNDSLRYFAQDPVNRQYHHGELTFSLVYAFTENFALPISHDEVVHGKGSLLRKMPGDRWQQLANVRAFLGYMWSHPGKQLLFMGSEFGQEAEWSESRSLDWWLLDTPWHQGLHRLVTRLNAVYKEHPELWSDDFTSEGFQWIDGADNQRNLISFVRWSKDRKPLVAVCNFSGSPYEDFRVGLPQAGPWREVLNTDAEEFAGSGVVNTGTLQGEDVPWNGQQFSAALRVPPLGVTWLVPA

SEQ ID NO: 6694 - protein, 247 aa, Pisum sativum
MGRGRVELKRVENKINRQVTFAKRRNGLLKKAYELSVLCDAEVALIVFSNRGKLYEFCSTSSMLKTLERYQKCNYGAPEGNVTSKEALVLELSSQQEYLKLKARYESLQRSQRNLMGEDLGPLSSKDLETLERQLDSSLKQIRSTRTQFMLDQLGDLQRKEHLLCEANRALRQRMEGYQINSLQLNLSAEDMGYGRHHQGHTHGDELFQVQPIECEPTLQIGYHQGDPGSVVTAGPSMNNYMGGWLP

SEQ ID NO: 6695 - protein, 567 aa, Vibrio cholerae O1 biovar eltor str. N16961
  misc_feature (520)..(520): Xaa can be any naturally occurring amino acid
MISKNMRSHLKLSFKSIFSIKFIVISHLVKRVIYPYILAGQKRAFDFFILRNVGQNGRSHWRATMHMSKSFLIISMGFVAVSVQAQTLTRDNGAPVGDNQNSITAGEHGSVLLQDVHLIQKLQRFARERIPERVVHARGTGAHGEFVASGDFSDLTLSAPFTSKGKITPVFVRFSTVIHSKGSPETLRDPRGFATKFYTEQGNWDLVGNNLPVFFIRDSIKFPDMVHSLKPSPVTNLQDPNRFFDFFSHEPGSTHMLTWVYTNLGTPASYRTMDGFGVHAYKWINQKGDVNYVKFHWKSLQGIESLRPDEVVKVQGQDFNHLTNDLYTQINAGNHPKWDLYVQVLTPEQLSKLDYNGLDATKVWLDVPEKKVGTMTLNKVPDNFFLETEQSAFAPSNLIPGIEPSEDRLLQGRLFAYADTQLYRLGANLFQLPINRPLVEVNSHNQEGASNSAQTASDINYQPSRKLELKEDPQFKAVQTQLVGSVQQKAISNPRNFYQAGVLYRSLNEQDKQDLITNLXGBLNKVTDKEIKATMVSHFYRADKDYGTRLARATNTDLKQVAKLAAM

SEQ ID NO: 6696 - protein, 591 aa, Mesorhizobium sp. BNC1
MCGICGEVRFDGRTPSVSAISGMMEALAPRGPDGAGIVSHGNAGFGHRRLRIIDLSEKAQQPMVDSALGLTIAFNGCIYNYPELREALEAKGYSFFSHGDTEVILKAWHAWGETCVERFHGMFAFVIQERDTGRIVMARDRFGIKPLYLAEKSGVLRFASSLPALVKAGDVDTSIDRVALHHYMTFHAVVPPPRTILNGVRKLPPATIRVIEADGRSTERRYWDPPYRRDPADAGVSAEEWRDRVHEALRLAVKRRMVADVPVGVLLSGGVDSSLIVGLLAEAGQTGLMSFSVGFEEANGEKGDEFVYSDLIAKEFGTDHHKIFVPSDRLMDALPGTFAAMSEPMVSYDNVGFYLLSQEVSKHIKVVQSGQGADEVFGGYHWYPPLARSNDVVADYAKVFFDRSHETLKRQLGANWINGEDYSRGLVAAELMRPGADSPVDRALRLDANVMLVDDPVKRVDNMTMAWGLEARVPFLDHELVELAARIPPEEKLKDGGKGVLKDVARLVVPHEVIDRPKGYFPVPQLKYVAGPYLEMVRDALGSQRARERGLFRQDYLDRLFAQPADHITPLRGSELWQAGLLELWLQTHGI

SEQ ID NO: 6697 - protein, 395 aa, Rickettsia prowazekii str. Madrid E
MLSKLNKPALFALIFYPVFIISLVVKYSFDYGIGLTEIIFIIASYYINNITVGIGLHRLWSHNAYKINKYAEFVLVMLSAGTLQGPALSWASNHYKHHAKTDTDQDPHSPLKFDNKVLGFLWSHIGWMLIGSGSYKFIDRITWAKLGKNNLLKWQLKYYWKIAAFMNIVVPLFTGYLVGGTIKSAYAGFLFIGLGRFLQQQATFCVNSLCHFVGSKKYYRGTAGDIWWMALFLLGENWHNYHHAFPSDYRNGVKWYHFDVHKWIIFLMSKIGLASELERTTKVRIQAKMQETLSYLSEKQKQKLSLMQTKIDNLLENLCLKSKEIEESSLAIKEQLKKSFVEIQESLKNLAEQVSSATQITEKPSEKLLKIVNKKIIDAEQSIYKLYNQLNTLKV

SEQ ID NO: 6698 - protein, 689 aa, Aspergillus oryzae
MGTSQAVDSSPPDGTGVIQLDPWLEPFRDALKQRFSFIEGWVKAINETEGGLETFSKGYERFGLNVQSNGDIIYREWAPNAVQAQLVGEFNNWDVTAHPMTKNGFGVWEVTVPAVNGAPAIPHDSKIKISMVIPSGERIYRIPAWIKRVVQDLSVSPTYEAVFWNPPTEKQYKFQYSRPKRPESLRIYEAHVGISSPETKVATYKEFTSNMLPRIKYLGYNAIQLMAIMEHAYYASFGYQVNNFFAASSRYGTPEDLKELVDKAHSMGLVVLLDVVHSHASKNVLDGLNMFDGTDHLYFHGGGKGRHELWDSRLFNYGHHEVLRFLLSNLRFWMEEYGFDGFRFDGVTSMLYTHHGIGTGFSGGYHEYFGSSVDEEGVMYLTLANEMLHNLYPNCITVAEDVSGMPALCLPHSLGGVGFDYRLAMAVPDMYIKLLKEKKDDEWDIGNLSFTLTNRRHGEKTIAYAESHDQALVGDKTLMMWLCDKEMYTHMSVLTEFTPIIERGMALHKLIRLVTHGLGGEGYLNFEGNEFGHPEWLDFPRDGNNNSFWYARRQLNLTEDHLLRYKFLNDFDRAMQLTEEKYGWLHSPQAYVSLKNETDKVLVFERAGLLWIFNFHPTNSFTDYRVGVEQSGTYRIVLDTDDPAFGGLNRNLKETRFFTTDLSWNGRSNFLQVYIPTRTALVLALEETL

SEQ ID NO: 6699 - protein, 141 aa, Oryza sativa (japonica cultivar-group)
MDKGVIVYICDSQGVRDIYEADGISTVAASEPLVVLVNKGTASASEILAGALKDNKRAVIYGEPTYGKGKIQSVFALSDGSGLAVTVARYETPAHTDIDKVGVIPDRPLPASFPTDEDGFCSCLRDSNSACNLNAAQLFTR

SEQ ID NO: 6700 - protein, 970 aa, Debaryomyces hansenii CBS767
MKTYLFSIPTKKTDETSWVKPLNNYLLSIYGNTTEYQLDLEKFDKLRQDIRGVNPDNTGIKLYYNYYSQLELLDLRFPFSTVNRHKKVNFSWYDAFQPSVVHKQTALAFEKACVLFNLGALLSTYAGAKYEEAQRNSSIAAADETIKESLQIFQQTAGIYQFLNENFLHAPSNDLHQASVKFLVKLMLAQAQEVFVLKVISGDLEQNKNSLIAKLCQGTTNHYTECFNMVCNINKSGGGSSHDDFAVTDTNESVDDILGDDDDDDDLGDYNPEKSGEPQVTASIDSAWVATIHFKVQFYESLSHYFHGLQLEKNNKYGDSIAYLTKSQNILNEISSATLKAISKSGSNDSYELLDNYKYQKDAVGIKLTEMNKDNDFIYHDIIPSLITLPEIKPMDGVKTIPINNSKLFNDLNEYNYSNFFNNVVPINIHELLSFYSEEKSQFLRNELDLVDVSNEELASILEYLKMPKSLVNLKEIMNSSKHVDTMSTSLETNIDPGVRSIVNEVSSKYQTDMSNKDHISTIRKEIYNTITESESNLSGKFSESLIKYKDDLVRLKKSLIDASNSDNNLFGLINNDNSHLYAILGKGADSPEFKMLFNVDSQTSKKQSNNVENEISLLDIDDSQLSSSVNATDSIDSKIKSIEDILHDLNSIKNNKAKLVDTLKKEIHNDDISDILILNSKIKSTNEIKTVIFPEELKKFDPYGKELDNLIEQEKTFINELKNQWANLSDDPKVKEIQSSKQFQSNLIKHQTDKIIKFYNQNWKKYSLGLSAGVDFYNKLLAYARLLKQNIATAVNAPPQSSFNENFSNLNLGPQHLGPRAPPRPNQSYRPSYGDQSGTPQYNASHFSSNSPSLNHNLPPQYSQSSLHRSSTGGSFASHHSNESPGSYSRPPPALPPKRPSYSAQPTPHAPPQAPYTQFQPQASNYTDNSSSSANPTNLPQHPDSGTNDLIYNQPSTYQPNMYNFFSSN

SEQ ID NO: 6701 - protein, 510 aa, Zea mays
MARYFRSSNLASRIFDRQLISPLPGATVNTIRQFYENLVPSYTIYDIDCPDYSFRKFTDDGKYLVAFSRNHQDLIVYRPIWFTYSCNEECETHELPPKAKKFDSFFKQLYSIPLASSNEYICKDFFLYMECHRFGLFATSTAQSNESTATEGAIHGVPLIEKITFHLVRLEDGVILDEKAFCNDFINLAHSIGAYMYEDLLCIVSLRYQTIHILQIRDSGNLVEVRNIGAFCREDDELFLHSHIQTGYGGSFLPGIKQRLLSYIFCKTWNEVPDQTLRVQHLKKKFYFHFQDYVDLIIWKVQFLDRHHLFVKFGSVDGGVSRSTDQNLAFFAVYNMETTDIVSLHQNSSEDIYALFEQFYDHFHANPQASSHGKFISSHSNDIHALDQLRVIKNKASSSSQFVKKMMTSLPYTCQSQSPSPYFDLSLFRYDEKLISAIDRHRHCTEHPIKFMSVRQNVVKFKIKPGSDSGASDSRAKRISSFLFHPFFPLALSIQQTYMQPTVVNIHFRR

SEQ ID NO: 6702 - protein, 365 aa, Salmonella enterica subsp. enterica serovar Typhi Ty2
MSSAKLFTPLKVGAITATNRVFMAPLTRLRSIEPGDIPTPLMAEYYRQRASAGLIISEATQISAQAKGYAGAPGLHSDEQIAAWKKITQGVHAQGGHMAVQLWHTGRISHASLQPGGQAPVAPSAINAGTRTSLRDENGQAIRVETSTPRALDTHEIPGIVNDFRQAIANAREAGFDLVELHSAHGYLLHQFLSPSSNHRTDRYGGSVENRARLVLEVVDAGIKEWGADRIGIRLSPVGTFQNVDNGPNEEADALYLIEALGKRGIAYLHMSEPDWAGGEPYSDAFREKVRARFHGPIIGAGAYTPEKAEDLIEKGLIDAVAFGRDYIANPDLVARLQRKAELNPQRPESFYGGGAEGYTDYPTL

SEQ ID NO: 6703 - protein, 364 aa, Enterobacter cloacae
SAEKLFTPLKVGAVTAPNRVFMAPLTRLRSIEPGDIPTPLMGEYYRQRASAGLIISEATQISAQAKGYAGAPGLHSPEQIAAWKKITAGVHAEDGRIAVQLFHTGRISHSSIQPGGQAPVSASALNANTRTSLRDENGNAIRVDTTTPRALELDEIPGIVNDFRQAVANAREAGFDLVELHSAHGYLLHQFLSPSSNQRTDQYGGSVENRARLVLEVVDAVCNEWSADRIGIRVSPIGTFQNVDNGPNEEADALYLIEELAKRGIAYLHMSETDLAGGKPYSEAFRQKVRERFHGVIIGAGAYTAEKAEDLIGKGLIDAVAFGRDYIANPDLVARLQKKAELNPQRPESFYGGGAEGYTDYPSL

SEQ ID NO: 6704 - protein, 481 aa, Silicibacter pomeroyi DSS-3
MSETRAIIYWLRRDLRLADHPGLAAAAASGRPVVPVFIHDESVAALGAAPAFRLGLGLERFGATLGDMGSRLILRRGSAPAVLQALIAETGAGAVWWTREYTPQAITRDSALKTALQQAGIEARSFGGALLFEPWTVETGAGGFYKVYTPFWRAVSQREVSAPDPAPARVRPPEAWPGSEALSDWGLGAPMRRGAAVVATHQAPGEAAALERLDRFIATGIGQYDACRDLPAGDGTSTLSDALSLGEIGPRTLWHRAGEAAHKGAQGAETFLKQLVWRDFAYHLMYHTPHLLSENWRPGWEVFPWATDPADPGFVAWTRGRTGVPLVDAAMREMYVTGRMHNRARMIAASYLTKHLMVHWKLGMDWFADCLTDWDPAANAMGWQWVAGCGPDAAPYFRIFNPETQAKKFDPKGRYRNHWIAEGQAEPPRAALSYFDAVPRSWNLRPDASYPPPIMALDQGRRRALSAYASAFSQGSDGKLA

SEQ ID NO: 6705 - protein, 141 aa, Oryza sativa
  misc_feature (70)..(70): Xaa can be any naturally occurring amino acid
MVSFEMSELKKIGLGLSGFGVLFSFLGIIMLFDKGLLAIGNILFVSGVSLTIGPKSTVQFFTKPKNHKGXSIAFGIGFFLVLIGWPFFGMLAEAYGFVKLFRGFWPTAAVYLQKSPTFGWIFHHPLVTSLITRFRGRRVPV

SEQ ID NO: 6706 - protein, 176 aa, Brassica napus
MGEQPDPFSTSTLPDFISSQKIGRPVTLEGQSNRGHPYSGLKKRGQSSRSWVKIDENGNSTVLELDKATIMKRCSLPSRDLRLLDPLFIYPSSILGRERAMVVSLEKIRCIITAEEVILMNARDASVVQYQSELCKRLQSNQNLAVKDDSPFEFKALELGLELSCLSLDAQDLTPL

SEQ ID NO: 6707 - protein, 141 aa, Thiomicrospira crunogena XCL-2
MSLLLRNLEPFRELKELENRLHHLFPKGEESNVAAFTPTVNTREGDYAYHIEIDLPGVKKEDIHVEVKENRLMISGERKVKEEVKEEDYHRVESRYGKFERSFTLPDNVDAENVDASTTDGVLEVVLPKKERSTSKKIEVK

SEQ ID NO: 6708 - protein, 466 aa, Streptococcus pyogenes SSI-1
MKQRKHRYQFPDGFLWGSSTSGPQSEGTVPGDGKGPSNWDYWFSIESAKFHHQIGPEKTSTFYENYKGDIALLKETGHTIFRTSIQWSRLIPEGVGEVNPKAVTFYREVFQDIIAQGIKLIVNLYHFDLPYALQEKGGWENKATVWAYETYAKTCFELFGDLVNTWITFNEPIVPVECGYLGYYHYPCKVDAKAAVQVAYNTQLASSLAVKACHKLHPDHKISIVLNMTPAYPRSDAPEDVKAARIAELFQTKSFLDPSVLGVYPAELVSILEEADLLPQYSADELEIIKNNTVDFLGVNYYQPLRVQAPSKSQQEGDPLILDIYFEPYDMPGKKVNPHRGWEIYEPGLYDIALNLKEHYGNIEWLVTENGMGVEGEEAFLADGQIQDDYRITFIEDHLIQLHKALGEGANCKGYLLWTFIDCWSWLNAYKNRYGLVALDLESQKRTIKKSGYWFKALSESNGFDK

SEQ ID NO: 6709 - protein, 245 aa, Glycine max
  misc_feature (233)..(233): Xaa can be any naturally occurring amino acid
MQTSKENAMFCSSLVLLPFPIFNFRVPLISLFLFTPKLRSLQQHSDLEMDGPAGRGGAGLDMFLPNYKLGKTLGIGSFGKVKIAEHVLTGHKVAIKILNRRKIKNMEMEEKVRREIKILRLFMHPHIIRLYEVIETPTDIYVVMEYVKSGELFDYIVEKGRLQEDEARNFFQQIISGVEYCHRNMVVHRDLKPENLLLDSKCNVKIADFGLSNIMRDGHFLKTSCGSPNYAAXPEVISGKMYAGP

SEQ ID NO: 6710 - protein, 283 aa, Arabidopsis thaliana
MANAITFFKLNTGAKFPSVGLGTWQASPGLVGDAVAAAVKIGYRHIDCAQIYGNEKEIGAVLKKLFEDRVVKREDLFITSKLWCTDHDPQDVPEALNRTLKDLQLEYVDLYLIHWPARIKKGSVGIKPENLLPVDIPSTWKAMEALYDSGKARAIGVSNFSTKKLADLLELARVPPAVNQVECHPSWRQTKLQEFCKSKGVHLSVSITRLTNPFTFYFIHSLNDFFFPGILAIRFSRDNMAEERCFEEPDTEYGCGKTRKESCASRPSLGTPNGSQCASQEYK

SEQ ID NO: 6711 - protein, 281 aa, Physcomitrella patens subsp. patens
MGRGKIEIKKIENTTSRQVTFSKRRGGLLKKAHELAVLCDAEVALVIFSSTGKHFEFASSGSMRDIIERYRKSSDGAVKRGTNTDLLGREVIKLKQQVERLESSQRHMLGEDLSALKVSDLLELEQQLDQGASRVRARKNQLILEEIEDLRRKEHELMIANEALRKKIADAEGAAEAAARANFPDARLESPKPFASDFSRDMSVSSQLAASVYPHPNLLQAQRSQTSLQLGWLSEQQIPSTEEGCAGESSLKWDHPHFHIQNRLHANISPSVRTYKLHVDR

SEQ ID NO: 6712 - protein, 185 aa, Guillardia theta
MSEKSNLAPFIKKLYQLVNDPMTNDYICWEKNETCFIVNKPTELSVYILPRYFKHNNFSSFVRQLNQYGFHKLEPNEWVFGHPYFKGGDKLKLSSIKRKKQWSSQKNVSVDFYNNEIFKKLIYELDTLKKYKQVLTKDILDVCRRQERFLIKQQSIETKIKKIEEELNNLKYLVFGYFGKILKSN

SEQ ID NO: 6713 - protein, 543 aa, Clostridium acetobutylicum ATCC 824
MAKQILYGEEARRSMQKGVDKLADTVKVTLGPKGRNVVLDKKFGAPLITNDGVSIAKEIELEDPYENMGAQLVKEVATKTNDVAGDGTTTATLLAQAIIREGLKNVTAGANPMLIRNGIRLAVDKTVEGLKKVSKNVNGKEDIARVASISAADPEIGKLIADAMEKVGNEGVITVEESKSMGTELDVVEGMQFDRGYLSPYMVTDQEKMEAVLDDPYILITDKKIANIQEILPLLEQIVQQGKKLLIIADDVEGEALATLVVNKLRGTFNCVAVKAPGFGDRRKDMLRDIAILTGGEVISEELGKDLKDVKVEDLGSAESVKISKENTTIVNGRGDKSAIHDRVAQIRGQIEETTSDFDREKLQERLAKLAGGVAVVKVGAASETELKERKMRIEDALAATKAAVEEGIIAGGGTAYINVLPEVRELTSDEPDVQVGINIIVKALEEPVRQIAANAGLEGSVIIEKIINSEKGIGFDALHEKYVDMLSVGIVDPTKVTRSALQNAASVASTFLTTECAVADIPEKDKPEMPGGAPGMGMGGMY

SEQ ID NO: 6714 - protein, 239 aa, Phalaenopsis equestris
MDSSSMEPKEKMGRGKIEIKRIENTTNRQVTFCKRRNGLLKKAYELSVLCDAEVALIIFSTRGRLYEYANNSVKGTIERYKKASTDNSNTGSISEANSQYYQQEATKLRQQITNLQNSNRNLLGDALTTMSLRDLKQLETRLEKGINKIRAKKNELLHAEIDYMQKREMELQTDNMFLRNKISDNERAQQQHQHMSILPSTSTEYEVMPPFDSRSFLHVNLMDPNDRYSHQQQTALQLG

SEQ ID NO: 6715 - protein, 466 aa, Agrobacterium tumefaciens str. C58
MDRKASRMTDPQTLAARFPGDFLFGVATASFQIEGATKADGRKPSIWDAFCNMPGHVFGRHNGDIACDHYNRWEEDLDLIKEMGVEAYRFSIAWPRIIPDGFGPINEKGLDFYDRLVDGCKARGIKTYATLYHWDLPLTLMGDGGWASRSTAHAFQRYAKTVMARLGDRLDAVATFNEPWCAVWLSHLYGIHAPGERNMEAALAAMHHINLAHGFGVEASRHVAPKVPVGLVLNAHSVIPASNSEADLKAAERAFQFHNGAFFDPVFKGEYPAEMMEALGDRMPVVEAEDLAIISQKLDWWGLNYYTPMRVADDATPGAEFPATTPAPAVSEVKTDIGWEVYAPALKSLVETLYKRYDLPECYITENGACYNMGIENGEVNDQPRLDYYAEHLGIVADLIRDGYPMRGYFAWSLMDNFEWAEGYRMRFGLVHVDYDTQVRTLKNSGKWYSALASRFPKGNHGVVKG

SEQ ID NO: 6716 - protein, 246 aa, Malus x domestica
MGRGRVELKRIENKINRQVTFAKRRNGLLKKAYELSVLCDAEVALIIFSNRGKLYEFCSSSSMLKTLDRYQKCSYGAVDQVNRPAKELESSYREYMKLKGRYESLQRTQRNLLGEDLGPLNTKELEQLERQLEGSLKQVRSTKTQYMLDQLSDLQNKEQLLIEANRDLTMKLDEISSRNQLRQSWEGGDQGMAYATQHHHAQSQGFFQPLDCNPTLQMGYSAVGSEQMSATTNAQQVNCFIPGWML

SEQ ID NO: 6717 - protein, 165 aa, Zea mays
  misc_feature (104)..(104): Xaa can be any naturally occurring amino acid
MASTTETNNYKFNHSMIRVKDPKASTKFYEFLGMSLVKKLEFPDNKFDLYFFGYDSPNALSHNKSTFDRQGLIELTHNYGTENDPEYKVNNGNQDPHRGFGHTXIAVDNIQAACQRIEDAGYKFQKKLTDGRMRNIAFRLDPDGNWGPKVVARNDYQETENVKED

SEQ ID NO: 6718 - protein, 546 aa, Burkholderia vietnamiensis G4
MAAKDVVFGDSARSKMVEGVNILANAVKVTLGPKGRNVVLERSFGGPTVTKDGVSVAKEIELKDKLQNMGAQMVKEVASKTSDNAGDGTTTATVLAQSIVREGMKYVASGMNPMDLKRGIDKAVAAAVEELKKISKPCTTNKEIAQVGSISANSDSSIGDRIAEAMDKVGKEGVITVEDGKSLADELDVVEGMQFDRGYLSPYFINNPDKQVAVLDNPFVLLHDKKVSNIRDLLPVLEQVAKAGRPLLIIAEDVEGEALATLVVNNIRGILKTVAVKAPGFGDRRKAMLEDIAILTGGQVIAEETGLTLEKATLAELGQAKRIEVGKENTTIIDGAGEAASIEARVKQVRTQIEEATSDYDREKLQERVAKLAGGVAVIKVGAATEVEMKEKKARVEDALHATRAAVEEGIVAGGGVALIRARTAIAGLTGANADQNAGIKIVLRAMEEPLRQIVTNGGEEASVVVAAVAAGKGNYGYNAATGEYVDMVEAGVVDPTKVTRTALQNAASVAGLLLTTDAAVAELPKEDAPMPGGMPGGMGGMGMDM

SEQ ID NO: 6719 - protein, 518 aa, Burkholderia sp. 383
MCVARRHHAAQPRQYVSLSAFVIEVPVPAKSSVAPAIVWFRDDLRVTDQPALTRAVESGRPLVCVFVDDTGDGAGRALGGAARWWLHGSLAGLDAALARHGGRLLLLRGDAQREIERVVHDTGAEAVYWNRRYAQPQRDADAALKASLKARGVTVESSNGSLLNEPWEVLTGSGGPYQVFTAYWRAARRDRTVAVPLPEPERIAFHPWPKAVRDCALALDVLALRPPVPDWAGGLRDAWPAPDEAGAHARLDAFLTASLAGYADARDLPDRPATSRLSPFLRFGNLSPRQVWHAVQGAANAGGAAVAADADKFLSELGWREFSYTLLYHFPALASDNFRAQFDAMPWRDDPAALRAWQRGRTGYPLVDAGLRELWTTGWMHNRVRMVVASFLIKHLLIDWRAGEAWFWDTLVDADPANNAASWQWVAGCGADAAPYFRIFNPVAQGQKFDPDGAYVRRWVPELAGLDNASIHAPWEASPLELDAAGVRLGVDYPAPLVEHAAARARALDALAALPKRR

SEQ ID NO: 6720 - protein, 358 aa, Silicibacter pomeroyi DSS-3
MSETLFTPLKAGNIALKNRVVMAPLTRNRADDTAGTVFDRHAEYYAQRASAGLLITEGAQISAEGKGYIQTPGIHTPEQVAAWRKVTDAVHARGGKIVIQLWHVGRISHSSLLPDGQAPVSPSAIAAEAKTFTHAGFETTSTPRALETDEIARVLADYAHAAQSAREAGFDGVEIHAANGYLVEQFLKDGANQRQDDYGGSVENRARFLFQVLEAVLTVWEPGNVGIRLSPFTTVNGISESDPVATYTPVIKRLDSYGLAYLHMIEGQTGGARDGAFDDLRQLWTGAYMGNNGYDRASALERTETGAVDLVAFGRPYIANPDLVERLAADAPLNMGDTATYYGGGDEGYTDYPVLQTA

SEQ ID NO: 6721 - protein, 180 aa, Pisum sativum
MASMISSSAVTTVSRASTVQSAAVAPFGGLKSMTGFPVKKVNTDITSITSNGGRVKCMQVWPPIGKKKFETLSYLPPLTRDQLLKEVEYLLRKGWVPCLEFELEKGFVYREHNKSPGYYDGRYWTMWKLPMFGTTDASQVLKELDEVVAAYPQAFVRIIGFDNVRQVQCISFIAHTPESY

SEQ ID NO: 6722 - protein, 180 aa, Pisum sativum
MASMISSSAVTTVSRASRGQSAAVAPFGGLKSMTGFPVKKVNTDITSITSNGGRVKCMQVWPPIGKKKFETLSYLPPLTRDQLLKEVEYLLRKGWVPCLEFELEKGFVYREHNKSPGYYDGRYWTMWKLPMFGTTDASQVLKELDEVVAAYPQAFVRIIGFDNVRQVQCISFIAHTPESY

SEQ ID NO: 6723 - protein, 448 aa, Triticum aestivum
  misc_feature (68)..(68): Xaa can be any naturally occurring amino acid
  misc_feature (146)..(146): Xaa can be any naturally occurring amino acid
  misc_feature (197)..(197): Xaa can be any naturally occurring amino acid
  misc_feature (214)..(214): Xaa can be any naturally occurring amino acid
PYFLVRDDKIKNELLGLGISMQSFNGDLLYEPWEVYDENGLAFTTFNKYWEKCMKLPIEISPFLAPWXIENICSSSIDNLGLESSKDEESSNALLSRAWSPGWRNAEKTLEDFVSHGLLDYSKDRMKVTGTTTSLLSPYLHYGEVXLLGNLKHYPWRADEDRFKSWRQGMTGYPLVDAGMRELWATGWTHNRIRYIXSGCLPDGHELGRLDNPXGQKYDPDGEYVRTWIPELARMPGEWIHHPWDAPSSILEVAGVELGFNYPMPIVELHMARECLDDAISTMWQLDTAEKLAELDGEVVEDNLSHIKSFDVPKVVLKELSPSAPRCDQKVPTDNGRNLELQPKELKGTDKQTICVNVIKASKMEDSGSMANSPISRKRSSSGSVFNVPSYSSSVEVRSQNQHPGGYSVGSSGYIVQNAERNCVGKAEDDDSADSCTSAATTLKRPAA

SEQ ID NO: 6724 - protein, 207 aa, Fusarium culmorum
VAVKKIMKPFSTPVLAKRTYRELKLLKHLKHENVISLSDIFISPLEDIYFVTELLGTDLHRLLTSRPLEKQFIQYFLYQIMRGLKYVHSAGVVHRDLKPSNILVNENCDLKICDFGLARIQDPQMTGYVSTRYYRAPEIMLTWQKYDVEVDIWSAGCIFAEMLEGKPLFPGKDHVNQFSIITELLGTPPDDVINTIASENTLRFVKS

SEQ ID NO: 6725 - protein, 833 aa, Triticum aestivum
MLCLTASSSPSPSPSLPPRPSRPAADRPGPGISGGGNVRLSAVPAPSSLRWSWPRKAKSKFSVPVSAPRDYTMATAEDGFGDLPIYDLDPKFAGFKDHFSYRMKKYLEQKHSIEKYEGGLEEFSKGYLKFGINTENDATVYREWAPAAKDAQLIGDFNNWNGSGHRMTKDNFGVWSIRISHVNGKPAIPHNSKVKFRFHRGDGLWVDRVPAWIRYATFDASKFGAPYDGVHWDPPTGERYVFKHPRPRKPDAPRIYEAHVGMSGEKPEVSTYREFADNVLPRIKANNYNTVQLMAIMEHSYYASFGYHVTNFFAVSSRSGTPEDLKYLVDKAHSLGLRVLMDVVHSHASSNMTDGLNGYDVGQNTQESYFHTGERGYHKLWDSRLFNYANWEVLRYLLSNLRYWMDEFMFDGFRFDGVTSMLYNHHGINMSFAGNYKEYFGLDTDVDAVVYMMLANHLMHKILPEATVVAEDVSGMPVLCRSVDEGGVGFDYRLAMAIPDRWIDYLKNKDDLEWSMSAIAHTLTNRRYTEKCIAYAESHDQSIVGDKTMAFLLMDKEMYTGMSDLQPASPTIDRGIALQKMIHFITMALGGDGYLNFMGNEFGHPEWIDFPREGNNWSYDKCRRQWSLSDIDHLRYKYMNAFDQAMNALDDKFSFLSSSKQIVSDMNEEKKIIVFERGDLVFVFNFHPSKTYDGYKVGCDLPGKYKVALDSDALMFGGHGRVAHDNDHFTSPEGVPGVPETNFNNRPNSFKVLSPPRTCVAYYRVEEKAEKPKDEGAASWGKAAPGYIDVEATRVKDAADGEATSGSKKASTGGDSSKKGINFVFGSPDKDNK

SEQ ID NO: 6726 - protein, 123 aa, Zea mays
  misc_feature (21)..(21): Xaa can be any naturally occurring amino acid
AQYYQLILLVYEGYKNIVESXQYNATALNQGLDKTDKFNIESKDNGVPLLGLSLKDRSRHSEFEILDLLRRFGWIVPGYTKPPDAHHVTVLRLFIREDFSRTLTERLVLDIEKVLHELDALHA

SEQ ID NO: 6727 - protein, 865 aa, Triticum aestivum
MLCLTASSSPSPSPSLPPRPSRPAADRPGPGISVSHSGSSFLFFSFVSGLRSASRRFPDAMPRAQGGGNVRLSAVPAPSSLRWSWPRKAKSKFSVPVSAPRDYTMATAEDGFGDLPIYDLDPKFAGFKDHFSYRMKKYLEQKHSIEKYEGGLEEFSKGYLKFGINTENDATVYREWAPAAKDAQLIGDFNNWNGSGHRMTKDNFGVWSIRISHVNGKPAIPHNSKVKFRFHRGDGLWVDRVPAWIRYATFDASKFGAPYDGVHWDPPTGERYVFKHPRPRKPDAPRIYEAHVGMSGEKPEVSTYREFADNVLPRIKANNYNTVQLMAIMEHSYYASFGYHVTNFFAVSSRSGTPEDLKYLVDKAHSLGLRVLMDVVHSHASSNMTDGLNGYDVGQNTQESYFHTGERGYHKLWDSRLFNYANWEVLRYLLSNLRYWMDEFMFDGFRFDGVTSMLYNHHGINMSFAGNYKEYFGLDTDVDAVVYMMLANHLMHKILPEATVVAEDVSGMPVLCRSVDEGGVGFDYRLAMAIPDRWIDYLKNKDDLEWSMSAIAHTLTNRRYTEKCIAYAESHDQSIVGDKTMAFLLMDKEMYTGMSDLQPASPTIDRGIALQKMIHFITMALGGDGYLNFMGNEFGHPEWIDFPREGNNWSYDKCRRQWSLSDIDHLRYKYMNAFDQAMNALDDKFSFLSSSKQIVSDMNEEKKIIVFERGDLVFVFNFHPSKTYDGYKVGCDLPGKYKVALDSDALMFGGHGRVAHDNDHFTSPEGVPGVPETNFNNRPNSFKVLSPPRTCVAYYRVEEKAEKPKDEGAASWGKAAPGYIDVEATRVKDAADGEATSGSKKASTGGDSSKKGINFVFGSPDKDNK

SEQ ID NO: 6728 - protein, 810 aa, Triticum aestivum
MLCLTASSSPSPSPSLPPRPSRPAADRPGPGISAKSKFSVPVSAPRDYTMATAEDGFGDLPIYDLDPKFAGFKDHFSYRMKKYLEQKHSIEKYEGGLEEFSKGYLKFGINTENDATVYREWAPAAKDAQLIGDFNNWNGSGHRMTKDNFGVWSIRISHVNGKPAIPHNSKVKFRFHRGDGLWVDRVPAWIRYATFDASKFGAPYDGVHWDPPTGERYVFKHPRPRKPDAPRIYEAHVGMSGEKPEVSTYREFADNVLPRIKANNYNTVQLMAIMEHSYYASFGYHVTNFFAVSSRSGTPEDLKYLVDKAHSLGLRVLMDVVHSHASSNMTDGLNGYDVGQNTQESYFHTGERGYHKLWDSRLFNYANWEVLRYLLSNLRYWMDEFMFDGFRFDGVTSMLYNHHGINMSFAGNYKEYFGLDTDVDAVVYMMLANHLMHKILPEATVVAEDVSGMPVLCRSVDEGGVGFDYRLAMAIPDRWIDYLKNKDDLEWSMSAIAHTLTNRRYTEKCIAYAESHDQSIVGDKTMAFLLMDKEMYTGMSDLQPASPTIDRGIALQKMIHFITMALGGDGYLNFMGNEFGHPEWIDFPREGNNWSYDKCRRQWSLSDIDHLRYKYMNAFDQAMNALDDKFSFLSSSKQIVSDMNEEKKIIVFERGDLVFVFNFHPSKTYDGYKVGCDLPGKYKVALDSDALMFGGHGRVAHDNDHFTSPEGVPGVPETNFNNRPNSFKVLSPPRTCVAYYRVEEKAEKPKDEGAASWGKAAPGYIDVEATRVKDAADGEATSGSKKASTGGDSSKKGINFVFGSPDKDNK

SEQ ID NO: 6729 - protein, 157 aa, Triticum aestivum
MSLIPRGNAFDPFSLDLWNPFDGFPFGSGSSGGGGSLFPSFPRISSETAAFAGARIDWKETPEAHVFKADVPGLKKEEVEDGNVLQISGERNKEKEEKTDTWHRVERSSGKFLRRFRLPEDAKVEQIKAAMENGVLTVTVAKEEAKKPEVKSILISG

SEQ ID NO: 6730 - protein, 642 aa, Neurospora crassa
MFRTIRTLTPTTSVFPPTSLHFKLKTTMAPSKRKASAPPQTSHVNGNPSADKKRKTTTDAPPTNPNTSSDPLRAPHPFYKDSETHGIVLRKFYPHEMSNARAQAYNDNELPRPIETLSAALAETAALRKSLPVRQAVVHWFKMDLRLHDNRSLWLASQKAKEAGVPLICLYVLSPEDLEAHLRAPIRVDFMLRTLEVLKTDLEDLGIPLWVETVEKRKEVPTKIKELMKSWGASHLFCAMEYEVDELRREAKLVKLLAEGEKGEKMAADVVHDTCVVMPGALQSGSGGQYAVYSPWFRAWIKHIEENPECLEIYEKPGPNPPGTKEKHENLFACSIPEAPEGKRLRDDEKARYHSLWPAGEHEALKRLEKFCDEAIGKYAERRNIPAMQGTSNLSVHFASGTLSARTAIRTARDRNNTKKLNGGNEGIQRWISEVAWRDFYKHVLVHWPYVCMNKPFKPTYSNIEWSYNVDHFHAWTQGRTGFPIIDAAMRQVLSTGYMHNRLRMIVASFLAKDLLVDWRMGERYFMEHLIDGDFASNNGGWGFAASVGVDPQPYFRVFNPLLQSEKFDPDGDYIRKWVEELRDLPELKGGKGGEIHDPYGRGSEKVKKKLEEKGYPRPIVEHSGARDRALDAYKRGLARDL

SEQ ID NO: 6731 - protein, 407 aa, Zygosaccharomyces rouxii
MATHEEFIRTQVFGTVFEITNRYTDLNPVGMGAFGLVCSATDTLAGQPVAIKKIMKPFSTAVLAKRTYRELKLLKHLRHENLICLQDIFLSPLEDIYFVTELQGTDLHRLLQTRPLEKQFVQYFLYQILRGLKYVHSAGVIHRDLKPSNILINENCDLKICDFGLARIQDPQMTGYVSTRYYRAPEIMLTWQKYDVEVDIWSAGCIFSEMIEGKPLFPGKVHVHQFSIITDLLGSPPRDVIITICSEDTLKFVTSLPHRDPVPFQERFKAVEPDAVDLLGRMLVFDPKKRITAADALVHPYLAPYHDPTDEPIAEAQFDWDFNDADLPVDTWRVMMYSEILDFHKIGGSDGQIDTNAAFDDQVAAATAGPMLPLWLNSNININNSHPVNIQVQLLRHQQPRITVVYQ

SEQ ID NO: 6732 - protein, 777 aa, Actinobacillus pleuropneumoniae serovar 1 str. 4074
MKTYTYSKQDLSFIEQLSQAYCKDPFSYLGLHQAGDVSVIRVFLPEATTVKILSAVGQILSEALKIDDSGLFVAQLAQQYSSLNYRLRVGYSLAEIDLEDPYRFTSSLLPMDNWLLAEGTHLRPYEILGAHLKTQEGVSGVHFSVWAPNARRVSVVGDFNYWDGRVNPMRFHAESGIWDIFLPNVEKGALYKFEILDSNGNIRLKSDPYAFASQFRPDTASVVTGLPEKIEVDAKLRHANDPDQPISIYEVHLGSWRRHLENNYWLNYEEIANELIPYVKDMGFTHIELLPITEYPFDGSWGYQPTGLYSPTSRFGSPEDLRTLIRKAHEAGINVILDWVVGHFPTDSHGLTEFDGSHLYEHQDPREGYHQDWNTLIFNYGRHEVFNYLSSNALYWTERFGIDGLRVDAVSSMIYRDYSRKDGEWIPNQYGGRENLEALDFLRRTNRMLKKEGHGAVVIAEESTSFAGITHSPEENGVGFDYKWNMGWMNDTLRYMSLDPIYRQYHHDWMTFGMMYQYSEKFVLPLSHDEVVHGKCSILGKMSGDCWQKFANLRAYYGYMWGYPGKKLLFMGNEFAQGREWNYNESLDWFLLGEQGGGWHKGVLNWVRDLNRTYQKYPALYQLDYDPAGFEWLVVDDWQQSVFAFERKAKNGESVIVVSNFTPVVRHNYRIGVRQDGTYTEILNSDAAYYEGSNVGNYGEIECEAIESHGKPFSIELSIPPLSTIFIACQPKPKEAVEAEQDIVKMAEVAMQKALKPTKKTVSVKAKAHKKAHKNKK

SEQ ID NO: 6733 - protein, 459 aa, Agrobacterium tumefaciens str. C58
MTDPQTLAARFPGDFLFGVATASFQIEGATKADGRKPSIWDAFCNMPGHVFGRHNGDIACDHYNRWEEDLDLIKEMGVEAYRFSIAWPRIIPDGFGPINEKGLDFYDRLVDGCKARGIKTYATLYHWDLPLTLMGDGGWASRSTAHAFQRYAKTVMARLGDRLDAVATFNEPWCAVWLSHLYGIHAPGERNMEAALAAMHHINLAHGFGVEASRHVAPKVPVGLVLNAHSVIPASNSEADLKAAERAFQFHNGAFFDPVFKGEYPAEMMEALGDRMPVVEAEDLAIISQKLDWWGLNYYTPMRVADDATPGAEFPATTPAPAVSEVKTDIGWEVYAPALKSLVETLYKRYDLPECYITENGACYNMGIENGEVNDQPRLDYYAEHLGIVADLIRDGYPMRGYFAWSLMDNFEWAEGYRMRFGLVHVDYDTQVRTLKNSGKWYSALASRFPKGNHGVVKG

SEQ ID NO: 6734 - protein, 642 aa, Debaryomyces hansenii CBS767
MVRMSSYDDDPIIEIFDNDNSDDIQVINRDNTQYDQNLMNSTGNTPHNYYNDIYDNSQHEHTQQNRQHQPQEQLSSLSSILQLQAETHSNQQEPSGLTPILSSNDYNQLTTVSQPKYTTSLPPLAPLSESVIPNNLNIPPTLSLPKASESQDKKTNTVTTTTKKRKEASSSKTRPAFVMKIWSMVNDPANHDYIRWNDNGKTFQVFHREEFMKLILPKYFKHNNFASFVRQLNMYGWHKVQDISNGTLNKDDKSNDEIWQFENPYFIRGREDLLDKIVRNKTISQESDHLEAGNLNFQSVLNELDQIKVNQFAIGEDLRRVRNDNKTLWQENFLTRERHQQQAQTLEKILKFLAAVYGNSAGKLLEVDNGSIGLDDFNSNNQMTTYNYQQPPQAHNQAPHQPIQVPSMTDQPSQPPSPFNRPRLMLMDQAYQKSPSNNPSPRETAQRNSNSGSIEEIIRSYENTPNDSPNSNVNKIYQQLMNNEPGVSSPRHYFPELNSQNNSYFGVPNTPGQQYIKSGTPLGSSNNTSEVMNGLEQNIFKQGQSIQQVQDWIQKLAAQQQQQQQQQQQLQNLQSLHQNHKQNSDDYEKPDIDEFDVNEFLDNSNASNSQASNSVNSDLNDASSNKRSIDEVNDGNAKRKKQ

SEQ ID NO: 6735 - protein, 476 aa, Borrelia garinii PBi
MKNKFLICAYFLLTLSISSLVIVESIFAVDESNNNKLSRSSYEQMMIQAFEFVKENYVEPVNDEVIFEGALKGIFQALGDPYSQYLTKKDLEEISKTTVGDYVGIGISIIKKMHSQDKQDKAKNLDSNSFCVSIVTPFEGGPAYKAGIKSGDCIIAVDGKSVSSMEVDQVVDRLKGKEGTKVKVSILRGKDLTLDFELTREKIEIQTIKYDVINPDIGYIRIVSFNPYTSVDFSKALDNLKNRNIKSLILDLRLNTGGYFQAAIKMADDILSKGTIVSTKSRNSSKPIDYKASSKQVLPSDIKIVALIDRSSASASEVFVGALKDNKRAYIIGEKSYGKGVIQHVVPFYTGGFKITSSKYYTPSGKSIHKVGIEPDLEIKSPDFSEEEAVIYKEIFDKKLIEGFLKGKKSITEQEIDFFVENLVKENPKYKIDKEFLGKYVFFNYYQDNNKELPIYNLHYDKVLKAACEYLSKLGN

SEQ ID NO: 6736 - protein, 186 aa, Emericella nidulans
MSSTSPSKEPEVEQEPHSGEEHEQMDKEQDNQTQGQGEFEVKEQDRWLPIANVARIMKLALPENAKIAKEAKECMQECVSEFISFITSEASEKCQQEKRKTVNGEDILFAMTSLGFENYAEALKIYLSKYRETQSARGEHQNRPPSSGYAGGDPSAELPAALQSCVPGVLQLEAPSPKPLIMQAAL

SEQ ID NO: 6737 - protein, 249 aa, Synechococcus sp. CC9605
MHSSLHALPVLQDNVIWIWVRGAEAVVIDPAVAPPVRAWLEKRQLSLAAVLQTHHHADHIGGTPELLQRWPEAEVIASADDRERIPFQTMPVRGGDHVTVLGETVEVMDVAAHTRAHIAFFLPNPKGAEIRPLLFCGDTLFSGGCGRLFEGSAEQMHQALQKLAELPEATQVCCAHEYTEANLQWAVAQQPNNTVLVERYREVRSLRAKGELSLPSSIGLERRTNLFMQASSAAELGFLRSHKDQWRPT

SEQ ID NO: 6738 - protein, 514 aa, Aspergillus oryzae
MEDGTQVSTLERVVKEVQAPALQTPTDEQFWSPEDPSKPNLQFLKQHFYREGRLTEDQALWIIQAGTQLLKAEPNLLEMDAPITVCGDVHGQYYDLMKLFEVGGDPSETRYLFLGDYVDRGYFSIECVLYLWSLKIWYPNTLWLLRGNHECRHLTDYFTFKLECKHKYSERIYEACIESFCSLPLAAVMNKQFLCIHGGLSPELHTLEDIKSIDRFREPPTHGLMCDLLWADPLEEFGQEKTGDYFVHNSVRGCSYFFSYPAACAFLEKNNLLSIIRAHEAQDAGYRMYRKTRTTGFPSVMTIFSAPNYLDVYNNKAAVLKYENNVMNIRQFNCTPHPYWLPNFMDVFTWSLPFVGEKITDMLIAILNTCSKEELEDDTPTTFHYGPPSPPVPMDVESSEFKRRAIKNKILAIGRLSRVFQVLREESERVTELKTATGGRLPAGTLMLGAEGIKQAITNFEDARKVDLQNERLPPSSEEVYKRSEEERQAALERAQREADNDAGLATVARRISM

SEQ ID NO: 6739 - protein, 559 aa, Debaryomyces hansenii CBS767
MGNSPSKNDPLPTNSSANQTLNQSTSSNGELESDESIPPLSGLSGNKLNGSSKTSAIKIVNKNDNKFNSNYYNTNSNTPSSIYKKNGVQISPKKNSKSNGNHDLALDLEIGVSMAKLLSNSSPSAPGSNKLSLPSQQEYSSSFDSEKSEVSTVSPVFTTLGEYKDEDLLLSLGSSGPNDNFGVVKGDLDLDTIVEISLESTPEPRKVPDKSIDQPKKHLDTQISLTSSTSSLQSPVENSNVKRPQVNVDEIIDRLLEIGLKRPNNSSANSSRKNKDKLPLTSQEIKYVLNKSRSIFLDQPTLLRLSPPVKIVGDIHGQFHDLIRIFNSCGYPPYTNYLFLGDYVDRGYKSLETILLLLCYKIKYPENFFMLRGNHESANITKIYGFYDECKRRLPSISGNHKLWKTFVDVFNALPIAATINDKIFCIHGGLSPDLADLKQIENIKRPTDIPDNGLLADLLWSDPDPLIKNFSPTNWPKNDRGVSYCFGKKHVDYFCLKFKMDLIVRGHMVVEDGYEFFDKRKLVTVFLAPNYCGEFDNYGAIMSVDKSLCCSFELIKPQ

SEQ ID NO: 6740 - protein, 740 aa, Zea mays
MASEILGNVTEKAKDLAGSKSTKMAQLAEVTKDVHDDKWRITSDYGVKQNNTDDWLRVATDDQTGPLLLEDQFAREKIHRFDHERIPERVVHARGSGAFGKFTLFESASDVTSAGILTDTSRETPVFLRFSTVLGSRGSADTVRDVRGFAVKFYTEEGNWDIVGNNIPVFFIQDSMKFPDVIHAGKPEPDCEVPQAQSAHNNFWDFQYMHPEATHMFMWAMSDRTIPRSYRMMQGFGVNTYTLINAKGERHFVKFHFTPELGVHSFVWDEALKIAGQDPDFHRKDLWMAIDSGAYPKWKFGIQVIPEAKEHDFEFDILDATKVWPEELVPVRYIGELELNKNPDEFFTQTEQVAFCTSHIVPGIGFSNDPLLQGRNFSYQDTQLSRLGINWEELPINKPVCPVMNFNRDGAMRHTITKGKVNYWPNRFQTVPPATEKEGAYVEFPEKTAGMKVRMQSKKFREHKSQAELFYNSMSENEKMHMKAAFAFELDHCDDPVVYERLCERLCEIDLELAQSVAEMVGGEQPTKQTRPKHNKKAKGLSQMDFQPEKPTIATRMVAILIADGYDKAAYTGMKAALTAAGALPFTISPRRNKIFADGEDKSGSGVVADHHLEGQRSTMYDSVFVPGGAKSIETLSKNGRAVHWVREAFGHLKAIGGTGEAVSFIKQAVDLPGMEFSTSGDVVNSYGVVTATAVQPESFKEAVNMAKEAKDFVSAYMYAISQHKNFERETAGLNAMVAY

SEQ ID NO: 6741 - protein, 265 aa, Petunia x hybrida
MAQLRADDLSFIFGLLGNIVSFMVFLAPVPTFYKIYKRKSSEGYQAIPYMVALFSAGLLLYYAYLRKNAYLIVSINGFGCAIELTYISLFLFYAPRKSKIFTGWLMLLELGALGMVMPITYLLAEGSHRVMIVGWICAAINVAVFAAPLSIMRQVIKTKSVEFMPFTLSLFLTLCATMWFFYGFFKKDFYIAFPNILGFLFGIVQMLLYFVYKDSKRIDDEKSDPVREATKSKEGVEIIINIEDDNSDNALQSMEKDFSRLRTSK

SEQ ID NO: 6742 - protein, 341 aa, Aegilops tauschii
MERYEVIKDIGSGNFGVAKLVRDVRTKELFAVKFIERGHKIDENVQREIMNHRSLRHPNIVRFKEVVLTPTHLAIVMEYAAGGELFERICGSGKFNENEARFFFQQLLSGVSYCHSMQICHRDLKLENTLLDGSEAPRLKICDFGYSKSSVLHSQPKSTVGTPAYIAPEVLSRREYDGKVADVWSCGITLYVMLVGAYPFEDPDEPKNFRKTITRILSVQYSVPDYVRISMECRHLLSRIFVANPEQRITIQEIKNHPWFLKNLPIEMTDEYQMSLHMVGVNAPPQTLEEIMAIIQEARIPGDGSKFAGQLSVPGLGSMELDDIDDVDVDVEDSGDFVCAL

SEQ ID NO: 6743 - protein, 312 aa, Zea mays
MAESFVLNTGSRIPSVGLGVWQIQPDAANDAIYAAVKAGYRHIDCAAAYNNEEEVGLALKKLFEDGVVKRDDLFITSKLWAANHAPEDVEEGIDTTLQDLQLDYLDLYLIHGPIRIKKGTSTMTPENFLPTDIPATWAAMEKLYDSGKARAIGVSNFSCKKLHDLLAVARVPPAVNQVECHPVWQQDKLRKLCQSNGVHLSAFSPLGSPGSPWINGPSVLKNPIVVSVADKLQKTPAQVALRWGIQMGHSVLPKSANESRIKENIDIFGWSIPEDLMAKFSEIKQVRLLTAEFVVHPQAGYNTLEDFWDGEI

SEQ ID NO: 6744 - protein, 432 aa, Candida albicans SC5314
MTVPYQVKPSDEIKGAPEVSYYTPEQPVPAGTFYPQSSDEVAPKIFQPLKIGKLALPNRIGVSPMCQYSADYNFEATPYHLIHYGSLVNRGPGITIVESTAVSPEGGLSPHDLGIWKDEQAEKLKPIVDYAHSQKQLIAIQLGHGGRKASGQPLFLHLEQVADKSVNGFADKAVAPSALAFRPNGNLPVPNELTKDEIKRVVKDFGAAARRAVEISGFDAVEIHGAHGYLINEFYSPISNKRTDEYGGSFENRTRFLKEVIDSVKSSIPNDVPVFLRISAAENSPDPEAWTIEDSKKLADILVEKGIALVDVSSGGNDYRQPPRSGISKELREPIHVPLSRAIKQHVGDKLLVSCVGGLEKDPELLNKYLEEGTFDLALIGRGFLRNPGLVWEFADKLGVRLHQALQLGWGFWPNKQQIVDLIERTSKLEVN

SEQ ID NO: 6745 - protein, 309 aa, Apium graveolens
MAITLNSGFKMPVLGLGVWRMDRNEIKNLLLSAINLGYRHFDCAADYKNELEVGEAFKEAFDTDLVKREDLFITTKLWNSDHGHVIEACKNSLKKLQLEYLDLYLIHFPMASKHSGIGTTRSILDDEGVWEVDATISLEATWHEMEKLVEMGLVRSIGISNYDVYLTRDILSYSKIKPAVNQIETHPYFQRDSLIKFCQKYGIAITAHTPLGGALANTERFGSVSCLDDPVLKKLSDKHNKSPAQIVLRWGVQRNTIVIPKSSKTKRLEENINIFDFELSKEDMELIKTMERNQRSNTPAKAWGIDVYA

SEQ ID NO: 6746 - protein, 467 aa, Listeria innocua Clip11262
MLYSENDKRKHESYRIPLFGSEEESTSIPKYVLKKEPMEPRIAYQLVKDQLMDEGNARQNLATFCQTYMEKEAEILMAETLEKNAIDKSEYPQTAELENRCVNILADLWNAPKEMSYLGTSTVGSSEACMLGGLAMKFRWRNNAEKRGLDIQAKRPNLIISSGYQVCWEKFCVYWDVDMRVVPMDKEHLSLDVEKVFELVDEYTIGIVGILGITYTGKFDDIALLDEKVEAYNEANEHQLVIHIDGASGAMFTPFVNPELPWDFRLKNVVSINTSGHKYGLVYPGVGWILWKDKEYLPKELIFEVSYLGGSMPTMAINFSRSASQIIGQYYNFLRYGFEGYREIHEKTKKTALYLSKTVEKSGYFEIINDGSNLPIVCYKLKDDLDVEWTLYDLADQLLMKGWQVPAYPLPADLSDTIIQRFVCRADLGYNVAEEFAADFADALHNLEHARVLYHDKERNDSYGFTH

SEQ ID NO: 6747 - protein, 366 aa, Glycine max
MRRWLCCTCQVEESYPSNENEHLKSPRNYGDGNQKGSKVSAPVKPETQKAPPPIEAPALSLDELKEKTDNFGSKALIGEGSYGRVYYATLNNGKAVAVKKLDVSSEPESNNEFLTQVSMVSRLKDDNFVEMHGYCVEGNLRVLAYEFATMGSLHDILHGRKGVQGAQPGPTLDWIQRVRIAVDAARGLEYLHEKVQPPIIHRDIRSSNVLIFEDYKAKIADFNLSNQAPDMAARLHSTRVLGTFGYHAPEYAMTGQLTQKSDVYSFGVVLLELLTGRKPVDHTMPRGQQSLVTWATPRLSEDKVKQCVDPKLKGEYPPKGVAKLGAVAALCVQYEAEFRPNMSIVVKALQPLLKSPAPAPAPVPES

SEQ ID NO: 6748 - protein, 548 aa, Escherichia coli
MAAKDVKFGNDAGVKMLRGVNVLADAVKVTLGPKGRNVVLDKSFGAPTITKDGVSVAREIELEDKFENMGAQMVKEVASKANDAAGDGTTTATVLAQAIITEGLKAVAAGMNPMDLKRGIDKAVTVAVEELKALSVPCSDSKAIAQVGTISANSDETVGKLIAEAMDKVGKEGVITVEDGTGLQDELDVVEGMQFDRGYLSPYFINKPETGAVELESPFILLADKKISNIREMLPVLEAVAKAGKPLLIIAEDVEGEALATAVVNTMRGIVKVAAVKAPGFGDRRKAMLQDIATLTGGTVISEEIGMELEKATLEDLGQAKRVVINKDTTTIIDGVGEEAAIQGRVAQIRQQIEEATSDYDREKLQERVAKLAGGVAVIKVGAATEVEMKEKKARVEDALHATRAAVEEGVVAGGGVALIRVASKLADLRGQNEDQNVGIKVALRAMEAPLRQIVLNCGEEPSVVANTVKGGDGNYGYNAATEEYGNMIDMGILDPTKVTRSALQYAASVAGLMITTECMVTDLPKNDAADLGAAGGMGGMGGMGGMM

SEQ ID NO: 6749 - protein, 496 aa, Zea mays
ITMDPTKFRPSSSHDTTVTTTNAGAPVWNDNEALTVGPRGPILLEDYHLIEKVAHFARERIPERVVHARGASAKGFFECTHDVTSLTCADFLRAPGVRTPVIVRFSTVIHERGSPETIRDPRGFAVKFYTREGNWDLLGNNFPVFFIRDGIKFPDVIHAFKPNPRSHVQEYWRVFDFLSHLPESLHTFFFLFDDVGVPSDYRHMEGFGVNTYTFVSAAGKAQYVKFHWKPTCGVRCILTDEEAALVGGRNHSHATQDLYDSIAAGSFPEWTLYVQVMEPDTEEQYDFDPLDDTKTWPEDLLPLRPVGRLVLDRNVDNFFNENEQLAFGPGLVVPGIYYSDDKMLQCRVFAYADTQRYRLGPNYLMLPVNAPRCAHHNNHYDGAMNFMHRDEEVDYYPSRHAPLRQAAPPTPLPPRPVAGRREKATIRKPNDFKQPGERYRSWDADRQDRFVKRFADSLGHPKVSQELRSIWIDLLAKCDASLGMKIATRLNMKPNM

SEQ ID NO: 6750 - protein, 596 aa, Debaryomyces hansenii CBS767
MHALFETDWFLDSKKYGTPCIPKSFNEFMYLVEINAFYTYNKLRDYINTYYINAYCGVWGYLAIIRDAVFIYLMYLYMSQMVVLIRGRGMIASIRIFIHAISKRGFQFLLSIPPIKKKIDQELSETTKKIEEELMQNDESLMQFKSLPEKGLDATIVKKELDRLQDLKHSDWYNGRVSGAVYHGGNELLDLQSDAYHKYSIANQLHPDVFPGIRKMESEIVSMVLRLFNAPEEGCGSTTSGGTESLLLAGLSAREYGKFYKNISNPEIIAPITIHAGIEKACYYFGMKLHKVDLDPVTFKVDVNKVKKLINGNTVLLVGSAPNFPHGIIDDIEALSNLAVKYKIPLHVDACLGSFIVSFLEKSKVHGDKPIPKFDFRLPGVTSISCDTHKYGFAPKGSSIVMYRNSKLRQCQYYILTDWTGGMYGSPTLAGSRPGALMAGCWATLVNFGEDNYAESCRTIVGASMKLKCAIKEHEMLSKYLEVIGDPIGSVVAFGVTKNYRSTLSIYKIGECLSSKGWHFSTLQNPAALHFALTRLTVPVIGELISDLVEVTSAALKDESNSESEIAALYGVAGSVKTTGVAERVVVAFLDTLYKI

SEQ ID NO: 6751 - protein, 351 aa, Passiflora edulis
QVSFDLLEAYLEQHPEASTWGNGAPGFRDNALFQDYHGLKSFRQAMASFMEQIRGGRAKFDPDRIVLTAGATAANELLTFILADPGDALLVPTPYYPGFDRDLRWRTGVKIVPIHCDSSNNFQVTPQALEAAYKNAEAMNLKVRGVLLTNPSNPLGATIQRSVLEEIFDFVTRKNIHLVSDEIYSGSTFSSAEFVSIAEILEARGYTEAERVHIVYSLSKDLGLPGFRVGTIYSYNDKVVTTARRMSSFTLISSQTQHPLACMLSNKEFAENYIKTNRERLRKRYDMIIQGLKDAGIECLKGNAGLFCWMNLSPLLETPTKEGELALWESIVHEVKLNISPGSSCHCSEPG

SEQ ID NO: 6752 - protein, 647 aa, Thermoanaerobacter tengcongensis MB4
MSEFKFEKLLEPIQIGSMKLRNRIIMPPMVTNYAAEDGAVTERFKAYHQTRAKGGVGLIIVEATYIHPGGKGFQNQLGIYKDELISGLKELTEAVHKYGAKIAVQLYHAGRQTTLKVTGMQVVAPSPIPCPVKQEKPKELSVDEIKELIEAFGQAARRAKEAGFDAVEIHGAHGYLINQFLSPYSNKRTDEYGGSFENRMRFPLEVVRRVREEVGPDFPIIYRMSAEEYVPGGLTIEDTKIFAQKLVEEGIDALHISGGVYESSAMIIQPAAIPQGCFVENAAAIKKAINSKVPVIVVGRIKDPIMAEQIIREGKADLVSMGRALLADPELPRKVSEGKIEEIRKCIGCNQGCIDRLFQDIDIGCIANALTGHETEFDMESLAKTRKKVFIIGGGPGGLEAARVAALRGHEVILYEKQPELGGQMRIAAVPPHKGEINDLADYLINQVEKSGITIVKGKEADLNTIHEIKPDVVILATGSEPIIPEIPGINQKNVVTAHDVLKGTVTVGKKVAVIGGGLVGCETAEFLADQGKEVTVIEMLDDIAIDVGSLVRALLLNRMAEKKIKVLTKSKVKEISGDKVTIETVNGNQELSGIDTIVIAVGSKPKNDLLKLIEKEGIPVYAIGDCVKARKFMDAIHEGFRYAYSL

SEQ ID NO: 6753 - protein, 504 aa, Methanococcoides burtonii DSM 6242
MSDEKTSSLTTAFGIPVGDDQNSLTAGERGPVLIQDVHLLEKLGHFNRERIPERVVHAKGAGAGGYFEVTADVTKYTKAKFLSEIGKRTEVFARFSTVGGEKGSADAARDPRGFAIKFYTEDGNHDLTGNNTPVFFIRDPLKFPDFIHTQKRNPATNCKDPNMFWDFLSLTPESIHQVTILFSDRGTPATFRNMNGYSSHTYKWYNDKGEYFWVQYHFKTDQGTKTLTREEAEKLSGTDPDHAVRDLYDAIEKGDYPSWTLEMQIMTPEQAEEYRFDILDITKVWPHGDFPTIKIGKMVLNRNPTNYFAEVEQSAFSPGNLVPGIDISPDKMLQARVFSYHDSHVHRLGPNYHQIPVNAPKNAPETSYQRDGFMRIDANGGSGPNYWPNSFGGPAPDPDALKPPFEVSGKADRTPYVHSNDDFVQAGNLYRDVMDDQARENLVGNIISHLSGAQKRIQLRQTALFFKADPDYGGRVADGLGLDVKEIERLANMTQTERVKATEK

SEQ ID NO: 6754 - protein, 249 aa, Brassica napus
SVNKNPSKQRRFLLPNRERENTPTHASAQQQQSLIYSFVARGTVILVEFTDFKGNFTSIAAQCLQKLPSSNNKFTYNCDGHTFNYLVENGFTYCVVAVDSAGRQIPMAFLERVKEDFNKRYGGGKAATAQANSLNKEFGSKLKEHMQYCMDHPDEISKLAKVKAQVSEVKGVMMENIEKVLDRGEKIELLVDKTENLRSQAQDFRTQGTQMRRKMWFQNMKIKLIVLAIIIALILIIVLSVCGGFNCGK

SEQ ID NO: 6755 - protein, 565 aa, Saccharomyces cerevisiae
MKRTVISSSNAYASKRSRLDIEHDFEQYHSLNKKYYPRPITRTGANQFNNKSRAKPMEIVEKLQKKQKTSFENVSTVMHWFRNDLRLYDNVGLYKSVALFQQLRQKNAKAKLYAVYVINEDDWRAHMDSGWKLMFIMGALKNLQQSLAELHIPLLLWEFHTPKSTLSNSKEFVEFFKEKCMNVSSGTGTIITANIEYQTDELYRDIRLLENEDHRLQLKYYHDSCIVAPGLITTDRGTNYSVFTPWYKKWVLYVNNYKKSTSEICHLHIIEPLKYNETFELKPFQYSLPDEFLQYIPKSKWCLPDVSEEAALSRLKDFLGTKSSKYNNEKDMLYLGGTSGLSVYITTGRISTRLIVNQAFQSCNGQIMSKALKDNSSTQNFIKEVAWRDFYRHCMCNWPYTSMGMPYRLDTLDIKWENNPVAFEKWCTGNTGIPIVDAIMRKLLYTGYINNRSRMITASFLSKNLLIDWRWGERWFMKHLIDGDSSSNVGGWGFCSSTGIDAQPYFRVFNMDIQAKKYDPQMIFVKQWVPELISSENKRPENYPKPLVDLKHSRERALKVYKDAM

SEQ ID NO: 6756 - protein, 283 aa, Yersinia pseudotuberculosis IP 32953
MQTVKLNNGIAMPLLGFGVFQMTNTAECERAVIDAIETGYRLIDTAASYQNETQVGNALKLSGIARDELFITTKLWLQDTSYEGAKAQFERSLNRLQLDYVDLYLIHQPYGDVHGAWRAMEELHQAGKIRAIGVSNFHPDRLADLMAFNKIIPAVNQIEVNPFNQQLHAVPWMQSRGIQPEAWAPFAEGRNGLFQNPVLTAIGEKYGKSVGQVVLRWIFQRGIVSLAKSVRKGRMEENINILDFELSAEDMLQIAALDTATSAFFSHRDPAMVEWLTGRKLDV

SEQ ID NO: 6757 - protein, 256 aa, Glycine max
MFSKLHSQHSQQPQPFQFSRECQSSKEDDIPSTCGLNLITAQKSGLSGDQNNETTSEIMRRPRGRPSGSKNRPKPPLIITCEPEPVMSPFILEIPGGSGVVEALARFSRRKNTGLCVLTGSGTVANVTLRQPSFTPAGASVATVTFHGRFNILSMSATFLHHGSPAAIPNALAVSLSGPQGQIVGGLVAGRLLAAGTVFVIAASFNNPSYHRLSSEEDAQNTSDGGGDRQSPAESSMYSCHRPSDVIWAPTPRPPF

SEQ ID NO: 6758 - protein, 77 aa, Zea mays
  misc_feature (55)..(55): Xaa can be any naturally occurring amino acid
  misc_feature (61)..(61): Xaa can be any naturally occurring amino acid
GMSGEKPAVSTYREFADNVLPRIRANNYNTVQLMAVMEHSYYASFGYHVTNFFAXSSRSGXPKGQNSWLKKEKFGFK

SEQ ID NO: 6759 - protein, 216 aa, Bartonella henselae str. Houston-1
MVSFRTHIIPVTSFQQNCTLLFDNERKVGVLVDPGGDWLQIQDVIRKNGVIVEAIWITHGHFDHVGAAMQAKEALNVKIIGSHRDDKPVMDAVRESAESYGITDARICVPDQWLEDGDSVHFAGHVFRVYHTPGHSPGHVIYFNEKERFALLGDVLFRGSIGRTDFPFCSHKDLMKSLREKVLPLGDDVRFICGHGPGSYLGYERQWNPFLQGFHE

SEQ ID NO: 6760 - protein, 493 aa, Oryza sativa (japonica cultivar-group)
MDSKSVIKKVLGIWYPYILKVAAAPVQEQEKCNGGGGGGFRGAAVRCHPALSTEKKASIRGVVGELLGAAAAAAGAGEERRRSLISLGVGDASSHACFRRGGEFAADAVADAARSGVFDCYAPSCGFPAARRWSNVSLFLEKVKLINIHICNSRAPETSAVADHLSAGARHRTRDADVFMTAGGTGAITAIATVLGGAPGANVLLPRPGFAPYEAACELAGAEPRFYDLLPRRGWEADLAGVRAMADGATAAIVVINPNNPCGAVYSAQHLFQIAETARELGIPIIADEVYAHMVFGGSKFVPMATFAHITPVITIGALSKKFMLPGWRLGWLAFCDPNGALKHVRNATEMLLNVTSGPASIVQAAVPKILSNEHNEFHRNVVNLLESAADALYRRVNQIEALQCYSKPHGSMFMMVEVNTSLLFGVEDDMDFARELIKEESVLVLPGSVIGLKNWIRIFFGAPTSVILEACDRIEAFCQKRAVQVKLLKKKF

SEQ ID NO: 6761 - protein, 382 aa, Zea mays
  misc_feature (74)..(74): Xaa can be any naturally occurring amino acid
MGRDKSRRLYGSRHFRQRLVLATLTSTAVTIEDIRSGDASPGLRPYEVSLLRLLDKISDHHTIDLNETGMDLPXTKLRYRPGVIIGGKGLEHDCGVHRGIGYFLEPLILLGLFSRAPISIRLKGITNDTKDPSVDTFRTTTLHMLKHFGVPLDGFNLNIDSRGSPPLGGGEVFLRVRNINSTLTAANWVDEGMVKRIRGVSFSTRVSPQLENRIIYAARGIFNRFIPDVHIHTDHRSGSAGGRSPGYGVSLVAETTTGCLLSVDVTVSYPSVDEINEESEKPELTSPEDLGVQAASMLLEEVAQGGVVDSTHQGLLFILCALCPPDVSKVRVGQLTPYGIETLRNIRDFLDVKFIIKPDPNSNTVTLKCVGAGVKNLARKIS

SEQ ID NO: 6762 - protein, 424 aa, Brucella suis 1330
MVMVQGAPASTAFAAGKDSDVYKELALFGDIFERVRAQYVTPPDDKKLIESAINGMLTSLDPHSSYLNPEAAQDMRVQTKGEFGGLGIEVTMDNDLVKVIAPIDDTPASKAGVLSGDLITKIDGQEVRGLSLTDAVDKMRGEVGAPIELTILRKGADKPITLKINRAIIKVKAVRSRVENDVGYLRIISFTEQTSEDLKKAIKDIQEKVPADKLKGYVLDLRLNPGGLLDQAVAVSDAFLDKGEIVSTRGRDPQDVTRFDARKGDLTNGKPLIVLINGGSASASEIVAGALQDHRRATVLGTQSFGKGSVQTIIPLGENGSLRLTTALYYTPSGKSIQGKGITPDIKVDQPLPPELKGEDVVRGESELKGHIKGNAEDASGSGSSAYVPPDPKDDLQLNEALKLLRGEVPNAAFPPDPKKGVLN

SEQ ID NO: 6763 - protein, 356 aa, Acinetobacter sp. ADP1
MAELSSPLKIGAFEIKNRLVMAPLTRSRSGEDRIPNDLMLEYYQQRAGAGLILTEATVISPKAVGYEDTPGLWSEEQASAWHPIVDAVHQKGAKIVVQLWHVGRISDPQLLGGDIPVAPSAIQPEGHVSLLRPKRPFVTPRALSIEEIHEIVAQYQHAAELAKVAGFDGVELHAANGYLIDQFLQSGTNQRSDEYGGSLENRARLLLQVVDAFIDVWGAGRVGVHIAPRGDSHDMSDANPLETFGYVMRQLSERHIAFVFSREYEAADSISLQLRQKFNGVWIANENLSAESAKRILAQGDADAVSFGKAAIANPDLYERLIHNAPLNSVNPDTLYAKGAEGYTDYPTSQESALEA

SEQ ID NO: 6764 - protein, 462 aa, Arabidopsis thaliana
MSEEQPHANLAVPAFKTEKEPITQTRNGQSSVWRFGGSDKAAKASTVTLRGVIYMLFDNCGKDVNETILPLGHGDPSVYPCFRTCIEAEDAVVDVLRSGKGNSYGPGAGILPARRAVADYMNRDLPHKLTPEDIFLTAGCNQGIEIVFESLARPNANILLPRPGFPHYDARAAYSGLEVRKFDLLPEREWEIDLEGIEAIADENTVAMVVINPNNPCGNVYSHDHLKKVAETARKLGIMVISDEVYDRTIFGDNPFVSMGKFASIVPVLTLAGISKGWVVPGWKIGWIALNDPEGVFETTKVLQSIKQNLDVTPDPATIIQAALPAILEKADKNFFAKKNKILKHNVDLVCDRLKDIPCVVCPKKPESCTYLLTKLELSLMDNIKDDIDFCVKLAREENLVFLPGDALGLKNWMRITIGVEAHMLEDALERLKGFCTRHAKKTETETESLQALKLSDNNLEM

SEQ ID NO: 6765 - protein, 235 aa, Actinobacillus pleuropneumoniae serovar 1 str. 4074
MLNITPIPALSDNYIWAIQKDNDVIIVDPSDAVPVLAFIAKNQLNLTAILLTHNHHDHTDGMPELLSRYPQLSVYGPQEVAQFANRIVQPEDHLTLFDYDVRVIESAGHTAQHVSYLFGNEYLFCGDALFSGGCGRVFTGNYQAQFDALQRFKALPEFVEIFPAHEYTLSNLKFAEAVLAPSCALFEIQERAEILRSRNQPTLPTTLERELQINPFLQAVDLDQFIALRHQKDNF

SEQ ID NO: 6766 - protein, 492 aa, Streptococcus mutans
LVRGVDILADTVKVTLGPKGRNVVLEKSFGSPLITNDGVTIAKEIELEDHFENMGAKLVSEVASKTNDIAGDGTTTATVLTQAIVREGLKNVTAGANPIGIRRGIETAVATAVDELKAIAQPVSGKEAIAQVAAVSSRSEKVGEYVSEAMEKVGNDGVITIEESRGMETELDVVEGMQFDRGYLSQYMVTDNEKMVADLENPYLLITDKKISNIQDVLPLLEEVLKTNRPLLIIADDVDGEALPTLVLNKIRGTFNVVAVKAPGFGDRRKAMLEDIAVLTGGTVITEDLGLELKDTTIDALGQAARVTVDKDSTVIVEGSGGKEAVANRVNLIKSQIETATSDFDREKLQERLAKLSGGVAVIKVGAATETELKEMKLRIEDALNATRAAVEEGIVAGGGTALINVIEKVAALDLTDDAATGRNLVLRALEEPVRQIAKNAGYEGSVIIDKLKNSSAGTGFNAANGEWVDMIDAGIIDPVKVTRSALQNAAS

SEQ ID NO: 6767 - protein, 480 aa, Bacteroides fragilis NCTC 9343
MEDLNFRKGDAKTEAFGSNRMLQPSPVEKIPDGPTTPEIAYQMVKDETFAQTQPRLNLATFVTTYMDDYATKLMNEAININYIDETEYPRIAVMNGKCINIVANLWNSPEKDTWKTGALAIGSSEACMLGGVAAWLRWRKKRQAQGKPFDKPNFVISTGFQVVWEKFAQLWQIEMRQVPLTLDKTTLDPEEALKMCDENTICVVPIQGVTWTGLNDDVEALDKALDAYNAKTGYDIPIHVDAASGGFILPFLYPDTKWDFRLKWVLSISVSGHKFGLVYPGLGWVVWKGKEYLPEEMAFSVNYLGANITQVGLNFSRPAAQILGQYYQFIRLGFQGYKEVQYNSLQIAKYIHSQIAKMTPFVNYSEDVVNPLFIWYMKPEYAKNAKWTLYDLQDKLAQHGWMVPAYTLPAKLQDYVVMRVVVRQGFSRDMADMLLGDIKNAIAELEKLEYPTSTRIAQEKNLPVEAKVFNHTGKPQAAKK

SEQ ID NO: 6768 - protein, 246 aa, Prochlorococcus marinus subsp. pastoris str. CCMP1986
MEFNKEHKIIGIRVLRDNIIWLWKKNRSAVVIDPALSQPVKEYLKTNNLNLEAILQTHHHSDHIGGTRELIKEWPNVKVIASCKEKDRIPFQNSSVKDGDTLELLDEEVKVIEVIGHTRSHIAFYINNNVPILFIGDTLFSAGCGRIFEGTYKQMYYSLKRIKSLPKNTLIYCAHEYTKSNLLWALDLEPENQNIKNKLIEVEKKIALKELTIPCLLEEEMKINLFLRADNLKGFSFLRANKDSWV

SEQ ID NO: 6769 - protein, 492 aa, Streptococcus anginosus
MVRGVDILADTVKVTLGPKGRNVVLEKSFGSPLITNDGVTIAKEIELEDHFENMGAKLVSEVASKTNDIAGDGTTTATVLTQAIVREGIKNVTAGANPIGIRRGIETAVATAVEALKANSVPVSNKEAIAQVAAVSSRSEKVGEYISEAMEKVGNDGVITIEESKGMETELDVVEGMQFDRGYLSQYMVTDNEKMVADLDNPYILITDKKISNIQEILPLLENILKTSRPLLIIADDVDGEALPTLVLNKIRGTFNVVAVKAPGFGDRRKAMLEDIAILTGGTVITEDLGLELKDATIEALGQASKVTVDKDSTVIVEGSGDAEAIANRVAVIKSQIESSTSDFDREKLQERLAKLSGGVAVIKVGAATETELKEMKLRIEDALNATRAAVEEGIVSGGGTAFVNVLSAVEALDLSGDEATGRNIVLRALEEPVRQIALNAGFEGSIVIDRLKNSEAGTGFNAATGEWVNMIDAGIIDPVKVTRSALQNAAS

SEQ ID NO: 6770 - protein, 447 aa, Paenibacillus polymyxa
TIFQFPQDFMWGTATAAYQIEGAYQEDGRGLSIWDTFAHTPGKVFNGDNGNVACDSYHRYEEDIRLMKELGIRTYRFSVSWPRIFPNGDGEVNQEGLDYYHRVVDLLNDNGIEPFCTLYHWDLPQALQDAGGWGNRRTIQAFVQFAETMFREFHGKIQHWLTFNEPWCIAFLSNMLGVHAPGLTNLQTAIDVGHHLLVAHGLSVRRFRELGTSGQIGIAPNVSWAVPYSTSEEDKAACARTISLHSDWFLQPIYQGSYPQFLVDWFAEQGATVPIQDGDMDIIGEPIDMIGINYYSMSVNRFNPEAGFLQSEEINMGLPVTDIGWPVESRGLYEVLHYLQKYGNIDIYITENGACINDEVVNGKVQDDRRISYMQQHLVQVHRAIHDGLHVKGYMAWSLLDNFEWAEGYNMRFGMIHVDFRTQVRTPKQSYYWYRNVVGNNWLETRR

SEQ ID NO: 6771 - protein, 492 aa, Streptococcus oralis
MVRGVDILADTVKVTLGPKGRNVVLEKSFGSPLITNDGVTIAKEIELEDHFENMGAKLVSEVASKTNDIAGDGTTTATVLTQAIVREGIKNVTAGANPIGIRRGIEAAVAAAVEALKNNAIPVANKEAIAQVAAVSSRSEKVGEYISEAMEKVGKDGVITIEESRGMETELEVVEGMQFDRGYLSQYMVTDSEKMVADLENPYILITDKKISNIQEILPLLESILQSNRPLLIIADDVDGEALPTLVLNKIRGTFNVVAVKAPGFGDRRKAMLEDIAILTGGTVITEDLGLELKDATIEALGQAARVTVDKDSAVIVEGAGNPEAISHRVAVIKSQIETTTSEFDREKLQERLAKLSGGVAVIKVGAATETELKEMKLRIEDALNATRAAVEEGIVAGGGTALANVIPAVADLELTGDEATGRNIVLRALEEPVRQIAHNAGFEGSIVIDRLKNAEVGTGFNAATGEWVNMIEEGIIDPVKVSRSALQNAAS

SEQ ID NO: 6772 - protein, 734 aa, Nitrosomonas europaea ATCC 19718
MKSLSSSSPGSSEDSAQSLLLTARLYDPCSFLGMHAAPNGRLIRVFQPYMSRVWLHTLSGYQPMRSVHQDGIFEWEGEGVMHPYLLRMENTATGVIEERHDPYAFPMQISGHDLYLFNEGRLLQAYHMLGAHRVRNHGVTGTRFAVWAPNAERVSVVGDFNRWDGRVYPMMVHGHSGVWELFIPDLPEGAIYKYEIRNRISGEILLKTDPYATTYELRPNNAALTPIEQKYDWKDDDWIARRKGWDWLHAPLNIYELHVGSWKRHPDGRFYSYHELADHLIPYLQDMGYSHVELLPISEHPLDESWGYQATGYFAVTSRYGSPEAFMSFVDRCHQAGIGVILDWVPAHFPQDSFSLARFDGTALYEHEDPRLGYHHDWGTYIFNYGRNEVKSFLLSSAHYWLSAFHIDGLRVDAVASMLYLNYSRKEGEWLPNRYGGHENLEAIEFLRALNTMVHGEFPGALTFAEESTSWPAVSRPAYLGGLGFSMKWNMGWMNDTLSYMQHDPVHRRYHHNELTFNQLYAYTENFVLPLSHDEVVHGKKSMLDKMPGDGWQKFANLRLLFTYQMTCPGKKINFMGNELGQGHEWRVGHELDWYLLERDPHRGIQALTRDLNHLYLNTPALHELDFFAEGFSWIDCHDVEQSVISYQRHARDGSFVLVVLNFTPILRTGYRVGIPGSSAYQEVFNSDSIYYDGSNAGNAGKISPTGQPWSGQPDSIIITLPPLAGVILKAADG

SEQ ID NO: 6773 - protein, 184 aa, Arabidopsis thaliana
MRTFSPKLLLLLLLVLRHHAESGSIVKFLPGFEGPLPFELETGYIGIAKYWANDERVREAMTRGYGSIGKWIRCNSNIHYDDDIISSIPYHMNNSINGYRSLIYSGDHDMEVPFLATEAWIRSLNYPIIDDWRPWIINNQIAGYTMTYANKMTYATIKASGHTAEYKPAESFIMFQRWISGQPL

SEQ ID NO: 6774 - protein, 637 aa, Passiflora edulis
MDSCDCIDTQWAHEGGILVKYQYISDVLIAFAYFSIPIELIYFVQKSAFFPYRWVLMQFGAFIVLCGATHFINLWTFSMHSKAVAVVMTVAKVSCAIVSCATALMLVHIIPDLLSVKTRELFLKNKAEELDREMGLILTQEETGRHVRMLTHEIRSTLDRHTILKTTLVELGRTLGLEECALWMPSRAGSTLQLSHTLNYQAQIGSSVSINIPEVNQVFNSARAMRIPYTCPLARIRPLVGRYLPPEVVALRVPLLHLSNFQINDWPDFSARSYAVMVLILPTDSARTWREHELELVEVVADQVAVALSHAAILEESMRARDQLMEQNVALKSARREAEMAIHARNDFLAVMNHEMRTPMHAIIALSSLLLETELTPEQRAMIETVLKSSNLLATLTNDVLDLSRLEDGSLELDVAMFNLHDIFREVINLIKPIASVKKLALTLTTTPDPPSFAVGDEKRLMQTILNVVGNAVKFTKEGSVSIIASVAKPDSLRDWRPPEFYPISTDGHFYLRIQVKDSGCGILPQDIPLLFTKFIRPQSGSNRGSSGAGLGLAICKRFVSLMGGHIWIESEGLNKGTVVTFIIKLGLCTNPEDLSMLQAASRRRANHGSVDLKGHKLLFRDNDGVPPPNPRYQRSF

SEQ ID NO: 6775 - protein, 158 aa, Brassica napus
  misc_feature (108)..(108): Xaa can be any naturally occurring amino acid
  misc_feature (120)..(120): Xaa can be any naturally occurring amino acid
MQYAKESIPLLTPYKMGRFNLSHRVVLAPLTRQRSYGNVPQPHAVLYYSQRTSPGGFLITEATGVSDTAQGYQDTPGIWTKEHVEAWKPIVDAVHAKGGVFFCQIWHXVGRVSNRGFQPXNGQAPISCSNKSLIPQARTESIKEVLFTPPRRLSTEEI

SEQ ID NO: 6776 - protein, 170 aa, Zea mays
  misc_feature (142)..(142): Xaa can be any naturally occurring amino acid
  misc_feature (154)..(154): Xaa can be any naturally occurring amino acid
YDKNLGRIEKWVLRKAFDDEEHPYLPQHILYRQKEQFSDGVGYNWIDGLKSFTEQQVTDEMMNSAAQMFPYNTPVNKEAYYYRIIFERLFPQDSARETVPWGPSIACSTPAAIEWVEQWKASNDPSGRFISSHDSAATDRTXTSWRWSTATGTXANGTVNGNDVAVAIAV

SEQ ID NO: 6777 - protein, 448 aa, Paenibacillus polymyxa
MTIFQFPQDFMWGTATAAYQIEGAYQEDGRGLSIWDTFAHTPGKVFNGDNGNVACDSYHRYEEDIRLMKELGIRTYRFSVSWPRIFPNGDGEVNQEGLDYYHRVVDLLNDNGIEPFCTLYHWDLPQALQDAGGWGNRRTIQAFVQFAETMFREFHGKIQHWLTFNEPWCIAFLSNMLGVHAPGLTNLQTAIDVGHHLLVAHGLSVRRFRELGTSGQIGIAPNVSWAVPYSTSEEDKAACARTISLHSDWFLQPIYQGSYPQFLVDWFAEQGATVPIQDGDMDIIGEPIDMIGINYYSMSVNRFNPEAGFLQSEEINMGLPVTDIGWPVESRGLYEVLHYLQKYGNIDIYITENGACINDEVVNGKVQDDRRISYMQQHLVQVHRTIHDGLHVKGYMAWSLLDNFEWAEGYNMRFGMIHVDFRTQVRTPKESYYWYRNVVSNNWLETRR

SEQ ID NO: 6778 - protein, 448 aa, Paenibacillus polymyxa
MSENTFIFPATFMWGTSTSSYQIEGGTDEGGRTPSIWDTFCQIPGKVIGGDCGDVACDHFHHFKEDVQLMKQLGFLHYRFSVAWPRIMPAAGIINEEGLLFYEHLLDEIELAGLIPMLTLYHWDLPQWIEDEGGWTQRETIQHFKTYASVIMDRFGERINWWNTINEPYCASILGYGTGEHAPGHENWREAFTAAHHILMCHGIASNLHKEKGLTGKIGITLNMEHVDAASERPEDVAAAIRRDGFINRWFAEPLFNGKYPEDMVEWYGTYLNGLDFVQPGDMELIQQPGDFLGINYYTRSIIRSTNDASLLQVEQVHMEEPVTDMGWEIHPESFYKLLTRIEKDFSKGLPILITENGAAMRDELVNGQIEDTGRHGYIEEHLKACHRFIEEGGQLKGYFVWSFLDNFEWAWGYSKRFGIVHINYETQERTPKQSALWFKQMMAKNGF

SEQ ID NO: 6779 - protein, 468 aa, Streptococcus gordonii
  misc_feature (230)..(230): Xaa can be any naturally occurring amino acid
  misc_feature (239)..(239): Xaa can be any naturally occurring amino acid
MTKSLPKDFIFGGATAAYQAEGATHTDGKGPVAWDKYLEDNYWYTAEPASDFYHKYPVDLKLAEEYGVNGIRISIAWSRIFPTGYGEVNPKGVEFYHNLFAECHKRHVEPFVTLHHFDTPEALHSNGDFLNRDNIEHFVDYAAFCFEEFPEVRYWTTFNEIGPIGDGQYLVGKFPPGIQYDLAKVFQSHHNMMVSHARAVKLYKDKGYKGEIGVVHALPTKYPYDPENPXDVRAAELEXIIHNKFILDATYLGHYSDVTLAGVNHILKVNGGQLDLRDEDFAALEAAKDLNDFLGINYYMSDWMRDFDGETEIIHNGKGEKGSSKYQIKGVGRRESPTHIPKTDWDWIIYPQGLYDQIMRIKKDYPNYKKIYITENGLGYKDEFVDNTVYDDARIDYVKQHLEVLSDAIADGANVKGYFIWSLMDVFSWSNGYEKRYGLFYVDFETQERYPKKSAHWYKKLAETQMIE

SEQ ID NO: 6780 - protein, 650 aa, Pseudomonas fluorescens Pf-5
MTSAFPHLFQPLQIRGKRLKNRIMSSGHDTSMPTDNLVNEQLIAYHRARAEGGVGLIVLQVAGVHDSARYTSHVLMATDDACIDGYRRLAETCHAHGTVVLSQIFHPGREIMESADGLLAVAYAPSAVPNERFRVMPRALDQDMIDEIIQGYADAARRLHQAGLDGVELVASHGYLPAQFINPRVNRRTDGYNGELEQRLRFIREILGAMRASTDAEFIIGLRISADERDPEGLTEDESLAAVQLLQGQLDYVHIVAGTSASLGGAVHIVPPMAVEAAYLAREAGTFKAGLSIPLFVTGRINQPQEAEAIIAKGQADVCGMTRALICDPQMPNKSERGHSEDVRACIACNQACIGHFHKGLPISCIQHPETGRELLYGQPKPSARGKRILVVGGGPAGMKAAAVAAQRGHRVTLYEASAQLGGQIQLAQLLPRRSEFGGASTNLQREMQLAGVEVVRNTRVDRALIERENPDHVIIATGAQPYWPNFERGGDLQVVDAWQVLRDEVQLGRSVVVADWRCDWIGPGIAERLVRAGHQVQLAVNGTHCGENLPLYVRDQLAGELHKLAIPIIPYARLYGCDDSTVYLQHTASGEPMLLENVDSLVLCQGHQSVDDLGQQLKGLVPFQRIGDCLAPRTVEEAIHEGLKVAWAL

SEQ ID NO: 6781 - protein, 498 aa, Zea mays
LKDLAAIQQHHHQQQLAAAAADENMSNLTSASGDQASVSSHPVPPPAKKKRSLPGNPDPDAEVIALSPRTLMATNRYVCEVCGKGFQRDQNLQLHRRGHNLPWKLKQRNPKEVVRKKVYVCPEPGCVHHDPARALGDLTGIKKHFSRKHGEKKWKCDRCAKRYAVQSDWKAHSKVCGTREYRCDCGTLFSRRDSFITHRAFCDALAEESARAVTAAAAVAGQHHPGQAGMLFSQAAGGGDGGAGLHLPPGVLDPSQTLGGGHAHGMSFQELCLKREQQQQQQFAPSSWLTAQHHQQELELPGSAVFGLARPLDQQEYMGNSTTESTAGLSGFVGFSPSAAGGAAASAHMSATALLQKAAQMGATLSRPSNQGQMAGTHSSSTTNAGTGTANAAAAAASNVPGSGTGAGALGFGSPHHFGAEERTTRPADRDAGNGSGNAAAVAAGGGNEGLTRDFLGLRAFSHGDILSMAGFDPCMSSASPAAYEQGHHHPSSKQWHV

SEQ ID NO: 6782 - protein, 828 aa, Aspergillus oryzae
MTSNILQIPFRRSHTVSLSDAITQYISTKYDQRPDMFADDLLIIDRLRNEAIHVQEPHVSGISRLVTYAAQLKWLGGKFPVDIGVEFPWYPAFGFNTSRPISQNNIRFELANILFNLVALYSQLAFSVNRTTPDGLKQACNYLCQAAGVLAHLRADILPDLRASPPEDMDDMTLQSLEQLLLAQGQECFWQKAVKDGLKDASIARLAAKVSDFYAEGGDYAVQSNAISPEWIHHMTAKHHHFAAAAQYRQSLDCLEKRKYGEEVARLRDSEVCVNEALKESRWINRTVLGDLQGLKNRVTEDLKRAEKDNDVIYLNPVPPKSELKIIDRACMVAAKAPSQVTDAISMLGDNGPLGQPLFSKLVPYAVHIAASIYSDRRDRLVNETIIGELETMTDKLRDLLSSLNLPGSLQALEKPLGLPPTLVSHAEEMRQQDGLNRLRRSLEDTARVKANDKAAYNEGVELLAAEKAEDDSSRRKYGTDRWAREPSEAAASKLYTTAREIDGYFSSAQSSDNLVEQKLRDSEAVFRVLTGTNRDLEMYVPSSRRAAIPPEVERESIRLRGCLSEVSRLENRRKRRAQALKDKARTDDISKALLKEAARLEREFPMQAIQASQFEDLFEEQLHLYDTDLEMVTQEQHEQDQISAQVREANRAFTRAHTGDASTKEREKALQELENGYLKYKEIISNIEVGRKFYNDLAKIVGRFRDDCKAFVHQRRMEASQIEGDITSVAAMASLNLSQPHLRQYSQQPTQPAQPVQPAQPVQPPNQLPPQPQPVQHQPPRDEPLTAPQPTRANTRPSMAPGVWSPEMGIRFGAQGTWDPSKGVKFS

SEQ ID NO: 6783 - protein, 509 aa, Vicia faba
MDGSAGPGGGNVNAFLRNYKMGKTLGIGSFGKVKIAEHVLTGHKVAIKILNRRKIKNMEMEEKVRREIKILRLFMHHHIIRLYEVVETPTDIYVVMEYVKSGELFDYIVEKGRLQEDEARSFFQQIISGVEYCHRNMVVHRDLKPENLLLDSKWSVKIADFGLSNIMRDGHFLKTSCGSPNYAAPEVISGKLYAGPEVDVWSCGVILYALLCGTLPFDDENIPNLFKKIKGGIYTLPSHLSPGARDLIPRLLVVDPMKRITIPEIRQHQWFQLRLPRYLAVPPPDTLQQAKKIDEEILQEVVNRGFDRDQLVESLSNRVQNEGTVTYYLLLDNRYRVSTGYLGAEFQETMDPGLNRINSGEVVSPAGGHHFLAYQGVGMRQQFPAERKWALGLQSRAQPREIMVEVLKALQGLNVCWKKIGHYNMKCRWVVGIPGHQGGMVNNSVLNNNFLGNVGIIENEAVPKSSVVKFELQLYKTQEKYLLDLQRVEGPQFLFLDLCAAFLAQLRVL

SEQ ID NO: 6784 - protein, 509 aa, Pisum sativum
MDGSAGPGGGNVNAFLRNYKMGKTLGIGSFGKVKIAEHVLTGHKVAIKILNRRKIKNMEMEEKVRREIQILRLFMHHHIIRLYEVVETPTDIYVVMEYVKSGELFDYIVEKGRLQEDEARSFFQQIISGVEYCHRNMVVHRDLKPENVLLDSKWSVKIADFGLSNIMRDGHFLKTSCGSPNYAAPEVISGKLYAGPEVDVWSCGVILYALLCGTLPFDDENIPNLFKKIKGGIYTLPSHLSPGARDLIPRLLVVDPMKRITIPEIRQHQWFQLRLPRYLAVPPPDTLQQAKKIDEEILQEVVNRGFDRDQLVESLSNRVQNEGTVTYYLLLDNRYRVSTGYLGAEFQETMDPGLNRINSGEVVSPAGGHHFLGYQGVGMRQQFPAERKWALGLQSRAQPREIMVEVLKALQGLNVCWKKIGHYNMKCRWVVGIPGHQGGMVNNSVLNNNFLGNVGIIESEAVPKSSVVKFELQLYKTQEKYLLDLQRVEGPQFLFLDLCAAFLAQLRVL

SEQ ID NO: 6785 - protein, 125 aa, Triticum aestivum
  misc_feature (101)..(101): Xaa can be any naturally occurring amino acid
  misc_feature (107)..(107): Xaa can be any naturally occurring amino acid
  misc_feature (114)..(114): Xaa can be any naturally occurring amino acid
MMGRKALDYEELNENVKKVQYAVRGELYLRASELQKEGKRIIFTNVGNPHALGQKPLTFPRQVVALCQAPFLLDDPNVGLIFPADAIARAKHYLSLAPGGXGAYSDXRGILGVXREVPSYGVWFK

SEQ ID NO: 6786 - protein, 484 aa, Streptococcus intermedius
RRAILADTVKVTLGPKGRNVVLEKSFGSPLITNDGVTIAKEIELEDHFENMGAKLVSEVASKTNDIAGDGTTTATVLTQAIVREGIKNVTAGANPIGIRRGIETAVATAVEALKANSVPVSNKEAIAQVAAVSSRSEKVGEYISEAMEKVGNDGVITIEESKGMDTELDVVEGMQFDRGYLSQYMVTDNEKMVADLDNPYILITDKKISNIQEILPLLENILKTSRPLLIIADDVDGEALPTLVLNKIRGTFNVVAVKAPGFGDRRKAMLEDIAILTGGTVITEDLGLELKDATIEALGQASKVTVDKDSTVIVEGSGDAEAIANRVAVIKSQIESVTSEFDKEKLQERLAKLSGGVAVIKVGAATETELKEMKLRIEDALNATRAAVEEGIVSGGGTAFVNVLDAVAALELEADEATGRNIVLRALEEPVRQIALNAGFEGSIVIDRLKNSEVGTGFNAATGEWVNMIEAGIIDPVKVTRYAL

SEQ ID NO: 6787 - protein, 476 aa, Streptococcus parasanguinis
LADTVKVTLGPKGRNVVLEKSFGSPLITNDGVTIAKEIELEDHFENMGAKLVSEVASKTNDIAGDGTTTATVLTQAIVREGIKNVTAGANPIGIRRGIETAVATAVEALKNNAIPVSSKEAIAQVAAVSSRSEKVGEYISEAMEKVGKDGVITIEESRGMETELEVVEGMQFDRGYLSQYMVTDNEKMVADLENPYILITDKKISNIQEILPLLESILQSNRPLLIIADDVDGEALPTLVLNKIRGTFNVVAVKAPGFGDRRKAMLEDIAILTGGTVITDDLGLELKDATIEALGQAAKVSVDKDSTVIVEGSGNPEAIANRVAVIKSQIETTTSEFDREKLQERLAKLSGGVAVIKVGAATETELKEMKLRIEDALNATRAAVEEGIVAGGGTALVNVISAVATLELEGDEATGRNIVLRALEEPVRQIAHNAGYEGSIVIDRLKNAEVGTGFNAATGEWVNMIDAGIIDPVKVT

SEQ ID NO: 6788 - protein, 472 aa, Guillardia theta
MNKLFSIKIGPYYLGKTLGVGSFGKVKLGEHELCGQKVAVKILNRKKIKNLKMEEKVKREICILKLFMHPHIIRLYEVIETPTDIFVVTEYITGGELFDYIVERGRLNEDESRKFFQQMISGIEYCHNHMVVHRDLKPENILLDAHLNVKIADFGLSNIMKDGNFLKTSCGSPNYAAPEVINGKSYLGPEVDVWSCGVIMYALLCGSLPFDDENIPNLFKKIKSGIYILPGYLSDLSRDMIAKMLITNPLLRITINEIRDHPWFNSRLPKYLSFPTFKKNFVIQKKLNIDDNILELVSNKTFLSKKYIKLGIMKHERNSTAIIYHLIRESITPFDMITVDNSYIRDIIKKENVIKKSNEKEHNTSLHQAFLGIESPRENLKDILNEIQRAIKTFRSKTHNLNHFSVIIVINTNSLFETKYKKKKEIILRTTTILIQIFKRSMKYLIDLQKINGDSFFFLSTCNFIKQELNLK

SEQ ID NO: 6789 - protein, 404 aa, Shewanella sp. ANA-3
MRPIIKSNKLDTVCYDIRGPVHKEARRLEDEGHRILKLNIGNPAPFGFEAPEEIVRDVILNLPSAQGYCESKGLFSARKAIVQHYQAQGIKGVDIEDVYIGNGVSELIMMAMQGLLNTDDEVLLPSPDYPLWTAAANLAGGKAVHYRCDEEADWFPDLDDIKSKISSRTRGIVLINPNNPTGAVYSKELLLQVIELCREHNLILFADEIYDKILYDEAKHIPAASLSDDILTVTFNGLSKAYRAAGFRVGWMMLSGNLKAAKSYIEGLEMLSSMRLCANVPNQHAIQTALGGYQSINELILPSGRLTVQRDTCYELLNQIPGVSVKKPKGALYAFPKLDMKKFNLRDDERLVLDLLRDKKILLVHGSAFNWPEPDHLRVVFLPYKEDLTKALTEFGNFLETYKQ

SEQ ID NO: 6790 - protein, 484 aa, Streptococcus sanguinis
GSSILANTVKVTLGPKGRNVVLEKSFGSPLITNDGVTIAKEIELEDHFENMGAKLVSEVASKTNDIAGDGTTTATVLTQAIVREGIKNVTAGANPIGIRRGIEAAVATAVEALKSNSVPVSNKEAIAQVAAVSSRSEKVGEYISEAMEKVGNDGVITIEESKGMETELDVVEGMQFDRGYLSQYMVTDNEKMVAELDNPYILITDKKISNIQEILPLLENILKTNRPLLIVADDVDGEALPTLVLNKIRGTFNVVAVKAPGFGDRRKAMLEDIAILTGGTVITDDLGLELKDATIEALGQASKVTVDKDSTVIVEGSGNPEAIANRVAVIKSQIESSTSEFDREKLQERLAKLSGGVAVIKVGAATETELKEMKLRIEDALNATRAAVEEGIVSGGGTAYINVLDAVAGLELAGDEGTGRNIVLRALEEPVRQIALNAGFEGSIVIDRLKNSEVGTGFNAATGEWVNMIEAGIIDPVKVTRSAS

SEQ ID NO: 6791 - protein, 340 aa, uncultured archaeon GZfos27B6
MIKIDGTYGEGGGQIIRTAIALAAITGEEVEIENIRANRPNPGLSAQHLHAVKAVAKLSGGRTEGRELRSTGLKFSPGALNGFEGEIDIGTAGSITLLLQCLIPVALFADSETKVKIKGGTDVKWSPPMDFYTEVFLKAIREMRCDVHLEVKKRGYYPKGDGLVEAKIAPSHQLKGIVLVESERTGEREGVVKGISHSCGLPAHVAERQAKAAEGVLNAAGYDSELKTEIDENGKRTTGCGITLWKGYKSGSALGERGKRAERVGEEAAGNIIKELASASTVDVYLADQLIPYIALADGKSEMKVREVTKHLETNVYVTKKFLDVEFEIEKKNGFFAIRR

SEQ ID NO: 6792 - protein, 272 aa, Bradyrhizobium sp. BTAi1
MLMIEANGARIPALGLGTWELRGRTCARIVEQALTLGYRHIDTAQVYENEQEVGEGLRASRVRRSELFLTTKVWTTHFAPNDLERSTKESLVRLRVSDVDLLLLHWPNSHVPLAETLGALAHAKTLGLTRHIGVSNFTVALLDEAVALSPEPLVCNQVEYHPYLEQTKIREACARHGIAMVAYSPIAKGKIRNDPTLTRIGHAHGKSPAQICLRWLVQQNVVAIPRTSKIERLSENLDVFDFELSEQDMTDIFAMGSAGGRMTDFAFAPKWD

SEQ ID NO: 6793 - protein, 385 aa, Burkholderia fungorum LB400
MALSWWQIVLATLVSTHITIVSVTVYLHRCQAHRALDLHPLASHFFRFWLWMTTGIVTGKWAAVHRKHHAKCETQEDPHSPQFKGIWKVLLGGAELYRTEAKNGETLRRFGHGTPVDWMERNVYEKYPDLGVSLLMVIDILLFGVVGVSVWAIQMMWIPFWAGGVVNGLGHFWGYRNFGPPDASTNVFPIGILIGGEELHNNHHAYATSAKMSNRWYEFDIGWMYICVLSALGLAKVRKVALRPHLVKGKSVLDDETLQAVLRNRCEVMASYARTAEHAYRQELVRAKHMSRRERAALMRGVRKWFRDGQPAQDGARQPVPTELCDNHAKLLVYVELREDLAAIWERSNRSREQLLCQLEAWCRRAEQSRIDALREFSLRLRHYG

SEQ ID NO: 6794 - protein, 225 aa, Cucumis sativus
MGRGKIEIKRIENTTNRQVTFCKRRNGLLKKAYELSVLCDAEVALIVFSSRGRLYEYSNNSIKTTIERYKKACSDSSATSSVTELNTQYYQQESAKLRQQIQMLQNSNRHLMGDSLSALTVKELKQLENRLERGITRIRSKKHEMLLAEIEYLQKREIELENENVCIRTKIAEVERVQQANMVSGQELNAIQALANSRNFFSPNIMEPAGPVSYSHQDKKMLHLG

SEQ ID NO: 6795 - protein, 254 aa, Cucumis sativus
  misc_feature (202)..(202): Xaa can be any naturally occurring amino acid
MSCYEEEDEESGVVGLRRSSSSSRTGRGKIEIKRIENTTNRQVTFCKRRNGLLKKAYELSVLCDAEVALIVFSSRGRLYEYANNSVRATISRYKKAYSDPSTAMTVSEANTQFYQQESAKLRAQIGNLQNLNRHLLGESISSLSVKDLKSLEVKLEKGISRIRSRKNELLFSEIEYMQKREIELHTNNQLIRAKIAETERSXQNTNASNNNGIATRRGEEGSMGTNLEDNNHHQYDSTNYFDPHHNHPISLQLV

SEQ ID NO: 6796 - protein, 633 aa, Arabidopsis thaliana
MAAPIRFFELNTGAKLPCVGLGTYAMVATAIEQAIKIGYRHIDCASIYGNEKEIGGVLKKLIGDGFVKREELFITSKLWSNDHLPEDVPKALEKTLQDLQIDYVDLYLIHWPASLKKESLMPTPEMLTKPDITSTWKAMEALYDSGKARAIGVSNFSSKKLTDLLNVARVTPAVNQVECHPVWQQQGLHELCKSKGVHLSGYSPLGSQSKGEVRLKVLQNPIVTEVAEKLGKTTAQVALRWGLQTGHSVLPKSSSGARLKENLDVFDWSIPEDLFTKRSFAELLSLRMRHTASIRPLRNCGTLVPSAVCVEQPPPHLIMANAITFFKLNTGAKFPSVGLGTWQASPGLVGDAVAAAVKIGYRHIDCAQIYGNEKEIGAVLKKLFEDRVVKREDLFITSKLWCTDHDPQDVPEALNRTLKDLQLEYVDLYLIHWPARIKKGSVGIKPENLLPVDIPSTWKAMEALYDSGKARAIGVSNFSTKKLADLLELARVPPAVNQVECHPSWRQTKLQEFCKSKGVHLSAYSPLGSPGTTWLKSDVLKNPILNMVAEKLGKSPAQVALRWGLQMGHSVLPKSTNEGRIKENFNVFDWSIPDYMFAKFAEIEQARLVTGSFLVHETLSPYKSIEELWDGEI

SEQ ID NO: 6797 - protein, 395 aa, Schizosaccharomyces pombe
MTIVNEGAENVGYFTPAQKIPAGAAIGVPQTKLFTPLKIRGVEFHNRMFVSPMCTYSADQEGHLTDFHLVHLGAMGMRGPGLVMVEATAVSPEGRISPNDSGLWMESQMKPLRRIVEFAHSQNQKIGIQLAHAGRKASTTAPYRGYTVATEAQGGWENDVYGPNEDRWDENHAQPHKLTEKQYDELVDKFVVAAKRAVEIGFDVIEIHGAHGYLISSTVSPATNDRNDKYGGTFEKRILFPMEVVHSVRKAIPDSMPLFYRVTATDWLPKGQGWEIEDTVALAARLRDGGVDLIDVSSGGNHKDQRIEVKDCYQVPFAEKIKDQVNGILLGAVGMIRDGLTANEILESGKADVTFVAREFLRNPSLVLDSANQLGENVAWPVQYDYAVKGHRKLR

SEQ ID NO: 6798 - protein, 237 aa, Cucumis sativus
MFQNQEEKMSDSPQRKMGRGKIEIKRIENTTNRQVTFCKRRNGLLKKAYELSVLCDAEVALIVFSSRGRLYEYANNSVKATIDRYKKASSDSSNTGSTSEANTQFYQQEAAKLRVQIGNLQNSNRNMLGESLSSLTAKDLKGLETKLEKGISRIRSKKNELLFAEIEYMRKREIDLHNNNQMLRAKIAESERNVNMMGGEFELMQSHPYDPRDFFQVNGLQHNHQYPRQDNMALQLV

SEQ ID NO: 6799 - protein, 347 aa, Schizosaccharomyces pombe
MKKDLDEIDTDIVTLSSFILQEQRRYNQKHKNEEGKPCIIQEASGELSLLLNSLQFSFKFIANTIRKAELVNLIGLSGIVNSTGDEQKKLDKICNDIFITAMKSNGCCKLIVSEEEEDLIVVDSNGSYAVTCDPIDGSSNIDAGVSVGTIFGIYKLRPGSQGDISDVLRPGKEMVAAGYTMYGASAHLLLTTGHRVNGFTLDTDIGEFILTHRNMKMPLQHSIYSINEGYTAFWDEKIARFIAHLKESTPDKKPYSARYIGSMVADMHRTILYGGLFAYPCSKGNNGKLRLLYECFPMAFLVEQAGGIAVNDKGDRILDLVPKTLHGKSSIWLGSKHEVEEYINFIK

SEQ ID NO: 6800 - protein, 430 aa, Yersinia pestis KIM
MASEYIEHLAVFHAEDTLLPAKGSFFMSPIEKSSKLDNVCYDIRGPVLKEAKRLEEEGNKVLKLNIGNPAPFGFDAPDEILVDVIRNLPTAQGYCDSKGLFSARKAIMQHYQARNIRDLTVEDIYIGNGVSELIVQSMQALLNLGDEMLVPAPDYPLWTAAVSLSSGKAIHYMCDEESGWFPDLDDIRSKITPRTRGIVIINPNNPTGAVYSKELLLEIVEIARQNDLIIFADEIYDKILYDDAQHHSIAALAPDLLTVTFNGLSKTYRVAGFRQGWMVLNGPKKHAKGYIEGLEMLASMRLCANVPMQHAIQTALGGYQSISEFIQPGGRLYEQRDRAWELINQIPGVSCVKPQGALYMFPRIDQKRFNLKDDQKLVLDLLLQEKVLLVQGSAFNWPYPDHVRIVTLPRVDELEMAVRKLGRFLETYHQ

SEQ ID NO: 6801 - protein, 672 aa, Shewanella oneidensis MR-1
MSFPHLLEPLDLGFTQLKNRVLMGSMHTGLEEEKGGFEKLAAFYKERALGGVGLIVTGGISPNLRGRLTPHACQLSFPWQVGKHRIVTQAVHEAGGKICMQILHAGRYGYHPFSQAPSKIKSPITPFTPSAMSSRQVRGTIKDYASSAALAKRAGYDGVEVMGSEGYLINQFISSRTNTRTDEWGGSFEKRAQFPIEIVNAIRAKVGKDFIIIFRLSMLDLVDNGSTWDEVVQLAKWLEHAGVSIINTGIGWHEARVPTIATSVPRGAFAWVTQKLKQSVAVPLIATNRINTPEIGEQIIASGQADMVSMARPFLADPEFVNKAAANTPELINTCIGCNQACLDHTFSLKRATCLVNPRACYETEINFLPTSKKKRIAVMGAGPAGMAFSVYAAMRGHEVVLFEAKSEVGGQFNLARKIPGKEEFNETIRYFLNQIKLHKIDLRLNTRLDAKVLETEKFDEIVIASGVVPRELSLPGFDSPKVVDYQQVLTGQALVGGKVALIGAGGIGFDMAHYLCESESSTLNPDKWLKQWGIDKQYQHAGGLTQPEVENTDHRQVYLLQRKTSKMGQGLGKTTGWIHRLVLKQHDVKMKMGVSYEKFDDAGLHIRVGEQVEVLAVDNVILCAGQESNRTLVDEMKASGIPVHLIGGVDVAAELDAKRAIRQGAELAMRL

SEQ ID NO: 6802 - protein, 438 aa, Zea mays
MEDSATNGHGVVTAVPASWNFEPNETLLGLPALSVRGVLTRVMAGMLPDGGRAVVRLGSGDPTAFPCFRTAPEAVDAVASAVQSGQYNSYSTSVGLEPARRSIAQYLSCDLPYKLSPDDVYLTSGCTQAIEILCSALARPGANILLPRPGFMFYEARAIFNGMEARYFNLLPGNGWEVDIDGVQALADKNTVAMVIVNPGNPCGNVYSYEHLAKASSDMLLLVAETARKLGIFVIADEVYAHLTFGERKFVPMGVFGAVAPVLTLGSISKRWMVPGWRLGWIVTNDPNGVFQRTKVVHSIKSYLDISSDPATFVQGAIPKLVENTKEEFFEKTIEILKRCVDICCEKLKGINAITCPSKPEGSMFVMVKLDLSCLEGIKDDMDFCCRLAKEELVVVLPGCAVGYKDWLRITFAIDPSSLEEGLDRLKSFCLRYRKPTK

SEQ ID NO: 6803 - protein, 459 aa, Agrobacterium sp. ATCC 21400
MTDPNTLAARFPGDFLFGVATASFQIEGSTKADGRKPSIWDAFCNMPGHVFGRHNGDIACDHYNRWEEDLDLIKEMGVEAYRFSLAWPRIIPDGFGPINEKGLDFYDRLVDGCKARGIKTYATLYHWDLPLTLMGDGGWASRSTAHAFQRYAKTVMARLGDRLDAVATFNEPWCAVWLSHLYGVHAPGERNMEAALAAMHHINLAHGFGVEASRHVAPKVPVGLVLNAHSAIPASDGEADLKAAERAFQFHNGAFFDPVFKGEYPAEMMEALGDRMPVVEAEDLGIISQKLDWWGLNYYTPMRVADDATPGVEFPATMPAPAVSDVKTDIGWEVYAPALHTLVETLYERYDLPECYITENGACYNMGVENGQVNDQPRLDYYAEHLGIVADLIRDGYPMRGYFAWSLMDNFEWAEGYRMRFGLVHVDYQTQVRTVKNSGKWYSALASGFPKGNHGVAKG

SEQ ID NO: 6804 - protein, 390 aa, Thiobacillus denitrificans ATCC 25259
MQSGLLDLPWWGLVLVTLGLTHVTIAAVTIYLHRSQAHRSVDLHPVVSHFFRFWLWLTSGMVTREWVSIHRKHHAKCETPEDPHSPQTRGLKKVFWEGSELYRAEAKVAETLEKYSHGTPDDWVERNVYSRHSAKGIFLMMAIDLALFGPIGLTIWAVQMAWIPITAAGIINGVGHYWGYRNFACEDASTNILPWGILIGGEELHNNHHAYGTSARLSNKWYEFDIGWLYIKLMSYAGLATVRKVAPTVKWQAPKPLCDLDTLQAIITHRYDVMSRFVKSVRAESAAEIAKLRAGANLPQNWNFDSFRRWLHKEPAELAADDRAALDTLLGRSERLQTVYRMRQELAAIWGRSTASREQLLEQLQAWCKRAEESGIQSLRDFSVRLRCYA

SEQ ID NO: 6805 - protein, 257 aa, Nostoc punctiforme PCC 73102
MQVIRLEALSDNYIFLLYDDKRNIAAVVDPAEAQPVLKKLAELKADLVAIFNTHHHNDHVGGNKQLIEKFPQLIVYGGAEDRGRIPGQKVFLQQGDRVEFADRIAEVIFVPGHTRAHIAYYFPPQEASETGDLFCGDTLFSGGCGRLFEGTPTQMVDSLSKLRSLPDNTRIWCAHEYTLKNLQFALTVDGDNADLQRRFNEVKAYRSRGEATIPSLLGVEKHTNPFLRWDQASLQSTVKSSDGVQTFARIREMKNNF

SEQ ID NO: 6806 - protein, 405 aa, Zea mays
TSESVAIKVIDKDKIKKCGLMDQIIQEISVMKLVKHPNIVQLYEVMATKTKIYFVIEYVKGGELFKKVQRGRLKEDVARAYFQQLISAVDFCHTRQVYHRDLKPENLLLDGSRNLKISDFGLSALPNCKRKDGLLHTICGTPAYVAPEVISQKGYDGAKADIWACGVILYVLLAGYLPFQDKNMMDMYKKIFKAELKWPSWFSSDVRKLLRRILHPNPNRRISIEEIRTHPWFRIGLDARLFDSTTRDYVPSDMDLALNSLNSNMVECNSAAEKLTILNAFDIISLSNGFDLSGIFENSNKVSKFTSTNTAMTIITKLMEVAKSLDLKVITKTGGLLNMEAAESGIKGVMSINAEIFQITPNYHLVEIKKINGDILEYHNFMNQSMRPALEDIVWAWHGEQPDEK

SEQ ID NO: 6807 - protein, 488 aa, Streptococcus pneumoniae
RGVDILADTVKVTLGPKGRNVVLEKSFGSPLITNDGVTIAKEIELEDHFENMGAKLVSEVASKTNDIAGDGTTTATVLTQAIVREGIKNVTAGANPIGIRRGIETAVAAAVEALKNNAIPVANKEAIAQVAAVSSRSEKVGEYISEAMEKVGKDGVITIEESRGMETELEVVEGMQFDRGYLSQYMVTDSEKMVADLENPYILITDKKISNIQEILPLLESILQSNRPLLIIADDVDGEALPTLVLNKIRGTFNVVAVKAPGFGDRRKAMLEDIAILTGGTVITEDLGLELKDATIEALGQAARVTVDKDSTVIVEGAGNPEAISHRVAVIKSQIETTTSEFDREKLQERLAKLSGGVAVIKVGAATETELKEMKLRIEDALNATRAAVEEGIVAGGGTALANVIPAVATLELTGDEATGRNIVLRALEEPVRQIAHNAGFEGSIVIDRLKNAELGIGFNAATGEWVNMIDQGIIDPVKVSRSALQDA

SEQ ID NO: 6808 - protein, 679 aa, Pseudomonas aeruginosa UCBPP-PA14
MTAAVPYPHLLAPLDLGFTTLRNRTLMGSMHTGLEEKPQGFERMAAYFAERARGGVGLMVTGGIGPNEEGGVYSGAAKLSTPEEAEKHRIVTQAVHEAGGKICMQILHAGRYAYSPKQVAPSAIQAPINPFKPKELDEEGIEKQIADFVNCASLAQVAGYDGVEIMGSEGYFINQFLVQHTNQRTDRWGGSYENRMRLPVEIVRRVREAVGPNFIIIYRLSMLDLVEGGSSWDEIVLLAKAVEKAGATLINTGIGWHEARIPTIATKVPRAAFTKVTAKLRGEVGIPLITTNRINTPEVAEKVLAEGDADMVSMARPFLADPDFVNKAAAGHAERINTCIGCNQACLDHTFGGKLTSCLVNPRACHETELNYIPTARPKKIAVVGAGPAGLAAATVAAERGHRVSLFDAAGEIGGQFNVAKRVPGKEEFHETLRYFRNKLESTGVELHLNRRVGVDDLVAGGYDEIVLATGIVPRTPAIPGIEHPKVISYLDAILERKPVGGKVAVIGAGGIGFDVSEFITHAGPSTSLEREAFWKQWGIDTRLEARGGIAGVKAEVHPAARQVFLLQRKKSKVGDGLGKTTGWIHRAGLKNKQVQMVNAVEYLGIDDAGLHIRVAEGEPQVLPVDTVIVCAGQDPLRELQDGLLAAGRSVHLIGGADVAAELDAKRAINQGSRLAAEL

SEQ ID NO: 6809 - protein, 701 aa, Xanthomonas oryzae
MAKSSGKPASAVSVDRSASAPDARGTGDELHQKARGRHPQLTTNQGIPVGDNQNSLRATPRGPTLLEDFILREKITHFDHERIPERIVHARGSASHGYFKLTKSLSQYTTAKIFTEVGEKTPLFTRFSTVAGGAGSVDTPRDVRGFAVKFYTKEGNWDLVGNNIPVFFIQDAIKFPDLIHAVKMEPDRGFPQAASAHDTFWDFISLTPESMHMIMWAMSDRTIPRSLRMIEGFGIHSFRFLNDKGESTFVKFHWRPKLGLQSTIWDEAVKIAGADQDFPPRDLFEAIQNGDFPEWELGVQLFTEAEADAFPFDHLDSTKIIPEELVPLQIVGRMVLDRWPDNFFAETEQVAYCPANIVPGIDFSNDPLLQGRLFSYLDTQLSRLGGPNFHQIPINAPKCPFANNQRDGHMQMDVPKARVAYEPSLLQADAPREALRGFPSHSTPAEDGAKGRVRAERFADHYSQARLFFRSQTAPEQAHMASALVFELSKVETAHVREAIVGHLRHIDQKLAQRVADGMGMTTLPPAPPAAVAPIDMPLSPALQVIGKMKDTLKGRTVGILIHDGSDASTIKAVRKAAEAEGATVKIVAPKLGGAKLSDGKQLAADGQLAGTPSVVFDAVAVLLSSEAAKLLTRESAALDFVSCAWAHLKAIAFDEGAQLLLKAGNIGKDAGVVPAADTKAFISAAKTRQWAREPKVRMLA

SEQ ID NO: 6810 - protein, 244 aa, Zea mays
MGRGRVELKRIENKINRQVTFAKRRNGLLKKAYELSVLCDAEVALIIFSNRGKLYEFCSGQSITKTLERYEKNSYGGPDTAVQNKENELVQSSRNEYLKLKARVDNLQRTQRNLLGEDLGSLGVKELDQLEKQIDSSLSHIRSTRTQHMLDQLTDLQRREQMMCEANKCLRRKLEETSNQVHGQVWEHGANLLLGYERHSSPQQAPSHVGNGLFFHPLEAAAEPTLQIGFAPEHMNNFMPAWLP

SEQ ID NO: 6811 - protein, 433 aa, Oryza sativa (indica cultivar-group)
KMLEEFVSHGLLEYSKHGMKVEGATTSLLSPYLHFGEVSVRKVYQLVRMQQIKWENEGTSEAEESIHFFMRSIGLREYSRYLCFNFPFTHEKSLLGNLKHYPWKVDEERFKSWRQGMTGYPLVDAGMRELWATGWTHNRIRVIISSFAVKFLLIPWTWGMKYFWDVLLDADLESDILGWQYISGSLPDGHELSRLDNPEVQGQKYDPDGVYVRTWIPELARMPTEWIHHPWDAPSCILEVAGVELGFNYPKPIVDLHIARECLDDSISTMWQLDTAEKLAELDGEVVEDNLSNIKTFDIPKVVLRETSPCALPIDQRVPHASSKDHNLKSKVLKASNRSSICVDMIRSSKMEATSSVANSPVSRKRSFCETAFHVPSYSSSAEVHSHIQDHGGSLVGPSRYLLQEAGRNCVDEVEDSSTADSGSSISRQRKAA

SEQ ID NO: 6812 - protein, 415 aa, Streptomyces coelicolor A3(2)
MRRIVYLGGLTPRGVPERTLSPHLRSRAEVGPILVRDVLHYLAGAATMPDDIDRAFDVGGPDVPTYREMMRRHATVSGLRRRIIVPAPVLTPGLSSHWVGLVTPVPASIARPLTESLRHEVVCQEHDIARYVPDAPGRPLPFDVALTLALRRVREAQVATRWSSASVPGAPSDPLPTDPDWAGGSLYEDERHLPVDASPEALWKVVEGIGGDNGWYSFPPAWAVRGWLDRFVGGVGLRRGRRDAQRLHPARPVAWRGGRRRGHRRLAGRTGYPVVDAAMRQLRHQGWMHNRARLLVASFLTKTLYVDWRIGARHFLDLLVDGDVVNNQLNWQWAAGTGTDTRPHRVLNPLVQARRFDPDGVYVRRWVPELRSVEGGKVHEPWRLAAAERGELDYPDPLVELADGLARFKHARGRD

SEQ ID NO: 6813 - protein, 177 aa, Glycine max
  misc_feature (125)..(125): Xaa can be any naturally occurring amino acid
  misc_feature (169)..(169): Xaa can be any naturally occurring amino acid
MASSMISSPAVTTVNRAGAGMVAPFTGLKSMAGFPTKKTNNDITSIASNGGRVQCMHVWPPFGKKKFETLSYLPDLDDAQLAKEVQYLLKKGWIPCLKFKLKHNFMYHEHNKSPKYYDKHYCTIXNLPIFNYTDTSQVFKELQHANTTYPNNFIHIIIFDNVQQVHDIXFHHYEPQS

SEQ ID NO: 6814 - protein, 651 aa, Oryza sativa (indica cultivar-group)
MAGSERTVVWFRRDLRIDDNPALAAAARDGVVLPVFIWCPADEGQFYPGRCSRWWLKQSLPHLSQSLESLGCPLVLIRAESTLEALLRCIDSVGATRLVYNHLYDPVSLVRDDKIKKELSALGISIQSFNGDLLYEPWEIYDDSGLAFTTFNMYWEKCMELPIDISPSLAPWKLVPAPGLESVRSCSVDDLGLESSKDEESSNALLRRAWSPGWRNAEKMLEEFVSHGLLEYSKHGMKVEGATTSLLSPYLHFGEVSVRKVYQLVRMQQIKWENEGTSEAEESIHFFMRSIGLREYSRYLCFNFPFTHEKSLLGNLKHYPWKVDEERFKSWRQGMTGYPLVDAGMRELWATGWTHNRIRVIISSFAVKFLLIPWTWGMKYFWDVLLDADLESDILGWQYISGSLPDGHELSRLDNPEVQGQKYDPDGVYVRTWIPELARMPTEWIHHPWDAPSCILEVAGVELGFNYPKPIVDLHIARECLDDSISTMWQLDTAEKLAELDGEVVEDNLSNIKTFDIPKVVLRETSPCALPIDQRVPHASSKDHNLKSKVLKASNRSSICVDMIRSSKMEATSSVANSPVSRKRSFCETAFHVPSYSSSAEVHSHIQDHGGSLVGPSRYLLQEAGRNCVDEVEDSSTADSGSSISRQRKAA

SEQ ID NO: 6815 - protein, 548 aa, Buchnera aphidicola (Myzus persicae)
MAAKDVKFGNEARIKMLRGVNVLADAVKVTLGPKGRNVVLDKSFGAPSITKDGVSVAREIELEDKFENMGAQMVKEVASKANDAAGDGTTTATLLAQSIVNEGLKAVAAGMNPMDLKRGIDKAVISAVEELKNLSVPCSDSKAITQVGTISANADEKVGALIAEAMEKVGNDGVITVEEGTGLQNELEVVKGMQFDRGYLSPYFINKPETGIVELENPYILVADKKISNVREMLPILESVAKSGKPLLIISEDLEGEALATLVVNSMRGIVKVAAVKAPGFGDRRKAMLQDISILTGGSVISEELAMELEKSTLEDLGQAKRVVISKDTTTIIGGVGEKHTIQSRISQIRQEIQEATSDYDKEKLNERLAKLSGGVAVLKVGAATEVEMKEKKARVEDALHATRAAVEEGVVAGGGVALVRVAGKTSNLRGQNEDQNVGIRVALRAMEAPLRQIVSNSGEEPSVVTNNVKDGKGNYGYNAATDEYGDMIDFGILDPTKVTRSALQYAASVAGLMITTECMVTDLPKEDKSSDSNSSPAGGMGGMGGMM

SEQ ID NO: 6816 - protein, 214 aa, Cytophaga hutchinsonii
MSKTWEKIFYVGCFIAQGSSYISANAYGKLHRLHHAHTDTPEDPHSPQNSSNALMMMWETRNNYIDVYTGKTPVDERFTKNLPDWPVFEKYAHTFYTRFAWIFLYVLFYVEFATAWWMFLFLPVTILMGSIQGVAVNWWAHKFGYVNCKVNNTSKNILPIDVIFWGESFHNNHHANPQNPNNSIKWFEFDSGYQMMRFLNMMRIIKLKPYYSVL

SEQ ID NO: 6817 - protein, 499 aa, Zea mays
MEGAGKDGNPLRNYRIGKTLGIGSFGKVKIAEHISTGHKVAIKILNRRKIRGMEMEEKVKREIKILRLFMHPHIIRLYEVIDTPADIYVVMEYVKCGELFDYIVEKGRLQEEEARRFFQQIISGVEYCHRNMVVHRDLKPENLLLDSKCNVKIADFGLSNVMRDGHFLKTSCGSPNYAAPEVISGKLYAGPEVDVWSCGVILYALLCGTLPFDDENIPNLFKKIKGGIYTLPSHLSGAARDLIPRMLVVDPMKRITIREIREHDWFKILLPRYLTVPPPDSAQQVKKVDEETLREVLGMGYDKNLLVESIQKRLQNEATVAYYLLLDNRLRTTSGYLGAECQEAMDSSFSNIASYETPSSARGNRQQIFMESPVGLRPHLPAERKWALGLQSRAHPKEIMSEVLKALQELNVYWKKIGHYNMKCRWSPGFPAQIHNNHNFSAGSIETDSLSERLSLIKFEIQLYKTRDEKYLLDLQRVSGPQLLFLDLCAAFLTQLRVL

SEQ ID NO: 6818 - protein, 561 aa, Bacteroides fragilis YCH46
MKKFLNRRNGVLLAAVLVAVAFFSFKSGDDRNFQIAKNLDTFNSIVKELDMFYVDTLDPNKTVREGIDYMLSSLDPYTEYYPEDDQAELQQMLNASFGGIGSLITYNQKLKRSMIAEPFEGTPAAKVGLKAGDILMEIDGKDLAGKNNQEVSQMLRGAVGTSFKLKVERPDEKGGTRPLEFDIVRQTIQTPMIPYDTIFNKNVGYINLSTFSGTPSKDFKKTFLKLKKEGITSLVIDLRGNGGGRLEEAVEIANFFLPRGKVIVTTKGKTKQASNTYKTLREPLDLDIPITVLVNGATASASEILSGAFQDFDRAVIVGSRTFGKGLVQTTRPLPYGGVMKLTTSKYYIPSGRCVQAIDYKHRNEDGSVGTIPDSLTTVFHTAAGREVRDGGGVMPDIEVKQEKLPNILFYLVRDNLIFDYATQYCLKHPSIPSPQEFKVTDADYNDFKAMVKKADFKYDQQSEKIMKTLKEAAKFEGYLDEASEEIKALEKKLTHNLDRDLDYFSKDIRSMIADEIIKRYYYTRGGIIQQLKDDDGLQAALKILADPVKYKETLSAPVKK

SEQ ID NO: 6819 - protein, 608 aa, Legionella pneumophila subsp. pneumophila str. Philadelphia 1
MFVRICAMFGFVSDLLTAAVSSLDELLQDTPAHQIILGTAALYFLYNQYHNPSISRWYRSRNNASMKQRIIDSAYALAKNLPGVNQIIEKELNKELSSTREKLRIQRSGMTLREEIPEEGLSPQDILSAFDVDVEKCHFDFLSVTNDSPEREFLVERGDGKDSGALYAIHPKELTELLKEVYGATALTNPLHDKWPRINAMQAEVIRWCQNLFHGSKECYGLLTHGGTTSIIEAMAAYVIRARAKGIDYPEIVVPETAHAAFKKAAELTGAILITVPVDKKTGAVNPKVMSSYITRNTAVIVGSAPSFMNGIHDPVSELGQLAKKKNVPFHVDACLGGFLTAFLDTSSEPMDFRVPGVTSISADLHKYGCCPKGTSVCLFSEDSPALSVYAALNWSGGLYATPGILDGSTSGARVAEVYATLSYYGKNKYQEIAKSIITLRNAIQKELTTLLEEGNGLTSEDIYVYGNPQWSILGFRSNTCNAHFIADELEKRGWKLNLLQNPDGFHLCLTHVHTLVKGFETQFIKDLREAVIDVKNYPPGKKPSGNVKVYGAVGMMPIELQREICKQYQKARLNYTSASPGSLRIFTNVPVEEDEGLRNRKTEKYKV

SEQ ID NO: 6820 - protein, 813 aa, Rhodobacter sphaeroides 2.4.1
MIAEKSERFFPFAVSAELAPVGVSAAERSALADYLESSETLLTERVVAYASTRSYSHLVSTLPEAWRSSVQGLTDSVILMLDHQSAEAAIDYDADIGTDPSTAYGIEAGLRHRLRGISLETFIGAFKGYRDVYLNVTAEARVPAAMREGWLRLLRGFFDRAEIGICAHWSGELGTLDHDQLLSVNRALVNEKNKYLTIFESMNNPVLLVDDGGRIENMNFAAARLFLQDALPGSVYYGPEANLRFADLAGFDLEAVKLRGEAGDVLTCIGERWYSITAQEMLDVSRKFVGIVVTFHDVTEARRAREQAEALARAKTDFLATMSHEIRTPIHSIGGVTELLKQSELASRDRGYVDAIERSTEVLASIVSDVLDYARIESGLVELEQVDFSIDQILDDVARMMQPLVRRKPQLRIVIERTDLPPVLGDAGKLRQILINLTSNAVKFTPEGTVVIGAERLAGGHRFRFTVSDTGPGIAAEKLEEIFKPYIQSDSSISRRHGGTGLGLAICRRLAGHLGGRLDVRSTPGFGSRFTLEVALAPGGSEPPGDATADAPPPARALDLLVVEDDEVNALVAQSLLSAAGHGVRVAGTGEAALVALGEHRFDLVLTDLNLPDMDGLELARTIRRHADRHTAELPLVALSAHGPGVDPAALTEAGIDAFLGKPFHFARLEEILSRLVGSSSPTPLGKAAPARRALQSVDLCVLRGHAEALGRTSAARIVQTFRQSVLETARALELAMDEADMRSVTSLAHRLKGAARHLGFRGLSDKAEQVETAAAADGCEAALVLELVSDCRAAPALADLAWAEASAGVAES

SEQ ID NO: 6821 - protein, 1091 aa, Oryza sativa
MSSSRPTQCSSSSSRTRQSSRARILAQTTLDAELNAEYEEYGDSFDYSKLVEAQRTTGPEQQARSEKVIAYLHHIQRAKLIQPFGCLLALDEKTFNVIALSENAPEMLTTVSHAVPSVDDPPKLRIGTNVWSLFTDPGATALQKALGFADVSLLNPILVQCKTSGKPFYAIVHRATGCLVVDFEPVKPTEFPATAAGALQSYKLAAKAISKIQSLPGGSMEVLCNTVVKELFDLTGYDRVMAYKFHEDDHGEVFAEITKPGLEPYLGLHYPATDIPQAARFLFMKNKVRMICDCRARSIKIIEDESLHLDISLCGSTLRAPHSCHLQYMENMNSIASLVMAVVVNENEDDDEVGADQPAQQQKRKKLWGLLVCHHESPRYVPFPLRYACEFLAQVFAVHVNKEFELERQVREKSILRMQTMLSDMLLRESSPLSIVSGTPNIMDLVKCDGAALLYGGKVWRLQNAPTESQIRDIAFWLSDVHRDSTGLSTDSLHDAGYPGAAALGDMICGMAVAKINSKDILFWFRSHTAAEIRWGGAKHDPSDKDDSRRMHPRLSFKAFLEVVKMKSLPWNDYEMDAIHSLQLILRGTLNDDIKPTRAASLDNQVGDLKLDGLAELQAVTSEMVRLMETATVPILAVDSNGLVNGWNQKVAELTGLRVDEAIGRHILTVVEESSVPVVQRMLYLALQGKEEKEVKFEVKTHGSKRDDGPVILVVNACASRDLHDHVVGVCFVAQDMTVHKLVMDKFTRVEGDYKAIIHNPSPLIPPIFGADEFGWCSEWNAAMTKLTGWHRDEVINKMLLGEVFDSTNASCLVKNKDAFVSLCILINSALAGDETEKAPFSFFDRNGKYIECLLSVNRKVNADGVITGVFCFIQVPSHELQHALHVQQASQQNALTKLKAYSYMRHAINNPLSGMLYSRKALKNTGLNEEQMKEVNVADSCHRQLNKILSDLDQDSVMNKSSCLDLEMVEFVLQDVFVAAILSDFLFVSVKFSPVGGSVEISCSLTKNSIGENLHLIDLELRIKHQGKGVPADLLSQMYEDDNKEQSDEGMSLAVSRNLLRLMNGDVRHMREAGMSTFILSVELASAPAK

SEQ ID NO: 6822 - protein, 198 aa, Selaginella serpens
DEHGEVVAEIRRSDLEPYLGLHYPATDIPQAPRFLFMKNRVRMIADCSATAVRIVQDKDLRQPISLAGSTLRAPHGCHGHYMGNMGSIASLVMAVIINDSTMISSGTAAGRASSSAAPSTWRKLWGLVVCHHTSPRTVPFPLRSACEFLMQVFGLQLNTEVELASQLREKHILRTQTLLCDMLLRDAPIGIVSQSPNI

SEQ ID NO: 6823 - protein, 550 aa, Burkholderia mallei
MAAKDVVFGDSARAKMVEGVNILANAVKVTLGPKGRNVVLERSFGGPTVTKDGVSVAKEIELKDKLQNMGAQMVKEVASKTSDNAGDGTTTATVLAQSIVREGMKYVASGMNPMDLKRGIDKAVAAAVEELKKISKPCTTNKEIAQVGAISANSDSSIGDRIAEAMDKVGKEGVITVEDGKSLADELDVVEGMQFDRGYLSPYFINNPDKQVAVLENPFVLLHDKKVSNIRDLLPVLEQVAKAGRPLLIIAEDVEGEALATLVVNNIRGILKTVAVKAPGFGDRRKAMLEDIAILTGGQVIAEETGLTLEKATLAELGQAKRIEVGKENTTIIDGAGEAVNIEARVKQIRTQIEEATSDYDREKLQERVAKLAGGVAVIKVGAATEVEMKEKKARVEDALHATRAAVEEGIVPGGGVALIRARTAIASLTGVNADQNAGIKIVLRAMEEPLRQIVTNGGEEASVVVAAVAAGKGNYGYNAATGEYVDMVEAGVVDPTKVTRTALQNAASVAGLLLTTDAAVAELPKEDAPMPGGMPGGMGGMGMGMGMDM

SEQ ID NO: 6824 - protein, 266 aa, Brassica napus
MHIYIKERKLQSNKNKMGRGRVELKRIENKINRQVTFAKRRNGLLKKAYELSVLCDAEVALIIFSNRGKLYEFCSSYNMIKTLERYQKCSYGSIEVNNKPAKELENSYREYLKLKGRYEGLQRQQRNLLGEDLGPLNSKELEQIERQLDGSLKQVRSIKTQYMLDQLSDLQTKEQMLLETNRALAMKLDDMIGVRSHHMGGGGGGWEGNEHNVSYAHHQAQSQGLFQPLECNPTLQMGYDNPVCSEQITATTQAQAQPGYIPDWML

SEQ ID NO: 6825 - protein, 754 aa, Prochlorococcus marinus subsp. pastoris str. CCMP1986
MKETIQADWIKSEAFNLENCCNDNPLNILGPHFVNGQWITRVWMPEADEVNIIFKDKTYKTTTLNHKWLFEVTLPEDPKNNYQINVSRGGVSHSQQDPWAYRKEWMGELDRHLFAEGNHHHIWEKMGAHIHEETNQQGVMFCIWAPNAKSISIIGDINSWDGRHHPMQKRLGGIWELFMPIMKEGDAYKYEIRTQEGHIYEKADPYGFLHEIRPQNGSIVSKLNNFDWEDSSWITNRDSSSQINKPISVYEMHLGSWMHDSIENKYIEKNGQTRSPVPAADLKPGTRFLTYPELTEKLIPYVKERGFTHIELMPISEHPFDGSWGYQVTGWYAPTSRYGTPNEFKEFINRCHAEGIGVILDWVPGHFPKDKHGLAFFDGCHLYEHGDPRIGEHKEWGTLIFNYSRNEVRNFLVANLIYWFEEFHIDGIRVDAVASMLYRDYLRPEGEWIPNENGGNENLEAVKFLQQANHVLFQHFPGALSIAEESTTWPMVTEPTNVGGLGFNLKWNMGWMHDMLDYFEIDPWFRQFHQNSVTFSITYNYTENFMLALSHDEVVHGKSHLLHKMPGDDWKKFANTRALLTYMWTHPGKKTIFMGMEFGQRQEWNVWDDLQWELLEFEPHKGIRNLVDDLNKLYKNEPSLWKNDFDPYGFQWIDCNDTSNSVISFMRRENESNEWLVIVANFTPNFHGSYKIGVPLEGFYKEIFNSDGSKYGGSNKGNMGGKETLKYNIHNYENALEIVLPPLSVSIFKHQLKQ

SEQ ID NO: 6826 - protein, 108 aa, Oryza sativa (japonica cultivar-group)
MAEEAQQPRGVKVGGIHDAPAGRENDLTTVELARFAVAEHNSKANAMLELERVVKVRQQVVGGFMHYLTVEVKEPGGANKLYEAKVWERAWENFKQLQDFKPLDDATA

SEQ ID NO: 6827 - protein, 634 aa, Bacillus clausii KSM-K16
MCGFVGDLLIRNGSHLPDHLWIQTLEAIHHRGPDSTGTYKDETVRFGFKRLSIIDLEHGDQPLAYSKGRYHIVFNGEIYNYIELRSQLIQRGYTFRTDSDTEVLLALYAADGKNAVKQLRGMYAFAIWDKHKKELFCARDRFGIKPFYYLKTDERFFFASEQKSIMPLLEQISIEQEALQHYATFQFVPEPNTLTKGIHKLLPGHTLTVNADFCVQIEAYAERTFQPRSGPTVTELANQTRKLLTDSVEKHMRSDVPVGAFLSSGIDSTSIAALAQQVHPNLLTFTVGFETEGYSEIAVAKETAKALGVKNIHKVISADEFIQELPNIVWHMDEPVADPAAVPLYFVAQEASKHVKVVLSGEGADELFGGYNIYREPLDLAWFKKLPPTFHAGLKRVVAHMPSKLKGRNYIIRGTTPLNERYIGNAFIFSEKEKTQLFRDYDRTKPYTNVTAPLYEQAKGMDESTIMQFVDMHTWLPGDILVKADRMTMAHSIELRVPFLDKDVFAFARMLGQDMKLSHKTTKFVLRQAMKDLIPANIVPRKKLGFPVPIRVWLKNELYDWAKQLIESSNTEDVFHKPFLLQMLQAHRDGHGDYSRRLWTVLTYMMWHDIHVAKRLISTHQQKDAERCKTLAHF

SEQ ID NO: 6828 - protein, 489 aa, Bacillus cereus G9241
MPQDRKEEVQNDTYEEKEIMPDNPQYLPRRVQMELPPEFSINPLFARKGESVVPRFNMPDEGMLPETAYQIVHDEITLDGNARLNLAMFVSTWMEPTAERLYAKSFDKNMIDKDEYPQTAEIEERCVRILANLWHSPSPLTTMGVSTTGSSEACMLGGLALKRRWQNARKREGKSVDRPNIVFSSAVQVVWEKFANYWEVEPRYVKVSPEHSLLDPQGVIAAVDENTIGVVPILGETYTGRYEPVAAIAKALDDLQERTGLDIPMHVDAASGGFIAPFLQPDLVWDFQLPRVKSINVSGHKYGLVYPGLGWIIWREADDLPEDLIFRVSYLGGNMPTFALNFSRPGAQVLLQYYNYLRLGKRGYYDVQRASQKVALFLSKAIQKMEPFELLSNGSDIPVFAWRLKNGHTSNWNLYDLSRQLRVFGWQVPAYPLPPDLEAVTIMRVVVRNGFSVDLAHLFLRNLKQAVAFLDSLDGPMPHDTKCDNGFHH

SEQ ID NO: 6829 - protein, 1391 aa, Mesorhizobium loti MAFF303099
MAEADEAIGARGKRGPDKPVHRGDAPPCADRDSPDALRQLLEAGSDWIWETDAELRFSWLSPTYQAATGIDPADVLGRFRFDFLNQDLKGSRSAAAHLEDLQARRPFRDFVYELKAGGADCRWVLTSGFPRFDNEGKFAGYRGIGRNVTTLAGAFETVEQNPLSGSDPDRHLADLERTMDAMHMGVVLLDAKLDTLIVNKAYRDLSSIPDGAVTVGAPFSRLMELNRRNGIYGDIDEQQWQRYLASRIEEIRAGSVAPREFVHASGRTMMFSVTALSGGKRLLTYYEVTELKRRDAEIESANAKIAETFVNLRTMVDEMPIGVLVLDADMRAEVINSAFYDFWRIDPGRAGIGSAFRELMEASRAIDPYGADELAWQRHTTEREAEIRAGVAGSKQLPHNDGRTLVASLAPLPGGKRLISYVDVTDMKGRETEAQDARKHLASVLESLPAGVIIYDRDDKFVFANRKLQDTLPALKPFWQPGCSFREALEFGQSIGYFRSSGDAGIDRLYEVEPEHWLDSMLARYRLPNSSYERLNADGRWYQVYDMRTDDGTFIGVRVDITDIKSREAALRDSMRQIDLFRHVMDELPVAAFIKAQDLSIEFVNKAWCALTGIAKEDVIGRTDRELFGTQDAEGYSHDDTQVVVTGKGIEVEEPVTHRDGTVRQLMTRKSRLVATDGSVHLVGSSTDITDVKAREKALEESMRENEVFRSLIDNVPVSIYAKRSDLRQFYVNKGWCDLTGLSREDAIGKTDIEIFGEDGEAFVAGDLAVLRTGETQEVEETVRLADGSVRHQFARKGAMIASDGSLYLIGSTTDITELKMREAELSEARQRAVLADRAKSEFLANMSHEIRTPMNGVLGMAELLAKSNLDPKQKTFTDIIVKSGNALLTIINDILDFSKIDAGQMVLDPAPFNLAEAIEDVATLVSTRAKEKDLELIVRVEPRLESLFVGDVGRIRQIVTNLLGNAVKFTDEGHVLVDVTGERVPTGTRLTISVTDTGIGIPEEKLKLVFEKFSQVDTSSTRRHEGTGLGLAITSRLVELMGGTIGVESAEGKGSTFWFTVTLPRAGQQNGQRIMPVDVTGARVLIVDDNAVNRAILTEQMTSWTFDSCAAESGAEGLKVLIAAAAYGVPVDCVVLDYQMPEMSGAEMARIVRNTGGLADTPIIMLTSVDQSLANTSYRDLGIDAQLIKPARSSVLLETLVATIQRHRHATDSHAVQPLAAERPDVPQPPPLALSEQRAQLQPPPVRPRLPATGGDGHRLDILVAEDNEVNQMVFTQILGETGYGFEIVGNGRKALDAFGKLNPCMILMDVSMPEMSGLEATAAIRQLEQQTGTHVPIVGVTAHALKGDRERCLEAGMDDYLPKPISPRALLEKVERWLGAGRQVQRNAG

SEQ ID NO: 6830 - protein, 470 aa, Leuconostoc mesenteroides subsp. mesenteroides ATCC 8293
MVSVMWFRRDLRLEDNIALFNALRHSNEILCVFHINPEQVTEKSTVNQSAFFASVLYFKNKLKKQGINLNIMYGDINDCFASLKQKLPDWHDIFFNFDERGFGRNRDQKSVAFFEDKLKVKAHPYIDYNLHGATEVKKDSGAGYKVFTPYFKRWIRQEKPAPVSYVIDKRIKSARLLFPENEQLLETFIDDRFSFIKKDLGSETAKKVLNRFINESLDQYDEERDFPANDSTSHLSRYLRTGEISIRTVWRAIDQSPDSDGKSTFMKELCWRDFYNMIYVMYPNQNVESVNKDFRHVDWINNEQQFEAWRTGQTGFPIVDAAMRQLNATGWMHNRLRMIVASFLTKDLLIDWRWGEAYFHNKLLDYDAASNIGGWQWAASTGTDSVPYFRIFNPTLQSKKFDSNGLFIKKYVPELKNVDNKMIHEPGKLSESEQTRFNVRIGQNYPFPIVDHSYARKRAISIYESSKDVN

SEQ ID NO: 6831 - protein, 116 aa, Carboxydothermus hydrogenoformans
  misc_feature (9)..(9): Xaa can be any naturally occurring amino acid
NPLTLQDFXPAGGIFEEGADVVVRAEIPGLNAKEDLEVIVEPESLTLRGEIRDERERKQERFYRSERYYGKFSRTIALPAEVEPDHARASYQNGILEVRMKKSGKNNPRARRIEIQ

SEQ ID NO: 6832 - protein, 277 aa, Staphylococcus aureus subsp. aureus Mu50
MEVKTFYNGNTMPQIGLGTFRVENDENCMESVKYAIEQGYRSIDTAKVYGNEEQVGAGIRAGLESTGIAREDLFITSKLYFEDFGRENVAAAYEASLSRLGLKYLDLYLVHWPGTNEAVMVDTWKGMEDLYKNNKAKNIGVSNFEPEHLEALLAQVSIKPVINQVEYHPYLTQHKLKLYLAAQHIVMESWSPLMNAQILNDETIKDIAQELGKSPAQVVLRWNVQHGVVIIPKSVTPNRISENFQIFDFELSDEQMTRIDGLNQDKRIGPDPKTFEG

SEQ ID NO: 6833 - protein, 118 aa, Brassica napus
MEFVRFPIVSILDDMREVPEEHNEKSRISPSRAYMRDAKAMAATPADVIEHPSSYVFVVDMPGIRGEDIRVQVENENVLVVSGERQRENKENEGVKYVRMERRMGKFMRKFQLPENAD

SEQ ID NO: 6834 - protein, 704 aa, Pseudomonas syringae pv. phaseolicola 1448A
MRYQLSSRRISMKQLFPSTALALFVGLSVLPMSASTFAANSWDNLQPDRDEVIASLNVVELLKRHHYSKPPLDDKRSAIIYQSYIKQLDPSRSYFMASDIAEFDKWQFQFDDFLKSGDLNPGFTIYKRYLDRIKARLDFALAELSKGVDKLDFNTKETLLVDRKDAAWPKDTAELDELWRKRIKDEVLRLKIAGKDPAKIQETLTKRYKNQQARLNQTRAEDIFQAYINTFAMSYDPHTNYLSPDSAENFDINMSLSLEGIGAVLQSDNDNVKIVRLVPAGPAAKTKQVAPADKIVAVAQGDKEMVDVIGWRLDEVVKLIRGPKGSVVRLEIIPASNAPNDQTSKIVAITREAVKLEEQAAKKSILHLKQDGKDYKLGVIDIPAFYLDFKAYRAGDPEYKSTTRDVKKLLTELQAEKVDGVVLDLRNNGGGSLQEATELTSLFIDKGPTVLVRNADGKVDVLEDEAKGAFYKGPMALLVNRLSASASEIFAGAMQDYHRALVIGGQTFGKGTVQTIQPLNHGELKLTLAKFYRVSGQSTQHQGVVPDITYPSLIDTKEIGESALPEAMPWDSIKPAIKPAIDPFKPFLAQLQARHEARSAKDAEFVFIEDRLALAKKLMNEKTVSLNEADRRAEHASIESKQLALENTRRKAKGEEPLKELKKEDEDALPVEDEKTKPEDDAYLAETGRILIDYLGLSAAVAKK

SEQ ID NO: 6835 - protein, 765 aa, Synechococcus sp. CC9605
MGVAAVLDWLVQDGERLASCRHDHPFAVLGPQASDQGWTVRMWMPEAQSVSLLQAGEEIAMTTPNHPWVFEAQVSQDPGCHYRVKVERGGIVHEQHDPWAFRGEWMGEMDRHLFAEGNHHHIWQKMGAHLTERDGITGVMFCLWAPNALSVSVIGDLNSWDGRHHPMQQRVGGIWELFVPGLEEGHLYKYEIRTQDGHCYQKADPYGFQHEVRPDNSSVVARLNGFQWSDQTWMQKRDSSNALDQPISVYEMHLGSWIHASADEPWIQPDGTPRPPVPAADMKPGARLLTYAELADRLIPYVKDRGFTHIEVMPITEHPFDGSWGYQVTGWYAPTSRYGTPDEFRAFVDRCHAEGIGVIIDWVPGHFPKDAHGLAFFDGAHLYEHSDPRIGEHKEWGTLIFNYSRNEVRNFLVANLIFWFEQFHIDGIRVDAVASMLYRDYLRPDGEWLPNESGGRENTEAVRFLQQANHVLFQHFPGALSIAEESTTWPMVTQPTDSGGLGFNLKWNMGWMHDMLDYFELDPWFRQFHQNNITFSIWYTYTENFMLALSHDEVVHGKSHLMHKMPGDDWQKYANTRALLSYMWTHPGKKTIFMGMEFGQRAEWNVWGDLQWDLLNYEPHKGIQRLVDDLNVLYKAEPALWRDDFDQFGFQWIDCNDNRHSVISFMRRESASGTWLVVVANFTPQSHSHYRVGVPLSGFYEEIFNSDAAKYGGSNLGNMGGKPTDEWGIHGYENSLDLCLPPLSLMVFKHDPKRSLNSSEPDNIV

SEQ ID NO: 6836 - protein, 279 aa, Streptococcus pyogenes MGAS8232
MVTTVKMTSGYEIPVLGFGTYQAADGEEAYQSTLAAIKAGYRHIDTAAIYKNEESVGRAIKDSGVLREDLFITTKLWNDAHSYEGAKDALAASLDHLGLDYVDLYLIHWPNPKALRNTWKEANAQAWQYMEEAVEAGLIKSIGVSNFMVHHLEALQETAKITPAINQIRLAPGCYQKEVVDYCKANEILLEAWSPLGQGEIFDNETMQQLANKYDKTVAQVALAWSLAEGFIPLPKSVHDERIKENMAIFDVSLTQEDKKTIRYLSGMSAIPNPDTTSF

SEQ ID NO: 6837 - protein, 169 aa, Stigmatella aurantiaca
MADLSVRRGTGSTPQRTREWDPFQQMQELMNWDPFELANHPWFANRQGPPAFVPAFEVRETKEAYIFKADLPGVDEKDIEVTLTGDRVSVSGKREREKREESERFYAYERSFGSFSRAFTLPEGVDGDNVRADLKNGVLTLTLPKRPEVQPKRIQVASSGTEQKEHIKA

SEQ ID NO: 6838 - protein, 219 aa, Triticum aestivum
  misc_feature (169)..(169): Xaa can be any naturally occurring amino acid
  misc_feature (196)..(196): Xaa can be any naturally occurring amino acid
MGSEGPSIVTVHVTGFKKFHGVAENPTEKLVTNIKSFIEKRGLPKNLVLGSCEILETAGQGALGTLYKVLESAIADRENGSSAQGQIIWVHFGVNSGASRFALENQAVNEATFRCPDELGWKPQRVPIVPSDGSISRTRETTLPVKELTKSLRKTGYDVMPSDDAGRFXVCNYVYYHSLPVRGSQHGIKSLFVHVXPLFSTVDEEVQIHFVASLVEALG

SEQ ID NO: 6839 - protein, 545 aa, Campylobacter lari RM2100
MAKEIFFSDEARNKLYEGVKKLNDAVKVTMGPRGRNVLIQKSFGAPTITKDGVSVAKEVELKDSLENMGASLVREVASKTADQAGDGTTTATVLAHAIFKEGLRNITAGANPIEVKRGMDKACEAIVAELKKLSREVKDKKEIAQVATISANSDEKIGNLIADAMEKVGKDGVITVEEAKSINDELNVVEGMQFDRGYLSPYFITNTEKMTAELQNPFILLFDKKIANLKDLLPILEQIQKTGKPLLIIAEDIEGEALATLVVNKLRGVLNISAVKAPGFGDRRKAMLEDIAILTGGEVISEELGRTLESASIQDLGQASSVIIDKDNTTIVNGAGEKANINARINQIKAQIAETSSDYDREKLQERLAKLSGGVAVIKVGAATETEMKEKKDRVDDALSATKAAVEEGIVIGGGAALIKAKSKISLNLQGDEAIGAAIVERALRAPLRQIAENAGFDAGVVVNTVENSKEENTGFDAAKGEYVNMLESGIIDPVKVERVALLNAVSVASMLLTTEATISEIKEDKPAMPDMSGMGGMGGMGGMM

SEQ ID NO: 6840 - protein, 707 aa, Gibberella zeae PH-1
MASIVKNSSNSLDPNQANGAAGDIPNDGTGVVKLDPWLEPFSGALKRRYSKAQDWIKTINAAEGGLEKFSRGAEKFGFNVDANNNIVYREWAPNATAAYLIGDFNGWNRGAHPMKKNDFGVFEITLPAQNGQAAIPHNSKLKISLDLPSGEHVDRLPAWIKYVTQDLSVSPAYDARFWNPPASETYKFKNSRPKKPASARVYEAHVGISSPEQKVASYKEFTKNMLPRIKALGYNVIQLMAVMEHAYYASFGYQINNFFAASSRYGTPEELKELIDTAHGLGITMLLDVVHSHASKNVLDGINEFDGTDHQYFHGGGKGRHDQWDSRLFNYGHHEVMRFLLSNLRFWMDEYQFDGFRFDGVTSMLYVHHGMGTGFSGGYHEYFGSDVDEEAVVYMMLANEMLHQLYPEVITIAEDVSGMPALCVPLSLGGIGFDYRLAMAIPDMWIKILKEVKDDEWDIANICHTLTNRRHGEKTIAYAESHDQALVGDKTLMMHLCDAEMYTHMSTLSPLTPVIDRGMALHKMIRLVTHGLGGEGYLNFEGNEFGHPEWLDFPREGNNNSFWYARRQLNLTDDPLLRYKFLDNFDRMMNQTEAKYGWLSAPQAYISLKHEGDKVIVFERAGLVFIFNFHPTNSFSDYRIGIEVPGTYRVVLNSDHGDVGGHNRIDENTRFFTTPMEWNNRKNWTHVYIPSRTAIILALESTVTQSS

SEQ ID NO: 6841 - protein, 210 aa, Parachlamydia sp. UWE25
MFIQPFPSGPFSTNAYLIACLSTQKAIIVDPAPESANLLLDCLRKHHFILQSILLTHSHWDHIADINSIKKLYDIPIYVHPLDQLNLEKPGSDGLPCWLTIQPVKANIFLNDGDLIPVGQLTFKVIHTPGHSPGSVCFYEISQSKLLSGDTLFKGSIGNISFPTSQPDLMWTSLDKLAQLPPSTSVYPGHGPMTTIGNENWLPKAKQLFQ

SEQ ID NO: 6842 - protein, 1048 aa, Magnaporthe grisea 70-15
MTTAISSNHEPPYPPSSGDRGQAYPPVSRSQSTRHRPSTAQPPAPHRSVSHNHSGSMSSRPSSSARPVQDVLPNNDYETTNVAQKATKDSRPPQSSRDTATRQHRRSGSQRSGHHGHDGNAEAGPSTPSQASHGSSDPRTRKMRTVIPAQSGKWNLGKTIGAGSMGKVKLARKEDGTEQVACKIIPRVTPDDGHTPRAERERADLSKEVRTAREAAIVTLLSHPHICGLRDVVRTNFHWYMLFEYVNGGQMLDYIISHGKLKEKQARKFSRQIASALDYCHRNSIVHRDLKIENILISKTGDIKIIDFGLSNLFAPKSHLKTFCGSLYFAAPELLQARPYTGPEVDVWSFGIVLYVLVCGKVPFDDQNMPALHAKIKKGVVDYPNWLSSECKHLLGRMLVTDPKQRITMAEILSHPWMVKGYSGPPENYLPNREPLTLPLDQEVINGMTGFSFGPPEVIKAQLTRIIESEDYQRSIRAYQREKETQQTPKDPEKKRGFGFYRRRNSFSSKDTLTTPSSEGLALGNDPLNAFNPLVSVYYLVREKQEKDSASRRPATSARPNAVPEIAPPQEAHTNASAYEMPGENATGGRTRPRARTHGEDDAPTEPIRPPQLSPPAAPPPERLEPPKKESAAAGLLRRFSTRRRKEQPERLDKDRSHPPVVQVHSPAENSSQPTSAIRKSFSIRRGRRDREEQASAESQARMRAGSSQPQHSDLLSPPLSAGANTQTFRKGLGRSASVNSGEFSRRRAMGTARTSKDPPPTSGSDHSTIHEKPPKEQQEKRSPTTAGPSQSMTSRAKSLGHARQESIQARRQRREAEKKREANVPEETDAEVNGADDSSKERVTDFDLDKPVYLKGLFSVSTTSGKPVREIRTDIKRVLKQLGVDYTEIKGGFYCRHSPSIDLQNVADNGAASPAQTPSGAKRRFSFGALRSDGKEESNGERVPVTPRTPGRSGGGSGTDRDRHDSSSEVSENSEAREETSRRRDHPAGETRTHVRSDMGESMVSEFEIFIVKVPMISLHGIQFKRLGGNTWQYKNLADQILKELKL

SEQ ID NO: 6843 - protein, 557 aa, Parachlamydia sp. UWE25
MAKLLQFNEEALKSILKGVKTLAKAVKVTLGPKGRNVVINKGFGSPLSTKDGVTVAKEVVLKDKFENMGAQLVNQVAAKTSDVAGDGTTTAIVLAEAIYSAGVKNVAAGANPMSLKRGIDQAVETITRSLDHLSTPVNTAQEVRQIATISANNDGEIGRIIGEAMERVGKDGIITVAEAKGIETHVDYVEGMQFDKGYVSPYFITNAEQMSVELSNADILITDKKLSAAKDIIPVLEKIMEKGARPLLIIAEDIDGEALATLVVNKLKAGMTVCAVKAPGFGDRRKAMLQDIAILTGGKVVSEEVGLKLDEVGPEVLGRAKTIKVSKEETTIIDGAGQSNEVKSRLAQIKAELANASTSKYDKEKLEERLAKMVGGVAVVNVGAATETELKEKKARVEDALHATRAAVAQGIVPGGGVALLRAVKSLEKLQLTGDEAIGVTIIKQAAFAPAIAIANNCGKQGNLIAEKIYEATGSYGYDGLTDEFKDLLKAGVIDPVLVTKSALINAASIAGLLLTTAAMITDKPQPKSQPAGMPGMDGMGGMGMGGMGGMGGMGMM

SEQ ID NO: 6844 - protein, 1739 aa, Rhodopirellula baltica SH 1
MSDPQPESKPLVVGVGAGAGGIEALQELLASLGDSPDMAMVFVGHDASELHATRIEQLADATSLRVVELKSRKLIRPNTVYICPPNSLLSISSGSRLMLKPATEESPATPIDHFFHAIAETQGEQGIGVILSGMGTDGTLGLKSISDAGGMTFSQISSSAKFDSMPRNAATTGVADHVLTPKEIANELNDYVVYRKQQSNRLTRESMLEEIERSIPEIADVLYKATKHNFKHYKTATLTRRILRRMQILQISDVATYLGRLRDDQDETQNLFRELLIGITAFFRDPESFKALAEEVIPQLFEGRTASDPVRIWVPGCATGEEAYSLAILCYEHLDRLKTQRDDDHAKDSLPTFQIIASDIDEHALAIARQGVYPLGITESIPETRLKQFFVKRGKRYHAKRNLRESILFSLHNLISDAPFSRQDLISCRNLLVYLGPHLQKKLIPLFHYALRPNGHLFLGPSESISSHDELFRTVDAEHRINQRKGTETVTDTADSRGFVSATEATQTAAIVPNEEDTKEIHQVLQRIILDEFAPKAVVVDVDGKVICTLSDTSPYLSSGEGMHQNNLIKMAHVHLRIGLRGAFAEAKANRRRVVRDDLLIMSESGQQRVKLTIQPMMQLGHETELFMVAFEDLGPSIAPSDSSTDDSIGSDPSIAADPHAQQRIEQLERELATTRDDLDRSIQEMEATNEELTSSYNELLVMNQGLQTANEKLEISKEEIRSSSEAVARANADLQNLLRSTRIATIFLDDDLSIRSFTPAATEIYGLIATDVGRPLTQIAPNVQDMPPLPKWELLIQEDGVEHTIVANTGKAFIRRVLPYRSYSGDHDGIVLTFTDVTQLRESEELFQSLVRASAQIVWIANADGVVESDSPSWREYTGQTLEQWVGLGWLDVIHPDDRELTQKVWTDAVAKDRPLVLEYRLRNRHGEYRWFQVRTAPQRRPDGTVNRWVGMNIDIHDQKQSRLELADREAHLRRVINNQLGLVGVIDRNGLLLEVDDRSLEYARVNRHEVIGKPFHEAPWWNYDPNVAQQMRDAMERAFKGEPVRYDVSLFAHGDDGVLIDFMIAPVFDDDGNIEYLIPSGVDIRDRKKAELKQQEVAVRLEAIFNTAVDGIITIDRRGTINSVNVAAAKIFGYGVDELTGSNINALIPEPEHSEHDGYLKAYEETGQSHIIGHQRQVTGRRKDGSTFSLDLSVSETSLSGEHRYVGIVRDVSDRVRSEQAKKNASRRMQMALRAGGMAAWEWTPKKSYWTKEMYELFGVTDDRKGSPELCFSLTHPDDVESLKRHWQEAIEGNQDYEYEFRIVRPDGEMRWITGMGEVVRGKSGNVTRMYGVNWDSTQEHVQAETLRESERRANEASASKSAFLANMSHEIRTPMTAILGYAELLQDIIQDTEGLHHLQTIRRNGDYLLDIINDILDLSKIEAGKLDVESERFDPAHLIEDVRSIMEVRAKEAGLELTVEYGQQIPASIQSDAKRLKQVLINLVGNAIKFTPEGNVRLVVRMESEPIRLCIDVIDTGIGITPEQQEQLFLPFSQGDSSVNRTFGGTGLGLTISRRLAEMLGGTIHFQSEVGVGSTFTLSVFPGDLTGVAMVDHSQPVSKLVDDLENSSTTPIKLNCYALVVDDRRDIRFLSRRILTKAGATVDECEDGLQAVDKIIESMKARRLPDVIILDMQMPKLDGYATAKKLRELGYDAPIIALTADAMQGDMNLCLKAGCNDYLSKPIDAAKLVALVSKLT

SEQ ID NO: 6845 - protein, 441 aa, Arabidopsis thaliana
MALKALDYDTLNENVKKCQYAVRGELYLRASELQKEGKKIIFTNVGNPHALGQKPLTFPRQVVALCQAPFLLDDPNVGMLFPADAIARAKHYLSLTSGGLGAYSDSRGLPGVRKEVAEFIQRRDGYPSDPELIFLTDGASKGVMQILNCVIRGNGDGILVPVPQYPLYSATISLLGGTLVPYYLDESENWGLDVANLRQSVAQARSQGITVRAMVIINPGNPTGQCLSEANIREILKFCYNEKLVLLGDEVYQQNIYQDERPFISSKKVLMEMGSPFSKEVQLVSFHTVSKGYWGECGQRGGYFEMTNLPPRVVEEIYKVASIALSPNVSAQIFMGLMVNPPKPGDISYDQFARESKGILESLRRRARLMTDGFNSCKNVVCNFTEGAMYSFPQIRLPTGALQAAKQAGKVPDVFYCLKLLEATGISTVPGSGFGQKEGRR

SEQ ID NO: 6846 - protein, 216 aa, Zea mays
MTLTPFEAKRANTSTNTSAEQPSATHTPTRTNQPAGSRFAALTMMPRRALLFAAVLLAASAAAVSGFHLGGDESGLVRGVLAALRERAEAEDAARFAVAHYNKNQGAALEFTRVLKSKRQVVTGTLHDLILEAADAGKKSVYRAKVWVKPWEDFKSVVEFRLVGDSESEPEPSVASDVSSGQAIAKLSLEADIVQEEARLHTIENDGLSGDFTSSS

SEQ ID NO: 6847 - protein, 378 aa, Ralstonia solanacearum
MFQSLFPGAEMTQQLLSPIQVGQTALANRVVMAPLTRSRAAQPGDVPTELNGTYYAQRATAGLIVTEATQVSRQGQGYAWTPGMYTDAQEAGWKAVVDAVHAKGGRISQQLWHVGRISHTLLQEGGQAPVAPSAIVAQGAQSFVVQPDGTPANVPTSEPRALATEEIPGIIAQYRQAVQRARRAGFDFVEIHAANGYLLHQFLSTNSNQRADQYGGSLENRARLILEVVDAAIAEIGAERVGIRLSPHFVAHDIADAEAETSALYLARELTRRGVAYLHIAEPDWAGGPELSDAFRRQLRDAFKGALIVCGQYTAEEGEQMIASGLADAVAFGRPFIANPDLVARFRAGAGLNTPDRSTFYGGQEKGYTDYPTLEEAA

SEQ ID NO: 6848 - protein, 286 aa, Thermotoga maritima MSB8
MQVPKVTLNNGVEMPILGYGVFQIPPEKTEECVYEAIKVGYRLIDTAASYMNEEGVGRAIKRAIDEGIVRREELFVTTKLWVSDVGYESTKKAFEKSLKKLQLEYIDLYLIHQPFGDVHCAWKAMEEMYKDGLVRAIGVSNFYPDRLMDLMVHHEIVPAVNQIEIHPFYQRQEEIEFMRNYNIQPEAWGPFAEGRKNIFQNGVLRSIAEKYGKTVAQVILRWLTQKGIVAIPKTVRRERMKENISIFDFELTQEDMEKIATLDEGQSAFFSHRDPEVVKWICSLKR

SEQ ID NO: 6849 - protein, 527 aa, Brassica napus
MKHLGLILAFLLALATCKADEEITCEENLPFKCSQPDRLNSSSFEKDFIFGVASSAYQACCLGRGLNVWDGFTHRYPNKSGPDHGNGDTTCDSFSYWQKDIDVLDELNATGYRFSIAWSRIIPRGKRSRGVNKDGINYYHGLIDGLIDKGITPFVTLFHWDLPQVLQDEYEGFLDPQIIHDFKHYANLCFQEFGHKVKNWLTINQLYTVPTRGYGAGSDAPGRCSPMVDPTCYAGNSSTEPYIVAHNQLLAHATVVDLYRKNYSIGPVMITRWFLPYNDTDPDSIAATERMKEFFLGWFMGPLTNGTYPQIMIDTVGERLPSFSPEESNLVKGSYDYLGLNYYVTQYAQPSPNPVHWANHTAMMDAGAKLTFRGNSDETKNSYYYPKGIYYVMDYFKTKYYNPLIYVTENGISTPGNETRDESMLHYKRIEYLCSHLCFLSKVIKEKHVNVKGYFAWSLGDNYEFDKGFTVRFGLSYIDWNNVTDRDLKLSGKWYQKFISPAIKNPLKKDFLRSSLTFEKNKKFEDA

SEQ ID NO: 6850 - protein, 245 aa, Glycine max
MRASNSSSSISIAKRYFFFFLLFIFFALRSSSGDCSEYHHHHSPMATIGGLHDSQGSQNSVETEALARFAVDEHNKKQNSLLEFARVVRAQEQVVAGTLHHLTLEAIEAGEKKLYEAKVWVKPWLNFKELQEFKPAGDAPSFTSADLGVKKDGHQPGWQSVPTHDPQVQDAANHAIKTIQQRSNSLVPYELHEVADAKAEVIDDFAKFNLLLKVKRGQKEEKFKVEVHKNNQGGFHLNQMEQDHS

SEQ ID NO: 6851 - protein, 192 aa, Zea mays
  misc_feature (168)..(168): Xaa can be any naturally occurring amino acid
MVLSHAASAGSSDDSVHSTFASRYVRASLPRFRMPENSIPKEAAYQIINDELMLDGNPRLNLASFVTTWMEPECNKLMMDSINKNYVDMDEYPVTTELQNRCVNMIAHLFNAPLGETETAVGVGTVRSSEAIMLAGLAFKRRWQNKMKAAGKPCDKPNIVTGANVQVXCWEKFARYFEVELKEVKLSEGYYV

SEQ ID NO: 6852 - protein, 614 aa, uncultured archaeon GZfos18F2
MAHARLSIIDLAGGDQPIHNEDRSIWIVFNGEIFNYPELRKELKSRGHRFYTRSDTEVLVHLYEDHGPEFIHELNGQFAIALWDVRKKQLLLARDRMGIRPLFYFEKAGRLVFASEIKGLLADDRVPRTLDLKALSDIFTCWSPFGALTPFESVRQLLPGHYAMFSSNGMQIRSYWQPVFSAPPSKERSLDDWTEELNGLLYDAARIRLRADVPVGAYLSGGLDSTYISSLVKRSFNNRLCTFSVGFTDERFDETSFQEKAVQSLETDHRIVRCSERDIGKVFPQVIWHTETPILRTAPAPLFMLSGLVRENNFKVVLTGEGADEVFAGYNIFKEDRVRRFWARQPDSKLRPLLLERLYPYIFSRKNSRTRVFLENFFRKSLIQVDSPCYSHLIRWNNTALLKAFFSDELQAMAGKPPDFEERFISTLPSDFMSWDPLSRSQYTEMTIFLANYLLSSQGDRMAMGHSVEGRFPFLDHRVVEFACSMPPEYRLNGLKEKYILKHASRDLIPPELRRRPKQPYRAPISRCFFGKGSPDYVGELLSENAIRRAGYFHPKKVGRLVDKCQKQEGHLASERENMAVAGILSTQLLDHLFLRNFPPHPIQEPENVRVFGL

SEQ ID NO: 6853 - protein, 672 aa, Rhodospirillum rubrum
MESPLTPPVAPAPRPPLSSLVAAPPAEDPPSARSVAAAPPPAPPVRRLPQGAEVQPGGGVHFRVWAPGRQAVTLCLENGAAIAMTAEDDGSFAALVAEAGAGTAYRYRLEGVEALCPDPLARFQPEGPHGPSLVVDPAGFVWSDQAWAGVSHQGMVLYEMHIGTFTPEGTWAAAMAHLERLRDLGVTCLEIMPIAEFSGRFGWGYDGVNLFAPTRLYGQPDDMRRFVDRAHALGLAVILDVVYNHLGPDGNYLGHFTNDYFTDRYKNDWGVAINFDGPGSAGVRAFYLANAGYWIEEFHLDGLRLDATQQIYDRSEPSILAEIAREVRAAAKGRNTFVVAENEPQEVRLIEDETAQGYGLDALWNDDLHHAAMVALTGRREAYYLDYLGSPQELISAAKWGFLYAGQYYSWQRNGRGTTSFAIPGRAMVAFLQNHDQVANSARGLRLDKLSDEAQFRALTAYLLLIPATPMLFQGQEFRSSAPFYYFADHGPKLAAMVKDGRADFLTQFPSIDQGWRSEDLPDPAAEATFERCKLDHREWQSHAEWVALHRDLLTLRRETPAFAAQDCRRMEGAVLGPQTFVLRFFAEERLSDRLMLVNLGPQITLTPMAEPLLAPPMGKAWTTLWASSDQRYGGAGLTAVERTPLWEIPARTTVVLGPGEKKPFIAPRTSG

SEQ ID NO: 6854 - protein, 480 aa, Lactobacillus plantarum WCFS1
MATTSGLRSDFLWGGAVAAHQLEGGWQAGGKGVSVADVMTAGANGVPREITDGVIAGKNYPNHEGIDFYGHYKEDIKLFAEMGFKCFRTSIAWTRIFPNGDEEEPNEAGLKFYDDMFDTCRQYGIEPVITLAHFEMPYHLVKEYGGWRSRKVIDFFVHYAETVFKRYKNKVKYWMTFNEINNQTTYTNQFLMATDSGLVLKPDDPDAEALMYQAAHYEVVASALAVKIGHAINPDFQIGNMINMTPIYPATAKPQDIMQAEKAMQRRYWFADVQSWGYYPNNMEAYFKQTGFRPDITAEDRQVLKEGTVDYIGFSYYNSNTVAAQDDNPSYHFVGTEAVDNPYLKTSEWDWPIDPEGLRYSLNWLQDRYHKPMMIVENGLGARDKVEADGSIHDPYRIDYLRAHISEMIKAVTEDGVDLIGYTPWGCIDLVSAGTGQMSKRYGFIYVDKDDEGNGTLERSKKDSFYWYQKVIRTNGADLK

SEQ ID NO: 6855 - protein, 479 aa, Lactobacillus plantarum WCFS1
MTKGYKMPKDFLWGGAVAAHQLEGAWDVDGKGVSIADVMTAGRNGVPRKVTDGVKDGEIYPNHWGNDFYHRYSEDDRLFEEMGFKCFRTSIAWTRIFPNGDESEPNEAGLKFYDDLFDDLLSHGIQPVVTLSHFEIPYHLVKAYGGFSNRKMIDFFVHFAKTVFKRYQDKVKYWMTFNEINNQTAWSDPHPLLQNSGLQLSKDDNWEQAMYQAAHYELVASALAVQAGHAINPDFQIGCMVAMCPIYPLTAKPADVMMAERAMQKRYWFGDVHCLGEYPKWLPKYFERKGFDMDITAADLATLKAGTVDYVGFSYYMSFVTKGRDGDSDYDFKEPDDFVENPYVEKSDWGWQIDPTGLRYAMNWMQDRWHLPQFIVENGFGAYDKKEADGSVHDDYRISYFRDHILAMEQAVVLDGVDLIGYTPWGCIDLVSASTGEMAKRYGFIYVDADDNGQGSFDRSKKDSFNWFQQVIASDGEDL

SEQ ID NO: 6856 - protein, 495 aa, Kluyveromyces lactis NRRL Y-1140
MNEYDAVDRHTFKVFNQDFTVDKRFQLIKEIGHGSYGIVCSARFTEAADETTVAIKKVTNVFSKTLLCKRSLRELKLLRHFRGHKNITCLYDMDIVFQPDGMFNGLYLYEELMECDMHQIVKSGQPLTDAHYQSFIYQILCGLKYIHSADVLHRDLKPGNLLVNADCQLKICDFGLARGYSENPVENNQFLTEYVATRWYRAPEIMLSYQGYTKAIDVWSCGCILAELLGGKPIFKGKDYVDQLNRILQVLGTPPEETLKRIGSKNVQDYIHQLGYIPKIPFSTLYPNANPDALNLLEGMLSFDPQLRITVDDALQHPYLSIWHDPADEPICTEKFDFSFESVNEIEQLKQMVIDEVTDFRQYVRLPLLHEQQQQQGKTDGGFDDQIREDQRTFQAQLEEQVNNGRTASNVPSFDEPFSSQMMGSASQQDPLVGIHSDNLPSHELDFPPRPSENVLDSPMGLSHQQTHNGSPECQDINDLLGLERELEFGLDRQF

SEQ ID NO: 6857 - protein, 491 aa, Staphylococcus epidermidis ATCC 12228
MNDHQKNHATSQDDNTKSTPSKNSKHIKIKLWHFILVILGIILLTSIITVVSTILISHQKSGLNKEQRANLKKIEYVYQTLNKDYYKKQSSDKLTQSAIDGMVKELKDPYSEYMTAEETKQFNEGVSGDFVGIGAEMQKKNEQISVTSPMKDSPAEKAGIQPKDIVTQVNHHSVVGKPLDQVVKMVRGKKGTYVTLTIKRGSQEKDIKIKRDTIHVKSVEYEKKGNVGVLTINKFQSNTSGELKSAIIKAHKQGIRHIILDLRNNPGGLLDEAVKMANIFIDKGNTVVQLEKGKDKEELKTSNQALKQAKDMKVSILVNEGSASASEVFTGAMKDYHKAKVYGSKTFGKGIVQTTREFSDGSLIKYTEMKWLTPDGHYIHGKGIRPDVSISTPKYQSLNVIPDNKTYHQGEKDKNVKTMKIGLKALGYPIDNETNIFDEQLESAIKTFQQDNNLKVNGNFDKKTNDKFTEKLVEKANKKDTVLNDLLNKLK

SEQ ID NO: 6858 - protein, 434 aa, Zea mays
MATHASDNGSGHAEWRFARAAKEGALAVAGDKMSIRAARFKISASVDGRDPRPVLPLAHGDPSVFPAFRTAAEAEDAVAAALRTGKFNCYPAGVGLPEARRALAEHLSSDLPYKLSTDDIFLTAGGTQAIEVVVSVLAQPGANILLPRPGYPNYEARAGLHNLQVRHFDLIPERGWEIDIDSLESIADKNTTAMVIINPNNPCGSVYTREHLAKVAEVARKLGILVIADEVYGNLVFGDTPYVPMGVFGHIAPVLSIGSLSKRCILPGWRLGWVAVCDPNKILQETKIIASITNFLNVSTDPATFVQGALPHILENTKEDFFRRIIGLLAETSEICYREIKDIKCITCPHKPEGSMFVMVKLNLYLLEGIHDDIDFCCKLAKEESVILCPGSVLGMENWIRITFAIDSSSLLDGLERIKSFCQRHKKKNLLNGH

SEQ ID NO: 6859 - protein, 477 aa, Vitis labrusca
MSHKGLDYETLNENVKKVQYAVRGELYLRASELQKEGKKIIFTNVGNPHALGQKPLTFPRQVVALCQAPFLLDDPNVGLVFPADAIARAKHYLSLTTGGLGAYSDSRGLPGIRKEVAEFIGRRDGYPSDPELIFLTDGASKGVMQILNTIIRGERDGILVPVPQYPLYSAAISLYGGSLVPYYLEETANWGLDVNNLHSSVAAARSKGITVRAMVIINPGNPTGQCLSEANLKEILHFCNQENLVLLGDEVYQQNIYQDERPFISARKALMDMGPPISKELQLVSFHTVSKGYWGECGQRGGYFEMTNIPPQTVDEIYKVASISLSPNVPGQIFLGVMVNPPTPGDISYLQFMRESKGILESLRRRAQIMTDGFNSCRNVVCNFTEGAMYSFPQIRLPPKAIEAAKKAGKVADVFYCLKLLEATGISTVPGSGFGQKEGVFHLRTTILPAEEDMPAIMESFKKFNDEFMEQYEDHRG

SEQ ID NO: 6860 - protein, 466 aa, Bacillus subtilis subsp. subtilis str. 168
MKRQLKLFFIVLITAVVASALTLFITGNSSILGQKSASTGDSKFDKLNKAYEQIKSDYYQKTDDDKLVDGAIKGMIQSLDDPYSTYMDQEQAKSFDETISASFEGIGAQVEEKDGEILIVSPIKGSPAEKAGIKPRDQIIKVNGKSVKGMNVNEAVALIRGKKGTKVKLELNRAGVGNIDLSIKRDTIPVETVYSEMKDNNIGEIQITSFSETTAKELTDAIDSLEKKGAKGYILDLRGNPGGLMEQAITMSNLFIDKGKNIMQVEYKNGSKEVMKAEKERKVTKPTVVLVNDGTASAAEIMAAALHESSNVPLIGETTFGKGTVQTAKEYDDGSTVKLTVAKWLTADGEWIHKKGIKPQVKAELPDYAKLPYLDADKTYKSGDTGTNVKVAQKMLKALGYKVKVNSMYDQDFVSVVKQFQKKEKLNETGILTGDTTTKLMIELQKKLSDNDTQMEKAIETLKKEM

SEQ ID NO: 6861 - protein, 484 aa, Vitis vinifera
MSHKGLDYETLNENVKKVQYAVRGELYLRASELQKEGKKIIFTNVGNPHALGQKPLTFPRQVVALCQAPFLLDDPNVGLVFPADAIARAKHYLSLTSGGLGAYSDSRGLPGIRKEVAEFIGRRDGYPSDPELIFLTDGASKGVMQILNTIIRGERDGILVPVPQYPLYSAAISLFGGSLVPYYLEETANWGLDVNNLHSSVAAARSKGITVRAMVIINPGNPTGQCLSEANLKEILHFCYQENLVLLGDEVYQQNIYQDERPFISARKVLMDMGPPISKELQLVSFHTVSKGYWGECGQRGGYFEMTNIPPQTVDEIYKVASISLSPNVPGQIFLGVMVNPPTPGDISYLQFMRESKGILESLRRRAQIMTDGFNSCRNVVCNFTEGAMYSFPQIRLPPKAIEAAKKAGKVADVFYCLKLLEATGISTVPGSGFGQKEGVFHLRTTILPAEEEMPAIMESFKKFNDEFMEQYEDHRGYSRMKNH

SEQ ID NO: 6862 - protein, 218 aa, Rosa rugosa
NGLLKKAYELSILCDAEVALIIFSNRGKLYEFCSSSSILKTLERYQKCSYGAMEVNEPAKELEQSSYREYLKLKTRCESLQRTQRNLLGEDLGPLNTKELEQLERQLESSLKHVRSTKTQYMLDQLSDLQSKEHMLIEANRDLTMKLDEINSGTQLRQTWERGHAHQTMLYGTQHAQTQGLMFQPLDCNPTLQIGYNAVGSQQMTAATPAPTQPVNGF

SEQ ID NO: 6863 - protein, 532 aa, Zea mays
  misc_feature (113)..(113): Xaa can be any naturally occurring amino acid
  misc_feature (199)..(200): Xaa can be any naturally occurring amino acid
VHTGPVLSAASTPRFLHAQPPQSVAFPSATAIRRAKSAAIPLRPQRPPAAISPPAAPAIRRLSIRGRNRFHPRPQSTAPNPPPHPCARNASTLLLSPYMHFGELSVRKVFHQXNDSNHAGEESCTLFLRSIGLREYSRYLTFNHPCSHEKPLLSHLRFFPWVVNEVYFKVWRQGRTGYPLVDAGMRELWATGWVHDRIXXVVVSSFFVKVLQLPWRWGMKYFWDTLLDADLESDALGWQYISGSLPDGRELDRIDNPQFEGYKFDPHGEYVRRWLPELARLPTEWIHHPWDAPESVLQAAGVELGSNYPRPIVELDAANSRLQDALSEMWELEAASRAAMENGMEEGLGDSTDEPPIDFPQELRMEVDRQPVQPAIHAPGVTGRRREDQMVPSMTSSFIRAETELTADFGHTSEDSRPEVPSNIHHLQARPEREETVDGGTGNAVRVHGNHHQQNLQNNMHRVLGIAPSISEASSSWTGRDGGVVPVWSPPAASGHSDSYAADEADISSRGYLDRHPQSHTMMNWSQLSQSL

SEQ ID NO: 6864 - protein, 481 aa, Pseudomonas syringae pv. phaseolicola 1448A
MSQKTLTTASGAPVADNQNSRSAGPRGPLLLDDFHLIEKLAHFNRENIPERRVHAKGSGAHGTFTVTRDISQYSSAKLFDTVGKQTPIFLRFSTVGGERGSADTERDPRGFAIKFYTEEGNWYIVGNNTPVFFIRDPLKFPDFIHTQKRLPQTNLKSPQMMWDFWSHSPEALHQVTILFSDRGIPDGYRHMHGFGSHTYSLISAAGERHWVKWHYKTRQGIKNLTPAEAARIAGTDPDYAQRDLFTAIERGDFPKWQVCIQLMSEAQAANHHENPFDVTKTWSQKEYPLIEVGELELNRNPLNYFAEVEQAAFGPSNMVPGVGLSPDRMLQGRVFAYADAHRYRVGTNHQQLPINAPRNPVHSYQRDGSMAFGTNGGAAPNYEPNSYSDAPKEDPRYAEPALALSGAAGRHDHRVDGDYYSQAGKLFNLMSDDQKALLISNIAGAMGGVSSDIVQRQLQHFYRADPAYGEGIANALGIKLG

SEQ ID NO: 6865 - protein, 606 aa, Anabaena variabilis ATCC 29413
MKIGAHYLGNGECEFTVWSPKLNSVAVQILKPEQQLIPLKPLAEGYWQIKVNDVYPGTLYRYQLNDQEAFADPASQYQPEGVHGASEVVDHQFEWTDENWSGVPLESMIFYEVHVGTFTPEGTFTAIIPRLSELRELGINAIEIMPIAQFPGDTHIEADLAYRNWGYDGVYPFAVQNSYGSPSDLKQFVNACHENGIAVVLDVVYNHFGPEGNYMGQFAPYFTRTYKTPWGNAMNFDDAYSQGVRNYFIENALYWLEEFHIDGLRLDAIQAIYDLGAKHFLRELAEVVHNFSQRGTWKRLLIAESDLNNPQIIRPVELGGYGLDAQWSDDFHHALHALLTGDRQGYYQDFGKCADLAKAYADTFVYDWRYAPHRKRFHGISCRDRPLSQFSVCIQNHDQIGNQMQGERLSERISFAGLKLAAGAVLLSPYLPLLFMGEEYGETAPFIYFVSHSDPDLIQAVRAGRKEEFEAFHYAEDPPDPESAETFLRCKLNWELRHQGQHKVLWDWYRQLIHLRKTHPALQNYDRDSIEATSDEDKQIVVVRRWCESGEVILVMNFNTSPVTVVLPIQKSVRKLLDSSDSGGVEKLSVGEEVVLQPTSLVLYEV

SEQ ID NO: 6866 - protein, 337 aa, Yersinia pseudotuberculosis IP 32953
MKTLGEFIVEKQLDFSHATGELTALLSAIKLGAKIIHRDINKAGLVDILGASGVSNIQGEDQMKLDLFANEKLKAALKARGEVAGIASEEEDDIVIFDGGRAENAKYVVLMDPLDGSSNIDVNVSVGTIFSIYRRITPFGTPITEEDFLQPGTKQVAAGYVVYGSSTMLVYTTGYGVHAFTYDPSLGVFCLSHEKVRYPATGCMYSINEGNYIKFPLGVKKYIKYCQEQDEATKRPYTSRYIGSLVADFHRNLLKGGIYIYPSTASHPQGKLRLLYECNPMAFLAEQAGGKATDGVNRILDIVPEKLHQRAPFFVGTKSMVEDAEGFIAKFPDEEAK

SEQ ID NO: 6867 - protein, 512 aa, Zea mays [sequence omitted]

SEQ ID NO: 6868 - protein, 529 aa, Bacteroides thetaiotaomicron VPI-5482
MMMKKIKVYALLVCLLATSAAQAQSFGSAAMRKLQMAEFAISNFYVDKVDEDKLVEEAIIKMLAQLDPHSTYSDAEEVKKMNEPLQGNFEGIGVQFQMIEDTLLVVQPVSNGPSEKVGILAGDRIIAVNDSAIAGVKMSTEDIMKRLRGPKGSKVNLTIVRRGVQDPLVFTVKRDKIPILSLDASYMIQPKIGYIRINRFGATTAEEFKKAMKDLQKQGMKDLILDLQGNGGGYLNAAIDLANEFLGQKELIVYTEGRTAQRSEFFAKGNGEFRDGRLIVLVDEYTASASEIVSGAVQDWDRGIIVGRRSFGKGLVQRPIDLPDGSMIRLTIARYYTPAGRCIQKPYDSSTDYNKDLIDRFNHGELMNADSIHFPDSLKVQTKKLKRTVYGGGGIMPDYFVPIDTTLYTDYHRKLVGKGVIIKFTMKFIEDHRKELADKYKKFDSFNEKFVIDDDMLATLREMGEKEGVKFNEEQYQKALPLIKTQLKALIARDLWDMNEYFRVMNTTNESVQKALEIFRSGEYQKKLK

SEQ ID NO: 6869 - protein, 830 aa, Triticum aestivum
MLCLTAPSCSPSLPPRPSRPAADRPGPGISGGGNVRLSAVPAPSSLRWSWPRKAKSKFSVPVSAPRDYTMATAEDGVGDLPIYDLDPKFAGFKEHFSYRMKKYLDQKHSIEKHEGGLEEFSKGYLKFGINTENDATVYREWAPAAMDAQLIGDFNNWNGSGHRMTKDNYGVWSIRISHVNGKPAIPHNSKVKFRFHRGDGLWVDRVPAWIRYATFDASKFGAPYDGVHWDPPSGERYVFKHPRPRKPDAPRIYEAHVGMSGEKPEVSTYGEFADNVLPRIKANNYNTVQLMAIMEHSYYASFGYHVTNFFAVSSRSGTPEDLKYLVDKAHSLGLRVLMDVVHSHASSNKTDGLNGYDVGQNTQESYFHTGERGYHKLWDSRLFNYANWEVLRFLLSNLRYWMDEFMFDGFRFDGVTSMLYNHHGINMSFAGSYKEYFGLDTDVDAVVYLMLANHLMHKLLPEATVVAEDVSGMPVLCRSVDEGGVGFDYRLAMAIPDRWIDYLKNKDDLEWSMSGIAHTLTNRRYTEKCIAYAESHDQSIVGDKTMAFLLMDKEMYTGMSDLQPASPTIDRGIALQKMIHFITMALGGDGYLNFMGNEFGHPEWIDFPREGNNWSYDKCRRQWSLADIDHLRYKYMNAFDQAMNALDDKFSFLSSSKQIVSDMNEEKKIIVFERGDLVFVFNFHPSKTYDGYKVGCDLPGKYKVALDSDALMFGGHGRVAHDNDHFTSPEGVPGVPETNFNNRPNSFKILSPSRTCVAYYRVEEKAEKPKDEGAASWGKTALGYIDVEATGVKDAADGEATSGSEKASTGGDSSKKGINFVFLSPDKDNK

SEQ ID NO: 6870 - protein, 621 aa, Listeria monocytogenes str. 1/2a F6854
MCGFVGCVHDRITEITGADKETFRQMNSMITHRGPDDEGYFTDDHVQFGFRRLSIIDVENGHQPLTYENERYWIIFNGEVYNYVELREQLVAEGMTFETESDTEVIIATYAKYKEKTAERLRGMFGFVIWDKQEELVYGARDPFGIKPFFYAEEDDKLFMGSEKKSILHALKEKELDEVSLQNYMTYQFVPEPDSLTKNVKRLEPGHQFTKKIGQPMEITTYWKASFAPVTKSEDAWIKEVRDVMYDSVKMHMRSDVPVGSFLSGGIDSSIIAAIAKEYHPAIKTFSVGFERDGFSEIDVAKETADKLGVENISYVISPEEYMKELPKIVWHMDDPLADPAAIPLYFLSREARKQVTVALSGEGADELFGGYNIYNEPNSLAMFNKMPGVFKSLLNNVARIMPEGMRGKSFLERGTTPMEERYIGNAKMFTEKEKQILLPKYQAGHDYTNITDPFYAETTNYHPVERMQYIDIHTWLRGDILLKADRMTMANSLEVRVPFLDKEVYNVARNIPDTMKTTNGTTKYILRKAAATFVPEHVLNRRKLGFPVPIRHWLKDEMNAWVKNIIKESPTDHLINKQYVLDLLDDHCAGKFDYSRKIWTVVIFMIWYDVYVADKYDFGK

SEQ ID NO: 6871 - protein, 262 aa, Bacillus anthracis str. A2012
LVRLGVFKVEEGPELVEAVKSAIKAGYRSIDTAAIYGNEKAVGEGIRAGIEATGISREDLFITSKVWNADQGYEETIAAYEESLKKLELDYLDLYLVHWPVEGKYKDTWRALETLYKEKRVRAIGVSNFQVHHLQDVMKDAEIKPMINQVEYHPRLTQKEVQAFCKEQGIQMEAWSPLMQGQLLDNETLQEIAEKHGKTTAQVILRWDLQNGVITIPKSTKEHRIIANADVFNFELTKEDMEKIDALNQNHRVGPDPDNFDF

SEQ ID NO: 6872 - protein, 359 aa, Streptomyces avermitilis MA-4680
MSALFEPYSLRDLTIPNRVWMAPMCQYSAAPQGPAAGAPHDWHFAHYAARATGGTGLIVVEATAVSPEGRISPYDLGIWNDTQVEAFRRITRFLAAQGTVPAIQLAHGGRKASTDRPWKGGAPLAADEHGWQPLGPSPVAFDERHPVPTELSVAEIRQIVGQFADAARRALAAGFEIAEIHGAHGYLINEFLSPHSNRRTDEYGGSYENRVRFALEVVDAVREVWPAGKPLFFRVSATDWLDEGGWTADDTVRFAAELQAHGVDLLDVSTGGNASGVRIPTGPGYQVPFAARVKAGTSLPVAAVGLITDAEQAEKILANGEADAILLGRELLRNPSFARLAARELGGDVHVPAQYHRSV

SEQ ID NO: 6873 - protein, 178 aa, Triticum aestivum
MSLIRRSNVFDPFSLDFFDPFDGFPFGSGSNSSGSLIPRTSSDTAAFAGARIDWKETPEAHVFKADVPGLKKEEVKVEVEDGNILQISGERNKEQEEKTDTWHRVERSSGKFLRRFRLPENAKAEQVKASMENGVLTVTVPKVEAKKPEVKSIQISGQSDEVECRAVAWSLAPVVVIK

SEQ ID NO: 6874 - protein, 439 aa, Kluyveromyces lactis NRRL Y-1140
MEANIISNQSNWNARQMPNVSRATKKLKKLLDPYVDHMKQSYELDQNNHIYVDPILTKRSIYSPANFSVPGRYEILQVLGKGSYGTVVSAVDKGNPTHEVQLAIKKVTSIFTREILLKRAIRELKFMSYFKGHRNIVSLIDLEIVNEEPYSGLYCYQELVDYDLARVIHSNVLFSEFHIKHFLYQILCGMKYIHSADVIHRDLKPGNILCSITGEIKICDFGLARGISPSFTVAGGISNHITNYVATRWYRAPELILSHKRYSKSVDMWAVGCILAEFYGRKPVFMGNDSLHQVMEIQKILGTPKQIVIRTYGSSRCYDIFSTSKPQYKKTPWCEIFPYASSEAVDLMERLIDWNPEARLTVEEALDHPFLQQVRNPEAEPICPHGPFDFTYEKHLYSMERLRECLCDEVSKFHNDRQTKDFVSPPLMTPHFIAESNSY

SEQ ID NO: 6875 - protein, 492 aa, Oryza sativa
MSHTSEEESLNNLQQQPKLEACAAGSSKGDTVMPVVKKRRGHPGNPDPDVEVVALSPKTLLATNRYICEVCHKGFQRDQNLQLHRRGHNLPWKLKQRSSTEAKKKVYVCPEITCPHHDATRALGDLTGIKKHYSRKHGEKKWKCDRCSKKYAVQSDWKAHTKICGTKEYRCDCGTIFSRKDSFITHRAFCDALAEDTSRVNHSLATMVGSLHGQQQDMFSHGVPSFSSSPTDMIANLASNDHNSDSHLRSLSPYALVTRNTTLFSNQISPKESGFPLDGSVTSYPYMSMNSPYMSATALLQKAAEMGAKTSQDPISPLLLKSFPNNLTSSRDHMNISSRSQGDSLGNSTVNSDCMKTTEDENSYMIGRGNILINAPWSSGIMRPGTVPLIGLMNHPFSMREEKDNPSIFPENQTQHNRQDNISGVVDADAGLTQDFLGLGGSGTLDMSSETYNADVTALSYSDEQEKPQEHIYSYHQSSLDPTALEKPIWDS

SEQ ID NO: 6876 - protein, 714 aa, Botryotinia fuckeliana
MYLATVLSLVGLVTAQCPYGMDKQPQKREPKDSQTSSSNFLDQFTLNDTNTYFTTDAGGPIQEDTSLKAGARGPTLLEDFIFRQKIQHFDHERVPERAVHARGAGAHGIFTSYGNYSNITAASFLNQEGKETPVFVRFSTVAESRGSADTARDVHGFATRFYTDEGNFDIVGNNIPVFFIQDAILFPDLIHAVKPSPDNEIPQAATAHDSAWDFFSQQPSSLHTLFWAMAGNGIPRSFRHMDGFGIHTFRLVTDSGTSKLVKWHWKSKQGKASLVWEEAQVLAGKNADFHRKDLWDAIESGNGPEWELGIQIVEEEDVLKFGFDLLDPTKILPEELVPVQKIGVMRLNANPRNYFAETEQVMFQPGHIVRGIDFTDDPLLQGRIFSYLDTQLNRHGGPNFEQLPINRPIVPVHNNNRDGAAHNYIPLNTAAYSPNTLNDAAPKQANQTVGRGFFTAPGRTVSGHLVREVSSTFSDVWSQPRLFYNSLIPVEQQFLINAIRFETSQLTSSVVKSNVLIQLNRVSHDLAARVASVLNLPVPEADNTYYNDNKTSSITIFGNELPTIATLNVGVLVSVKNNATLTQAANLATSFSTSGVNVKVIGEILTNGVDATYSASDATLFDGIIVTDGAENLFTNGSKSTYFPADRPRQILLDAYNWGKPVGTLGNARTSLNVASISTTPGVYSNSTSVSGLVKEFEAGLKTFRFVDRFALDD

SEQ ID NO: 6877 - protein, 142 aa, Silicibacter sp. TM1040
MPLKYLHTMVRVKDLEKSMAFYALLGLKETRRYDSEAGRFSLIFMAPPGQEEAPVELTWNWDGDDELPSDSRHFGHLAYEVDNIYETCQHLMDNGVVINRPPRDGRMAFVRSPDNISIELLQAGDALPPAEPWSSMENTGHW

SEQ ID NO: 6878 - protein, 850 aa, Geobacter sulfurreducens PCA
MRQKAAAPSRAFLLERVNYLEEANHRYLSILDMLASSSMFHSDLGRAKDPQEIFRATLTQLRRVLDCRMTGFLISCSDGSFKLVSWEPDEGHDEIQRIIDAKIVDGTFAWALNRNQAILVPLADDRSLLLHVVATRSRIRGMFAGILPGSSHSPDAATLNAVSVIMHTCAHSLESTELYSMVRDTLASLEQRVQERTRDLAAAREQAESASRAKSDFLANMSHEIRTPLNGIMGMTDLLLGGGLNQTQQHQYLGAIKGSADCLMGVIGDILDFSKIEAGKVELDPVPFSLRTFVGQAVRSLSARAAEKGVELVCDPREDVIDPLIGDCGKLRQVLVNLVGNAIKFSDGGEVVVAVETAAVEGNEVLLRFSVSDQGCGIAPEALDRIFNVFEQADSSTTKRFGGTGLGLAISRRIVQLMGGDIRVESAPGEGSTFYFTCRFQLRPPEPDSLADHGLAGRPVLVVEAPTSSRRVLVSYLTGWGMRPRVAATVDDALELAAGMTTAAGEPLMALVDKKSLGAGWQEALQRLTEGVGTELRLILMTEVGDVVEKESRLWPDKARCLLKPLVHGDLGEAIVSALTGREPSETPPRSAQPGSGPGLSILVADDVEVNRMLVNAILGRMGHRVAQAANGEEVLKALEDSRFDLVLMDVQMPVMDGFETARRIREQERGSGRRTPILALTAYAGRQDREQCLSADMDGYVAKPFTAEELVRAVHSCCGVDGSLDGAGDGRETAPAVADEAPPVFDRQGLLARLRGKDELVPKFVGMFRDGTEKNLAKLWEAVEKRDVAGLRVGAHAIVGAAGNIGAQRVLALALRIEDAAISGRLDEAVSLLQPLAAEYDTFVRETER

SEQ ID NO: 6879 - protein, 441 aa, Arabidopsis thaliana
MANKYVSSVLKSLLVLLHLVFLSKQHVDSASIVKSLPGFEGQLPFELETGYIGVGEEEEVQLFYYFIKSERNPKEDPLILWLTGGPGCSAISGLLFENGPLTMKLDVYNGTLPSLVSTTYSWTKTSSIIFLDQPVGTGFSYSRTQQFNKPSDSGEAKRIHEFLQKWLGKHQVFSSNPFYVAGDSYSGLVVPATVQEISKGNYECCNPPINLQGYVLGNPLTDYTTGSNSRIPFAHGMALISDELYESLKKTCKGEYTNVHPRNTQCLKFVEEFNKCTNRIFQQLILDPLCETETPDCYIYRYLLTTYWANDATVREALQINKESIGEWVRCYYSIPYNNDIKSSMPYHVNNSISGYRSLIYSGDHDFEVPYLGTQAWIRSLNYSIIDDWRPWMVKNQIAGYTRTYANKMTFATIKGGGHTAESKPEEASIMFQRWINGQPL

SEQ ID NO: 6880 - protein, 472 aa, Shigella flexneri 2a str. 301
MTTHLAWFRQDLRLHDNLALAAACRNSSARVLALYIATPRKWETHNMSPRQAELINAQLNGLQIALAEKGIPLLFREVDDFVASVEIVKQVCAENSVTHLFYNYQYEVNERARDVDVERALRNVVCEGFDDSVILPPGAVMTGNHEMYKVFTPFKNAWLKRLREGMPECVAAPKVRSSGSIKPAPSITLNYPRQSFDTAHFPVEEKAAIAQLRQFCENGAGEYEQQRDFPAVEGTSRLSASLATGGLSPRQCLHRLLAEQPQALDGGAGSVWLSELIWREFYRHLMTYYPSLCKHRPFIAWTDRVQWQSNPAHLQAWQKGKTGYPIIDAAMRQLNSTGWMHNRLRMITASFLVKDLLIDWREGERYFMSQLIDGDLAANNGGWQWAASTGTDAAPYFRIFNPITQGEKFDREGEFIRRWLPELRDVPGKAVHEPWKWAQKAGVKLDYPQPIVEHKEARVQTLAAYEAARKGK

SEQ ID NO: 6881 - protein, 511 aa, Oryza sativa
MARMGISKGGSGKEAKKPPLLLGRFEVGKLLGQGNFAKVYHARNVATGEEVAIKVMEKEKIFKSGLTAHIKREIAVLRRVRHPHIVQLYEVMATKLRIYFVMEYVRGGELFARVARGRLPEADARRYFQQLVSAVAFCHARGVFHRDIKPENLLVDDAGDLKVSDFGLSAVADGMRRDGLFHTFCGTPAYVAPEVLSRRGYDAGGADLWSCGVVLFVLMAGYLPFQDRNLAGMYRKIHKGDFRCPKWFSPELIRLLRGVLVTNPQRRATAEGIMENEWFKIGFRRFSFRVEDDRTFTCFELDDDAAVDAPTSPPDTPRTVDSGDVGSAPTRPRKAGSLTSCDSAPSLLEGRFGLGGSSRRRSSLNAFDIISFSPGFDLSGLFDQDDGGGAGAGSIPEQQKHTARFVSAAPVEVIVATLEAAAAAAGMAVREREDGSISMEGTREGEHGALAVAAEIYELTPELVVVEVRRKAGGAAEYEEFFRARLKPSLRELVCDDRPCPEDSGELSRSL

SEQ ID NO: 6882 - protein, 558 aa, Sulfolobus solfataricus
TFAYKIDGNEVIFTLWAPYQKSVKLKVLEKGLYEMERDEKGYFTITLNNVKVRDRYKYVLDDASEIPDPASRYQPEGVHGPSQIIQESKEFNNETFLKKEDLIIYEIHVGTFTPEGTFEGVIRKLDYLKDLGITAIEIMPIAQFPGKRDWGYDGVYLYAVQNSYGGPEGFRKLVDEAHKKGLGVILDVVYNHVGPEGNYMVKLGPYFSQKYKTPWGLTFNFDDAESDEVRKFILENVEYWIKEYNVDGFRLDAVHAIIDTSPKHILEEIADVVHKYNRIVIAESDLNDPRVVNPKEKCGYNIDAQWVDDFHHSIHAYLTGERQGYYTDFGNLDDIVKSYKDVFVYDGKYSNFRRKTHGEPVGELDGCNFVVYIQNHDQVGNRGKGERIIKLVDRESYKIAAALYLLSPYIPMIFMGEEYGEENPFYFFSDFSDSKLIQGVREGRKKENGQDTDPQDESTFNASKLSWKIDEEIFSFYKILIKMRKELSIACDRRVNVVNGENWLIIKGREYFSLYVFSKSSIEVKYSGTLLLSSNNSFPQHIEEGKYEFDKGFALYKL

SEQ ID NO: 6883 - protein, 547 aa, Pasteurella multocida subsp. multocida str. Pm70
MAAKDVKFGNDARVKMLAGVNILADAVKVTLGPKGRNVVLDKSFGAPTITKDGVSVAREIELEDKFENMGAQMVKEVASKANDAAGDGTTTATVLAQAIVNEGLKAVAAGMNPMDLKRGIDKAVTAVVTELKALSKPCETSKEIEQVGTISANSDSIVGQIIAQAMDKVGKEGVITVEDGTGLEDELAVVEGMQFDRGYLSPYFINKPETATVELDNPFILLVDKKVSNIRELLPVLEGVAKAGKPLLIIAEDVEGEALATLVVNTMRGIVKVAAVKAPGFGDRRKAMLQDIAILTAGTVISEEIGMELEKATLEDLGQAKRVVINKDNTTIIDGIGDEAQIQGRVAQIRQQIEESTSDYDKEKLQERVAKLAGGVAVIKVGAATEVEMKEKKARVEDALHATRAAVEEGIVAGGGVALIRAASKVAGLQGDNEEQNVGIKLALRAMEAPLRQIVANAGEEASIVASAVKNGEGNFGYNAGTEQYGDMIEMGILDPTKVTRSALQFAASVAGLMITTECMVTDLPKEDKADLGAAGMGGMGGMGGMM

SEQ ID NO: 6884 - protein, 558 aa, Sulfolobus solfataricus
TFAYKIDGNEVIFTLWAPYQKSVKLKVLEKGLYEMERDEKGYFTITLNNVKVRDRYKYVLDDASEIPDPASRYQPEGVHGPSQIIQESKEFNNETFLKKEDLIIYEIHVGTFTPEGTFEGVIRKLDYLKDLGITAIEIMPIAQFPGKRDWGYDGVYLYAVQNSYGGPEGFRKLVDEAHKKGLGVILDVVYNHVGPEGNYMVKLGPYFSQKYKTPWGLTFNFDDAESDEVRKFILENVEYWIKEYNVDGFRLDAVHAIIDTSPKHILEEIADVVHKYNRIVIAESDLNDPRVVNPKEKVGYNIDAQWVDDFHHSIHAYLTGERQGYYTDFGNLDDIVKSYKDVFVYDGKYSNFRRKTHGEPVGELDGCNFVVYIQNHDQVGNRGKGERIIKLVDRESYKIAAALYLLSPYIPMIFMGEEYGEENPFYFFSDFSDSKLIQGVREGRKKENGQDTDPQDESTFNASKLSWKIDEEIFSFYKILIKMRKELSIACDRRVNVVNGENWLIIKGREYFSLYVFSKSSIEVKYSGTLLLSSNNSFPQHIEEGKYEFDKGFALYKL

SEQ ID NO: 6885 - protein, 206 aa, Candida albicans
LFKNIAAGNYPSWTAYIQTMTEAEAKEAEFSVFDLTKVWPHKKYPLRRFGKFTLNENPKNYFAEVEQAAFSPAHTVPYMEPSADPVLQSRLFSYADTHRHRLGTNYTQIPVNCPVTGAVFNPHMRDGAMTVNGNLGSHPNYLASDKPVEFKQFSLQEDQEVWNGAATPFHWKATPADFKQAQELWKVLKRYPNQQEHLAHNIAVHA

SEQ ID NO: 6886 - protein, 293 aa, Candida albicans SC5314
MKKALPEHAKLSKESKECIQECVSEFISFITSQAADRCLVEKRKTLNGEDILWAMYTLGFENYSETLKIYLAKYRQYEQEQLSLKPPRKKIRKRKTKSSLSQTQSKEQVDQDQDFQQIEQQYDDGEEEEEESENEEGDMSNIESNLILQNLPEYSDDYFDDEDEEEDRQQQREENSDNEPQQHHGDDSQPINLQPQLPSSAVPSLPTQQQQQFSDINPTTESNQQESFFTTQYYPNQTQYVNAAPLPTNPQPRQYQNQNQPNNYQNDQRQNDKQRIIPDLLNITNSYSEDEFI

SEQ ID NO: 6887 - protein, 242 aa, Petunia x hybrida
  misc_feature (120)..(120): Xaa can be any naturally occurring amino acid
MEFQSDLTREISPQRKLGRGKIEIKRIENTTNRQVTFCKRRNGLLKKAYELSVLCDAEVALIVFSSRGRLYEYANNSVKATIERYKKACSDSSNTGSIAEANAQYYQQEASKLRAQIGNXQNQNRNFLGESLAALNLRDLRNLEQKIEKGISKIRAKKNELLFAEIEYMQKREIDLHNNNQYLRAKIAETERSQQMNLMPGSSSYDLVPPQQSFDARNYLQVNGLQTNNHYPRQDQPPLQLV

SEQ ID NO: 6888 - protein, 544 aa, Agrobacterium tumefaciens
MAAKEVKPGASAREKMLKGVDILADAVKVTLGPKGRNVVIDKSFGAPPITKDGVSVAKEIELEDKFENMGAQLVREVASKTNDIAGDGTTTATVLAQAIVREGAKAVAAGMNPMDLKRGIDLAVAEVVKDLQAKAKKINTSEEVAQVGTISANGERQIGLDIAEAMQRVGNEGVITVEEAKTAETELEVVEGMQFDRGYLSPYFVTNPEKMVADLEDAYILLHEKKLSNLQAMLPVLEAVVQTGKPLVIIAEDVEGERLATLVVNKLRGGLKIAAVKAPGFGDRRKAMLEDIAILTGGTVISEDLGIKLESVTLDMLGKSKKVSISKENTTIVDGAGQKSDIEGRVAQIKAQIEETTSDYDREKLQERLAKLAGGVAVIRVGVSTEVEVKEKKDRIDDALKPTRAAVQEGIVPGGGVALLRSSTKITVKGVNDDQEAGINIVRKALQSLVRQIAENAGDEASIVVGKILDKNEDNYGYNAQTGEYGDLIALGIVDPVKVVRTALQNAASVASVLITTEAMIAELPKKESAMPQMPGGGMGGMDF

SEQ ID NO: 6889 - protein, 288 aa, Lactobacillus plantarum WCFS1
MTKTPTITLNDGRAIPAIGFGTFQIPDDGSTYQAVKEALVIGYRHIDTAVAYFNEDEVGQAIKDSGIPRDQIWVTSKLWLQDYGFDAASRAIDRSLTKLRLDYIDLYLIHQPYGDVPGAWQAMEAAQKAGKLKSIGVSNMTPTLWQKFVPQFETIPAVNQVEFNPYFQQQPLRQLLAAQDVKLEAWAPLGQGNQALFKEPIIQQLAIKYHKDAGQIILRFEHQEGVIVFPKSVHSARIKSNRDIFDFELTSTEMAQLRALDTGKGHHDPDAPGVSEQLLHAFDVHADD

SEQ ID NO: 6890 - protein, 786 aa, Mesorhizobium loti MAFF303099
MLGLRMPEYSSFIRFVRVRYLSGLLIFALASTAIMVALNRVNSFRHEIDALSSNLVVFTRDLRNATSFAETTGSAWRNETRDALTASARDHSERLTSEIDTLSAQFAALRSRLSAKTLNELETASVNGDLFWSAHDMVRNFNLMSVAQKADEWSYREIRNQNDLFVQPMLVRVRTAMDEERHLADASSDRLLLWASGLLFGVLAIVAFWIFRPMEQAIRRAFAQSAESLFKAEAADRAKSEFLANMSHEIRTPMNGVLGMAELLAKTELTPRQKTFTDVIVKSGNALLTIINDILDFSKINAGQLTLDPAPFRLTEAVEDVATLVSARVAEKNLELIVRVDPRLPAHVVGDAGRFRQIVTNLVGNAVKFTEKGHVLIDVGGETVNDVVQLRLRVEDTGIGIPAEKLQNVFEKFAQVDGSSTRRHEGTGLGLAIAARLVDLMAGKIGVESEIGRGSVFWFAVPLPVHHAEAREAIVPVDVTGARVLVIDDNPVNREILLEQLRSWSFDCAAAESGAVGLAFLDRACQLGASVDCIILDYQMPGMNGADVARAIAADSRLSAIPIVILTSVDQVDFGKMIIDFGISAHLTKPARSAVLLGTVISVIQKARSQGGKAQFIREPVQPKPVPQAAPPAFTVIRGPAVPVMAVPESTAMPNGPIDILIAEDNEVNQLVFGQILNGLGLSYRIAGNGRTAVEMYRSLHPKLILMDVSMPEMNGYEATRAIRAIETSSGGHIPIIGVTAHALKGDRDKCIEAGMDDYLPKPVSPDRLGTKIGTWLSETVVAKTA

SEQ ID NO: 6891 - protein, 226 aa, Asparagus virgatus
MGRGKIEIKRIENTTNRQVTFCKRRNGLLKKAYELSVLCDAEVALIVFSSRGRLYEYANNSVKATIERYKKACTDTTNTGTVSEANSQYYQQEASKLRQQITNLQNSNRNLMGESLSSMGLRDLKQLESRLEKGISKIRSKKNELLYAEIEYMQKREMELQNDNMYLRNKIAENERAQQQMNMLPAATSNEYEGMPQFDSRNFLQVNLLDPNHHYSQQQQTALQLG

SEQ ID NO: 6892 - protein, 288 aa, Lactobacillus plantarum WCFS1
MMVPTTKLNNGVVMPQLGFGVFQVPDLNECEAAVTAALKAGYRLIDTATAYQNETAVGRAIQKSGLRRDELFVTSKLWVSEFTYERAKQGIDASLQRLGVDYLDLYLLHQPYGDVMGAWRALEEAYHAGKIRAIGVSNFYADQLKNLELTMSVQPAVNQIEVNPWYQQADEVRFNQDEHVRVEAWAPFAEGKHAIFSNPSIQTIAQAHGKTTGQVILRWLLQRGITVIPKSVHPERMAENIAVFDFELTAAEMSAMAELDQGVSQFFDHRDPVTIEQIFGASLRQLHE

SEQ ID NO: 6893 - protein, 440 aa, Glycine max
MMGEKSNSNSGDAINSTLLHGKYELGRLLGHGSFAKVYHARHLNTGKSVAMKVVGKEKVVKVGMMEQIKREISAMNMVKHPNIVQLHEVMASKSKIYIAMELVRGGELFNKIARGRLREETARLYFQQLISAVDFCHSRGVFHRDLKPENLLLDDDGNLKVTDFGLSTFSEHLRHDGLLHTTCGTPAYVAPEVIGKRGYDGAKADIWSCGVILYVLLAGFLPFQDENLVALYKKIYRGDFKCPPWFSSEARRLITKLLDPNPNTRITISKIMDSSWFKKPVPKNLVGKKREELNLEEKIKHQEQEVSTTMNAFHIISLSEGFDLSPLFEEKKREEKELRFATTRPASSVISRLEDLAKAVKFDVKKSETKVRLQGQENGRKGKLAIAADLYAVTPSFLVVEVKKDNGDTLEYNQFCSKELRPALKDIVWRTSPAENPTLA

SEQ ID NO: 6894 - protein, 118 aa, Triticum aestivum
  misc_feature (83)..(83): Xaa can be any naturally occurring amino acid
  misc_feature (94)..(94): Xaa can be any naturally occurring amino acid
  misc_feature (99)..(99): Xaa can be any naturally occurring amino acid
  misc_feature (103)..(103): Xaa can be any naturally occurring amino acid
  misc_feature (107)..(107): Xaa can be any naturally occurring amino acid
FERDDGIFTVLSERATALHKAFSQMEGVECAEPQGSMYLFPTINLPAKAAEAAKAEGRSADEFYCMRLLEATGICVVPGSGFXQKENTLHFRTXFLAPXTERXGRIXKFHNEFLDKYR

SEQ ID NO: 6895 - protein, 131 aa, Zea mays
QSDETRKMGDIVHTLTNRRWLEKCVTYAESHDQALVGDKTIAFWLMDKDMYDFMALDRPSTPTIDRGIALHKMIRLITMGLGGEGYLNFMGNEFGHPEWIDFPRGPQRLPSGKFIPGNNNSYDKCRRRFDL

SEQ ID NO: 6896 - protein, 131 aa, Zea mays
QSDETRQMGDIVHTLTNRRWLEKCVTYAESHDQALVGDKTIAFWLMDKDMYDFMALDRPSTPTIDRGIALHKMIRLITMGLGGEGYLNFMGNEFGHPEWIDFPRGPQRLPSGKFIPGNNNSYDKCRRRFDL

SEQ ID NO: 6897 - protein, 152 aa, Triticum aestivum
MSIVRRSNVFDPFADLWADPFDAFRSIVPAISGGSSSETAAFASARVDWKETPEAHVFKADLPGVKKEEVKVEVEDGNVLVVSGERSREKEDKNDKWHRVERSSGKFARRFRLPEDAKVEEVKAGLENGVLTVTVPKAHVKKPEVKAIEISG

SEQ ID NO: 6898 - protein, 131 aa, Zea mays
QSDETWKMGDIVHTLTNRRWLEKCVTYAESHDQALVGDKTIAFWLMDKDMYDFMALDRPSTPTIDRGIALHKMIRLITMGLGGEGYLNFMGNEFGHPEWIDFPRGPQRLPSGKFIPGNNNSYDKCRRRFDL

SEQ ID NO: 6899 - protein, 60 aa, Zea mays
QSDETWKMGDIVHTLTNRRWLEKCVTYAESHDQALVGDKTIAFWLMDKDMYDFMALDRPS

SEQ ID NO: 6900 - protein, 512 aa, Pseudomonas fluorescens PfO-1
MNSTLGSGIIPRRTIGVLAASLLTLSVNAAPLTRDNGAAVGDNQNSQTAGANGPVLLQDVQLIQKLQRFDRERIPERVVHARGTGAHGTFTTTNDLSDLSKAKVFTAGQVTPVFVRFSAVVHGNHSPETLRDPRGFATKFYTADGNWDLVGNNFPTFFIRDAIKFPDMVHAFKPDPRTNLDDDSRRFDFFSHVPEATRTLTELYSNSGTPASYREMDGNSVHAYKLVNAKGDVHYVKFHWKSLQGIKNLDPKQVEKVQGRDYSHMTHDLVENIQKGNFPKWDLYIQVLNPQDLSKFEFDPLDATKIWPGVPERKVGQMVLNRNPANVFQETEQVAMAPSNVVPGIEPSEDRLLQGRIFAYADTQMYRLGANALQLPINAAKTAVNNGNQDGAMNAGASTSGVNYEPSRLQPREETAGARYSQTALQGSTQQAKIQREQNFKQAGDLYRSFSKKERQDLIESFGGSLASADDESKHIMLSFLYKADPEYGAGVTKVAKGDLSRVKALAAKLAD

SEQ ID NO: 6901 - protein, 497 aa, Vibrio vulnificus CMCP6
MGLASISVHAQTLTRDNGAPVGDNQNSITAGENGSVLLQDVHLIQKLQRFARERIPERVVHARGTGAHGEFVVSGDFSDLTLSSPFAQSGKVTPVFVRFSTVIHSKGSPETLRDPRGFATKFYTDQGNWDLVGNNLPVFFIRDSIKFPDMVHSLKPSPVTNLQDPNRFFDFFSSQPSATNMLTWVYTNLGTPASYRTMDGFGVHAYKWINRKGEVNYVKFHWKSQQGVKSLRPAEVTKVQGEDFNHLTNDLYTQINAGNFPKWDLYVKVLSPKALSKLDYNGLDATKVWLDVPEKKVGTMTLNRVPDNFFLETEQSAFAPSNIIPGIEPSEDRLLQGRLFAYADTQLYRLGANLFQLPVNSPKSPVANHNQDGPSNNSTGLGNVDSLDVNYEPSRLVNLTVDKQARAVETPLSGHVQQQAIRNPRDFFQAGVLYRSLSEQDKADLIHNLSGDLNKVNDAEVKAIMVSYFYRADKEYGTRLAKATDVNLKQVTKLASM

SEQ ID NO: 6902 - protein, 216 aa, Daucus carota
MAAPPARPRADYDYLIKLLLIGDSGVGKSCLLLRFSDGSFTTSFITTIGIDFKIRTIEMDGKRIKLQIWDTAGQERFRTITTAYYRGAMGILLVYDVTDESSFNNIRNWIRNIEQHASDNVNKILVGNKADMDESKRAVPTSKGQALADEYGIKFFEASAKTNMNVEEVFFSIAKDIKQRLAETDSKTEPQTIKINQQEQGAGTSAASQKSACCGS

SEQ ID NO: 6903 - protein, 471 aa, Escherichia coli
TTHLVWFRQDLRLHDNLALAAACRNSSARVLALYIATPRQWATHNMSPRQAELINAQLNGLQIALAEKGIPLLFREVDDFVASVEIVKQVCAENSVTHLFYNYQYEVNERARDVEVERALRNVVCEGFDDSVILPPGAVMTGNHEMYKVFTPFKNAWLKRLREGMPECVAAPKVRSSGSIEPSPSITLNYPRQSFDTAHFPVEEKAAIAQLRQFCQNGAGEYEQQRDFPAVEGTSRLSASLATGGLSPRQCLHRLLAEQPQALDGGAGSVWLNELIWREFYRHLITYHPSLCKHRPFIAWTDRVQWQSNPAHLQAWQEGKTGYPIVDAAMRQLNSTGWMHNRLRMITASFLVKDLLIDWREGERYFMSQLIDGDLAANNGGWQWAASTGTDAAPYFRIFNPTTQGEKFDHEGEFIRQWLPELRDVPGKVVHEPWKWAQKAGVTLDYPQPIVEHKEARVQTLAAYEAARKGK

SEQ ID NO: 6904 - protein, 745 aa, Neurospora crassa
MAPSKVVIYAMRRELRLSDNPIFHHLSNPESKHGFSHLLPVYVFPAQQIDLSGFVPKGSENPHPAPKSAVGGYARCGPYRAKFLAESVWDLKTSLQSIGSDLLVRAGPYKDVIQSLVEGLKAKECQVGAVWMTSHEGSEEKSEEKTVASFCAKSGIDFKLWDDEKYLIHDRDTGITHLNDLPDVFTTYRKQIEPLREKARKTLPVPEKGALPAYPDIDMIPSQQPPFNIPGTCEELVDAVVRPVKNFLKDLPDFPEKAESSHPFRGGETSAHKRIDHLVLSGGMKSYKDSRNGLLGPDFSTKLSAYLAQGCVTARQIHHALVAYEDGTGTKYKGADGFGEGDNQGTETVRMELLWRDYMRLCHQKYGDKLFRVEGFNGKHTDYEGEDKKYGWRTANTSIALPGQEPTPEKVSEILARFNAGTTGMGLIDASQRELIHTGYTSNRTRQNVASFLAKHLEIDWRYGAEWYEMLLVDYDVSSNWANWQYVAGVGNDPRGAARIFNPVKQAFDYDKDGTYVRTWVPEVAKFENLENVFQAWTASKEDLKTAGLEGNIMVTDPVKPIKFNLDHKPSKVKKRPFFRKRGTKTRDAQGSAESPGSSDSHSGSGGSPDGSGGGNIPSESNCAAAGSGQAQQTHQGSGRSQSSSNHGGRSHSHQHNQQNYHHSHRGNDYTRGGGGGRGGRGGRGGGGGGYSASQGYYGIGGGYRGGGRGRGGGGGFRGRYAPTGGLGGHHHSEQQVASQFQTDA

SEQ ID NO: 6905 - protein, 505 aa, Oryza sativa
MEGAGRDGNPLGGYRIGKTLGIGSFGKVKIAEHILTGHKVAIKILNRRKIKSMEMEEKVKREIKILRLFMHPHIIRLYEVIDTPADIYVVMEYVKSGELFDYIVEKGRLQEEEARRFFQQIISGVEYCHRNMVVHRDLKPENLLLDSKCNVKIADFGLSNVMRDGHFLKTSCGSPNYAAPEVISGKLYAGPEVDVWSCGVILYALLCGTLPFDDENIPNLFKKIKGGIYTLPSHLSPLARDLIPRMLVVDPMKRITIREIREHQWFTVGLPRYLAVPPPDTAQQVKKLDDETLNDVINMGFDKNQLIESLHKRLQNEATVAYYLLLDNRLRTTSGYLGAEFHESMESSLAQVTPAETPNSATDHRQHGHMESPGFGLRHHFAADRKWALGLQSRAHPREIITEVLKALQELNVCWKKIGHYNMKCRWSPSFPSHESMMHNNHGFGAESAIIETDDSEKSTHTVKFEIQLYKTRDEKYLLDLQRVSGPQLLFLDLCSAFLTQLRVL

SEQ ID NO: 6906 - protein, 207 aa, Daucus carota
MERADQQARGFQGYRKIHQQQQLPASGTASTGTDNNPAAGDQDCLVREQDRFMPIANVIRLMRKSIPSHAKISDDAKELVQESVSEFISFVTSEANYRCQKEQRKTITAEDVLWAMSSLGFDDYVEPLTFYLDRFREADGGERSALRGEPLVRRSGEHGAPGIPPTFAPGYYMGPHNALLGAVTMGSFVNDVHNAGPSGAGVNTLDP

SEQ ID NO: 6907 - protein, 444 aa, x Doritaenopsis sp.
MSKMFGKEVPLSKMAVSKAHGEGSPYFAGWKAYEENRYDAVGNPDGVIQMGLAENQLSFDLLEEYLELHPEAFSWASDSSSFRENALFQDYHGLQTLRQALASFMEKIRGGRSKFDANRIVLTAGATAANEILTFILADRGDALLVPTPYYPGFLRDLQWRTGVTIFPVHCYSSNGFQLTLSSLEKAYAEAKASNFNVRGLLMTNPCNPLGTSASLSLLQDIIHFISDKTIHLISDEIYSGSVFSSTNLFSISDLITDAISEQVHIVYSLSKDLGLPGFRVGALYSYNDRVVKTARRMSSFSLVSSQTQRLLSFMLSDEEFTVRYIEKNRERLRERYELVVNGLKEAGIECLKGEAGLFCWVNMEKLMEEETKEGEAEPWKVIIDDLKLNISPGSSCCCAEPGWFRLCFANMSRETLEGVKRLKDFAQKKVAAKKKKMNNVYFC

SEQ ID NO: 6908 - protein, 76 aa, Zea mays
  misc_feature (1)..(1): Xaa can be any naturally occurring amino acid
XSDETWKMGDIVHTLTNRRWLEKCVTYAESHDQALVGDKTIAFWLMDKDMYDFMALDRPSTPTIDRGIALHKMIRL

SEQ ID NO: 6909 - protein, 721 aa, Oryza sativa
  misc_feature (9)..(9): Xaa can be any naturally occurring amino acid
  misc_feature (48)..(48): Xaa can be any naturally occurring amino acid
  misc_feature (372)..(372): Xaa can be any naturally occurring amino acid
MSASPSSMXSGAGAGEAGVRTVVWFRRDLRVEDNPALAAAARAAGEVXVPVYVWAPEEDGPYYPGRVSRWWLSQSLKHLDASLRRLGASRLVTRRSADAVVALIELVRSIGATHLFFNHLYGSIDPEFQIDPLSLVRDHRVKALLTAEGIAVQSFNADLLYEPWEVVDDDGCPFTMFAPFWDRCLCMPDPAAPLLPPKRIAPGELPARRCPSDELVFEDESERGSNALLARAWSPGWQNADKALAAFLNGPLMDYSVNRKKADSASTSLLSPYLHFGELSVRKVFHQVRMKQLMWSNEGNHAGDESCVLFLRSIGLREYSRYLTFNHPCSLEKPLLAHLRFFPWVVDEVYFKVWRQGRTGYPLVDAGMRELXATGWLHDRIRVVVSSFFVKVLQLPWRWGMKYFWDTLLDADLESDALGWQYISGSLPDGRELDRIDNPQLEGYKFDPHGEYVRRWLPELARLPTEWIHHPWDAPESVLQAAGIELGSNYPLPIVELDAAKTRLQDALSEMWELEAASRAAMENGMEEGLGDSSDVPPIAFPPELQMEVDRAPAQPTVHGPTTAGRRREDQMVPSMTSSLVRAETELSADFDNSMDSRPEVPSQVLFQPRMEREETVDGGGGGGMVGRSNGGGHQGQHQQQQHNFQTTIHRARGVAPSTSEASSNWTGREGGVVPVWSPPAASGPSDHYAADEADITSRSYLDRHPQSHTLMNWSQLSQSL

SEQ ID NO: 6910 - protein, 286 aa, Leuconostoc mesenteroides subsp. mesenteroides ATCC 8293
MSLVDTYKLTNGIEIPIIGFGTWQSANGTEAYQSVRWALEAGYRHIDTAAVYGNEDSVGRAIKDSGIPRDELFVTTKLWNDAHTYERAIQALDTSLSKLGLDYVDLYLIHWPNPAALQKQGKDAWIDANADTWRALEDEYKIGKTTAIGVSNFQIEHLEALAKTQTIAPMVNQNFLNPSDNQQELVDYDKDHGMLNEAYSPLGTGKLVDLPQVVSLSEKYNKSVPQILIRWSLDKGFLPLPKSTHETYIKANADVFDFALTSAEIESLDSLTGVGGFHTDASSADF

SEQ ID NO: 6911 - protein, 730 aa, Pasteurella multocida subsp. multocida str. Pm70
MVQLVSPSVINQFFEGTHADPFSVLGMHETEKGIEIRALLPDASRVVVIDRETHNAVCELEHVDERGFFAAVIPKTRTFFAYQLQVFWGAESQFIEDPYRFHPMLADLDNWLLSEGSHLRPYEVLGAHFMECDGVSGVNFRLWAPNAKRVSIVGDFNYWDGRRHPMRFHQKSGVWELFLPKASLGQLYKFELIDCHGQLRLKADPYAFSSQLRPDTASQISALPEIVPMTEQRRKANQFDQPISIYEVHLGSWRRNLENNFWLDYDQIADELIPYVKEMGFTHIEFLPISEFPFDGSWGYQPLGLYSPTSRFGTAEGFKRLIEKAHQAGINVILDWVPGHFPSDTHGLAAFDGTALYEHADPREGYHQDWNTLIYNYGRNEVRNFLSSNALYWLERFGLDGIRVDAVASMIYRDYSRAEGEWIPNQYGGRENLEAIEFLKHTNWKIDSEVQGAISIAEESTSFAGVTKPSTEGGLGFHFKWNMGWMNDTLSYMQKDPVYRQYHHDQMTFGMVYQYSENFVLPLSHDEVVHGKCSLLGKMPGDAWQKFANLRAYYGYMWGYPGKKLLFMGNEFAQGREWNYQESLDWFLLEEEHGGRWHQGVQLLVKDLNHIYQQHASLFELDGSPEGFDWLVVDDRQNSVFAFERRSKDGERIIVVSNFTPVPRHDYRFGVNMAGNYVEILNTDSAFYQGSNVGNYGEVGSEAIPSHARAQSICVSIPPLATIYLKYQGE

SEQ ID NO: 6912 - protein, 541 aa, Methanocaldococcus jannaschii
MCSISGIIVKDNQISAKYSIDMMKILKHRGRDNSGLLLDDEVIYFNDFEDVEDLEEEMIGNLSLAHNRLAIVGRYGVQPIPNEDETIWLVCNGEIYNYIELREYLKQNHEFRTDSDNEVIIHLYEEEKLEELDGDYAFAIYDKSKNVVRLARDMFGVKPLFYVDRDKYFAFASERKALWHLLINIDGCERDLDELNSKIKTLKPNSQLIYYLDDNRFEIIEGFKKLELNYMKERSYEEAKEYLDRALKNSVLKRVRGLDKVGIICSGGVDSSLIAKLASLYCEVILYAVGTENSEDLIYAERLAKDLNLKLRKKIISEEEYEEYVFKVAKAIDEVDLMKIGVGIPIYVASEMANEDGLKVVLSGQGADELFGGYARHERIYRERGEEELKKELLKDVYNLYKVNLERDDHCTMANGVELRVPFLDEEVVEIALSIPIEYKMSELSNRPYAESNISLKSEPINGLKNTNLNIKCVRSVRKKILRDVASQYLPDYIAYRPKKAAQYGSGGEKMIYKVAKKYGFSKKRINEFLDMLKRKIVSEF

SEQ ID NO: 6913 - protein, 397 aa, Pseudomonas aeruginosa
MWYHGILQPTLWQLIVATLALTHVSIISVTLYLHRHSAHRSVQLHPALKHFFRFWLWLTTGMNTRAWTAVHRRHHACCETPDDPHSPRFKGLLTVLLRGAELYRAEARNPETLQTYGRGCPDDWLERRLYSRFPNAGLGLMLGVDLVLFGVAGLTVWALQMIWIAFWAAGVINGLGHAFGYRTFECPDDSSNLLPWGVLVGGEELHNNHHAYPGSAKLSVQAWEFDLGWAWICLLRALGLAQVNRGLPTIQWDCDKRALDLEASGVILRNRLLVMAQYGKRVMRPLAREESARCDAATRHLLRRASRLLVRDPDRLSDLQQSLFHSAVGRSQVMQLACAHRLALQRTWSDAGADLGEVHAALKRWVTEAEASGIRPLREFAGLLCSYSLYAPRQIVP

SEQ ID NO: 6914 - protein, 142 aa, Thermotoga maritima
MLLGRREDIFRPFRELQREIDRLFDDFFRTEVRPAPDMDVFETDDEVVIEVEIPGIDRKDVQITVEENILKISGEKKLEREQKGKNYYYVERSAGKFERAIRLPDYVDVEKIKAEYKNGVLTIRVPKKEERKKKVIEVEVQE

SEQ ID NO: 6915 - protein, 130 aa, Zea mays
QSDETWKMGDIVHTLTNRRWLEKCVTYAESHDQALVGDKTIAFWLMDKDMYDFMALDRPSTPTIDRGIALHKMIRLITMGLGGEGYLNFMGNEFGHPEWIDFPRGPQRLPSGKFIPGNNNSYDKCRRRFD

SEQ ID NO: 6916 - protein, 438 aa, Fervidobacterium sp. YNP
MIRRSDFPKDFIFGTATAAYQIEGAANEDGRGPSIWDVFSHTPGKTLNGDTGDVACDHYHRYKEDIQLMKEIGLDAYRFSISWPRIMPDGKNINQKGVDFYNRLVDELLKNDIIPFVTLYHWDLPYALYEKGGWLNPDIALYFRAYATFMFNELGDRVKHWITLNEPWCSSFLGYYTGEHAPGHQNLQEAIIAAHNLLRAHGHAVQAFREEVKDGKVGLTNVVMKIEPGDAKPESFLVASLVDKFVNAWFHDPVVFGKYPEEAVALYTEKGLQVPDSDMNIISTPIDFFGVNYYTRTLVVFDMNNPLGFSYVQGDLPKTEMGWEIYPQGLFDMLVYLKERYKLPLYITENGMAGPDKLENGRVHDNYRIEYLEKHFEKALEAINAGVDLKGYFIWSLMDNFEWAYGYSKRFGIIYVDYNTQKRILKDSALWLKEFLKS

SEQ ID NO: 6917 - protein, 544 aa, Acinetobacter sp. ADP1
MSAKDVKFGDSARSKMIAGVNVLADAVKVTLGPKGRNVVIDRSFGAPHITKDGVTVAKEITLKDKFENMGAQLVREVSSKTNDIAGDGTTTATVLAQAILNEGIKSVTAGMNPMDLKRGIDIAVRAVVENIRATAKPADDFKAIEQVGSISANSDETVGKLIAQAMEKVGKEGVITVEEGSGFEDALDVVEGMQFDRGYISPYFANKQDTLTAELENPFILLVDKKISNIRELITTLEAVAKTGKPLLIIAEDVEGEALATLVVNNMRGIIKVCAVKAPGFGDRRKAMLQDIAILTGATVISEEVGMSLEQASLQDLGTAHKITVSKENTVIVDGAGDANAIAERVQQIRAQIEESTSEYDKEKLQERVAKLAGGVAVIKIGAATEVEMKEKKDRVDDALHATRAAVEEGVVAGGGVALVRAVNSLDGLTGANDDQTVGINILRRAIEAPLRQIVSNAGDEPSVVINAVKAGEGNYGYNAATGVYGDMLEMGILDPAKVTRSALEHAASVAGLMLTTEAMITDIPEDKPAMPDMGGMGGMGGMM

SEQ ID NO: 6918 - protein, 126 aa, Yarrowia lipolytica CLIB122
MSCTDLLLVIVAVFFPPIPVAIRRGVCSADFFINVALCCLGFLPGLIHAFYIISKYPGDEHGCRHGGYAPVNGSEQTFYGSSDLERAGPSSSHQQQPQHQAPPSGEYYTSLDNKKDNTNRPPPYSG

SEQ ID NO: 6919 - protein, 481 aa, Arabidopsis thaliana
MALKALDYDTLNENVKKCQYAVRGELYLRASELQKEGKKIIFTNVGNPHALGQKPLTFPRQVVALCQAPFLLDDPNVGMLFPADAIARAKHYLSLTSGGLGAYSDSRGLPGVRKEVAEFIQRRDGYPSDPELIFLTDGASKGVMQILNCVIRGNGDGILVPVPQYPLYSATISLLGGTLVPYYLDESENWGLDVANLRQSVAQARSQGITVRAMVIINPGNPTGQCLSEANIREILKFCYNEKLVLLGDEVYQQNIYQDERPFISSKKVLMEMGSPFSKEVQLVSFHTVSKGYWGECGQRGGYFEMTNLPPRVVEEIYKVASIALSPNVSAQIFMGLMVNPPKPGDISYDQFARESKGILESLRRRARLMTDGFNSCKNVVCNFTEGAMYSFPQIRLPTGALQAAKQAGKVPDVFYCLKLLEATGISTVPGSGFGQKEGVFHLRTTILPAEDEMPEIMDSFKKFNDEFMTQYDNNFGYSKM

SEQ ID NO: 6920 - protein, 220 aa, Brassica napus
MAQQQSLIYSFVARGTVILVEFTDFKGNFTSIAAQCLQKLPSSNNKFTYNCDGHTFNYLVEDGFTYCVVAVDSAGRQIPMAFLERVKEDFNKRYGGGKAATAQANSLNKEFGSKLKEHMQYCMDHPDEISKLAKVKAQVSEVKGVMMENIEKVLDRGEKIELLVDKTENLRSQAQDFRTTGTQMRRKMWLQNMKIKLIVLAIIIALILIIVLSVCHGFKC

SEQ ID NO: 6921 - protein, 549 aa, Wolbachia endosymbiont of Drosophila ananassae
MTNVVVSGEQLQEAFREVAAIVDSTVAITAGPRGKTVGINKPYGAPEITKDGYKVMKGIKPEKPLNAAIASIFAQSCSQCNDKVGDGTTTCSILTSNMIMEASKSIAAGNDRVGIKNGIQKAKDVILKEIASMSRTISLEKIDEVAQVAIISANGDKDIGNSIADSVKKVGKEGVITVEESKGSKELEVELTTGMQFDRGYLSPYFITNNEKMIVELDNPYLLITEKKLNIIQPLLPVLEAIVKSGKPLVIIAEDIEGEALSTLVINKLRGGLKVAAVKAPGFGDRRKEMLEDIATLTGAKYVIKDELGIKMEDLTLDDLGTAKNVKITKDNTTVVSENSDSDSVKARIEQIKSQIETSTSDYDKEKLRERLAKLSGGVAVLKVGGATEVEVKERRDRVEDALHATRAAIEEGIVPGGGVALLYASSVLDKLKGASDEEQIGINIIKKVLSAPIRRLVKNAGLESAVIIDYLIKQNDKELIYNVEAMNYANAFTAGVIDPAKVVRIAFETAVSVASVLITTESMIVDVPSKENASSPMGAGEMSGMGGF

SEQ ID NO: 6922 - protein, 841 aa, Thiobacillus denitrificans ATCC 25259
MKTALHQLLPAFLRRLLKRIKDRPDSEFQQTLIRIVIGLGFLLYFSRDLATLDESTREIAQLISAFFTAIAVVITALSLTSLKVSPPRRIVAMALDYATCSFLLTYTGEAGSPLLVVYLWVTLGNGFRYGVFYLYIAAAMAITGFLLVLTYSSYWNSHMSIGLAFLLSMIAVPLYSASLLKQLHSAVERERKASLAKSSFLANMSHELRTPLNGVIGVADLLAETKLNKEQKEFAQIIRTSADTLLELIDNVLDISRIEAGRILTSSEDFDLHRVINGTVAMMETQANAKGLVLAAHIAPQTPFQLQGDAPHLRQVLINLIGNAVKFTEHGRVDVYVRPVGQGNPQRLRLEVVDTGIGIPPDAQIRIFDSFTQADASITRRFGGTGLGTTIAKQLVEAMGGEIGLHSREGEGTTFWFELPFALRSSGQPAEERFDAPMRVALLASGDLADRMQAAIRAWDVEAVTLRSAAQLGSQLSASPASEASFGAIVVERSLLPADPVAFLSQLREGPVRSSLPVILIESDARIPPSEDALLLRAGYASVLRSPVNTGLLFNAIHAVTSRELPPNVISLANRFQAQTAQATGLNILVAEDNPVNQRVLRGLLEHAGHKTTLAHDGEEALDLLDSDGASFDLAIIDMHMPELSGPEVVQRWRFLEKGHLPIIMLTADARSEAETACKEAGADAFLTKPVNSRELIDAITRLGVPSPSPVTAPAAKAVRTGELDETVLDDLAELGGAEFVRELLASFEDDSARALRDAEFALVAHEYGQWHHHLHMLKGGASDVGANLLAERCAEAERVKPFELATPLARTRLDAVRTALEEARTALSRYQERRLRAEHS

SEQ ID NO: 6923 - protein, 386 aa, Yarrowia lipolytica CLIB122
MADFIRTQIFGTCFEITSRYVDLNPVGMGAFGLVCSAKDQLTDQNVAIKKIMKPFGTPVLSKRTYRELKLLKHLRHENLICLSDIFISPLEDIYFVTELLGTDLHRLLMTRPLEKQFIQYFLYQILRGLKYVHSAGVVHRDLKPSNILVNENCDLKICDFGLARIQDTQMTGYVSTRYYRAPEIMLTWQKYDVEVDIWSTGCIFAEMLEGKPLFPGKDHVHQFSIITELLGSPPEDVIHTICSENTLRFVRTLPRRERIPLASKFRNADPEAIDLMEKMLVFDPKKRITAAEALAHPYLAPYHDPSDEPVAEERFDWSFNDADLPVDTWKVMMYSEILDFHNVDIDVNGQPPQGQFEQVHAQAQAAVAQNEAARAREQEQQQQEQQ

SEQ ID NO: 6924 - protein, 521 aa, Aspergillus nidulans FGSC A4
MVTLSRVSQESSSHRQRREIRDISVQTTEYAGVYGTKYAAEELPLYVMNDNGMPPDVAEQMIRDELSLDGNPLLNMASFVTTYMEPQVETLMAAAMRKNFIDFEQYPQSARMQTRCVNMIADLFNAPTNQESKEGTEHGESEGAEGAMGTSTVGSSEAIMLALLAMKKTWHKKRSDAGKDTSHPNIIMNSAVQVCWEKAARYFDVEERYCYCTDDRYVIDPVQAVELVDENTIGICAIMGTTYTGHYEDVKAINDLLVQRNIDCPIHVDAASGGFVAPFICPELVWDFRLEKVVSINVSGHKYGLVYPGVGWIFWRSPEYLPRELVFNINYLGSEQATFTLNFSKGASHIIGQYYQLIRLGRNGYKAIMQNLVQVSQNLARGLSDLGLLILSDNTGNGSGGVPLVAFRLPDDESRLFDEFAVSAVLRRRGWVVPAYTMAPRSNNLKLMRIVVREDFTAHRCGILIQDIKMAIEWLEEMDETTIQRYTTYLAQHGTRLPNAHSFYKDEHSLHGKTGKTHAVC

SEQ ID NO: 6925 - protein, 239 aa, Antirrhinum majus
MEFPNQDSESLRKNGRGKIEIKRIENITNRQVTFCKRRNGLLKKAYELSVLCDAEVALVVFSSRGRLYEYANNSVRATIERYKKASADSSNSVSTSEANTQFYQQEANKLRRQIREIQTSNRQMLGEGVSNMALKDLKSTEAKVEKAISRIRSKKNELLFAEIEHMQKRELELHNANMFLRAKIAEGERAQQQMNLMPGSDYQPMTSQSYDVRNFLPMNLMEPNQQQYSRHDQTALQLV

SEQ ID NO: 6926 - protein, 544 aa, Methanocaldococcus jannaschii DSM 2661
MRDMCSISGIIVKDNQISAKYSIDMMKILKHRGRDNSGLLLDDEVIYFNDFEDVEDLEEEMIGNLSLAHNRLAIVGRYGVQPIPNEDETIWLVCNGEIYNYIELREYLKQNHEFRTDSDNEVIIHLYEEEKLEELDGDYAFAIYDKSKNVVRLARDMFGVKPLFYVDRDKYFAFASERKALWHLLINIDGCERDLDELNSKIKTLKPNSQLIYYLDDNRFEIIEGFKKLELNYMKERSYEEAKEYLDRALKNSVLKRVRGLDKVGIICSGGVDSSLIAKLASLYCEVILYAVGTENSEDLIYAERLAKDLNLKLRKKIISEEEYEEYVFKVAKAIDEVDLMKIGVGIPIYVASEMANEDGLKVVLSGQGADELFGGYARHERIYRERGEEELKKELLKDVYNLYKVNLERDDHCTMANGVELRVPFLDEEVVEIALSIPIEYKMSELSNRPYAESNISLKSEPINGLKNTNLNIKCVRSVRKKILRDVASQYLPDYIAYRPKKAAQYGSGGEKMIYKVAKKYGFSKKRINEFLDMLKRKIVSEF

SEQ ID NO: 6927 - protein, 711 aa, Novosphingobium aromaticivorans DSM 12444
MSVRAYRHLLSPGRINRLELKNRIFFSPMGSNLAEEDGSVGDRLRTYYVARAKGGAALVTMGSVSVGFPEGASNWRQEAISDDRFVPGLKRLADEVHEHGAKLCVQLHHGGLVAMTDMLDGRPVACPNPPPAAKDSGDFVDVMLPEEQAKFFEPYAKMGEVRYNSLDASGVDHIVDLFARAAVRAKTAGIDAVELHAGHGYIFSTFLSPAYNHRTDEFGGSIENRARLLLKTIRAVRAAVGPDYPVWMRFDSQEFLMDYGITLEDAIAVARMAQEAGLDAIHVSAHGDGNYGRTYSTGHATDIRNGFVDNAAAIKAAVSIPVICPGRIEPEEADRFIAQGKLDFVTMGRKLLADPELPNKLAAGKPETVRPCVYCYTCISSIFNSSHIVCAVNPMTGFETDRQPQPASKRKVVLVVGGGPGGMAAARDLSDKGHKVVLCEATDRLGGTAQFASIAYAPNQRIVDWLRREVTARPIEVRLGTRATADLARRIGADEVIVATGARRAMPPIPGSERDFVFSGDDMRNLVLGQNLDSLASKTGLATRLAMKLGRATGLTKRIGLLRAGSKAWMPLGEHVVIIGGELVGLELAEFLAHRGRKVTVLEESARVGKGIPLVRRFRAVDDCHALGVALLTETSGFRIGDGTVTYSNAHGQERTLRADTVIVAQGATGDESLTKEMRSAGFLTHSVGDCTGVGYIEGAMRDAALAIQAI

SEQ ID NO: 6928 - protein, 442 aa, Arabidopsis thaliana
  misc_feature (402)..(402): Xaa can be any naturally occurring amino acid
MKSTPKLLLLLLFIINHHVDSGSIVKFLPGFEGPLPFELETGYIGIGEEEDVQLFYYFIKSERNPKEDPLLLWLSGGPGCSSITGLLFENGPLALKSKVYNGSVPSLVSTTYSWTKTANIIFLDQPIGAGFSYSRIPLIDTPSDTGEVKNIHEFLQKWLSKHPQFSSNPFYASGDSYSGMIVPALVQEISKGNYICCKPPINLQGYILGNPITYFEVDQNYRIPFSHGMALISDELYESIRRDCKGNYFNVDPRNTKCLKLVEEYHKCTDELNEFNILSPDCDTTSPDCFLYPYYLLGYWINDESVRDALHVNKSSIGKWERCTYQNRIPYNKDINNSIPYHMNNSISGYRSLIYSGDHDLVVPFLATQAWIKSLNYSIIHEWRPWMIKDQIAGYIIYFCVXTRTYSNKMTFATVKGSGHTAEYKPNETFIMFQRWISGHDL

SEQ ID NO: 6929 - protein, 165 aa, Nostoc punctiforme PCC 73102
MPLVRWNPFRDSERLEPFRDTESWEPFREIDTLQRQMNRLFDRLMPTTNGGERSGFIFSPAAELEETDDAIRLRLEVPGLEAKDINVEATPESISITGERKTETKSEENGITRSEFRYGKFQRVIPLPSQIQNDKVQAEYKNGILQLTLPKAESEKHKAVKVNLG

SEQ ID NO: 6930 - protein, 334 aa, Haemophilus influenzae R2866
MKTLSEFIVERQAEYPNAKGELSGILSSIRLLAKIIHRDINKAGLTNILGQSGIENVQGESQMKLDLFAHNTMKAALMAREEVAGFASEEEESFIAFDTERGRNAKYIILTDPLDGSSNIDVNVSVGTIFSIYRRVSPIGSPVTLEDFMQPGNKQVAAGYIVYGSSTMLVYTTGHGVNGFTYDPSIGTFCLSHENMQMPKEGKIYSINEGQYLKFPQGVKKYIKYCQEEDKATHRPYVSRYIGSLVADFHRNLLKGGIYIYPSATNYPNGKLRLLYEGNPIAFLAEQAGGVATDGYRRILDIQPTELHQRVPLFVGSEDMVKKAQEMMEEFKEE

SEQ ID NO: 6931 - protein, 151 aa, Pseudomonas putida KT2440
MYESLLNLSSDPIAEFEKLQRELQHVLGTGLGRPGSIRALASGAFPAINVASTPSSMEVYAFVPGVDPSDIDLQIHRGLLSISGERRPARSTQEGNCSVYANERYAGPFKRTVSLNDQVDTDKVEAHYRDGVLRISLPRREALQPKRIVIQ

SEQ ID NO: 6932 - protein, 255 aa, Zea mays
MCQTVRRTPPLLSPSLGSWASLPTPEQPSSPCSASPPPRTAPPAPPARAGGTQLPASSLRRGYTMEGAGRDANPLGGYRIGKTLGIGSFGKVKIAEHILTGHKVAIKILNRRKIRSMEMEEKVKREIKILRLFMHPHIIRLYEVIDTPADIYVVMEYVKSGELFDYIVEKGRLHEEEARRFFQQIISGVEYCHRNMVAHRDLKPENLLLDSKCNIKIADFGLSNVMRDGHFLKTSCGSPNYAAPEVISGKLYAGP

SEQ ID NO: 6933 - protein, 130 aa, Zea mays
QSDETRKMGDIVHTLTNRRWLEKCVTYAESHDQALVGDKTIAFWLMDKDMYDFMALDRPSTPTIDRGIALHKMIRLITMGLGGEGYLNFMGNEFGHPEWIDFPRGPQRLPSGKFIPGNNNSYDKCRRRFD

SEQ ID NO: 6934 - protein, 1129 aa, Petroselinum crispum
MSSSRPANSSSNPGRANQNARVVLTTLDAKIHADFEESGNSFDYSSSVRVTSAVGENSSIQSNKLTTAYLHHIQKGKLIQPVGCLLAVDEKSFKIMAYSENAPEMLTMVSHAVPSVGEHPVLGIGTDVRTIFTAPSAAALQKAVGFTDINLLNPILVHCKTSGKPFYAIAHRVTGSLIIDFEPVKPYEVPMTAAGALQSYKLASKAVNRLQALPGGSMERLCDTMVQEVFELTGYDRVMAYKFHDDDHGEVTAEVTKPGLEPYFGLHYPATDVPQAARFLFLKNKVRMICDCRANSAPVLQDEKLPFELTLCGSTLRAPHSCHLQYMENMNSIASLVMAVVINDSDEVVESSDRNSVKSKKLWGLVVCHNTSPRFVPFPLRYACEFLAQVFAIHVSKELELENQIVEKNILRTQTLLCDLLMRDAPLGIVSQSPNMMDLVKCDGAALLYKNKVYRLGATPSDYQLRDIVSWLTEYHTDSTGLSTDSLYDAGYPGALALGDVVCGMAVVKITSHDMLFWFRSHAAGHIRWGGAKAEPDENHDGRKMHPRSSFKAFLEVVKTRSTTWKEFEMDAIHSLQLILRKALSVEKAVAAQGDEIRSNTDVIHTKLNDLKIEGIQELEAVTSEMVRLIETATVPIFAVDADEIVNGWNTKIAELTGLPVDQAMGKHLLTLVEDSSVGTVVFLLALALQGKEEQGIPFEFKTYGSREDSVPITVVVNACATRGLHDNVVGVCFVAQDVTSQKTIMDKFTRIQGDYKAIVQNPNPLIPPIFGTDEFGWCSEWNQAMTELSGWRREDVMNKMLLGEIFGIQTSCCHLKSKEAFVNLGVVLNNALTGQISEKICFSFFATDGKYVECLLCASKKLHGEGTVTGIFCFLQLASQELQQALHIQRLTEQTAMKRLKTLSYLRRQAKNPLCGINFVREKLEEIGMGEEQTKLFRTSVHCQRHVNKILDDTDLDSIIDGYLDLEMSEFRLHDVYVASRSQVSMRSNGKAIQVVDNFSEEMMSETLYGDSLRLQKVLADFMSVCVNLTPVGGHLGISVTLTEDNLGQSVQLVHLEFRITHTGAGVPEEAVSQMFGSDSETSEEGISLLISRKLVKLMNGDVHYLREAGKSTFIITVELAAASKRES

SEQ ID NO: 6935 - protein, 131 aa, Zea mays
QSDEASKMGDIVHTLTNRRWLEKCVTYAESHDQALVGDKTIAFWLMDKDMYDFMALDRPSTPTIDRGIALHKMIRLITMGLGGEGYLNFMGNEFGHPEWIDFPRGPQRLPSGKFIPGNNNSYDKCRRRFDL

SEQ ID NO: 6936 - protein, 327 aa, Burkholderia vietnamiensis G4
MNSSIQVAPGVTAAGGLSAADGQIPGVSPLLGSGARVKRLTALAVMLVPLAGFALAVRQLVLGEFAATDLVLFAVFYFLHMGGITMGFHRYLAHKTFRTSKWFEGLLLICGSMAAQGPIMFWVTTHRRHHLYSDQQGDPHSPNLAGKGLFAKLRGLWYAHMPWMLAPDVSGWTFFAPDVLRDRRLFFYHRTYAWWIVLGLVLPAAIGGAVAGSWLGAWNGLLFGGLARIFVANQAAWCVGSVCHMFGGRPFKTGDNSANNWTVAVFTFGEGLQNNHHAFPASYRHSVKWYEPDLSAWVLWTLGKLGIVRDLRQPTPAAIRKLAKQPY

SEQ ID NO: 6937 - protein, 237 aa, Oryza sativa
ENKINRQVTFAKRRNGLLKKAYELSVLCDAEVALIIFSNRGKLYEFCSGQSMTRTLERYQKFSYGGPDTAIQNKENELVQSSRNEYLKLKARVENLQRTQRNLLGEDLGTLGIKELEQLEKQLDSSLRHIRSTRTQHMLDQLTDLQRREQMLCEANKCLRRKLEESNQLHGQVWEHGATLLGYERQSPHAVQQVPPHGGNGFFHSLEAAAEPTLQIGFTPEQMNNSCVTAFMPTWLP

SEQ ID NO: 6938 - protein, 319 aa, Burkholderia vietnamiensis G4
MAEADLSSSRTPAAARAADADTDSRARRLAYLTVGVPALGFVLAIAYTWTYGVRATDFILLAVMYFSTAIGVETGMHRYFSHRAFKGRPIVTVMLGVFGSMAAQGPILFWAATHRMHHAFTDQDGDPHSPLPRANRHGRPSRLAGLWHGHVGWLFSVRRENWSAYAADLLRDRLIVNLNLRYGWWVLLGLALPALAGALLAPAGQALTGAVGGFLWGGLARIFLLDQSTWAVNSLCHTIGTRPHATRDHSRNLGLLAIVSVGGAWHNNHHAQPAFANNDHAFWQLDPSAWVIRLLDALGLVTEVRYAPKRRATVPSISP

SEQ ID NO: 6939 - protein, 515 aa, Shigella flexneri 2a str. 301
MCSIFGVFDIKTDAVELRKKALELSRLMRHRGPDWSGIYASDNAILAHERLSIVDVNAGAQPLYNQQKNHVLAVNGEIYNHQALRAEYGDRYQFQTGSDCEVILALYQEKGPEFLDDLQGMFAFALYDSEKDAYLIGRDHLGIIPLYMGYDEHGQLYVASEMKSLVPVCRTIKEFPAGSYLWSQDGEIRSYYHRDWFDFDAVKDNVTDKNELRQALEDSVKSHLMSDVPYGVLLSGGLDSSIISAITKKYAARRVHHEIHFTVQEGLDAIRDVIYHIETYDVTTIRASTPMYLMSRKIKAMGIKMVLSGEGSDEVFGGYLYFHKAPNVKELHEETVRKLLALHMYDCARANKAMSAWGVEARVPFLDKKFLDVAMRINPQDKMCGNGKMEKHILRECFESYLPASVAWRQKEQFSDGVGYSWIDTLKEVAAQQVSDQQLETARFRFPYNTPTSKEAYLYREIFEELFPLPSAAECVPGGPSVACSSAKAIEWDEAFKKMDDPSGRAVGVHQSAYK

SEQ ID NO: 6940 - protein, 77 aa, Zea mays
QSDETWKMGDIVHTLTNRRWLEKCVTYAESHDQALVGDKTIAFWLMDKDMYDFMALDRPSTPTIDRGIALHKMIRLI

SEQ ID NO: 6941 - protein, 432 aa, Arabidopsis thaliana
MVIKGMRVGKYELGRTLGEGNSAKVKFAIDTLTGESFAIKIIEKSCITRLNVSFQIKREIRTLKVLKHPNIVRLHEVLASKTKIYMVLECVTGGDLFDRIVSKGKLSETQGRKMFQQLIDGVSYCHNKGVFHRDLKLENVLLDAKGHIKITDFGLSALSQHYREDGLLHTTCGSPNYVAPEVLANEGYDGAASDIWSCGVILYVILTGCLPFDDANLAVICRKIFKGDPPIPRWISLGAKTMIKRMLDPNPVTRVTIAGIKAHDWFKHDYTPSNYDDDDDVYLIQEDVFMMKEYEEEKSPDSPTIINAFQLIGMSSFLDLSGFFETEKLSERQIRFTSNSLAKDLLENIETIFTEMGFCLQKKHAKLKAIKEESTQKRQCGLSVTAEVFEISPSLNVVELRKSHGDSSLYKQLYERLLNELGSSSQVQELLA

SEQ ID NO: 6942 - protein, 54 aa, Zea mays
QSDETWKMGDIVHTLTNRRWLEKCVTYAESHDQALVGDKTIAFWLMDKDMYDFM

SEQ ID NO: 6943 - protein, 738 aa, Prunus persica
MEACNCIEPQWPADELLMKYQYISDFFIALAYFSIPLELIYFVKKSAVFPYRWVLVQFGAFIVLCGATHLINLWTFSMHSRTVAIVMTTAKVLTAVVSCATALMLVHIIPDLLSVKTRELFLKNKAAELDREMGLIRTQEETGRHVRMLTHEIRSTFDRHTILKTTLVELGRTLALEECALWMPTRTGLELQLSYTLRQQNPVGYTVPIHLPVINQVFSSNRALKISPNSPVARMRPLAGKHMPGEVVAVRVPLLHLSNFQINDWPELSTKRYALMVLMLPSDSARQWHVHELELVEVVADQVAVALSHAAILEESMRARDLLMEQNIALDLARREAETAIRARNDFLAVMNHEMRTPMHAIIALSSLLQETELTPEQRLMVETILKSSHLLATLINDVLDLSRLEDGSLQLEIATFNLHSVFREVHNLIKPVASVKKLSVSLNLAADLPVQAVGDEKRLMQIVLNVVGNAVKFSKEGSISITAFVAKSESLRDFRAPEFFPAQSDNHFYLRVQVKDSRSGINPQDIPKLFTKFAQTQSLATRNSGGSGLGLAICKRFVNLMEGHIWIESEGPGKGCTAIFIVKLGFAERSNESKLPFVTKVQANHVQTNFPGLKVLVMDDNGSVTKGLLVHLGCDVTTVSSIDEFLHVISQEHKVVFMDVCMPGIDGYELAVRIHEKFTKRHERPVLVALTGNIDKMTKENCMRVGMDGVILKPVSVDKMRSVLSELLEHRVLFEAM

SEQ ID NO: 6944 - protein, 128 aa, Zea mays
QSDETWKMGDIVHTLTNRRWLEKCVTYAESHDQALVGDKTIAFWLMDKDMYDFMALDRPSTPTIDRGIALHKMIRLITMGLGGEGYLNFMGNEFGHPEWIDFPRGPQRLPSGKFIPGNNNSYDKCRRR

SEQ ID NO: 6945 - protein, 210 aa, Neisseria gonorrhoeae FA 1090
MTLRYEILPVTPFRQNCTLIWDDESGEAVLTDVGGDVPFLLQALANRKLTLTAIWLTHGHLDHAGGVVEMLETHKVPVLGPHREDEFLLQSLPQTTAQYGFPVSPAFAPNRWLEEGETLTVGRYAFQVLHIPGHTPGHVVFYCAEAELLIAGDVLFYETIGRTDFPRGNHADLINNIRNKLFAFPETVQVVAGHERMTSIGHEKRHNPFF

SEQ ID NO: 6946 - protein, 148 aa, Brassica napus
KNLIDQTHQARHKSLRLLSLLAASDSAPVLSSPRLFSSSSDMSGSGSDSSSSSLPVTLDSLNPKVLKCEYAVRGEIVNIAQKLQEDLKINKDAYPFDEIIYCNIGNPQSLGQQPITFFREVLALCSHTALLDESATHGLFSSDSIERA

SEQ ID NO: 6947 - protein, 537 aa, Cryptococcus neoformans var. neoformans JEC21
MTVYVIYNSNCFRWRFLVLLPHLAAVVIVAGFVDPTFPFTTCPSLPQKTSTTPYPPVTMDPTKAQTTATFAHLKAQKANKQCFDCHAKNPTWSSVTFGIYLCLDCSSVHRNLGVHISFVRSTNLDSWSIQQLRTLKVGGNASCAEFFNKNGGGNLLAPQSTDARARYTSRIASLYKEELAKRTQDDAARYPHGIHIDGLELTPLASPAKAAATDDDFFSSWDKPTSKPATPAASAQAATVPSIGLTRAPAPRTVTSSSLRSSTTSAPSSRPASASRLSSSTTTTTGAAPKVSKLGASKLGAKKAAAPIDFEEAQRKALEEEERAKQLSAENKKKEEEAAKAAREREAEEAKKAKAAAAAAASANASVGSSRSGTPANGAAKKSVVNSAPVPGRLGFGQTVGVAAPAQSKTRAAVADDVRTARDKFGNQKGISSDMYFGRGTYDPSAAAEAQTRLRDFQGATAISSNAYFGREEENEEEGGLGGDGGMGGDDAIAGLERGIRDMAERVLANPEVQQFGDQIRAGALKLSDYLASFEGR

SEQ ID NO: 6948 - protein, 701 aa, Xanthomonas oryzae pv. oryzae KACC10331
MAKSSGKPASAVSVDRSASAPDARGTGDELHQKARGRHPQLTTNQGIPVGDNQNSLRATPRGPTLLEDFILREKITHFDHERIPERIVHARGSAAHGYFKLTKSLSQYTTAKIFTEIGEKTPLFTRFSTVAGGAGSVDTPRDVRGFAVKFYTKEGNWDLVGNNIPVFFIQDAIKFPDLIHAVKMEPDRGFPQAASAHDTFWDFISLTPESMHMIMWAMSDRTIPRSLRMIEGFGIHSFRFLNDKGESTFVKFHWRPKLGLQSTIWDEAVKIAGADQDFHRRDLFEAIQNGDFPEWELGVQLFTEAEADAFPFDHLDSTKIIPEELVPLQIVGRMVLDRWPDNFFAETEQVAYCPGNIVPGIDFSNDPLLQGRLFSYLDTQLSRLGGPNFHQIPINAPKCPFVNNQRDGHMQMDVPKGRVAYEPSSLQADAPREALRGFPSHSTPAEDGAKGRVRAERFADHYSQARLFFRSQTAPEQAHMASALVFELSKVETAHVREAIVGHLRHIDQKLAQRVADGMGMTTLPPAPPAAVAPIDMPLSPALQVIGKMKDTLKGRTVGILIHDGSDASTIKAVRKAAEAEGATVKIVAPKLGGAKLSDGKQLAADGQLAGTPSVVFDAVAVLLSSEAAKLLTRESAALDFVSCAWAHLKAIAFDEGAQLLLKAGNIGKDAGVVPAADTKAFISAAKTRQWAREPKVRMLA

SEQ ID NO: 6949 - protein, 154 aa, Bacillus cereus G9241
MSEEKKDSSRPPVRNYLKQIDDFFEQTPLRNVIADLNHFFQKGNRLLTFPVDLYEVGEELVVTAELPGIQKEQIQIEIQSEYLKVSVKEEILEEAEEETSHNYYRRERSISEASRLIKLPYSINKKAAKASYQNGVLEIRAPKLPQQHDILSID

SEQ ID NO: 6950 - protein, 538 aa, Armoracia rusticana
MKLLGIALVLLLAVVTCKAEITCEEDKPFTCNQTERLNRNHFDPDFIFGFASSAYQIEGSRGRGINTWDAFTHRYPEKGGADLGNGDTTCGSYEHWQKDIDVMAELGVNGYRFSFAWSRIVPRGKVSRGINQDGVNYYNNLIDGLLEKNITPFATLYHWDLPQCLQDEYEGFLDREIIEDFKNYADLCFQLFGDRVKNWITINQLFTVPTRGYATGTDAPGRCSSWLNKGCYAGDSGTEPYIVAHNQLLAHATAVDLYRKKYKKEQGGQIGPVMITRWFLPYDDTQASKDAVERNKAFFLGWFMEPLTKGKYPDIMRKLVGDRLPKFTESESKLVKGSFDFLGLNYYYTQYVYAIPKNPPNRLTVMNDSLSALSFVNKDGPIGPWFNADIYYRPRGILDTMEYFKTKYDNPLVYITENGYSSAGGDTPFEEVIADYNRTDFLCSHLCFLRKAIKESGCNVKGYFVWSLGDNYEFCQGFTVRFGVSYIDFKNITADRDLKESGKWYKRFLSVKDNKVPHESQDLLRSRFFLGQKKVADA

SEQ ID NO: 6951 - protein, 361 aa, Oryza sativa
  misc_feature (308)..(308): Xaa can be any naturally occurring amino acid
MAAAAIAAASLLPSSAFALRRLSSAANVSRFAQLKRFDRARRFAPAAAMSTSSGPKEAPANNPGLQAPSEKDPATKGYFMQQTSGRRVSWVKRDGWGSSGSLWAAVGQGGEDVAVLPRLWETRAAGQCQVWVGSSEWLGSGGWGGRFDMNNGITDGGGEAERGERGVVEEEGLWWREGTADRRFRCQAPSAETEAGCLMFRVKDPKVSLDFYSRVMGMSLLKRLDFPEMKFSLYFLGYEDVESAPTDPVKRTVWTFGQRATLELTHNWGTENDPEFKGYHNGNSDPRGFGHIGVTVHDVYKACERFEXLGVEYVKKPDDGKMKGIAFIKDPDGYWIEIFDLNRIGAVTSGSIMMCLKCYEL

SEQ ID NO: 6952 - protein, 520 aa, Neurospora crassa
MVHLTIIPKEDEIRDGLDIPLTGALKAVHLQLANDEDRFTTSVYGSKFAAADLPRHEMPDEEMPKEVAYRMIKDELSLDGNPLLNLASFVTTYMEEEAEKLMTESLPKNFIDYEEYPQTADIQNRCVSMIGRLFNAPVKDAEASSAVGTSSVGSSEAIMLGVLAMKKRWKNKRIAEGKPADKPNLIMSSAVQVCWEKATRYFEVEEKFVYCTPDRYVIDPKETVDLVDENTIGICCILGTTYTGEYEDVKAVNDLLVERGLDTPIHVDAASGGFVAPFVVPDLEWDFRLKNVVSINVSGHKYGLVYPGVGWVVWRSAEYLPQELVFNINYLGADQASFTLNFSKGASQVIGQYYQLIRLGKHGYRAIMSNLTRTADYLAESLAALGFIIMSQKSGQGLPLVAFRLKEDPDRTYDEFALAHQLRVRGWIVPAYTMAPKTEGLKMLRIVVREDFSRNRCDGLISDIRSCQGILEQMDKETVKKQQEFIHKHHVVSGKASHNHPKYHEKHSLQGKTGKTHSIC

SEQ ID NO: 6953 - protein, 716 aa, Arabidopsis thaliana
MSGSVSGCGSGGCSIVWFRRDLRVEDNPALAAAVRAGPVIALFVWAPEEEGHYHPGRVSRWWLKNSLAQLDSSLRSLGTCLITKRSTDSVASLLDVVKSTGASQIFFNHLYDPLSLVRDHRAKDVLTAQGIAVRSFNADLLYEPWEVTDELGRPFSMFAAFWERCLSMPYDPESPLLPPKKIISGDVSKCVADPLVFEDDSEKGSNALLARAWSPGWSNGDKALTTFINGPLLEYSKNRRKADSATTSFLSPHLHFGEVSVRKVFHLVRIKQVAWANEGNEAGEESVNLFLKSIGLREYSRYISFNHPYSHERPLLGHLKFFPWAVDENYFKAWRQGRTGYPLVDAGMRELWATGWLHDRIRVVVSSFFVKVLQLPWRWGMKYFWDTLLDADLESDALGWQYITGTLPDSREFDRIDNPQFEGYKFDPNGEYVRRWLPELSRLPTDWIHHPWNAPESVLQAAGIELGSNYPLPIVGLDEAKARLHEALSQMWQLEAASRAAIENGSEEGLGDSAEVEEAPIEFPRDITMEETEPTRLNPNRRYEDQMVPSITSSLIRPEEDEESSLNLRNSVGDSRAEVPRNMVNTNQAQQRRAEPASNQVTAMIPEFNIRIVAESTEDSTAESSSSGRRERSGGIVPEWSPGYSEQFPSEENGIGGGSTTSSYLQNHHEILNWRRLSQTGYVKSAFGGAKGEEHHKGCNSGEIWLDCKPSTFGTV

SEQ ID NO: 6954 - protein, 398 aa, Pyrococcus furiosus DSM 3638
MIRASKRALSVEYAIRDVVLPARELEKKGIKVIRLNIGDPVKFDFQPPEHMKEAYCKAIKEGHNYYGDSEGLPELRKAIVEREKRKNGVDITPDDVRVTAAVTEALQLIFGALLDPGDEILVPGPSYPPYTGLVKFYGGKPVEYRTIEEEDWQPDIDDIRKKITDRTKAIAVINPNNPTGALYDKKTLEEILNIAGEYEIPVISDEIYDLMTYEGEHISPGSLTKDVPVIVMNGLSKVYFATGWRLGYMYFVDPENKLSEVREAIDRLARIRLCPNTPAQFAAIAGLTGPMDYLKEYMKKLKERRDYIYKRLNEIPGISTTKPQGAFYIFPKIEVGPWKNDKEFVLDVLHNAHVLFVHGSGFGEYGAGHFRAVFLPPIEILEEAMDRFEKFMKERLKE

SEQ ID NO: 6955 - protein, 611 aa, Geobacter sulfurreducens PCA
MCGIVGKYYFNKNAGDSSDIDAMMQAIYHRGPDSSGKYINGRAALGFQRLSIIDTVSGHQPLYNETKTIVLLANGEIYNYKEFVPFLESKGHVFSTRSDCEVIIHLYEEYGIEFISKLNGMFAFCLYDTRNDVMFIARDRVGIKPLYYHLNKEAIIFGSEIKGILASGEVVTEEANDCLAEYLCFRYVANFRTFFSSVNALEPGTYIKISPNGCTFEKFWDLSKYVLNYAQDGDLVETVDAALTASVQRQMMTDVPLGTQLSGGVDSSLVSKLAAGYSPGLKTFTVSFFESAYDESAYARLLADSAGLEYHQIRVDGKTFADTLPKVIWYHDEPLCHANSVHMYLLCTYARQFVTVLLTGEGADELFAGYPRYQICRFGDAYNKLNPSVASLVKSVLKGVPARKIVKIVDNLGLGARELALWNSSFTTKEKVSWLLDSGDVTLDARSALVDSVWNDELSLFDNLLLYEQKSYLQPILMRQDKMSMAASVESRVPVLDNEMLDVANTIPYQYKVRHFTPKHVFKKVAERHISRKIVYKKKVGFGVPVDEWLRDHSGLGRYLDLLLDTARGINGVSRPRIEQLIAEHASRRYNHGDVLWPLVNYAIWREQFFK

SEQ ID NO: 6956 - protein, 204 aa, Schizosaccharomyces pombe
GPCKTVRHLNWLHCMLIFGLPMIAIYGVFTTPLQTKTLIFAIIYYAYSGLGITAGYHRLWSHRAYKAKKPLEYFLAAGGAAAFEGSIRWWSRDHRAHHRYTDTDKDPYNVKKGFWYAHVGWMIILQNPRRIGRSDVSDLNSDPFVMFNHRHFLPIASFMAFIFPSLFCGLLWGDYRGGYFYAGVCRLVFVHHATFCVNSLAHLI

SEQ ID NO: 6957 - protein, 157 aa, Magnetospirillum magnetotacticum MS-1
  misc_feature (156)..(156): Xaa can be any naturally occurring amino acid
MADQSPRLTTAFGNPVSDNQNSLTAGPRGPVLMQDYHLIEKMAHFNRERIPERVVHAKGYGAYGTFRLTKSLGEYTRAKVLTEVGKEVPMVARFSTVGGESGSADTARDPRGFALKFYTEEGNWDLVGNNTPIFFVRDAIKFSDFIRTQKRDPRTXI

SEQ ID NO: 6958 - protein, 430 aa, Arabidopsis thaliana
  misc_feature (147)..(147): Xaa can be any naturally occurring amino acid
MNPSKATGGIVEDLTKQLPKSMFLSMDADKTLLHIIQKKITSAKNVNCILGYCRCPRSLKSLHETDGIKFRVFHDAGNKLISTLRRVKTCAGARVLNMQMEEVDRAFTMSGQLHLTTWTRRRTKTTPQRSMCDPIREDGSNKRGAVXSKEKRPYIHREWSWADIIRALTVINVHFLCLLAPFNYKWEALRFGFVLYALTSLSITFSYHRNLAHRSFKLPKWLEYPLAYFAVFALQGDPLDWVSIHRFHHQFTDSDRDPHSPIEGFWFSHVWWICDTRYIKYKCGGRNNVMDLKQQWFYWFLRMTIGFHVLMFWTVLYLYGGLPYLTCGGGVGGVIGYHVTWLVNSACHIWGSRSWKTKDTSRNVWWLSLFTMGESWHNNHHAFESSARQGLEWWQIDITWYLIRLFEVLGLATDVKLPSEIQKQKLALTR

SEQ ID NO: 6959 - protein, 849 aa, Magnaporthe grisea 70-15
MSSQSAYQLPISFRKSNQLSFAPAVRQYISNKYDQHPDMFRQDIEVIDALRRDAINVREPHTSGIRKLQAYAAQLVWISGKFPIDIGADFTWYPALGYNTDRPLVQNNLQYELLNVLYNLAALYCQLALSTNSNGDSNAIKTAANYFSHAAGVLSHMKTAVLPELRMPSPPEDMDEATLESLEQLMLAQCQECYWQKAVAEGYKDATIAKLAARASDLYNSAAEAAMKSEAISSAWIHHISAKHHHFAAAAQYRASLDCLEKRKYGEEIARLQDAVACANEGLREARGGYLKEGVAEDLRRLKMRAEEDLKRAEHDNDMLYLLPVPTKPELKILDRANLAVARIPAQVSAPVDHIGDEAEFGPALFSKLVPYAVHMAVSIYEERRDRLVNNNIIHELEVLTERMHEILSSLNLPGSLQALEKPLGLPGPLIQHAEEIRQADGINRIQRSFADIDKLRSSDIAVFEEGKSLLVTEEEEDQRLRRRHGTQRWARPESRQDPAGGQKLWAQVGEIEGYFASSTSSDGIVREKYLAIEDTLMVLSGSDRSLMDFVPSSRRTEIPESVKPALGRLRGAYNDVLRMESRRRKRVEALRERARSDDIKPDILRETGRLERAYPGTTLAAAHFDDFFERRLDSLYEDDLALLERETAEQEKCLNEVSRVNREFESQRRAAGADKAGGKEREAALQKLDSAFYKYKEIVSNVEVGRKFYNDLSKIVGTFRDTCRTWVAERRKDARSLEDEISMPPLGSLSLQQTPSQQSSQYYSQQQQQQPRSPPQEAHHSAYADTGSMPPQQPRPLPAANAQQTWSQNMPIQFGGPPGTAQQTQPAQAGAKKPVGGTWDPSAGIRFG

SEQ ID NO: 6960 - protein, 131 aa, Zea mays
  misc_feature (6)..(6): Xaa can be any naturally occurring amino acid
QSDETXKMGDIVHTLTNRRWLEKCVTYAESHDQALVGDKTIAFWLMDKDMYDFMALDRPSTPTIDRGIALHKMIRLITMGLGGEGYLNFMGNEFGHPEWIDFPRGPQRLPSGKFIPGNNNSYDKCRRGFDL

SEQ ID NO: 6961 - protein, 494 aa, Neisseria meningitidis MC58
MSKPVFKKIALYTLGAISGVAVSLAVQGFAAEKDRRDNEVLPVQSIRTMAEVYGQIKANYYQDKPDADLFEGAMKGMVAGLDPHSEYMDKKGYAEIKESTSGEFGGLGMEIGQEDGFVKVVSPIEDTPAERAGVKSGDFIVKIDNVSTRGMTVSEAVKKMRGKPGTKITLTLSRKNADKPIVVNLTRAIIKVKSVRHHLIEPDYGYIRVSQFQERTVESVNTAAKELVKENKGKPLKGLVLDLRDDPGGLLTGAVGVSAAFLPSEAVVVSTKGRDGKDRMVLKAIPEDYVYGMGGDSLAGIPAELKTIPMTVLVNSGSASASEIVAGALQDHKRAVIVGTQSFGKGSVQTLIPLSNGSAVKLTTALYYTPNDRSIQAQGIVPDVEVKDKERIFESREADLVGHIGNPLGGEDVNGETLAVPLEKDADKPAVKEKGKKKKDEDLSSRRIPNPAKDDQLRKALDLVKSPEQWQKSLGLAAKKPVSNKDKKDKKDKK

SEQ ID NO: 6962 - protein, 105 aa, Zea mays
QSDETWKMGDIVHTLTNRRWLEKCVTYAESHDQALVGDKTIAFWLMDKDMYDFMALDRPSTPTIDRGIALHKMIRLITMGLGGEGYLNFMGNEFGHPEWIDFPRG

SEQ ID NO: 6963 - protein, 158 aa, Zea mays
MSLIRRSNVFDPFSLDLWDPFEGFPFGSGNSSSLFPSFPRTSSETAAFAGARIDWKETPEAHVFKADVPGLKKEEVKVEVEDGNVLQISGERNKEQEEKTDTWHRVERSSGRFLRRFRLPENAKTEQITAAMENGVLTVTVPKEDAKKPEVKSIQISG

SEQ ID NO: 6964 - protein, 70 aa, Zea mays
QSDETWKMGDIVHTLTNRRWLEKCVTYAESHDQALVGDKTIAFWLMDKDMYDFMALDRPSTPTIDRGITL

SEQ ID NO: 6965 - protein, 53 aa, Zea mays
  misc_feature (5)..(6): Xaa can be any naturally occurring amino acid
  misc_feature (21)..(22): Xaa can be any naturally occurring amino acid
  misc_feature (36)..(36): Xaa can be any naturally occurring amino acid
  misc_feature (39)..(39): Xaa can be any naturally occurring amino acid
  misc_feature (45)..(45): Xaa can be any naturally occurring amino acid
QSDEXXKMGDIVHTLTNRRWXXKCVTYAESHDQALXGDXTIAFWXMDKDYVYV

SEQ ID NO: 6966 - protein, 700 aa, Xanthomonas oryzae pv. oryzae KACC10331
MRAMCLALTSASLRAWRTLSSIGLRHALARARAARDACGARPVTPRCQQAGALTMCGLAGLLLASPRLHGEQLDALVRPMGAALRHRGPDDAGTWCDAQAGVALAHQRLSILDLSPLGHQPMRSADGRYVLAYNGEVYNFAQLRAALSALGHRFRGHSDTEVLLAAVVEWGLDETLTRCNGMFAIALWDERDNCLFLARDRVGKKPLYYGWAGDTLVFGSELKALWQHPDFDNGVDRNALTLLLRLGYIPAPACIHAHTFKLMPGRVLRMDAQAVAAGAAAHRADQAQQPFWNAREAMQRALAAPFTGSDAQAEEQLDSVLRDAVALRMVADVPVGVFLSGGTDSSIVTAMMQAQSAQPVHTFSIGFEGSHHDEAPLAREVATHLHTDHTELYVSGADALAVVPCLPDMFDEPFADASQVPTALVARLARGGVTVALSGDGGDELFFGYGRYQRALRNWRMHGLVPGPLRRLMAVAARRNGESSRTGGLAALVAEAGARGIGDIYRNRISRWRDPAAVVPGATEPDSFYSLADPLHGSGTPADAMMLADFAAYLPDDLLCKVDRTTMAVGLEARAPLLDWRVAEFAWSLPLSLKYRDGMSKYLLKRVLCRYLPDTMVYRGKRGFGAPVSAWLRGDLHGWADDLLAHGALQREGVFAADTVAGLWRDFNGGERKWHTHLWTVLMFQAWQAHWREQRAAITR

SEQ ID NO: 6967 - protein, 484 aa, Xanthomonas oryzae pv. oryzae KACC10331
MLRSLIVRCRVRMSYAIVWFRRDLRLQDNPALRAALDAGHHPIPLYIDAPHEEGEWTPGAASRTWRHRSLAALEDALRALGSGLVIRAGDSAQVLDAVIAQTGAVAVYWNRKYEPATQPRDAQIKRALRERGIEAQSCNCALLFEPWQLSTQQGGPYKVFTPFWRNALTQLQLPATAPAPRSLPPLPAMLKTDALDTLQLVPSLNWDQGFWEHWHAGEAGAHEMLEFFIDGGLSGYRKNRDRPDRVGTSQLSPHLHFGEIAPWRIASALEAQRTARNGAEIDGYIRQLGWRDFAYHLLHHFPDTTNQNLNPRFEGFDWAKVDPVALQAWQRGRTGIPIVDAGMRQLWHTGWMHNRVRMIVASFLCKHLRIHWIEGARWFWDTLVDADLANNTLGWQWVAGTGADAAPYFRVFNPVTQAEKFDPHATYITRWVPELGKLPVKERFAPWLHPLSLARFAPEYPRTPIIGLAEGRDAALAAYSKSRA

SEQ ID NO: 6968 - protein, 445 aa, Arabidopsis thaliana
MVVRKVGKYELGRTIGEGTFAKVKFAQNTETGESVAMKIVDRSTIIKRKMVDQIKREISIMKLVRHPCVVRLYEVLASRTKIYIILEYITGGELFDKIVRNGRLSESEARKYFHQLIDGVDYCHSKGVYHRDLKPENLLLDSQGNLKISDFGLSALPEQGVTILKTTCGTPNYVAPEVLSHKGYNGAVADIWSCGVILYVLMAGYLPFDEMDLPTLYSKIDKAEFSCPSYFALGAKSLINRILDPNPETRITIAEIRKDEWFLKDYTPVQLIDYEHVNLDDVYAAFDDPEEQTYAQDGTRDTGPLTLNAFDLIILSQGLNLATLFDRGKDSMKHQTRFISHKPANVVLSSMEVVSQSMGFKTHIRNYKMRVEGLSANKTSHFSVILEVFKVAPSILMVDIQNAAGDAEEYLKFYKTFCSKLDDIIWKPPDASMRNRVTKAKSKRR

SEQ ID NO: 6969 - protein, 648 aa, Pseudomonas aeruginosa PAO1
MNFPHLFSPLEIRGKRLKNRIMSSGHDTSMPTDNLVNEPLVAYHRARARGGAGLIVMQVAGVHDSARYTSHVLMATDDACIPGYRRVAEACHAEGCVVLSQIFHPGREIMESADGLLAVAYSASASPNERFRVMPRELDQPLIDEIVAGYAAAARRLHQAGLDGVEVVASHGYLPAQFLNPRVNRRTDGYNGDLDARLRFLREVLAAVRAATSEDFIVGLRLSADERDPEGLSESESLQAAEAVQGELDYLHIVAGTSASLGGAIHIVPPMAIEPAYLAREASTFKARLAIPLFVTGRINQPQEAEAILARGQADVCGMTRALICDPQMPNKAEAGRSDDVRACIACNQACIGHFHRGYPISCIQHPETGRELTYATPNPASRRKRVLVAGGGPAGMKAAAVAAQRGHEVVLCEAGAQLGGQVNLAQLLPRRAEFGGASTNLQREMQLAGVEVRRNTPVDRALVERERPDLVIVATGAEPYWPPFERGGELQVVDAWQVLRGEVRVGRSVLVTDWRGDWIGPGIAEKLVREGHQVRLAVNGTHCGESLPLYVRDQLAGELHRLGIPVTPYARLYGCDDTTVYMQHSASGEAMLFEEVDTLVLCQGHQPVDRLADSLHGLAEVLRIGDCLAPRTAEEAIYEGLKAAWSI

SEQ ID NO: 6970 - protein, 547 aa, Pseudomonas aeruginosa PAO1
MAAKEVKFGDSARKKMLVGVNVLADAVKATLGPKGRNVVLDKSFGAPTITKDGVSVAKEIELKDKFENMGAQLVKDVASKANDAAGDGTTTATVLAQAIVNEGLKAVAAGMNPMDLKRGIDKATVAIVAQLKELAKPCADTKAIAQVGTISANSDESIGQIIAEAMEKVGKEGVITVEEGSGLENELSVVEGMQFDRGYLSPYFVNKPDTMAAELDSPLLLLVDKKISNIREMLPVLEAVAKAGRPLLIVAEDVEGEALATLVVNNMRGIVKVAAVKAPGFGDRRKAMLQDIAILTGGTVISEEVGLSLEGATLEHLGNAKRVVINKENTTIIDGAGVQADIEARVLQIRKQIEETTSDYDREKLQERLAKLAGGVAVIKVGAATEVEMKEKKARVEDALHATRAAVEEGVVPGGGVALVRALQAIEGLKGDNEEQNVGIALLRRAVESPLRQIVANAGDEPSVVVDKVKQGSGNYGFNAATGVYGDMIEMGILDPAKVTRSALQAAASIGGLMITTEAMVAEIVEDKPAMGGMPDMGGMGGMGGMM

SEQ ID NO: 6971 - protein, 374 aa, Vibrio parahaemolyticus RIMD 2210633
MNQNKPPFIWLNILIFSASFVLTFIVMPWYAYHYGLGWEHLIWGILAFSFTNLSITAGYHRLWSHKTYEAHPVLRAIFAIGGAFSLQNSALHWSSDHRVHHKHVDNNDKDPYSAKRGFWYSHIGWMLRDYNKSKENEYTNCRDLKRDSIVMWQHNYYVPLALLTNIGFPVALGLIYGDVWGMLLVVGAARLFLSHHTTFFINSLAHVWGKQTFTDKNTARDNGVLAFFTFGEGYHNFHHIFENDYRNGVYWWHYDPTKWLIKSCSWLGLTSKLRTTSTFRIEKARATQLLKKAKEKLESKPNAQTVLDQLQQEFDALVHHMQEYYEARKELLGEKTANVVKKYECSVSKLKYQQLKTEFERQQRSWNLMIRRYA

SEQ ID NO: 6972 - protein, 475 aa, Erwinia carotovora subsp. atroseptica SCRI1043
MHYQQQKHFPAGFLWGASTSAYQVEGGWQADGKSPSIIDKCQHPENTADFTVASDHYHRFKDDVQLFAELGLKAYRFSIAWTRILPNGTGDVNPLGIAFYNELIDELNAHGIEPVVTLYHFDLPYCLEAQGGWQNRATIDAFVHYARTLFTHFGDKVKYWLTINEQNTMILHPGAIGLPEGGVLPSKKALYQQNHHMMLAQAQVMALCHELAPNGLIGPAINTTSMYQATSKPEDAIAAHNWETLRCWSFLDVAVHGRYNALAWRYLEDRGLAPETLPGDDEILQSGKPDYVAINYYSTATIAASKGDASDVSARAGDQQIMLGEPGVYRAAENPHVDKTPYGWVIDPIGLRLTLRKTYERYHLPILITENGMGAPDKLEADGTINDQYRIDFIARHIEQIQLAISDGVDLIGYCPWSAIDVVSTHQGYGKRYGFIYVNRDEFDLKDLRRIKKKSFYWYQGVIESNGTRLFPREP

SEQ ID NO: 6973 - protein, 415 aa, Triticum aestivum
  misc_feature (393)..(393): Xaa can be any naturally occurring amino acid
MAFDAFTDKTAVFRRLKAKPENKMCFDCNAKNPTWASVTYGIFLCLDCSAFHRSLGVHITFVRSTNLDSWTPDQLKMMAFGGNNRAHAFFKQHGWTEGSGKVDSKYTSRAAELYRQILQKEVAKSSTVNVLPSSPVAASQAPNPSDDFPDFKLADAPEETTNGKHEPAVANPPKEPAQAPKAPTHPTYVSSVKKPLGAKKLGAKTGGLGVKKLTTKSNESLYDQKPEEPKPALPTMTTTTSAAKSGPSSHSRFQYVENETSTESKTGGGNKTGHVSAPKTSDFFHEYGMDNGFQRKTSTAASKTQIEETDEARKKFSNAKAISSSQYFGNTDREQKEAQLSLQKFSGSSSISSADLFGRDTNDSDLDASAADLINRISFQASQDLSSLKNMAXEKPGKKLTSFASNFITDLDRIL

SEQ ID NO: 6974 - protein, 668 aa, Vibrio sp. Ex25
MNCRSKVTLIAASLWLAASAQALEAKLHKDDLPVLAPEVQHETASKRVTSRFTRSHYKHFSLNDDFSKAIFERYVELLDYNRNIFTQADIDSFKDWSIELDDQLKAGNNQIAFDVYNLSMQKRFERFAYALTLLDEEIKFDTDDEIELDRSEAAWPKDEAELNELWRKRVKYDALNLKLTGKEWPEIKEVLEKRYNNAMKRITQTNNEDAFQLYMNAFARQVDPHTSYLSPRNAEQFQSEMNLSLEGIGAVLQMTDDYTVIRSLVVGGPASKSKQLGEGDRIIGVGQDGEEIVDVIGWRLDDVVQLIKGPKGTKVNLQILPEGNDAKSYIVTIVRDKVRLEDRAVKSEIIEKDGKKIGILEVPSFYVGLSKDTDKLLAELKTKNVDGVIVDLRNNGGGALTEATALTGLFIKEGPVVQVRDSYGRIKVNADTDGKVSYDGPLTVLINRYSASASEIFAAAMQDYNRAIILGENSFGKGTVQQHRSLNHIYDLFDKELGYVQYTIQKFYRIDGGSTQNRGVAPDISYPTPIEASETGESVEDNALPWDQIDKAKYQTFPSNEALVEKLTALHNKRISDEMEFRFINEDIEKYRKEKDDNMLSLNEKVRKAESDKAEALRLQRINERQAALGKEAFKTLDDIPKDYEAPDVYLDESVAIMVDLLKQKNQS

SEQ ID NO: 6975 - protein, 1122 aa, Armoracia rusticana
MSGSRPSQSSEGSRRSRHSARIIAQTTVDAKLHADFEESGSSFDYSTSVRVTGPVVENQPPRSDKVTTTYLHHIQKGKLIQPFGCLLALDEKTFKVIAYSENAPELLTMASHAVPSVGEHPVLGIGTDIRSLFTAPSASALQKALGFGDVSLLNPILVHCKTSAKPFYAIVHRVTGSIIVDFEPVKPYEVPMTAAGALQSYKLAAKAITRLQSLPSGSMERLCDTMVQEVFELTGYDRVMAYKFHEDDHGEVVSEVTKPGMEPYLGLHYPATDIPQAARFLFMKNKVRMIVDCNAKHARVLQDEKLSFDLTLCGSTLRAPHSCHLQYMANMDSIASLVMAVVVNEEDGEGDAPDSTTQPQKRKRLWGLVVCHNTTPRFVPFPLRYACEFLAQVFAIHVNKEVELENQIVEKNILRTQTLLCDMLMRDAPLGIVSQSPNIMDLVKCDGAALLYKDKIWKLGTTPSEFHLQEIASWLYEYHTDSTGLSTDSLYDAGFPKALSLGDAVCGMAAVRISSKDMIFWFRSHTAGEVRWGGAKHDPDDRDDARRMHPRSSFKAFLEVVKTRSLPWKDYEMDAIHSLQLILRNAFKDGESTDVNTKFIHSKLNDLKIDGIQELEAVTSEMVRLIETATVPILAVDSDGLVNGWNTKIAELTGLPVDEAIGKHLLTLVEDSSVEIVKRMLENALEGTEEQNVQFEIKTHLSRADAGPISLVVNACASRDLHENVVGVCFVAHDLTGQKTVMDKFTRIEGDYKAIIQNPNPLIPPIFGTDEFGWCTEWNPAMSKLTGLKREEVIDKMLLGEVFGTQTACCRLKNQEAFVNLGIVLNSAVTSQESEKVSFAFFTRGGKYIECLLCVSKKLDREGVVTGVFCFLQLASHELQQALHVQRLAERTALKRLKTLAYIKRQIRNPLSGIMFTRKMMEGTELGPEQRQILQTSSLCQKQLSKVLDDSDLERIIEGCLDLEMKEFSLNEVLTASTSQVMMKSNGKSVRITNETGEEVMSDTLYGDSIRLQQVLADFMLMSVNFTPSGGQLTVTASLRKDQLGRSVHLAYLEIRLTHTGAGIPELLLNQMFGTEKDVSEEGLSLMVSRKLVKLMNGDVQYLRQAGKSSFIISAELAAANK

SEQ ID NO: 6976 - protein, 1122 aa, Armoracia rusticana
MSGSRPSQSSEGSRRSRHSARIIAQTTVDAKLHADFEESGSSFDYSTSVRVTGPVVENQPPRSDKVTTTYLHHIQKGKLIQPFGCLLALDEKTFKVIAYSENSPELLTMASHAVPSVGEHPVLGIGTDIRSLFTAPSASALQKALGFGDVSLLNPILVHCKTSAKPFYAIVHRVTGSIIVDFEPVKPYEVPMTAAGALQSYKLAAKAITRLQSLPSGSMERLCDTMVQEVFELTGYDRVMAYKFHEDDHGEVVSEVTKPGLEPYLGLHYPATDIPQAARFLFMKNKVRMIVDCNAKHARVLQDEKLSFDLTLCGSTLRAPHSCHLQYMANMDSIASHVMAVVVNEEDGEGDATDSTTQPQKRKRLWGLVVCHNTTPRFVPFPLRYACEFLAQVFAIHVNKEVELENQIVEKNILRTQTLLCDMLMRDAPLGIVSQSPNIMDLVKCDGAALLYKDKIWKLGTTPSELHLQEIASWLYEYHTDSTGLSTDSLHDAGFPKALSLGDAVCGMAAVRISLKDMIFWFRSHTAGEVRWGGAKHNPDDRDDARRMHPRSSFKAFLEVVKTRSLPWKDYEMDAIHSLQLILRNAFKDGESTDVNTNIIHSKLNDLKIDGIQELEAVTSEMVRLIETATVPILAVDSDGLVNGWNTKIAELTGLPVDEAIGKHLLTLVEDSSVEIVKRMLENALEGTEEQNVQFEIKTHQSRADAGTISLAVNACASRDLHENVVGVCFVAHDLTGQKTVMDKFTRIEGDYKAIIQNPNPLIPPIFGTDEFGWCTEWNPAMSKLTGLKREEVIDKMLLGEVFGTQKSCCRLKNQEAFVNLGIVLNGAVTSQESEKVSFAFFTRGGKYIECLLCVSKKLDREGVVTGVFCFLQLASHELQQALHVQRLAERTALKRLKAIAYIKRQIRNPLSGVMFTRKMMEGTELGPEQRQILHTSALCQEQLSKVLDDSDLESIIEGCLDLEMKEFSLNEVLTASTSQVMMKSNGKSVRITNETGEEVMSDTLYGDSIRLQQVLADFMLMSVNFTPSGGQLTVTASLRKDQLGRSVHLAYLEIRLTHTGAGIPEFLLNQMFGTEEDVSEEGLSLMVSRKLVKLMNGDVQYLRQAGKSSFIISAELAAANK

SEQ ID NO: 6977 - protein, 431 aa, Glycine max
MEASPPPSPSPSPRTTILAKYQLTRFLGRGNFAKVYQARSLLDGATVAVKAIDKSKTVDAAMEPRIVREIDAMRRLHHHPNILKIHEVLATKTKIYLIVDFAGGGELFSKLTRRGRLPEPLARRYFAQLVSALRFCHRHGVAHRDLKPQNLLLDAAGNLKVSDFGLSALPEHLHDGLLHTACGTPAFTAPEILRRVGYDGSKADAWSCGVILYNLLAGHLPFDDSNIPAMCRRISRRDYQFPAWISKSARSLIYQLLDPNPITRISLEKVCDNNKWFKNNSMVEVKESVWESDLYNKCCDGGYKSGMNAFDIISMSSGLDLRGLFETTSEKGRRREKRFTSDKKVETVEAKVKEVGEKLGFRIEIGKNGAIGLGKGKVGVVVEVFEIVADLLLVAVKVVDGGLEFEELHWDDWRIGLQDLVLSWHDVGLEL

SEQ ID NO: 6978 - protein, 473 aa, Pyrus communis
MCMLSRNATFNSHGQDSSYFLGWQEYEKTPYHEVHNTNGIIQMGLAENQLCFDLLESWLAKNPEAAAFKKNGESIFAELALFQDYHGLPAFKKAMVDFMAEIRGNKVTFDPNHLVLTAGATSANETFIFCLADPGEVLLIPTPYYPGFDRDSKWRTGVAIVPIHCTSSNGFQITETALEEAYQEAEKRNLRVKGVLVTNPSNPLGTTMTRNELYLLLSFVEDKGIHLISDEIYSGTAFSTPSFRSVMEVLKDRNCDENSEVWQRVHVVYSLSKDLGLPGFRVGAIYSNDDMVVAAATKMSSFGLVSSQTQHLLSAMLSDRKLTKNYIAENHKRLKQRQKNLVSGLQKAGISCLNGNAGLFCWVDMRHLLRSNTFEAEMELWKKIVYEVHLNISPGSSCHCTEPGWFRVCFANLPERTLDLAMQRLKAFVGEYYNVPEVNGRSQSSHLSHSRGQSLRKWVSRLSFDDRCPIHGR

SEQ ID NO: 6979 - protein, 748 aa, Vibrio sp. Ex25
MIQISGLEKDIGSREKDLKTTKTKKIKKQHERAYELLAEAAYSDPFSALGPFIDDGEGSLRVWMPGANKVELLVNGEPRVALERDGDSGFILKEQRDLHLTHYRLAVDWNGVEQIIDDPYQYHNIYQEYEHLHTPKDMYHYMGAHFVTLERGGENISGVRFLVYAPHASAVSLVGCFNQWDGRRHPMQRLDYGIWGLFIPGLEEGVQYKFELKGPNGEGLPHKQDPWGFYSEQYPSFASITYDHKRYQWQDAKWQNRAVTQKRDEALSFYELHAGSWKRNEKGDFLNYRELAEQLVPYLVDMGYTHVELMPVSEHPFYGSWGYQPVGLFAPTSRFGSPDDFKFFVDTCHQAGIGVVLDWVPAHFPSDDHGLANFDGTPLFHDPDPRRGWHQDWNSYIYDLGREHVRRFLVSNALYWFEQFHIDGIRVDAVASMLYLDYSRSHDQWVPNVDGGNENYDAIATLKWMNEEVYKHFPNAMTIAEESTAFPGVSAPTFMGGLGFGFKWNMGWMHDSLSYIKEDPVHRKYHHNTITFPLVYAHSENYVLSLSHDEVVYGKGSIHNKMPGDEWQQTANLRAYYGYMYGQPGKKLNFMGAEIGQTAEWNHDDQLQWFLLEYERHQGVQKLMRDLNHLYRNEAAMHDQDCVPAGFEWRLQDEADASILAHERISKEGERILIITNFTPVPHERFRLGVPNAGQYELLLNTDDSKYGGSDFKVLTSVKTEKVESESLPQSLELRLPPLSTVFYKLNK

SEQ ID NO: 6980 - protein, 1122 aa, Armoracia rusticana
MSGSRPSQSSEGSRRSRHSARIIAQTTVDAKLHADFEESGSSFDYSTSVRVTGPVVENQPPRSDKVTTTYLHHIQKGKLIQPFGCLLALDEKTFKVIAYSENAPELLTMASHAVPSVGEHPVLGIGTDIRSLFTAPSASALQKALGFGDVSLLNPILVHCKTSAKPFYAIVHRVTGSIIVDFEPVKPYEVPMTAAGALQSYKLAAKAITRLQSLPSGSMERLCDTMVQEVFELTGYDRVMAYKFHEDDHGEVVSEVTKPGLEPYLGLHYPATDIPQAARFLFMKNKVRMIVDCNAKHARVLQDEKLSFDLTLCGSTLRAPHSCHLQYMANMDSIASLVMAVVVNEEDGEGDAPDSTTQPQKRKRLWGLVVCHNTTPRFVPFPLRYACEFLAQVFAIHVNKEVELENQIVEKNILRTQTLLCDMLMRDAPLGIVSQSPNIMDLVKCDGAALLYKDKIWKLGTTPSELHLQEIASWLYEYHTDSTGLSTDSLHDAGFPKALSLGDAVCGMAAVRISLKDMIFWFRSHTAGEVRWGGAKHNPDDRDDARRMHPRSSFKAFLEVVKTRSLPWKDYEMDAIHSLQLILRNAFKDGESTDVNTNIIHSKLNDLKIDGIQELEAVTSEMVRLIETATVPILAVDSDGLVNGWNTKIAELTGLPVDEAIGKHLLTLVEDSSVEIVKRMLENALEGTEEQNVQFEIKTHQSRADAGTISLAVNACASRDLHENVVGVCFVAHDLTGQKTVMDKFTRIEGDYKAIIQNPNPLIPPIFGTDEFGWCTEWNPAMSKLTGLKREEVIDKMLLGEVFGTQKSCCRLKNQEAFVNLGIVLNGAVTSQESEKVSFAFFTRGGKYIECLLCVSKKLDREGVVTGVFCFLQLASHELQQALHVQRLAERTALKRLKAIAYIKRQIRNPLSGVMFTREMIEGTELGPEQRQILHTSALCQEQLSKVLDDSDLESIIEGCLDLEMKEFSLNEVLTASTSQVMMKSNGKSVRITNETGEEVMSDTLYGDSIRLQQVLADFMLMSVNFTPSGGQLTVTASLRKDQPGRSVHLAYLEIRLTHTGAGIPEFLLNQMFGTEEDVSEEGLSLMVSRKLVKLMNGDVQYLRQAGKSSFIISAELAAANK

SEQ ID NO: 6981 - protein, 122 aa, Zea mays
  misc_feature (96)..(96): Xaa can be any naturally occurring amino acid
GKHRIVSLVFALLILLALPVLSTRNAQEDSMANNTGTLVGGIQDVPGNENNLPLQELARFPVDEPTKKANAFLGFEKLVKAKTQVVAGPMYYLPIXVKDGEVKKLFEVKVWEKPWENLKKPV

SEQ ID NO: 6982 - protein, 632 aa, Archaeoglobus fulgidus DSM 4304
MKLFEPIEFGGMKVKNRIVMPAAELNYHTPDGRPTDRLLRFYEERAKGGIGFAVVGIAKIEPHFFGGIAAHSDEFIPDLKKIADVFHKYDVKCALQLWHPGRYEISFDPNRQPVAPSPIPPPIFTKRTPKELTKEEILQIEEEFADAAVRAKKAGFDAVELIGSAGYLISQFFSPATNKRTDEYGGSLENRTRFAVEIIQKIKEKCGESYPVMIRIPGDEFIEGGNTVREMKQIAKILEDAGVVAINVMAGWHESRKPLTTMLVPRGGFAYLAAEIKSAVSVPVIASHRINDPIVAEKILQEGKADMVAMLRALIADPELPKKAKEGRFDEIRYCVACNQGCMDMVMQAQPVTCLVNPIVGREAEFENLKAEKPKKVVIVGGGPGGCMAAEMLARKGHKVVLFEKTDKLGGQLNLAAKSPLGYEFAEVGKYFMNVLPKLGVEVRYNTEADAGKVLAENPDVAVIAVGASPLIPPIPGVENAVTAFDVLAGRAEVGNSVVVIGGGGVGCDVAAELANEGKKVTIVEMLPKIGQDIGISTRWTVLMYLKEKGVEMLTNTKAVEIKPNAVVVEQNGERKELQCDTAVIAVGTKPNNGLYDELQGKVSELYKIGDCVKPRKALDATREGADLALKV

SEQ ID NO: 6983 - protein, 513 aa, Methanococcus maripaludis S2
MCSISGIIAKDEEGSGSRSLLKNIQKHVINMMKILKHRGPDYSGMMFDDEVLYFENFDDITENTETISRMAMGHNRLAIVGTAVQPIPNTDESIWIICNGEIYNHVELRDELSVDHEFKTDTDSEAIIHTYEDELVDVLDGDYAYAIYDKEKNIIELRRDLMGVKPLYYIDTDEYFAFASEKKALYGLLMEINEMDYKSAFNYDISRLNPNSRLIYELDENSWYIEEDLEKVNPDYFEENDYELCKNELETTILDSVLKRVKGLERVGIIYSGGVDSTLVSKLASENCDVTLYSVGSANSEDLIYAERAAKDMGLKFRKKIILEDEFEEYVIKVAKAIDELDVMKLSVGIPIFAASEMAKEDGIKVVLSGQGADELFAGYNRYQRILNEKGEEGLKKSIISDVFDIHKVNLERDDHCTMANGVELRVPFLDKFVIDVGLSIPVEYKIEEPRKKILRDIASKYVPDYIAQRPKKAAQYGSGSEKMVYAVAKKHGYSKKEINKFFEEYLIEKIKF

SEQ ID NO: 6984 - protein, 368 aa, Pseudomonas fluorescens PfO-1
MSLLLEPFTLRQLTLSNRIAVSPMCQYSSVDGLANDWHLVHLGSRAVGGAGLVFTEATAITADGRITAEDLGLWNDEQILPLQRITRFINAQGAVAGIQLAHAGRKASTHRPWIGKHGSVKPEDGGWIPVGPSPIAFDPQHTQPKQLDEGQIAQVIQDFVAAAKRALTAGFSVVEVHAAHGYLLHQFLSPLSNQRRDQYGGSFENRIRLVLQVTEAVRAVWPEELPVFVRLSATDWVEDGWNPDETVELARRLKALGADLIDVSSGGTAVNAEIPVGPGYQTRFAERVRKESGIATGTVGMITEPAQAEHILRTCQADIIFLARELLRDPYWPLHADDDLGGRKAVWPAQYQRATHRDQPIHESDLRD

SEQ ID NO: 6985 - protein, 48 aa, Zea mays
  misc_feature (6)..(6): Xaa can be any naturally occurring amino acid
QSDETXKMGDIVHTLTNRRWLEKCVTYAESHDQSLVGDKTIALWLMDK

SEQ ID NO: 6986 - protein, 220 aa, Pyrus communis
CDFEPVKPYEVPMTAAGALQSYKLAAKAIAAIARLQSLPSGSMERLCDTMVQEVSELTGYDRVMAYKFRDDDHGEVVSEITKPGLEPYLGLHYPSTDIPQASRFLFMKNKVRMIVDCCAKQVKVLQDEKVPFDLTLCGSTLRAPHSCHLQYMKNMDSIASLVMAVVVNEGDDEVASPDSVQPQKRKRLWGLVVCHNTSLRFVPFPLRYACEFLAQVFAIP

SEQ ID NO: 6987 - protein, 48 aa, Zea mays
  misc_feature (45)..(45): Xaa can be any naturally occurring amino acid
QSDETWKMGDIVHTLTNRRWLEKCVTYAESHDQALVGDKTIAFWXMDK

SEQ ID NO: 6988 - protein, 131 aa, Zea mays
  misc_feature (43)..(43): Xaa can be any naturally occurring amino acid
QSDETWKMGDIVHTLTNRRWLEKCVTYAESHDQALVGDKTIAXWLMDKDMYDFMALDRPSTPTIDRGIALHKMIRLITMGLGGEGYLNFMGNEFGHPEWIDFPRGPQRLPSGKFIPGNNNSYDKCRRRFDL

SEQ ID NO: 6989 - protein, 573 aa, Saccharomyces cerevisiae
MPIRSISSASQMNVFGKKEEKQEKVYSLQNGFPYSHHPYASQYSRPDGPILLQDFHLLENIASFDRERVPERVVHAKGGGCRLEFELTDSLSDITYAAPYQNVGYKCPGLVRFSTVGGESGTPDTARDPRGVSFKFYTEWGNHDWVFNNTPVFFLRDAIKFPVFIHSQKRDPQSHLNQFQDTTIYWDYLTLNPESIHQITYMFGDRGTPASWASMNAYSGHSFIMVNKEGKDTYVQFHVLSDTGFETLTGDKAAELSGSHPDYNQAKLFTQLQNGEKPKFNCYVQTMTPEQATKFRYSVNDLTKIWPHKEFPLRKFGTITLTENVDNYFQEIEQVAFSPTNTCIPGIKPSNDSVLQARLFSYPDTQRHRLGANYQQLPVNRPRNLGCPYSKGDSQYTAEQCPFKAVNFQRDGPMSYYNFGPEPNYISSLPNQTLKFKNEDNDEVSDKFKGIVLDEVTEVSVRKQEQDQIRNEHIVDAKINQYYYVYGISPLDFEQPRALYEKVYNDEQKKLFVHNVVCHACKIKDPKVKKRVTQYFGLLNEDLGKVIAECLGVPWEPVDLEGYAKTWSIASAN

SEQ ID NO: 6990 - protein, 283 aa, Oenococcus oeni PSU-1
MSILTDTYTLNNGTKIPKVAFGTWQTPDGDVAYQAVSSALKFGYRHIDTAKIYGNEKSVGRAIADSDVKREDLWVTTKLPSQDKTRDLVLADFESSLSRLGLDYVDLYLIHAPWPWGEAGSKHFDEENAEAWKTLEELQKSGRVKSIGISNFDVHDMENILKIAEIKPVVNQIQYYIGFTEPKISKFAAEHDIRIEAYSPLATGDILNSEAIRKIAGRYNVSVAQLALRFTLQNGTVTLPKAISERHIQENTQLDFTINDDDMRTLNSMPDAAPAHFHNSTQG

SEQ ID NO: 6991 - protein, 280 aa, Streptococcus mutans UA159
METVVLSNGVKMPILGFGVFQVPDLEECERVVTEAIKVGYRLLDTAQVYGNEEAVGNAVRKSGLAREEFFITTKVWISNAGYEKAKASLDESLRKLQTDYVDLVLIHQPFGDYYGTWSALEAYYKSGKIKAIGVSNFYPDRLVDLASFNEIVPMVNQVETHVFNQQIEAKKVSEEYGVQLESWGPFAEGKNNFFTNPTLTAIGEKYGKSAAQVGLRYLIQRGVVVIPKTVHQERMVQNFDVFGFNLSDDDMADILKLDQGESLFINHYDPETVKFLANYK

SEQ ID NO: 6992 - protein, 288 aa, Streptococcus mutans UA159
MEYITLNTGVKMPMEGFGVFQVTDPEICKESVLNAIKTGYRLFDTAAVYGNEKALGEAIHEAIEQGLVTRNELFITSKLWVQDMNYEAAKKGIERSLEKLGLDYLDLYLLHQAMRDYFGAYRALEEAYQAGKLRAIGVSNFYPNILTNFCETVSVIPAVNQIELHPFFTQEEALETARYYGVVPEAWAPLGGGRYDAFNNAILQEVASAHQKTVGQIMLRWNVQRGVVVIPKSTHKERIEENFAIWDFSLTDDEMTKIASLDMGYGDTRTKHFDPNFVRSVLNVKIHD

SEQ ID NO: 6993 - protein, 92 aa, Glycine max
GNRDVTGSQNSVEIDALARFAVEEHNKKQNALLEFEKVVTAKQQVVSGTLYTITLEAKDGGQKKVYEAKVWEKSWLNFKEVQEFKLVGDAPA

SEQ ID NO: 6994 - protein, 103 aa, Glycine max
AALEKVQELGGITDVHGAANSVEINNLARFAVEEQNKRENSVLEFVRVISAKQQVVAGVNYYITLEAKDGLIKNEYEAKVWVREWLNSKELLEFKPVNVSSTQ

SEQ ID NO: 6995 - protein, 478 aa, Rhodospirillum rubrum
MTIPVLVWFRDDLRLADNPALCAALDSGAPVIPFYLLDDSTSDGHRPLGGATRWWLGRSLTSLAESIAQRGGRLVLRRGEALSAVPELAAETDAAALFANRLYGMDSLRDDDLFMVLRVAGLTVRLFDSGLLHRPEAVTTKTGRPFRVFTPFWKTLSATLDPGLPLAAPDSFPPVDDPPPASDSLADWSLEPTTPDWAGGLRDTWQPGEAGAQARLEAFFNGPVADYASGRDRPDKPLTSKLSPHLRFGEISPRQVWTAARHHPPGGGMDAFLRELGWREFCHHLLFQAPTMAEEPLKAEFLAFPWTEAKEIGPALAAWQSGETGYPIVDAGMRELWHTGWMHNRVRMIAASFLIKDLLIPWQHGERWFWDTLVDACPANNAAGWQWVAGCGADAAPFFRIFNPVTQGERFDPEGAYVRRWLPELADLPSSLIHRPWEAPPLILRQAGVTLGKTYPPPLIDHAHARVRALEALAVVNR

SEQ ID NO: 6996 - protein, 100 aa, Glycine max
LGGFTDITGAQNSIDIENLARFAVDEHNKKENAVLEFVRVISAKKQVVSGTLYYITLEANDGVTKKVYETKVLEKPWLNIKEVQEFKPITVAVNPLSVTV

SEQ ID NO: 6997 - protein, 363 aa, Photobacterium profundum SS9
MIFQEFSHELLKAKNRIVMAPMTRSRTSQPGDVPNEMMASYYKQRANAGLIVTEGAPISAVGRGYSMTPGIYTQDHIDGWKKVTQAIHEEGGKVFIQLWHVGRRSHSTISGQQPFSSSVIKVPDQVFGPLSEGGFGMIETEQPKAMTQQDIDNTIADFVQAAKNAIDAGFDGIEIHAAHGYLFDTFMHLESNQRDDQYGGSQENRMRFLLDTLKAVADEICSDKVAVRVSPHVIEGFAEEDPEIVEVILKALAKMAAMNLAYVHFSENISRYVEVPESFRQQVREVYPNPIMVAGKLTKQTAQELVDKKYVDLVAFGTPYVTNPDLVERFKNDWPLTEFDADARLTLYGGSEEGYIDYPAYQA

SEQ ID NO: 6998 - protein, 98 aa, Lycopersicon esculentum
EYREHVKDLVCISKDLSRIVIVDNNPFSFLLQPLNGIPCIPFSAGQPHDIQQLLEVILPLLKHLSKQKDVRPELYDRFHMPECLQKHGIPASALTSEE

SEQ ID NO: 6999 - protein, 327 aa, Photobacterium profundum SS9
MATYYAQRATAGLIISEGTQISPMAKGYAWTPGIYTPEQITGWKKVTDAVHAKGGAIFAQLWHVGRVTHPDNICGQQPISSSAIKAENVKVFIDNGTDEPGFVDVVEPREMTADDIQQVIEQYRQAALNAIEAGFDGIELHAANGYLINQFIDSEANNRTDEYGGSLENRLRFLDEVVAAMVKAIGAERVGVRLAPLTTLNGTVDADPINTYTEAATLLNKHKIVYLHIAEVDWDDAPDTPNAFKQALRNAYQGVLIYAGRYNAEKAQQAIKAGLADMIGFGRPFVANPDLPNRIQNGYPLAEHVPETLFGGNEKGLIDYPVYQLED

SEQ ID NO: 7000 - protein, 214 aa, Prunus dulcis
TGVRPYEVPMTAAGALQSYKLAVKAIARLQSLPSGSMERLCDTMVQEVFELTGYDRVMAYKFHDDDHGEVVSEITKPGLEPYLGLHYPSTDIPQASRFLFMKNKVRMIVDCCAKQVKVLQDEKLPFDLTLCGSTLRAPHSYHLQYMKNMESIASLVMAVVVNEGDDEVASPDSVQPQKRKRLWGLVVCHNTSPRFVPFPLRYACEFLAQVFPYT

SEQ ID NO: 7001 - protein, 459 aa, Bacillus anthracis str. 'Ames Ancestor'
MGENHDKQRQSLLGKDFNENGERNEQAILHSQTVGSRGPVLEQDSVLHEALQEFIHEKILERPVHVKGFGAFGYFQTIYPMSEHTKLSFLQHSNEKVPVMVRFSLAVSTKGTPDTARNVRGFSTKFYTKEGIFDLLCNHIPVFSVRDPMRFPETIQALSPSPKNNLLDPNRFWSFVARAPESIHFVVHLYSDNGTAKSFRRIPGHSVNTYVWRNAEGNRKYVKYHWYPFEGVQSITNEEANKLAAENPDYSGKDLYDAIANGKPVEYGLYVQLMDPKDEAHLSYDPLDDTKAWDEKAYPLIPVGKMVLNKNPENYMEQVEKVAFSPSNLLNGAELSDDKMLQGRANIYSDSQRRRIGPEFRKLAINQQQDWTPANQITSGDGRYVEGKLERTSIPKQDDFTQAGEFYAKLQPIEKEHLAENLASDLKVISDDIRKVVLGYFHNVSADLVKRIESAMQQL

SEQ ID NO: 7002 - protein, 280 aa, Streptococcus agalactiae A909
METYTLSNTLNIPKIGFGTWQLTEGEEAYKAVTHALKVGYTHIDTAQIYGNEHSVGRAIRDSGLARESIFLTTKIWNDKHDYHLAKASIDESLQKLGVDYIDLLLIHWPNPKALRENDAWKAGNAGTWKAMEEAYKEGKVKAIGVSNFMKHHLEALFETAEIKPMVNQIILAPGCAQEDLVRFCKGNDILLEAYSPFGTGAIFENESIKAIAEKYGKSVAQVALRWSLDNGFLPLPKSATPKNIEANLDIFDFQLNEDDIATLIQLDSGIKPKDPDNVSF

SEQ ID NO: 7003 - protein, 335 aa, Triticum aestivum
  misc_feature (83)..(83): Xaa can be any naturally occurring amino acid
AYLGDTIEQVCTKKQAGTGPEFPGYRRPTRPANYLGTMHHEFTFTVQDGIDAIEDVIYHTETYDVTTIRASTPMFLMSSKIKXLGVKMVISGEGSDEIFGGYLYFHKAPNKEELHRETCQKIKALHQYDCLRANKATSAWGLEARVPFLDKEFINEAMSIDPEWKMIRPDLGRIEKWVLRKAFDDGEQPFLPKHILYRQKEQFSDGVGYSWIDGLKAHAESNVTDRMMSNAKFIYPHNTPTTKEAYCYRMIFERFLPQNSAILTVPGGPSVACSTAKAVEWDAQWSGNLDPSGRAALGVHLSAYEQEHLPATILTGTSKKPRMIEVAAPGVAIES

SEQ ID NO: 7004 - protein, 393 aa, Chromobacterium violaceum ATCC 12472
MQSIMSSLERLPLRGGRIPRLNDMPAPDLFSPLQAGALPLPSRIVMAPMTRCRTDQPGDIPNAMMARYYAQRAGAGLIVSEATQISRQGQGYSFTPGIYSQDQIDGWRRVTDAVRQAGGRMVLQLWHVGRMSHPMFHDGAPPVAPSAIAPDAQVWVADETGAGRMVDCPTPRALETAEIAAIVGDYRQAARNAMAAGFDGVEIHAANGYLIDQFLRSTSNRRDDAYGGSLENRLRFLMEVAAAVADEIGAARVGVRLAPYITARGMNCPEIVPAILEAAVRLNGLGIAYLHLSEADWDDAPQVDDAFRHALRARFRGAIIVAGRYDQPRGERLLAEGLADLIAFGRPFIANPDLPERLARGWPLADFDPSALFGGDGRGYDDYPRYREMATAR

SEQ ID NO: 7005 - protein, 252 aa, Prunus emarginata
AHYKSEADVGNAIAEAIRSGLVKREELFITSKASNHGHVVEACKNSLEKLQLDYLDLYLVHYPLATKHSGVGTTASLLDENKVLDIDVTVSLESTWHDMEKTVSLGLVRSIGLSNYELFLTRDCLSYAKIKPQVSQFETHPYFQRESLVRFCKKHGVTPMAHTPLGGATANVKSFGSISPLEDPVLLGLAKKYKKSVAQIALRWNIERDTPVIPKSSKVERLKENLEVLNFKLEKEDIELINTIDKKSRTTL

SEQ ID NO: 7006 - protein, 548 aa, Haemophilus influenzae Rd KW20
MAAKDVKFGNDARVKMLKGVNVLADAVKVTLGPKGRHVILDKSFGAPTITKDGVSVAREIELEDKFENMGAQMVKEVASKANDAAGDGTTTATVLAQAIVNEGLKAVAAGMNPMDLKRGIDKAVSAVVSELKNLSKPCETAKEIEQVGTISANSDSIVGQLISQAMEKVGKEGVITVEDGTGLEDELDVVEGMQFDRGYLSPYFINKPETATVELDNPYLLLVDKKISNIRELLPVLEGVAKAGKPLLIIAEDVEGEALATLVVNTMRGIVKVAAVKAPGFGDRRKAMLQDIAILTAGTVISEEIGMELEKATLEDLGQAKRVVINKDNTTIIDGIGDEAQIKGRVAQIRQQIEESTSDYDKEKLQERVAKLAGGVAVIKVGAATEVEMKEKKDRVDDALHATRAAVEEGIVAGGGVALVRAAAKVAASLKGDNEEQNVGIKLALRAMEAPLRQIVTNAGEEASVVASAVKNGEGNFGYNAGTEQYGDMIEMGILDPTKVTRSALQFAASVAGLMITTECMVTDLPKDDKADLGAAGMGGMGGMGGMM

SEQ ID NO: 7007 - protein, 363 aa, Pseudomonas syringae pv. tomato str. DC3000
MSALFEPFKLKDVTLRNRIAIPPMCQYSAIDGVVNDWHHVHLASMARGGAGLLVVEATAVAPEGRITPGCTGIWNDEQAQAFVPIVKAIKDAGCVPGIQIAHAGRKASANRPWEGDDHIVASDSRGWDTIAPSAIAFGANLPKVPRAMTLDDIARVRQNFVDAARRARDAGFEWIELHFAHGYLGQSFFSEHSNQRTDEYGGSFDNRSRFLLETLAAVREVWPENLPLTARFGVLEYDGRDEQTLTESIELARRFKAGGLDLLSVSVGFSTPDANIPWGPAFMGPIAERVRREAAIPVTSAWGFGEPKLAEEAVKSGQLDLVSIGRAHLADPHWAYFAAKELGVEKSAWTLPAPYAHWLERYR

SEQ ID NO: 7008 - protein, 48 aa, Zea mays
  misc_feature (6)..(6): Xaa can be any naturally occurring amino acid
QSDETXKMGDIVHTLTNRRWLEKCVTYAESHDQALVGDKTIAFWLMDK

SEQ ID NO: 7009 - protein, 304 aa, Oryza sativa
MVCCCDDDDGSRVLEGGAGMADAGHDESGSPPRSGGVREQDRFLPIANISRIMKKAVPANGKIAKDAKETLQECVSEFISFVTSEASDKCQKEKRKTINGEDLLFAMGTLGFEEYVDPLKIYLHKYREMEGDSKLSSKAGDGSVKKDTIGPHSGASSSSAQGMVGAYTQGMGYMQPQSNFHILVVLQSFAFPYMYQVAQIYCNKYEVSREQIWDTPQIMELSPWIPYTINRIWKETHGSQDIRIQGRPREAANSALDWQWPSKHSSLASNFYGTRVVGGHHEYQRSTKKDTTHVNFASGLGDLG

SEQ ID NO: 7010 - protein, 80 aa, Zea mays
QSDETWKMGDIVHTLTNRRWLEKCVTYAESHDQALVGDKTIAFWLMDKDMYDFMALDRPSTPTIDRGIALHKMIRLITMG

SEQ ID NO: 7011 - protein, 368 aa, Prunus armeniaca
MATLVEPPDGIRQRGKHYYSMWQTLFEVDTKYVPIKPIGRGAYGIVCSSINRATNEKVAIKKINNVFENRIDALRTLRELKLLRHIRHENVIALKDVMMPIHRTSFKDVYFVYELMDTDLHQIIKSSQPLSSDHCKYFLFQLLRGLKYLHSANILHRDLKPGNLLINANCDLKICDFGLARTSGGTGQFMTEYVVTRWYRAPELLLCCDNYGTSIDVWSVGCIFAEILGRKPIFPGTECLNQLKLIINVLGSQHEPDLAFIDNPKARKYIKSLPYSRGTHFSRLYPQADPLAIDLLQRMLVFDPTKRISVTEALQHPYMSGLYDPRCNPPAQVPINLDIDENLAEPMIREMMWHEMLHYHPEAAFVNA

SEQ ID NO: 7012 - protein, 125 aa, Zea mays
WKMGDIVHTLTNRRWLEKCVTYAESHDQALVGDKTIAFWLMDKDMYDFMALDRPSTPTIDRGIALHKMIRLITMGLGGEGYLNFMGNEFGHPERIDFPRGPQRLPSGKFIPGNNNSYDKCRRRFD

SEQ ID NO: 7013 - protein, 420 aa, Triticum aestivum
  misc_feature (395)..(395): Xaa can be any naturally occurring amino acid
NKFVQKSRLVPVRNSRDIVDPRVRERVGSTMKLIRHPNVIRMYEVMASRTKIYIVMELVTGGELFDKIASRGRLKEDDARKYFQQLINAVDYCHSRGVYHRDLKPENLLLDANGTLKVSDFGLSALSQQVREDGLLHTTCGTPNYVAPEVINNKGYDGAKADLWSCGVILFVLMAGYLPFEDSNLMALYKKIYKADFSCPSWFSTSAKKLIKKILDPNPNSRITIAEVINNEWFKKGYQPPRFETAEVNLDDINSIFNESGDPAQLVVERREERPAVMNAFELISTSQGLNLGTLFEKQTDSVKRETRFASRLPANEILSKIEAAAGPMGFNVPRPRPRLKLQGENPGRKGQLAIATEVFEVTPSLYMVELRKSNGDTLEFHKFYHSISNGLKDXMWKPEGSIAEGDETRHRSLRDISKC

SEQ ID NO: 7014 - protein, 428 aa, Nostoc punctiforme PCC 73102
MHLLWFRRDLRLTDNEIVTSSSGNDARVLPFFIIDPWFYTWADVGTARVRFLFESLEKLNSNLQKLSSRLYLFEGNSTGIVQELTRQLTERGYKPKLFFNRDVQVEYGINRDKTIVDFYKQLNLDYHIGLNNFLQSAEQRDEWVNEYYTYQRQSQYKTPAIINTPQITLNLPQLTFEELKQKYHRFWAVEKVYFPGGETQAQAQLDSFLKKRYYGYHWKLSRPMLSQLGATSHLSPHLTFGTISTRTVYQSTKALAEQLKTQPKAEFSLKAFRDRLRWHDSFTQRLYFHPEIAYTNRYREFDKLYTPETLSGAKQELYQAWQQGMTGFPLVDASMRQLQTMGWMNFRMRAMCATFLTINCGVSWHHGAKHYMNYLVDGDLAIDNWQWQMQAGVTNPLSDTFRIYNPSKNIAEKDPLGVNIAKLSPGAR

SEQ ID NO: 7015 - protein, 245 aa, Triticum aestivum
  misc_feature (34)..(34): Xaa can be any naturally occurring amino acid
  misc_feature (78)..(78): Xaa can be any naturally occurring amino acid
  misc_feature (112)..(112): Xaa can be any naturally occurring amino acid
  misc_feature (135)..(135): Xaa can be any naturally occurring amino acid
  misc_feature (196)..(196): Xaa can be any naturally occurring amino acid
  misc_feature (221)..(221): Xaa can be any naturally occurring amino acid
  misc_feature (241)..(241): Xaa can be any naturally occurring amino acid
MSSSAMEALHALIPEQHQRDVEAAAALSGATRGXDSGHVLHGWANRKRSRRQRSEEENLALCLLMLSRGGKQRVQAPXPEAYAVPVPAEFKCSVWGKSFSSYQALGGHKTSXHGVKQPSPPADAAAAPLVALPGXAAVLPSAEPATSYTVASSDGTTNRVHRCSICQKEFPTGQALGVHKRKHYEGGVGADDSSTXLLAAAAADFEVGSTGYGTSSGRAFXLEIPGVPEFGWRPCPRCKLXWEDH

SEQ ID NO: 7016 - protein, 97 aa, Zea mays
  misc_feature (6)..(6): Xaa can be any naturally occurring amino acid
  misc_feature (39)..(39): Xaa can be any naturally occurring amino acid
QSDETXKMGDIVHTLTNRRWLEKCVTYAESHDQALVGDXTIAFWLMDKDMYDFMALDRPSTPTIDRGIALHKMIRLITMGLGGEGYLYFMGNECGHP

SEQ ID NO: 7017 - protein, 205 aa, Glycine max
MTNYGTIPTSSTPSTNLEFISRAKQRVKEGLGTRRPWKLMFNFRSFALPAGVGDAVSRVRENISYFQMNYAIVVLIVLFLSLLWHPISLIVFVVLMAAWLFLYFLRDEPLIIFGRLISDRVVLIVMAVLTVVLLLLTGAIGNILVALLIGAVLVVAHAALRKTDDLFFDEEEATRLSPPGAPLSGSPNLLLLLLSVNFLFGQFSK

SEQ ID NO: 7018 - protein, 544 aa, Chlamydia muridarum
MVAKNIKYNEEARKKIQKGVKTLAEAVKVTLGPKGRHVVIDKSFGSPQVTKDGVTVAKEVELADKHENMGAQMVKEVASKTADKAGDGTTTATVLAEAIYTEGLRNVTAGANPMDLKRGIDKAVKVVVDQIKKISKPVQHHKEIAQVATISANNDAEIGNLIAEAMEKVGKNGSITVEEAKGFETVLDVVEGMNFNRGYLSSYFATNPETQECVLEDALVLIYDKKISGIKDFLPVLQQVAESGRPLLIIAEDIEGEALATLVVNRIRGGFRVCAVKAPGFGDRRKAMLEDIAILTGGQLISEELGMKLENASLAMLGKAKKVIVSKEDTTIVEGMGEKEALDARCESIKKQIEDSTSDYDKEKLQERLAKLSGGVAVIRVGAATEIEMKEKKDRVDDAQHATIAAVEEGILPGGGTALIRCIPTLEAFLPMLTNEDERIGARIVLKALSAPLKQIAANAGKEGAIIFQQVMSRSANEGYDALRDAYTDMIEAGILDPAKVTRSALESAASVAGLLLTTEALIAEIPEEKPAAAPAMPGAGMDY

SEQ ID NO: 7019 - protein, 161 aa, Chenopodium rubrum
MSLIPNNWFNTGRRSNIFDPFSLDEIWDPFFGLPSTLSTVPRSETAAETAAFANARIDWKETPEAHVFKADLPGVKKEEVKVEVEDGNVLRISGQRAREKEEKNDTWHRVERSSGQFMRKFRLPENAKVDQVKAGMENGVLTVTVPKNEAPKPQVKAINVY

SEQ ID NO: 7020 - protein, 246 aa, Lycopersicon esculentum
MGRGRVELKRIENKINRQVTFAKRRNGLLKKAYELSVLCDAEVALLVFSNRGKLYEFCSTNNMLKTLDRYQKCSYGTLEVNRSIKDNEQSSYREYLKLKAKYESLQRYQRHLLGDELGPLTIDDLEHLEVQLDTSLKHIRSTRTQMMLDQLSDLQTKEKLWNEANKVLERKMEEIYAENNMQQAWGGGEQSLNYGQQQHPQSQGFFQPLECNSSLQIGYDPITTSSQITAVTNAQNVNGMIPGWML

SEQ ID NO: 7021 - protein, 277 aa, Staphylococcus aureus subsp. aureus COL
MEVKTFYNGNTMPQIGLGTFRVENDENCMESVKYAIEQGYRSIDTAKVYGNEEQVGAGIRAGLESTGIAREDLFITSKLYFEDFGRENVAAAYEASLSRLGLKYLDLYLVHWPGTNEAVMVDTWKGMEDLYKNNNVKNIGVSNFEPEHLEALLAQVSIKPVINQVEYHPYLTQHKLKLYLAAQRIVMESWSPLMNAQILNDETIKDIAQELGKSPAQVVLRWNVQHAVVTIPKSVTPNRISENFQIFDFELSDEQMTRIDGLNQDKRIGPDPKKFEG

SEQ ID NO: 7022 - protein, 90 aa, Artemisia vulgaris
MAVCGGVTECKNFENNVEIETIAKFAVEEHNKKENATLEFVKVVSAKEQVVSGKIYYITIETNDGKTYEAKLWVKPWENFQELQEFKPAA

SEQ ID NO: 7023 - protein, 534 aa, Zea mays
MGDWVPRGRPGSSDLLLSSRTRQIYRQRTAKARGPQPLSPKGEDEMALSTTNTNAAESQLHCSTFASRYVRTALPRFKIPEQSIPKEAAYQIINDELMLDGNPRLNLASFVTTWMEPECDKLIQSSINKNYVDMDEYPVTTELQNRCVNMIAHLFNAPIGDDETAVGVGTVGSSEAIMLAGLAFKRKWQNKMKAAGKPYDKPNIVTGANVQVCWEKFARYFEVELKEVKLKEGYYVMDPEKAAEMVDENTICVAAILGSTLNGEFEDVKLLSDLLTAKNAETGWDTPIHVDAASGGFIAPFLYPELEWDFRLPLVKSINVSGHKYGLVYAGVGWVIWRSKEDLPDELIFHINYLGADQPTFTLNFSKGSSQIIAQYYQLIRLGFEGYKDVMQNCRDNAAVLREGINKMGYFDVVSKDSGVPLVAFSLKDSSKYTVFEVAESLRRFGWIVPAYTMPADAEHVAVMRVVIREDFSRGLAERLIADLGKTMADMDAHAGRKQAPEQPKKSVHDIEKEVTTFWRRLVANSKKKSSMVC

SEQ ID NO: 7024 - protein, 249 aa, Glycine max
MGRGRVELKRIENKINRQVTFAKRRNGLLKKAYELSVLCDAEVALIIFSTRGKLYEFCSTNSMLKTLERYQKCSYGAVEVSKPGKELEQSSYREYLKLKARFESLQRTQRNLLGEDLGPLNTKDLEQLERQLDSSLKQVRSTKTQFMLDQLADLQNKEHMLVEANRSLTMKLEEINSRNQYRQTWEAGEQSMSYGTQNAHSQGFFQPLECNPTLQIGSDYRYNPEASEQQLAATTQAQQVNGFIPGWML

SEQ ID NO: 7025 - protein, 480 aa, Zea mays
RKMARKPLDYEELNENVKRVQYAVRGELYLRASELQKEGKKIIFTNVGNPHALGQKPLTFPRQVVALCQAPFLLDDPHVGLMFPADAIARAKHYLAMAPGGLGAYSDSRGIPGIRKEVADFIHKRDGYPSDPELIYLTDGASKGVMQILNTIIRNEMDGILVPVPQYPLYSATISLYGGSLVPYYLEEEANWSLDFVNIRQTVAEARSKGISVRAMVMINPGNPTGQCLSEANIKELLQFCYHENLVLLADEVYQQNIYQDERPFISARKVMFDMGPPISSELQVVSFHTVSKGYWGECGQRGGYFEMTNLPPKTVDEIYKVASIALSPNVPGQIFMGVMVNPPKPGDISYLKFAAESKSIHESLRRRARMMTDGFNSCRNVVCNFTEGAMYSFPQIRLPPRAIEAARRAGKSADVFYCLKLLEATGISTVPGSGFGQKEGVFHLRTTILPAEEDFPAIMSSFKKFNDSFMEQYEGYSRL

SEQ ID NO: 7026 - protein, 427 aa, Fusobacterium nucleatum subsp. nucleatum ATCC 25586
MIAISSLSFTEDDRTGFLSNMRELKEISDIMDVIQDSYVENANAQKYKEEKNKNSARKNTGVTKKSLMQGALRGMMESLDDPHSVYFTKEEMRSFQEDIKGKYVGVGMVIQKKVGEPLTVVSPIEDGPAYKVGIKPKDKVIEIDGESTYNLTSEEASKRLKGKANTIVKVKVFREVNKMTKVFELKRETIELKYVKSKMLDDGIGYLRLTQFGDNVYPDMKKALEDLQAKGMKGLIFDLRSNPGGELGQSIKIASMFIEKGKIVSTRQKKGEESVYTREGKYFGNFPMVVLINGGSASASEIVSGALKDHKRATLIGEKTFGKGSVQTLLPLPDGDGIKITIAKYYTPNGISIDGTGIEPDTKIEDKDYYLISDGAITNIDENQQKENKKEIIKEVKGEKVAKEVDTHKDIQLEAAIKAIKGMTNKK

SEQ ID NO: 7027 - protein, 512 aa, Arabidopsis thaliana
MDGSGTGSRSGVESILPNYKLGRTLGIGSFGRVKIAEHALTGHKVAIKILNRRKIKNMEMEEKVRREIKILRLFMHPHIIRLYEVIETPTDIYLVMEYVNSGELFDYIVEKGRLQEDEARNFFQQIISGVEYCHRNMVVHRDLKPENLLLDSKCNVKIADFGLSNIMRDGHFLKTSCGSPNYAAPEVISGKLYAGPEVDVWSCGVILYALLCGTLPFDDENIPNLFKKIKGGIYTLPSHLSPGARDLIPRMLVVDPMKRVTIPEIRQHPWFQAHLPRYLAVPPPDTVQQAKKIDEEILQEVINMGFDRNHLIESLRNRTQNDGTVTYYLILDNRFRASSGYLGAEFQETMEGTPRMHPAESVASPVSHRLPGLMEYQGVGLRSQYPVERKWALGLQSRAHPREIMTEVLKALQDLNVCWKKIGHYNMKCRWVPNSSADGMLSNSMHDNNYFGDESSIIENEAAVKSPNVVKFEIQLYKTRDDKYLLDLQRVQGPQFLFLDLCAAFLAQLRVL

SEQ ID NO: 7028 - protein, 280 aa, Lactococcus lactis subsp. lactis Il1403
MIEQEKYTLNDGHLIPKIGLGTFQIRGYEGVEQILTAIQSGYRLLDTSTNYDSEGAVGEAIRRSGIPRSNFFVTTKLPGKYHHFEDALKMIEESLLRTGLSYFDLYLIHWPLPKRDNYVEAWKALIAAKKRGLVRSIGVSNFEEDHLDKIIQETGVIPAINQNEIHPYWPQEKLLKINKKYGILTEAWSPLGRGSKELEESLIQNIAQKYGKDTGQIILRWQVERGIIPIVKATSPEHQRRNIDIFDFSLSSEEINKITALKQENGRVDNQDPNEYEEFV

SEQ ID NO: 7029 - protein, 76 aa, Zea mays
QSDETWKMGDIVHTLTNRRWLEKCVTYAESHDQALVGDKTIAFWLMDKDMYDFMALDRPSTPTIDRGIALHKMIRL

SEQ ID NO: 7030 - protein, 348 aa, Brassica rapa subsp. pekinensis
MDQWFYLFPAEDSHLHHRDNALTPPSSSLMPSFSREMEMSAIVSALTHVVSGNVPPHQFVGGGEGTSNSSSSSGQKRRREVEEGGGGGKSVKAANTLTVDQYFSGGNSSSRVREASSNMSGSGPTYEYTTTTTTNTETSSLNGDQQPRRRYRGVRQRPWGKWAAEIRDPFKAARVWLGTFDNAESAARAYDEAALRFRGNKAKLNFPENVKLVRPATTQSVQQTTAVQTPTQFRNSTSTSTLLPLRPAVDSQPLIQPYNLSYSEMARHQQQFQQHNQQTMDLYDQMSFPLRFGYTGDSMMQSTSSSSSHSRPLFSPAAVQPSETGYLQDIQWSPDKTSNHNYNNSSSS

SEQ ID NO: 7031 - protein, 598 aa, Arthrobacter sp. Q36
MTHTYPREAAKPVLGPARYDVWAPNAESVTLLAGGERYAMQRRAETGPEDAGWWTAAGAPTDGNVDYGYLLDGDETPLPDPRTRRQPDGVHALSRTFDPSAYSWQDDAWQGRELQGAVIYELHLGTFTPEGTLEAAAGKLDYLAGLGVDFIELLPVNAFNGTHNWGYDGVQWFAVHEAYGGPEAYQRFVDAAHAAGLGVIQDVVYNHLGPSGNYLPRFGPYLKQGEGNTWGDSVNLDGPGSDHVRRYILDNLAMWLRDYRVDGLRLDAVHALKDERAVHILEDFGALADQISAEVGRPLTLIAESDLNNPRLLYPRDVNGYGLEGQWSDDFHHAVHVNVTGETTGYYSDFDSLAALAKVLRDGFFHDGSYSSFRERHHGRPINFSAVHPAALVVCSQNHDQIGNRATGDRLSQTLPYGSLALAAVLTLTGPFTPMLLMGEEYGASTPWQFFTSHPEPELGKATAEGRIKEFERMGWDPAVVPDPQDPETFRRSKLDWAEAAEGDHARLLELYRSLTALRRSTPDLTKLGFEDTQVAFDEDARWLRFRRGGVQVLLNFSEQPVSLDGAGTALLLATDDAVRLEGERAELGPLSAAVVSD

SEQ ID NO: 7032 - protein, 48 aa, Zea mays
  misc_feature (5)..(6): Xaa can be any naturally occurring amino acid
  misc_feature (43)..(43): Xaa can be any naturally occurring amino acid
QSDEXXKMGDIVHTLTNRRWLEKCVTYAESHDQALVGDKTIAXWLMDN

SEQ ID NO: 7033 - protein, 348 aa, Crocosphaera watsonii WH 8501
MTSVQIPVIPEQSLDRECTTLSRHVLQQLQSFSPEAQDLSAIMNRIALAGKLISRRLSQAGLMADVLGFTGETNVQGESVKKMDVYANDVFISVFKQSGLVCRLASEEMDKPYYIPENCPIGRYTLLYDPIDGSSNVDINLNVGSIFAIRQQSGEDLDGEATDLLQDGRGQLAAGYIVYGPSTMLVYTIGHGVHSFILDPSLGEFILAQENIQIPDHGPVYSTNEGNFWQWDEAIRDYTRYVHRHEGYTARYSGALVGDIHRILMQGGVFLYPGTVKKPEGKLRLLYETAPLAFLMEQAGGKASDGVKPILDVVPDKLHARSPLVIGSKEDVSLVESFIQDHQRRGNA

SEQ ID NO: 7034 - protein, 665 aa, Arabidopsis thaliana
MANKYFSSVLKSLLLLLHLVFLSKQHVDSASIVKFLPGFEGPLPFELETGYIGIGEEEEVQLFYYFIKSERNPKEDPLILWLTGGPGCSSISGLLFENGPLTMKLDVYNGTLPSLVSTTYSWTKTSSMIFLDQPVGTGFSYSRTQQFNKPSDSGEAKRIHEFLQKWLGKHQEFSSNPFYVAGDSYSGLVVPATVQEISKGNYECCNPPINLQGYVLGNPLTDYAIDSNSRIPFAHGMALISDELYESLKKTCKGEYTNVHPRNTQCLKFIEEFNKCTNRILQQLILDPLCETETPDCYIYRYLLTTYWANDATVREALQINKESIGEWVRCYRTIPYDNDIKSSMPYHVNNSISGYRSLIYSGDHDLEVPYLGTQAWIRSLNYSIIDDWRPWMIKNQIAGYTRTYANKMTFATIKGGGHTIEFKPEEASIISMLILPLSSSFFLVLKGLFPLSSKPGPLAMKLDVYNGTLPSLVPTTYSWTKTSSMIFLDQPVGTGFSYSRTQQYNKPSDSGEAKRIHEFLQKWLSKHQEFSSNPFYVAGDSYSGMVVPATVQEISKGNYQCCSPPINLQGYVLGNPITEHAIDYNYRIPFAHGMALISDELYESLKRVCKGEYVDPRDTECLKLVEEFSKVTYSTEESYFSCCVCVCLSPLVNKQHHFCGYCVF

SEQ ID NO: 7035 - protein, 123 aa, Zea mays
  misc_feature (6)..(6): Xaa can be any naturally occurring amino acid
  misc_feature (43)..(43): Xaa can be any naturally occurring amino acid
QSDETXKMGDIVHTLTNRRWLEKCVTYAESHDQALVGDKTIAXWLMDKDMYDFMALDRPSTPTIDRGIALHKMIRLITMGLGGEGYLNFMGNEFGHPEWIDFPRGPQRLPSGKFIPGNNNSYD

SEQ ID NO: 7036 - protein, 546 aa, Burkholderia fungorum LB400
MAAKEIIFSDVARSRLVEGVNILANAVKVTLGPKGRNVVLERSFGSPVVTKDGVSVAKEIELSDRVQNIGAQLVKEVASRTSDAAGDGTTTATVLAQAIVREGQKYVAAGLNPLDLKRGIDKAVIAAIEELKKISKPTTTSKEIAQVATISANGEESIGQRIAEAIDRVGKEGVITVEDGKSLDDELDVVEGLQFDRGYLSPYFINDQDKQVAVLDNPFVLLHDRKVSNIRDLLPILEQVAKAGRPLLIIAEDVEGEALATLVVNNIRGILKTVAVKAPGFGDRRKALLEDIAILTGGQVIAEETGLSLEKATLAELGQAKRIEVGKENTTVIDGAGDSKNIEARVKQIRTQIEEATSDYDREKLQERVAKLAGGVAVIKVGGATEIEVKEKKDRVDDALHATRAAVEEGIVPGGGVALIRVKQAISGLKGANADQDAGIKIVLRALEEPLRQIVTNAGEEASVVVAKVAQGTGNFGYNAQTGEYGDLVQSGVLDPTKVTRTALQNASSVAGLLLTTDATVHEAPKDTPAAGQPGGPGAGGPGLDF

SEQ ID NO: 7037 - protein, 131 aa, Zea mays
  misc_feature (5)..(6): Xaa can be any naturally occurring amino acid
  misc_feature (39)..(39): Xaa can be any naturally occurring amino acid
QSDEXXKMGDIVHTLTNRRWLEKCVTYAESHDQALVGDXTIAFWLMDKDMYDFMALDRPSTPTIDRGIALHKMIRLITMGLGGEGYLNFMGNEFGHPEWIDFPRGPQRLPSGKFIPGNNNSYDKCRRRFDL

SEQ ID NO: 7038 - protein, 513 aa, Zea mays
  misc_feature (256)..(256): Xaa can be any naturally occurring amino acid
MSYNKAPSITAETINPRVKIIRYAPCGEIVKHAARLEQEIEENPASIPFQEIIYCNLGNPQVLGQPPLTFFREVLSLCDNPALMDRDEARALFSPCSIRRARRILNSIPSKDTGGYTDCRGIKCLRQVVADGITARDGFPSTADDIFLTDGATSAINLMMQILIRSHEDGILSPLPEYPLYSASIILHGGTMVPYNLTEDNGWGLEIFEVKRCLEEARSAGLTVRAMVVINPGNPTGQLRLYQSFSSSTHLIPLVXVLSVTNQEEIVEFCRKEGLVILADEVYQENIYAENKKFHSFKKVARSLAYDENDLTLVSLHSVSMSYGESGRRGGYMEVSGVAANVKDQIYKVASLTLCPNIAGQILVSLAMDPPKLGDESFESFDKEKEQIRSSFCKRAKTLEKAFSGLEGVTCNKLEGALYLFPRLHLPSAAIRAADFEGVSPDIFYAHRLLDATGIAVVPGSGFHQASGTIHIRCTILPDERKIEAMVARLRAFHKAFMNEFRGSQQVMNDLRR

SEQ ID NO: 7039 - protein, 131 aa, Zea mays
  misc_feature (12)..(12): Xaa can be any naturally occurring amino acid
  misc_feature (43)..(43): Xaa can be any naturally occurring amino acid
QSDETWKMGDIXHTLTNRRWLEKCVTYAESHDQALVGDKTIAXWLMDKDMYDFMALDRPSTPTIDRGIALHKMIKLITMGLGGEGYLNFMGNEFGHPEWIDFPRGPQRLPSGKFIPGNNNSYDKCRRRFDL

SEQ ID NO: 7040 - protein, 133 aa, Brassica napus
  misc_feature (131)..(131): Xaa can be any naturally occurring amino acid
MSVTTTVEENHRKDPSSPEKEAEKRKQRWAFWGRKWRRLDYFKLTASLFVHSMALLAPFYFSWSALWVTFLFYTIGGLGITVSYHRNLAHRSFKVPKWLEYLLAYCALLAIQGDPIDWVSTHRYHHQFTDXER

SEQ ID NO: 7041 - protein, 113 aa, Yarrowia lipolytica CLIB122
MSHKQAGQPNNILFVKNLPYESTSDELYELFGRFGAVRQIRAGSEKDTRGTAFVVYEDIDDATEAVKTLSGFNYKNRYLVALFHSLEQMDKTAENLEARRAKLEELKKEHGLE

SEQ ID NO: 7042 - protein, 925 aa, Pseudomonas aeruginosa UCBPP-PA14
MFKDLGIKGRVLLLTLLPTSLLAMVLGGYFTWVQLSDMRAQLIERGQLIAEQLAPLAATALARKDTAVLNRIANEALDQPDVRAVTFLDARQERLAHAGPSMLTVAPAGDASHLSMSTELDTTHFLLPVLGRHHSLSGATEPDDERVLGWVELELSHHGTLLRGYRSLFTSLLLIAAGLGVTALLALRMSRAINAPLELISQGVAQLKEGRMETRLPPMGSNELDELASGINRMAETLQSAQEEMQHNIDQATEDVRQNLETIEIQNIELDLARKEALEASRIKSEFLANMSHEIRTPLNGILGFTNLLQKSELSPRQQDYLTTIQKSAESLLGIINEILDFSKIEAGKLVLENLPFNLRDLIQDALTMLAPAAHEKQLELVSLVYRDTPIQLQGDPQRLKQILTNLVGNAIKFTQGGTVAVRAMLEDESDDRAQLRISVQDTGIGLSEEDQQALFKAFSQADNSLSRQAGGTGLGLVISKRLIEQMGGEIGVDSTPGEGAEFWISLSLPKSRDDNEEPGASWAAGQRVALLEPQELTRRSLHHQLTDFGLEVSEFADLDSLQESLRNPPPGQLPISLAVLGVSAAIHPPEELSQSFWEFERLGCKTLVLCPTTEQAQYHATLPDEQVEAKPACTRKLQRKLQELLQVRPTRSDKPHAMVSGRPPRLLCVDDNPANLLLVQTLLSDLGAQVTAVDSGYAALEVVQRERFDLVFMDVQMPGMDGRQATEAIRRWEAEREVSPVPVIALTAHALSNEKRALLQAGMDDYLTKPIDEQQLAQVVLKWTGLSLGQSLASMSRAPQLGQLSVLDPEEGLRLAAGKADLAADMLAMLLASLAADRQAIRQARDNDDRTALLERVHRLHGATRYCGVPQLRAACQTSETLLKQNDPAAAAALDELDKAIEALADTASATTHLSSTSLDSSEL

SEQ ID NO: 7043 - protein, 585 aa, Ustilago maydis 521
MSLSQHIDPEELIEQAADHPILGLLEHPAGKHARAYHSGAHAGRYVTEPIPKYKIPQKGTDAEATYELLSSELSLDGKPTLNLASFVHTWMPKEATKLMSETMMVNLCDQDEYPATMSFHNRAVSMLADLWKAPTEKDENGKRKPAMGVATTGSSEAIMLACLAAKKRWQHRMKAQGKSFKEPGPNMVFGSNAQVAIEKFARYFDVEERLVPVSHESRYCLDINKAIEMVDENTICVVVILGSTYTGHYEDVEGMSKLLDEYESKTGISIPIHVDGASGAMVAPFATPELKWSFEIARVASINTSGHKFGMVYPGLGWVLFRDNEQVPKELIFELHYLGSVEYSFGLNFSRPAHPVIGQLFNFINLGFEGYRRVMQSDLQNARLLSRALENSGLYQVLSEIHKPVSSPSAATGAAALIQQAGSKLTSSTQSHEQLNQHSAEMYRPGLPVVSFRWSEDFRKRNPNLEQRWMQTLLRAKGWIVPNYNLSPDLEHIDILRVVVRENLSETMIEQLVYDIITITQSLEKQANDGGFRHLAELTSSKHDDSTAAKDAEKSTGHHNAAHDKHRGGLPKDSGVQAKGYAKQC

SEQ ID NO: 7044 - protein, 448 aa, Treponema pallidum subsp. pallidum str. Nichols
MQTVQDVYEFLRKYYVDEVDPHILYKGALEGMINSLQDPYTTFVESDSISGVNLQDTTKGFFGGIGVVISKSRTSTPGKPAYVEVTAAIEDTPSWKGGIRPRDLIVKIGTMSTDTMTMDEVLKKLRGPIGTKVTLVVKRGTKIFRPFTLTRAKIEIPTVKYAKIDPNIAYVRLIEFNPVTATRMVETVTELRRQGCDRLILDLRNNPGGLITAAVDVTSSFIPSGTVVTTKSRVQGHSITFSVNARAQKLPPSMPVIVLINRDSASASEIVSGALKDHKRAYLVGQTTYGKGVVQQVFDLNERESLKMTISRYYTPSDANIDKSGIPPDLEVRETEFTPEEEEALVSLFKSEKVKLFAEQNRTMNSERIKQYARGLAREFKLRSILVEKLIAQEYHRHNASFVYDLEYDEQLRKAVELIRTQDIHALVARTKTVKELQEGIQEKKKVS

SEQ ID NO: 7045 - protein, 464 aa, Zea mays
MARSGREADPGEEERKLVLGKYELGRLLGQGTFAKVYYARDLSAGAGTGHSCSVAIKVIDKARLRRTEGMVEQLRREISIMRMVRHPNVVGIREVLASRSRVFVVMEYARGGELFAKVARGRLDEDHARRYFQQLVAAVGFCHRRGVAHRDLKPENLLLDEAGRLKVTDFGLAALPEQLRHDGLLHTQCGTPAYVAPEVLRKRGYDGARADLWSCGVVLYVLLCGFLPFQHDNYVKLYQKIFKADYQVPPWVSGDARRLIARLLVVDPAKRASIAEIMCTPWFRKGFVPPVLSPPVTPKKQQLDEGAALFDNDDDDNSNSNHSGATSPRSCNAFQLISSMSSGFDLSGLFESEQKTATVFTARAPAATVVEKLESVARALGFEVTRGKGWKVRMEAKAEGTNGRLAATAEVLEVAVDVTVVEFVHDAGDALDFNKFCAVDVRPGLTEIVWAWQGDSPAAAVGTA

SEQ ID NO: 7046 - protein, 443 aa, Zea mays
MHAWLPLPIIRQRGTMSWRRAAASPGGGGKAAAVRCHPVLAEERKASIRGVVGDLLAMAGGGRRSLISLGVGDASSHACFRRGGEFAAEAVAHAALSGAFDCYAPSFGFPDARRAVAAHLSTGAVHRTHEADVFMTAGGTGAITAIATVLGGAPGANVLLPRPGFAPYEAACEVAGAEPRFYDLLPRRGWEADLAGVRALADAATAALVVINPNNPCGAVYSAHHLRQLAETARELGIPIVADEVYAHMVFGGSRFVPMASLAHIAPVVSIGALSKRFMLPGWRLGWLAFCDPNGALKHVRAATEMLLNVTSGPASIVQAAVPKILSAEHHEFHRNVVHLLESAADALYRRVNQIEALRCYSKPEGSMFMMVEINTSILHGVANDMDFARELIKEECVLVLPGSVIGLKNWVRIFFGAPVSLILEACDRIEMFCRRRTLKQNN

SEQ ID NO: 7047 - protein, 365 aa, Anabaena variabilis ATCC 29413
MSTNINLFSSYQLGELKLPNRIVMAPLTRQRAGEGNVPHQLNAIYYGQRASAGLIIAEATQVTPQGQGYPHTPGIHSPEQVAGWKLVTDTVHQQGGRIFLQLWHVGRISHPDLQPDGELPVAPSAIAPKGEVLTYEGKKPYVTPRALETSEIPGIVEQYRQGAANALAAGFDGVEIHAANGYLIDQFLRDGTNQRTDEYGGAIENRARLLLEVTEAVTSVWDSQRVGVRLSPSGTFNDIRDSHPLETFGYVAQALNRFNLSYLHIFEAIDADIRHGGTIVPTSHLRDRFTGTLIVNGGYTREKGDTVIANKAADLVAFGTLFISNPDLPERLEVNAPLNQADPTTFYGGGEKGYTDYPFLEVASK

SEQ ID NO: 7048 - protein, 549 aa, Mesorhizobium loti MAFF303099
MAAKDVKFSRDARERMLRGVNILADAVKVTLGPKGRNVVIDKSFGAPRITKDGVTVAKEIELEDKFENMGAQMVREVASKTNDIAGDGTTTATVLAQSIVQEGHKAVAAGMNPMDLKRGIDLAVADVVATLIKNAKKIKTSEEVAQVGTIAGNGDSSVGSMIAEAMQKVGNEGVITVEEAKTAETELEVVEGMQFDRGYLSPYFVTNADKMVADLEDAYILLHEKKLSNLQAMLPILEAVVQTSKPLVIISEDVEGEALATLVVNKLRGGLKIAAVKAPGFGDRRKAMLEDIAILTGGQVISEDLGIKLENVGLNMLGRAKKVSISKENTTIVDGAGKKAEIQGRVAQIKQQIEETTSDYDKEKLQERLAKLAGGVAVIRVGGATEVEVKEKKDRVDDALNATRAAVEEGIVPGGGVALLRASLSINAVGANSDQTAGISIVRRALQAPARQIAANAGAEASIVAGKILENKGATYGYNAQTGEYGDMIAMGIVDPVKVVRTALQDAASVAGLLVTAEAMIAEAPKKESAGGGMPGGMPGGGMGGMGGF

SEQ ID NO: 7049 - protein, 214 aa, Porphyromonas gingivalis W83
MTTTEVKMFTFNSVAENTYILYDSTGEAALIDCGCMDGSEEQQLLRFVQEQQLTVKLLLNTHLHFDHAWGNGFAAKTFGLPVLTHRAEVEEMPSPSKQLAAFGMFGTMDEPPIQYIAPGDVLQLGESIIKVLFVPGHSPGHLAFYCPQAQAVFTGDALFAGDMGRTDLWGGSYELLKKSIRTELLPLPDDTVVYPGHGPTSTIAYERTNNPFLD

SEQ ID NO: 7050 - protein, 253 aa, Zea mays
  misc_feature (44)..(44): Xaa can be any naturally occurring amino acid
MAAGFEALLDSTALSLALPVPVPTMTLLGLKKLNSEDYLAICLXAALAGTRGRSGLSKAAAAAAGFGRQEGGGSRKQWSCPPPAPAREEEELRFRCAVCGKAFASYQALGGHKSSHRRPPTGEQYAAALAAAQQAAGSAAGHSEETTTTSGGPHRCTICWRGFATGQALGGHKRCHYWDGSSVSVSLSATASATGTGTGSSGVTVRNFDLNLMPVPESDGMRRWVEEEEEVQSPLPIKKRRISNPSLTLATCD

SEQ ID NO: 7051 - protein, 326 aa, Saccharomyces cerevisiae
MSTDSTRYPIQIEKASNDPTLLLNHTCLRVKDPARAVKFYTEHFGMKLLSRKDFEEAKFSLYFLSFPKDDIPKNKNGEPDVFSAHGVLELTHNWGTEKNPDYKINNGNEEPHRGFGHICFSVSDINKTCEELESQGVKFKKRLSEGRQKDIAFALDPDGYWIELITYSREGQEYPKGSVGNKFNHTMIRIKNPTRSLEFYQNVLGMKLLRTSEHESAKFTLYFLGYGVPKTDSVFSCESVLELTHNWGTENDPNFHYHNGNSEPQGYGHICISCDDAGALCKEIEVKYGDKIQWSPKFNQGRMKNIAFLKDPDGYSIEVVPYGLIA

SEQ ID NO: 7052 - protein, 306 aa, Cryptococcus neoformans var. neoformans B-3501A
MLGRVGGAKEDETWTKTVSMRMFLLLLLEDGGGRRPPRRSGARKVNDVAFANGVPIYTSRRTRSKKYLMVIPSSHCATATQPLSHTTMSLIHALIARGTTVLAEHATGTAELKPAAQITILSKIPPNNSKLTYVWQDRLIHYVSSNGVIYLVMADDSVGRRMPFAFLADLERRFTAQYESDDIVSAGAHSLEEFEPELAKLMHQYTSSPPADPLRQAQSDLNNVKDIMVQNIDSILQRGERLDLLVDKTDTLAGQAYAFRRGARSVRRQQWWKNMRIMALSGVVGLLLLYLFIAQFCGASLGHCRS

SEQ ID NO: 7053 - protein, 284 aa, Escherichia coli
AGKPTDKPNLVCGPVQISWHKFARYWDVELREIPMRPGQLFMDPKRMIEACDENTIGVVPNFGVTYTGNYEFPQPLHDALDKFQADTGIDIDMHIDAASGGFLAPFVAPDIVWDFRLPRVKSISASGHKFGLAPLGCGWVIWRDEEAVPQELVFNVDYLGGQIGTFAINFSRPAGQVIAQYYEFLRLGREGYTKVQNASYQVAAYLADEIAKLGPYEFICTGRPDEGIPAVCFKLKDGEDPGYTLYDLSERLRLRGWQVPAFTLGGEATDIVVMRIMCRRGFEM

SEQ ID NO: 7054 - protein, 130 aa, Zea mays
  misc_feature (1)..(2): Xaa can be any naturally occurring amino acid
  misc_feature (6)..(7): Xaa can be any naturally occurring amino acid
  misc_feature (43)..(43): Xaa can be any naturally occurring amino acid
XXDETXXMGDIVHTLTNRRWLEKCVTYAESHDQALVGDKTIAXWLMDKDMYDFMALDRPSTPTIDRGIALHKMIRLITMGLGGEGYLNFMGNEFGHPEWIDSPRGPQRLPSGKFIPGNNNSYDKCRRRFD

SEQ ID NO: 7055 - protein, 532 aa, Petunia integrifolia subsp. inflata
MGNCCSRGQPNESNDHTESISTAKNGDGKVMQGGSVTPPKTPPPASPDPSSKPSKTSPIGPVLGRPMEDVRKTYSIGKELGRGQFGVTHLCTHKQSGEQFACKTIAKRKLVNKEDIEDVKREVQIMHHLTGQQNIVELKGAYEDKHSVHLVMELCAGGELFDRIIAKGHYTERAAATLLRTIVQIGHTCHSMGVIHRDLKPENFLLLNKDEDSPLKATDFGLSVFYKQGDVFKDIVGSAYYIAPEVLKRRYGPEVDIWSVGVMLYILLSGVPPFWAETEHGIFNAILRGHIDFSCDPWPAISHGAKDLVRKMLTIDPKQRLTAIQVLNHPWIKEDGDAPDTPLDNAVLSRLKQFRAMNNFKKVALRVIAGCLSEEEIMGLKQMFKSMDTDNSGAITLEELKTGLAKQGTKLSDYEIQQLMEAADADGNGTIDYEEFITATMHMNRMDKEEHLYTAFQYFDKDNSGYITVEELEQALREFGITDGKDIKDIVAEVDSNNDGRINYDEFVAMMKKGTPDTAANLKKRRESFDAK

SEQ ID NO: 7056 - protein, 447 aa, Arabidopsis thaliana
MGLPLMMERSSNNNNVELSRVAVSDTHGEDSPYFAGWKAYDENPYDESHNPSGVIQMGLAENQVSFDLLETYLEKKNPEGSMWGSKGAPGFRENALFQDYHGLKTFRQAMASFMEQIRGGKARFDPDRIVLTAGATAANELLTFILADPNDALLVPTPYYPGFDRDLRWRTGVKIVPIHCDSSNHFQITPEALESAYQTARDANIRVRGVLITNPSNPLGATVQKKVLEDLLDFCVRKNIHLVSDEIYSGSVFHASEFTSVAEIVENIDDVSVKERVHIVYSLSKDLGLPGFRVGTIYSYNDNVVRTARRMSSFTLVSSQTQHMLASMLSDEEFTEKYIRINRERLRRRYDTIVEGLKKAGIECLKGNAGLFCWMNLGFLLEKKTKDGELQLWDVILKELNLNISPGSSCHCSEVGWFRVCFANMSENTLEIALKRIHEFMDRRRRF

SEQ ID NO: 7057 - protein, 48 aa, Zea mays
QSDETWKMGDIVHTLTNRRWLEKCVTYAESHDQALVGDKTIAFWLMDK

SEQ ID NO: 7058 - protein, 208 aa, Oryza sativa (japonica cultivar-group)
MGEYCDWRRSEAIKRQDREATNPSAIRGRRRRRRRRRRGDREMESAMFGLETPLMTALQHLLDIPDGEGGAAGKQGATGGPTRAYVRDARAMAATPADVKDLPGAYAFVVDMPGLKSSDIKVQVEEERLLVISGERRRGGGEEEKEESCKYLRMERRMGKFMRKFVLPDNADVDKISAVCQDGVLTVTVEKLPPPEPKKPKTIEVKVA

SEQ ID NO: 7059 - protein, 547 aa, Ralstonia solanacearum
MAAKDVVFGDAARAKMVEGVNILANAVKVTLGPKGRNVVLERSFGGPTVTKDGVSVAKEIELKDKLQNMGAQMVKEVASKTSDNAGDGTTTATVLAQSIVREGMKYVAAGMNPMDLKRGIDKAVAAAVEELKKISKPTTTSKEIAQVGAISANSDESIGARIAEAMDKVGKEGVITVEDGKSLEDELDVVEGMQFDRGYLSPYFINNPEKQVVQLDNPFVLLFDKKISNIRDLLPVLEQVAKAGRPLLIVAEDVEGEALATLVVNNIRGILKTAAVKAPGFGDRRKAMLEDIAILTGGQVIAEEVGLTLEKATLNDLGQAKRVEIGKENTTIIDGAGDARNIEARVKQVRAQIEEATSDYDREKLQERVAKLAGGVAVIKVGAATEVEMKEKKARVEDALHATRAAVEEGIVAGGGVALLRARALISGLKGANADQDAGIKIVLRAMEEPLRQIVTNAGDEASVVVANVIAGKGNYGYNASTGEYGDLVEMGVLDPTKVTRTALQNAASVASLMLTTDCAVAELPKDDAAPAMPGGMGGMGGMDGMM

SEQ ID NO: 7060 - protein, 471 aa, Vibrio vulnificus CMCP6
MAMKLVWLRRDLRSVDNTALNHAIATSQEVVACFVATPLQWRDHHMAPMQADLIARRLAVLAEELNALNIPLLYDEVDDYAQSATRVANWAEQLAVSEVVLNREYEVNERVRDEQLVNQLASSEIGVLDVEDKCVQAPGCVLNKQGDYFKVFTPFKKAWLKSFVPPQIIKTSAAQPVVLPEALQSSLWHEQAPFSYPRQSSEEWSVDSQQIRETLRHFCHEEVDRYHEQRDFPATAGTSVLSPYLAIGAISVRQCIARLYWQQSYLSNGREVWLSELIWREFYHHLIHFEPKLVKGQGFVEWEKHLLWPAKPDWFDRWCRGETGYPIVDAAMRQLNQTGWMHNRLRMIVASFLTKDLHVNWRLGEQYFMQKLVDGDFAANNGGWQWCASTGCDGQPYFRIFNPITQGEKFDPNGEFVKHWLPELVEVPSKFVHQPWNWPGHMQLDYPAPMVDHKQEREITLSLYTQAKDCL

SEQ ID NO: 7061 - protein, 321 aa, Glycine max
PPPISSPTRPRTRGVGSLKQSLRQLETLGAQRAGLEDMLKEMKRKDDILPKLMTSTGSYDDLFKKEIAKYDHICEEIAQNIEAQEQLLLQIQAQNDEFSVIFNLIFITASREKAYKQIEAAIAKFREIKDNINEGLKFYVTLQDAITNVKQQSNDFVMTRNIQCREMIEDVQRQVAGLSFQDNKNTGGFNSNYPSVGSQNQRSPTQTDPARPQAPYYQQPVEQPPVPPYGHHPPPPYGGPAQHHQPPPPYHIPPSSTAPYPPPQVHQQPPANHEYGQPAYPGWRGPYYNAQAQQPGSVPRPPYTIPSPYPPPHQSGYYKQQ

SEQ ID NO: 7062 - protein, 102 aa, Zea mays
  misc_feature (43)..(43): Xaa can be any naturally occurring amino acid
QSDETWKMGDIVHTLTNRRWLEKCVTYAESHDQALVGDKTIAXWLMDKDMYDFMALDRPSTPTIDRGIALHKMIRLITMGLGGEGYLNFMGNEFGHPERIDF

SEQ ID NO: 7063 - protein, 335 aa, Haemophilus somnus 2336
MKTLGQFIVEKQAEYPNAKGELSGILSSLRLVAKIIHRDINKAGLTNNIIGNSGVENVQGETQMKLDLFAHNTMKQALITREEVAGFASEEEENFVAFDTERGRNAKYVILTDPLDGSSNIDVNVAVGTIFSIYRRVSPIGTPVTLEDFLQPGHKQVAAGYIVYGSSTMLVYTTGNGVNGFTYDPSLGVFCLSHENIQIPPNGKIYSINEGQYLKFPMGVKKYIKYCQEKDKSTDRPYTSRYIGSLVSDFHRNMLKGGIYIYPSATTYPKGKLRLLYEGNPMAFLAEQAGGIASDGKDRILDIQPKELHERVPLFVGSREMVRKAEEFMREFSEE

SEQ ID NO: 7064 - protein, 687 aa, Burkholderia fungorum LB400
MRYPNLFKPLTLNKLTLRNRIVSTAHAEVYAEPGGLPGDRYIRYYEEKAKGGVGLAVCGGSSPVSIDSPQGWWKSVNLATDRIIDPLARLAEAMHTHGARIMIQATHMGRRSAFHGEHWPHLMSPSGVREPVHRGNAKIIEVEEIRRIISDFAAAAKRVKDAGMDGVEISAAHQHLIDQFWSPRTNFRTDEWGGSLENRLRFGTEVLKAVREAVGADFCVGLRMCGDEFHEDGLDHEQLKEIAQAMSETGLIDYLGVIGSGADTHNTLANCMPPMALPPEPFVHLAAGIKSVVKLPVMHAQSIRDAGQAERLLASGMVDLVGMTRAQIADPHMVIKIRDGREDEIKQCVGANYCIDRQYNGLDVLCVQNAATSREATMPHVIARTRGPKRKVVVVGAGPAGLEAARVAKSRGHDVVLFEKNDYVGGQIMLAAKAPQREQMAGIVRWFDMETKRLGVDRRLGVAADEKTIMAEKPDIVVLATGGSSFTSQVAAWGVEEGLAVSSWDVLSGKVEPGRNVLVYDGVSTHAGAGVADFMSSRGSNVEIVTPDVKVADDVGGTTFPIFYRRLYAQGVIHTPNYWLDKVYEEDGKKIAVLRNEYTEEQEERAVDQVVIENGSTPNDELYWKLKPESVNRGQVDVHKLFASEPQPSLSEEPGNGRFLLFRVGDCISMHNIHGAIYDALRLCKDF

SEQ ID NO: 7065 - protein, 545 aa, Prunus dulcis
NYAAKDIKFGVEARALMLKGVEELADAVKVTMGPKGRNVVLEQSFGAPKVTKDGVTVAKSIEFRDKVKNIGASLVKQVANATNDAAGDGTTCATVLTRAIFTEGCKSVAAGMNAMDLRRGISMAVDSVVTNLKSRARMISTSEEIAQVGTISANGEREIGELIAKAMEKVGKEGVITIADGKTLYNELEVVEGMKLDRGYISPYFITNPKNQKCELEDPLVLIHEKKISNLNSIVKILELALKKQRPLLIVAEDVESEALATLIINKLRAGIKVCAIKAPGFGENRKANLQDLAILTGGEVITEELGLNLDKVGVETLGTCKRVTISKDDTVILDGAGDKKAIEERCEQLRSSIELSTSDYDKEKLQERLAKISGGVAVLKIGGASEAEVSEKKDRVTDALNATKAAVEEGIVPGGGAALLYASKELDKLATANFDQKIGVQIIQNALKMPVSTIASNAGVEGAVVVGKLLEQDNPDLGYDAAKGEYVDMIKAGIIDPLKVIRTALVDAASVSSLMTTTEAVVVELPKDEKETPGMGGGMGGMDY

SEQ ID NO: 7066 - protein, 215 aa, Escherichia coli CFT073
MNYRIIPVTAFSQNCSLIWCEQTRLAALVDPGGDAEKIKQEVDASGLTLMQILLTHGHLDHVGAAAELAQHYGVPVFGPEKEDEFWLQGLPAQSRMFGLEECQPLTPDRWLNEGDTISIGNVTLQVLHCPGHTPGHVVFFDDRAKLLISGDVIFKGGVGRSDFPRGDHNQLISSIKDKLLPLGDDVTFIPGHGPLSTLGYERLHNPFLQDEMPVW

SEQ ID NO: 7067 - protein, 404 aa, Emericella nidulans
MASQVQPGQKPKVQPCRYKTGKTLGAGLYSVVKECVHIDTGQYYAAKVINKRLMVGREHMVRNEIAILKQVSTGHQNILTLVDYFETMNNLYLVTDLALGGELFDRICRKGSYYESDAADLVRAILSAVAYLHDHGIVHRDLKPENLLFRTPEDNADLLIADFGLSRIMDEEQLHVLTTTCGTPGYMAPEIFDKSGHGKPVDIWAIGLITYFMLCGYTPFDRETNLEEVQAIATANFSFTPVEYWRGVSQEARDFIKRCLTVNPKKRMTAHQALQHPWINPPYDTTDDLGSGEDLLPNIKKNFNARRTLHKAIDTVRAINKLRENGGLMMDGIMSVDPKPEHVNGSEVVEDRTTPRERENEDAMEIDSRSNARGQTEQQIREQERKVKETVAGLWSRTAPRSER

SEQ ID NO: 7068 - protein, 148 aa, Triticum aestivum
  misc_feature (131)..(131): Xaa can be any naturally occurring amino acid
DQAMNALEEEFSFLSSSKQIVSDMNEKDKVIVFERGDLVFVFNFHPNKTYKGYKVGCDLPGKYRVALDSDALVFGGHGRVGHDVDHFTSPEGMPGVPETNFNNRPNSFKVLSPPRTCVAYYRVDEDREELXRGGAVASGKIVTEYIDV

SEQ ID NO: 7069 - protein, 547 aa, Bordetella pertussis Tohama I
MAAKQVLFADEARVRIVRGVNVLANAVKTTLGPKGRNVVLERSFGAPTVTKDGVSVAKEIELKDKFENIGAQLVKDVASKTSDNAGDGTTTATVLAQAVVQEGLKYVAAGFNPIDLKRGIDKAVAAAVEELKKLSKPVTTSKEIAQVGSISANSDASIGQIIADAMDKVGKEGVITVEDGKSLENELDVVEGMQFDRGYLSPYFINSPEKQVAALDDPYVLIYDKKVSNIRDLLPVLEQVAKSSRPLLIIAEDVEGEALATLVVNNIRGILKTTAVKAPGFGDRRKAMLEDIAILTGGTVISEETGMSLEKATLQDLGQAKRIEVAKENTTIIDGAGDGKSIEARVKQIRAQIEEATSDYDREKLQERVAKLAGGVAVIRVGAATEVEMKEKKARVEDALHATRAAVEEGVVPGGGVALLRAKQAITGLKGDTADQNAGIKLILRAVEEPLRTIVTNAGDEASVVVNTVLNGKGNYGYNAATGEYGDLVEQGVLDPTKVTRTALQNAASVASLLLTAEAAVVELMENKPAAAPAMPGGMGGMGGMDF

SEQ ID NO: 7070 - protein, 642 aa, Streptococcus pneumoniae TIGR4
MDNREALKTFMTGENFYLQHYLGAHREELNGEHGYTFRVWAPNAQAVHLVGDFTNWIENQIPMVRNDFGVWEVFTNMAQEGHIYKYHVTRQNGHQLMKIDPFAVRYEARPGTGAIVTELPEKKWKDGLWLARRKRWGFEERPVNIYEVHAGSWKRNSDGSPYSFAQLKDELIPYLVEMNYTHIEFMPLMSHPLGLSWGYQLMGYFALEHAYGRPEEFQDFVEECHTHNIGVIVDWVPGHFTINDDALAYYDGTPTFEYQDHNKAHNHGWGALNFDLGKNEVQSFLISCIKHWIDVYHLDGIRVDAVSNMLYLDYDDAPWTPNKDGGNLNYEGYYFLQRLNEVIKLEYPDVMMIAEESSSAIKITGMKEIGGLGFDYKWNMGWMNDILRFYEEDPIYRKYDFNLVTFSFMYVFKENYLLPFSHDEVVHGKKSMMHKMWGDRYNQFAGLRNLYTYQICHPGKKLLFMGSEYGQFLEWKSEEQLEWSNLEDPMNAKMKYFASQLNQFYKDHRCLWEIDTSYDGIEIIDADNRDQSVLSFIRKGKKGEMLVCIFNMVPVERKDFTIGLPVAGIYEEVWNTELEEWGGVWKEHNQTVQTQEGLWKDYEQTLTFTLPAMGASVWKIKRRLKSTKTVTNKNQKGVENEK

SEQ ID NO: 7071 - protein, 202 aa, Arabidopsis thaliana
  misc_feature (76)..(76): Xaa can be any naturally occurring amino acid
  misc_feature (83)..(83): Xaa can be any naturally occurring amino acid
  misc_feature (144)..(144): Xaa can be any naturally occurring amino acid
  misc_feature (180)..(180): Xaa can be any naturally occurring amino acid
MDPYKRTTSSEYIAPFYTTNGGAAVYNNMFSLTMGERGPDLIEDHHSIENVAHLTRDRIPERVVHAERRSVLMGWXEVTHDMXNLTRGDSLRAAGVRTSGIGQFSTDGHERARTETMRDMRGFAAKLYTREGNWGLGGNNTGVXFIRDAIQGPDGVHPLNPNPKTDIQEDWKCLAYMVHXAWKIVTWRWPYDEVATYTDTGP

SEQ ID NO: 7072 - protein, 544 aa, Neisseria gonorrhoeae FA 1090
MAAKDVQFGNEVRQKMVNGVNILANAVRVTLGPKGRNVVVDRAFGGPHITKDGVTVAKEIELKDKFENMGAQMVKEVASKTNDVAGDGTTTATVLAQSIVAEGMKYVTAGMNPTDLKRGIDKAVAALVEELKNIAKPCDTSKEIAQVGSISANSDEQVGAIIAEAMEKVGKEGVITVEDGKSLENELDVVEGMQFDRGYLSPYFINDAEKQIAGLDNPFVLLFDKKISNIRDLLPVLEQVAKASRPLLIIAEDVEGEALATLVVNNIRGILKTVAVKAPGFGDRRKAMLQDIAILTGGVVISEEVGLSLEKATLDDLGQAKRIEIGKENTTVIDGFGDAAQIEARVAEIRQQIETATSDYDKEKLQERVAKLAGGVAVIKVGAATEVEMKEKKDRVEDALHATRAAVEEGVVAGGGVALLRARAALENLHTGNADQDAGVQIVLRAVESPLRQIVANAGGEPSVVVNKVLEGKGNYGYNAGSGEYGDMIGMGVLDPAKVTRSALQHAASIAGLMLTTDCMIAEIPEEKPAVPDMGGMGGMGGMM

SEQ ID NO: 7073 - protein, 580 aa, Rhodospirillum rubrum
MVTKLGRSVPEGLADRFAQKLAHRGPDGKGVFEAPGVLLVQARLAIIDLLTGDQPLHGPDGLVLVANGEVYNYRELRAELGEGVFLTRSDCEPPLHLYARRGLAGFDVLRGMYAIALWDPPRRRLVLCRDPFGIKPLYYVETNDGVAFASEPQALIGAGLLPAREDAAAVDELLQLQFTCGARTIFQGIRRVLPGETLVFEDAQLVERHRRPALPAVRERVSPADPLALLDHVLEDSLDLHQRADVPYGLFLSGGIDSSSVLAMMARLNERPVLAFTAGFPGTEVADERADARAATRAVGARHVEVAVSEGDFLEHLPAIAAAVDDPVADYAIVPTWLLAREAAKSVKVVLCGEGGDELLGGYGRYRSAMRPWPLARPLRRKGLLDGLGLLRGGGGRNWRAGIARAEVEARAQGGSRLIRAQRVDCADWLPHDLLNKLDRCLMAHGLEGRVPFVDVDVARFCLPLADGLKVRDGMGKWILRSWLERTLPEARPFAPKRGFSVPVGEWMSRHGDRLGPLVAASPAVAARCHGEAVRALFTHPRKETALAAWILLYYALWHRRHIVGLAPEGDVFHCLSTAA

SEQ ID NO: 7074 - protein, 650 aa, Dechloromonas aromatica RCB
MCGVIGFIRTDFSRTYAADSRRQLELMADAVVHRGPDDAGYWGDESHGIWLGHRRLSILDLSPAGHQPMSSACGRYIVVFNGEVYNWASIRTELEQSGRAPVWRGHSDTEVLLAGLVAWGLEATLKRARGMFAIAVWDRQQRVLSLARDRIGEKPLYYGRVGDTFVFASELKSLRAIPGADFQTDPGSLALMLRYGYVPAPLCIYRNIFKLPPGTLLRVNARGEFGEPEAWWSFAETAQQRVAGRSPMSDAAALDALDEVLGAAIGEQMVADVPLGALLSGGLDSSMVVALMQARSTKPVRTFTIGFAEGAYDEAAHAKVVAAHLGTEHTELYVSPDQARAIIPSLPDMYDEPFADSSQIPTALVCALTRQHVTVCLSGDAGDELFGGYNRYFWATSLWRRFGKMPLGLRKGAAGIFSSVSAGTWNSAFGALSWAMPGRLRVSNPGDKLHKLAEVMAAESEEALYRELVSQWRGPLPMRSPNEPRTLVPDPARWPRMPSYAERMMAVDTLTYLPDDILVKVDRAAMAASLETRVPFLDERVISFAWGLPFEQKVRNGQGKWLLRQLLYRYVPQAMVDRPKQGFGVPIEHWLRGPLRDWAEDLLSPDQLASDGLLDPTPIRAMWEKHLSGRNVQYALWNVLMYQAWRRRWA

SEQ ID NO: 7075 - protein, 374 aa, Vibrio sp. Ex25
MKQRPNKLFEPAQLKALSLQNRIVMAPMTRARTTQPGNIPNEMMATYYQQRASAGLIISEATQISDDSQGYSFTPGVYTDAQVAGWQGVTQAVKSQGAAMFCQLWHVGRVSHPTFQNGEQPIAPSALAPVETQVWIADEQGNGNMVDCVEPRAMTQADINRVVGDFANAAKRAIESGFDGVEIHGGNGYLIDQFLRTNSNHRTDNYGGPRENRIRFLIEVVDAVIAAVGAHRVGVRLAPFITFKDMDCPDIVPTILEASKQLQERDIAYLHLSEADWADAPTIPEAFRVELRKRFRNAIIVAGRYDPQRANEVLEKGYADLVAFGRPFVANPDLVSRLQHHHPLAELDGSTLFGGNERGYTDYPALQQKCAEQA

SEQ ID NO: 7076 - protein, 1358 aa, Oryza sativa
MGEAAAVVAVNGERYEAVGVDPSMTLLEFLRTRTPFRGPKLGCGEGGCGACAVVVSKYDAAADEVTSFSASSCLTLLGSLHHCAVTTSEGIGNSRDGFHPVQRRLAGFHASQCGFCTPGMCVSIFSALANADRAASAAPPPPPTPPGFSRLTAADAERAVSGNLCRCTGYRPILDACKSFAADVDLEDLGLNSFWKKGERADITKLPAYSCTADVATFPEFLKSEIRSSGGAPAVAVTGDGCWFHPRSIEEFHRLFECNLFDEMSVKIVASNTGSGVYKDQDLHDKYINISQIPELSAINRSSNGIEIGAAVSISKAIEILRSDGGDAVVFRKIAYHLGKVASPFVRNTATIGGNIIMAQRMSFPSDIATVLLAAGSTVTIQQVASKRMCLTLEEFLKQPPCDSRTLLISISIPDWCSYDGITFETFRAAPRPFGNAVSYVNSAFLARSSLDAASGSHLIEDVRLAFGAFGSEHAIRASKVEEFLKGKLVSASVILEAVRLLKGVVSPAEGTTHPEYRVSLAVSYLFRFLSSLANGLDDKPENANNVPNGSCTTNGTTNGSAESTVDSFDLPIKSRQEMVFSDEYKPVGKPIKKVGAELQASGEAVYVDDIPAPKDCLYGAFIYSTHPHAHIKGVNFRSSLASQKVITVITAKDIPTGGENVGSCFPMLGDEALFADPVAEFAGQNIGVVIAETQKYAYMAARQAVIEYNTENLQPPILTVEDAVQHNSYFQVPPFLQPKPIGDFNQAMSEADHKIIDGEVKLGSQYYFYMETQTALAFPDEDNCITVYCSAQMPEVTQDIVARCLGVPFHNVRIITRRVGGGFGGKAMKATHVATACAVAAFKLRRPVRMYLDRKTDMIMAGGRHPMKAKYSVGFKSDGKITALHLDLKINAGISPEFSPAIPYAIVGALKKYSWGALAFDIKVCKTNVSSKSAMRAPGDAQGSFIAEAIVEHVASTLSVATNTIRRKNLHDLESLKVFFGDSAAGEASTSSYSLVIIFDRLASTPEYQRRAAMVEQFNGSSRWKKRGISCVPITYSVTLRPSPGKVSILNDGSIAVEVGGVEIGQGLWTKVKQMTAFALGQLCDDGGEGLLDNVRVIQADTLSMIQGGWTAGSTTSETSCEAVRKSCAALVERLKPIKEKAGTLPWKSFIAQASMASVKLTEHAYWTPDPTFTSYMNYGAATSEVEVDVLTGATTILRSDLVYDCGQSLNPAVDLGQVEGAFVQGVGFFTNEEYATNADGLVIHDGTWTYKIPTVDTIPKQFNVELINTARHHSRVLSSKASGEPPLLLASSVHCAMREAIRAARREFAAVGGGTGGSDQVTSFQMDVPATMPAVKELCGLDVVERYLESFSATTA

SEQ ID NO: 7077 - protein, 462 aa, Glycine max
MESKPHVLMHRYELGRLLGQGTFGKVYYARSTITNQSVAIKVIDKDKVMKTGQAEQIKREISVMRLARHPNIIQLFEVLANKNKIYFVIECAKGGELFNKVAKGKLKEDVAHKYFKQLINAVDYCHSRGVYHRDIKPENILLDENGNLKVSDFGLSALVDSKRQDGLLHTPCGTPAYVAPEVIKRKGYDGTKADIWSCGIVLFVLLAGYLPFHDPNLIEMYRKISKAELKCPNWFPPEVCELLGMMLNPNPETRIPISTIRENSWFKKGQNIKNKRPVVENNTVSSSSTVLLDQNDCDGLAAEANGESVVPLSINAFDIISRSVGFDLSRFFDESFKKKEARFSSRLPANVIISKLEDIANQLRMKIKKKAAGLLKLESLNEGRKGVLSIDAEIFEVTPCFHMVEVKKSNGDTLEYQKILKEDIRPALQDIVWVWQSDQQLQSQQSEQQQQTDDQQQQQPQS

SEQ ID NO: 7078 - protein, 683 aa, Shewanella sp. MR-7
MRKLTLATSIATVFVGFSAWAVPPTIQISELPTLKQEAQHKVASKRVTDLYTRSHYHRFALDDAFSAQIFDRYLQQLDYRRNVLTQADVDSFKPYINQFDDMLSSGELEPAYKMFDLVQKRRYEGFVYALSLLDKEMDFTVPGDAYEYDREDVAWPKDQAEINELWRQRVKYDALNLKLTGKKWPEIVDILQKRYNNAIKRLTQTNSEDVFQAVMNAFSRSIEPHTSYLSPRNAERFQMEMNLSLEGIGAQLQLEDDYTVIKSLIAGGPAASSEKLSPEDKIVGVGQEGGEIVDVIGWRLDDVVDLIKGPKGSKVVLQILPKKGGSNAKPFNLTLVRDKIRLEDRAATSKIIEPKDGEYANRKVGVIQIPGFYMNLSQDVEKELVKLNEAKVEGVVIDLRGNGGGALTEAVLLTGLFIDMGPVVQVRDADGRVSAHRDNDGKTTYAGPLTIMVDRYSASASEIFAAALQDYDRALIVGESSFGKGTVQQHKSLGRIYDMYEKPIGHVQYTIQKFYRINGGSTQLKGVTPNIAYPSALEPGEYGEAEEKNALPWDKVPMAQYGTLNDITPELVASLDKKHLARIQNNVEFNYINQDIADFKKHHKEKTVSLVESERIASREADEKKVLDRTNERRVAHGLAAVKSMEDIKDKDDVEAPDAFLDETAYITLDMADAKKLANAGTK

SEQ ID NO: 7079 - protein, 813 aa, Aspergillus nidulans FGSC A4
MAIPRPSTPPEAPLEVTEISERSQSSRWLSRDDRIRILTLRDAGFTYQQISSQLGFTYRQVQYTCQNEQSTPRKPPGQRPKLSEEDMDNIITFISSSQRTRRLSYKRVIEELNLPCGETALARALKKRGYSRCKALRKPPLSDDTKRVRLAWALEHVNWTIEQWNRILWSDETWVTPGFHTRIWVTRRAGEELDETCIRLSTPKKRGWMFWGSFYGDTKGPCLFWEKEWGSINVESYCERIVPIIDGYLRLNRQQGNYLCLMHDGAPGHASKDTIAELHERSIYPISWPAFSPDLNPIEMVWNWMKDWIQERYPDDRQLSYDALREINPKESYPYSPVLPSDFLWGFATASYQIEGAVDEDGRGPSIWDTFCKKPGKIAGGANGDVACDSYHRTHEDIDLLKQCQAKAYRFSISWSRVIPLGGRNDPINEKGLQFYVKFVDDLLAAGITPLVTLFHWDLPEELDKRYGGLLNKEEFVADYANYARIIFNALSPKVKYWITFNEPWCSSVLGYNVGQFAPGRTSDRSKNPEGDGSTEPWIVGHNILVAHGTAVKIYREEFKARDGGEIGITLNGDWAEPWDPENPADVEAAPRKIEFAISWFADPIYFGRYPESMIKQLGNRLPEWTPEEVALVKGSNDFYGMNHYCANFIRAKTSEPDPTDVAGNLELLLQNKAGEWVGPETQSPWLRPSPTGFRKLLKWLSDRYNRPKIYVTENGTSLKGENDLPLEQLLKDDFRVKYFEDYIHAMAEAYTYDNVNVRAYMAWSLMDNFEWAEGYETRFGVTYVDYENNQKRYPKASAKAMSEIFAKYIQNE

SEQ ID NO: 7080 - protein, 205 aa, Lycium barbarum
GAILDERVFHNDYVNLAHSIGAFLYDDLLAIVSLRYQRIHILQIRDSGDLVDVRAIGEFCREDDELFLNFNSQVLVNHVGNGFHHSMPELETSFMSGIKQRLLSFIFRGIWNEETDQTMRVQCLKKKFYFHFQDYIDLIIWKVQFLDRHHLLIKFGSVDGGVSRNADSHPSFFAVYNMETTEIVAFYQNSADELYFLFELFSDHF

SEQ ID NO: 7081 - protein, 165 aa, Populus alba
LTKKFINLIKHAEDGILDLNKAAETLEVQKRRIYDITNVLEGIGLIEKKLKNRIQWKGLDVSRPGEADDNNVATLQAEVENLTMEERRLDEQTREMQERLRDLSEDENNQKWLFVTEEDIKSLPGFQNETLIAIKAPHGTTLEVPDPDEAVDYPQRRYRILLRST

SEQ ID NO: 7082 - protein, 367 aa, Anabaena variabilis ATCC 29413
MLPRKLDPTNSSHKKVHNMAKASESLDLSVNESTDKALDRDCTTLSRHVLQQLQSFSADAQDLSALMNRIALAGKLVARRLSRAGLMEGVLGFTGEVNVQGESVKKMDVYANDVFISVFKQSGLVCRLASEEMDEPYYIPENCPVGRYTLLYDPIDGSSNTDTNLSLGSIFSIRQQEGDDSDGQAKDLLTNGRKQIAAGYILYGPSTMLVYTMGKGVHSFTLDPSLGEFILSEENIRIPDHGAVYSVNEGNFWQWEESMREYIRYVHRTEGYTARYSGAMVSDIHRILVQGGVFLYPGTVQNPEGKLRLLYESAPLAFLIQQAGGRATTGLVDILDVVPKKLHQRTPLIIGSKEDVAKVESFIQNGH

SEQ ID NO: 7083 - protein, 369 aa, Burkholderia vietnamiensis G4
MSALFEPFKLKDVTLRNRIAVPPMCQYVAEEGVVNDWHHVHLAGIARGGAGLVIAEATAVAPEGRITPGCAGLWTDAQAEAFAPSVAAIKAAGAVPGIQIAHAGRKASANRPWEGDDHIAEGDPCGWQTIAPSAIPFGAHLPKMPRAMTHDDIARVQADFVASAQRARDLGFEWLELHFAHGYLGQSFFSVHSNQRDDEYGGSAENRGRFLVDTLKAVRRVWPEHLPLTARLGVIEYDGRDEETLAESIALVQRMKQEGLDMLSVSVGFSTPDAQIPWGPAFLAPIAQRVRRETGLPVSSAWGIDTPQLANRVVAEQQLDLVMVGRAHLADPHWPYYAAKQLGVERPSWTLPAPYAHWLERYRVADKVA

SEQ ID NO: 7084 - protein, 158 aa, Triticum aestivum
MSLIRRSNVFDPFSLDFFDPFDGFPFGSGSSNSGGSLVPRTSSDTAAFAGARIDWKETPEAHVFKADVPGLKKEEVKVEVEDGNILQISGERNKEQEEKTDTWHRVERSSGKFLRRFRLPENAKAEQVKASMENGVLTVTVPKEEAKKPDVKSIQISG

SEQ ID NO: 7085 - protein, 304 aa, Chlamydomonas reinhardtii
MDIAQVDEIIERLLDVRNGRPGKQVQLAENEIRLLCLTAKEIFMSQPNLLELEAPIKICGDIHGQYSDLLRLFEYGGFPPEANYLFLGDYVDRGKQSLETICLLLSFKIKYPENFFLLRGNHECASINRIYGFYDECKRRYNIRLWRTFTDCFNCLPVAALIDEKILCMHGGLSPELKSLEQIKRITRPTDVPDSGLLCDLLWADPDKDIQGWGENDRGVSYTFGPDCVTEFLQKHDLDLVCRAHQVVEEGYEFFAKRQLVTIFSAPNYCGEFENAGAMMSVDETLMCSFQILKPAETKAKGRR

SEQ ID NO: 7086 - protein, 449 aa, Magnetospirillum magnetotacticum MS-1
MIRKILIAAGTFALLSTTALTPVSAAERKETYKLLDLFGEVLEKVRSEYVEPVNDEDLIEAALNGMLASLDPHSSYLNPKNSKDMDIQTRGEFGGLGLEVTMENGWVKVVSPIDDTPAYRAGMQPGDFVTHLDGEQVQGLSLSEAVDRMRGTVNTDIKLTVRRAGVEQPFDIKLTRAVIKVQTVKGQTHGDIGYIRISQFSATTHADLVRIMAQLKKDIGKTPTGFVIDLRNNPGGLLDQAVAVSDDFLDKGEIVSTRSRRPEDTQRFNARPGDIADGLPLVVLINDGSASASEIVAGALQDHKRAVLLGTRSFGKGSVQTLMPLHGHGSLRLTTARYYTPSGRSIQAVGIEPDIKAAQSKVEPVAGAVVERRSEASLRKALPNPNGEKAKPAEKEKAEETKAPEQPKGEGGKAEAPAPIKLGDPAQDYQLARALDLLRGLSLYRPAQR

SEQ ID NO: 7087 - protein, 743 aa, Magnaporthe grisea 70-15
MASLKDIGDTLSKGKSYVMHSQGDKISDLARNTVTPDEKGRQTTDAGVRITNPDDWLRVTSNDQIGPSLLEDQIAREKIHRFDHERIPERVVHARGTAAHGKFTLHKSIEHLTTAGVLTDTSRETPVFLRFSTVLGSRGSADTVRDVRGFAVKFYTPEGNWDIVGNNIPVFFIQDSMKFPDVIHAGKPEPDNEVPQAQSAHNNFWDFMYQHSEATHMFMWAMSDRTIPRSYRMMQGFGVNTYTLINAKGERHFVKFHFTPELGVHSLVWDEALKLAGQDPDFHRKDLMEAIANGAFPRWKFGVQVLPESREHEFDFDILDATKVWPEDLIPVDYIGTLELNRNIDEFFPETEQVAYCTSHVVPGIGFSDDPLLQGRNFSYFDTQISRLGINWEELPINRPVCPVLSFNRDGQSRHTITKGKVNYWPNRFGVNAPADGVKEGGYVEHATKVQGIKARTKSAKFLDHISQAQLFFNSMSDVEKRHMLAAFSFELDHCEEEVVYNNLVSRLTQIDIGLAQQVAEMVGAQIPDKATKENKGIKAKGLSQFDFLPENPTIASRKVAILIADGYDSVQFRAVKAALSAAQAIPLVIAPRRSPIYAAGETKGSSGAGLKPDHHLEGFRSTMVDAVYVPGGAESIKTLSKNGRALHYVREAFGHLKAIGASGEGVELVKLAVTLPEVTVSSADVMESYGVVTVRNVQADSLKEVVDLAKGGKDFLDQFFHSIAMHRNWAREADGLNSQVAY

SEQ ID NO: 7088 - protein, 243 aa, Lotus corniculatus var. japonicus
MGRGRVELKRIENKINRQVTFAKRRNGLLKKAYELSVLCDAEVALIIFSNRGKLYEFCSSSSMLKTLERYQKCNYGAPEANVSTREALELSSQQEYLKLKARYEALQRSQRNLMGEDLGPLNSKELESLERQLDSSLKQIRSTRTQFMLDQLSDLQRKEHMLSEANRSLRQRQLEGYQLNSLQLNPGVEDMGYGRHPAQTHGDAFYHSIECEPTLQIGYQPDPVSVVTAGPSMNNNYMAGWLP

SEQ ID NO: 7089 - protein, 437 aa, Malus x domestica
MATAVSTIGSVNRAPPNLNGSSSSASVPSSTFLGSSLKKVNSRFTNSKVSSGSLRIVASVDEDKQTDKDRWKGLAFDTSDDQQDITRGKGKVDSLFQAPQGSGTHFAIMSSYEYISTGLRQYNFDNNMDGYYIAPAFMDKLVVHITKNFMTLPNMKVPLILGIWGGKGQGKSFQCELVFAKMRISPIMMSAGELESGNAGEPAKLIRQRYREAADIIRKGKMCALFINDLDAGAGRLGGTTQYTVNNQMVNATLMNIADNPTNVQLPGMYNKEENPRVPIIVTGNDFSTLYAPLIRDGRMEKFYWAPTREDRIGVCIGIFRSDNVAKEDIVKLVDTFPGQSIDFFGALRARVYDDEVRKWITGVGVDSIGKKLVNSKEGPPTFEQPKMTIEKLLEYGNMLVQEQENVKRVQLADKYLSEAALGDANSDAMNTGTFYG

SEQ ID NO: 7090 - protein, 583 aa, Pseudomonas aeruginosa UCBPP-PA14
MAIRRRFGAQFQGNGRTCFGLWAPDAREVRVETADGRDWPLEGSDSGWFEATLPCPPGTRYRYRIDGRPGVPDPASQFQPDGVHGHSQVLDHDAYAWRVDEWRGRPWHEAVIYELHVGLFGSYAEVEGFLPRLVELGVTAVELMPLGEFPGRRNWGYDGVLPFAPASAYGTPEQLKHLIDSAHGMGLMVFVDVIYNHFGPDGNYLAQYAAAFFRDDRQTPWGQAIDFRRGEVREFFYENALMWLLDYRVDGLRFDAVHAIPDSAFLVEMARRLRGAAGPERHVHLVLENDDNRASLLRQGYDAQWNDDGHHALHVLLTGESDGYYQDYPEPLRCLARCLAEGFVYQGEANRHGRPRGEPSADLAPDAFVLFLQNHDQVGNRAFGERLSVLAEPQALRLAIALQLLAPMIPLLFMGEECAAREPFLYFTDHQGELADAVREGRRKEFGEFGRFGEGATLASLPDPNAVEAFERSRPGLADCDPAWRGFYRQLLEIRHEHLIPRLRGARSLGVTTIAGAALSARWRLGDGSDWRIDFNPSPLEAEVEPPAAATQVLFLDNLACAEYRRGRLSPRSIAVSLEPAHE

SEQ ID NO: 7091 - protein, 136 aa, Triticum aestivum
  misc_feature (100)..(100): Xaa can be any naturally occurring amino acid
  misc_feature (124)..(124): Xaa can be any naturally occurring amino acid
KNKPKPPIIVTRDSPNALHSHVLEVAAGADVVDCVAEYARRRGRGVCVLSGGGAVVNVALRQPGASPPGSMVATLRGRFEILSLTGTVLPPPAPPGASGXTVFLSGGQGQSSAGALVGPLVAAXPSPDGASRTRVR

SEQ ID NO: 7092 - protein, 638 aa, Desulfovibrio desulfuricans G20
MATPVESGTVPCSLEPFDVYLFGRGEHWDIYRVLGAHAHAQDGETGYRFAVWAPNAHAVSLVGPFNDWRSGDFPLFPVGTSGIWAGFVAGMEYGRLYKFAVQGADGTVRLKTDPYALYCEMRPGTASFTWSLDSYAWNDAAWMQRRREAGPPLQQPVSIYELHAGSWMRRHGEGHPFVNWDELAGTLIPYVRDAGFTHIELMPVAEHPLDQSWGYQTGAYYAPTSRFGTPDDLRRFVDLCHQQGIGVILDWVPAHFPKDDWSLGRFDGTALYEHLDPRLGEHPDWGTYVFNYGRHEVRNFLFANALYWFKEFHVDGLRIDAVASMLYLDYSRKEGEWLPNVHGGNENLEAIDFLRELNRVVHEQYPGVMMIAEESTSWPGVSRPLYTGGLGFTFKWNMGWMHDTLNYMRQDPVFRAYQHSSLTFSMLYAFSENFVLPLSHDEVVHGKGALLSKMPGDMWQQQANLRLMYAYMWAHPGKKLLFMGGEIGQWNEWSESREPDWCLREFPAHEGIRNLVRDLNGIYAQEPAMHRHDHDWSGFRWLDFSDYGCSVISFARFAEDSPPVMWVFNFTPVVRRWYRVPCPRAGEWQEVLNTDSGYYGGSNVGNGGGAVACTDNWHGGHFMELTLPPLAAVALKPV

SEQ ID NO: 7093 - protein, 363 aa, Triticum aestivum
MGLAENHLSLDLVREWMEEHAGPAMTPARGDEERDLTISGLATYQPYDGILALKMALAGFMRQIMHESVSFDPSQMVITSGATPAMEILSSCIADPGNAFLVPSPYYPGWDRDIKWRTGIELIPVPCRSTDNFNISITALEIAYNQAKKRGVRVRGVLISNPSNPTGSFVPKQTLRDLLDFATEKNIHLISDEVFAGSTFGSGEFVSVAEVVNELEDFDRGRVHIIYGLSKDLSLAGFRVGVIYSYNESIVEAAAKIARFSSVSTPTQRLLVAMLSDQKFISNYLKVNRERLRKAYNLLVDALKQVGIECFKSSGGFYCWADMSKFIRSYSEKGERRLWDRLLEEAKVNVTPGSSCHCIEPGW

SEQ ID NO: 7094 - protein, 541 aa, Frankia sp. CcI3
MPKIIAYEEEARRGLERGMNQLAGAVKVTLGPKGRNVVLEKKWGVPAITNDGVSIAREIELEDPYEKIGAEMVKEVAKKTDEVAGDGTTTATVLAEALVHEGLRNVAAGANPIALKRGIELAVERVCGELANLSRELETKDQIASTASISAGGDTAIGQIIAEAMDKVGRDGVITVEESNTFGLELELTEGMRFDKGYISPYFITDQERMECVLEDPYILVANIKISLVKDLLPLLEKVMQAGRPLLVIAENVEGEALATLVVNKIRGTFRSVAVKAPGFGERRKAMLGDIAVLTGSQVISEEVGLRLENADLDLLGRARKVVVTKDDTTIIEGAGDPGRIAGRVSQIRSEIEKSDSDYDREKLQERLARLAGGVAVIKAGAATEVELKERKHRIEDAVRNAKAAVEEGIVPGGGVALLLASGAVFDGLEVAEDERTGAEMVRRALTEPLRQIAVNAGLEGGVVVEKVRNLQPGWGLDAATGEHVNMLEAGIIDPTKVTRSALQNAASIAGLFLTTEAVVAEKPEEKETAAAPAGGGGLEY

SEQ ID NO: 7095 - protein, 225 aa, Zea mays
MDGGFPALLDPTALSLALPVTQGPQGLNKLSKDDYLAICLAALAGTRGSGLVVKAAAGFGRKETGGINKQSWCPPQPAPAAHEEALRLRFRCAVCGKAFPSYQALGGHKSSHRKPPTAEQQAVVSAADSEDETTTSSGGGPHRCTICRRGFATGQALGGHKRCHYWDGASASVSLSASGTGSSGVTLRNFDLNLMPVAENAGMKRWVEEEEVQSPLPIKKRRILD

SEQ ID NO: 7096 - protein, 525 aa, Ralstonia eutropha JMP134
MLGYRPANLHQGTMQGADTPAHARPPYRIDHQFDRGLVWFRRDLRSTDHAALHYALKHCREVWCVFVFDRDILDPLLARGLKGDRRVDFIRASLIELDATLRAAGGGLIVMNDSAASAIPALARELGVQAVFANHDYEPDAVARDAAVRDSLAGDARVLFTFKDQVIFERDEILTSQGKPFAVFTPYKNAWLKTIQPFDLRPYPIEPYLHALAPLPSKRLVPLPSLEDLGFAPSNLAEVAMPTGSSGGQALFEEFTSRMGDYGRRRDYPALRGPSYLSVHLRFGTVSIRTLARAAHGAVLRGGADSAGAATWLSELVWRDFYFMILHHHPRVAAGEAFHPAYDIIRWRDGETGDRYFESWRDAATGYPLVDAAMLQIRQSGYMHNRLRMVTASFLVKDLGVDWRRGEHYFADQLNDFDFAANNGGWQWAASTGCDAQPWFRIFNPVTQSEKFDPQGRFIRKYLPQLAALPDKYVHAPWTAPQDVLLAAGVRLGENYPRPLVQHDVARKETLERYAVVKEWRRPEG

SEQ ID NO: 7097 - protein, 444 aa, Campylobacter jejuni subsp. jejuni NCTC 11168
MMELILKTKRFFAGLAGFATTFILCLFLTSHLQAKVDQKEEQVQKRLEALDKLTKTLAIVEQYYVDDQNISDLVDKSLSGLLSNLDAHSSFLNEKDFNDMKIQTNGEFGGLGITVGMKDGALTVVSPIEGTPADKAGIKSGDIILKINDEATLGINLNDAVDKMRGKPKTQITLTIFRKGATKPFDVTLTREIIKIESVYAKMIENENILYLRVTNFDKNVVDVASKELKKYPNVKGVILDLRNNPGGLLNQAIGLVNLFVDKGVIVSQKGRIASENQEYKADPKNKISNASLVVLVNGGSASASEIVSGALQDLKRGVIVGENTFGKGSVQQIIPINKTEALRLTIARYYLPSGRTIQAVGVKPDIEVFPGKVNTQEDGFSIKESDLKQHLESELEKIDKNKKEDKQENKDNKNLISQKQINDDAQLKSAIDTIKILNIKQGQ

SEQ ID NO: 7098 - protein, 162 aa, Triticum aestivum
MAGMVFGLENPMMTALQHLLDIPDGEAGGAGPAAGEKQGPTRAYVRDARAMAATPADVKELPGAYAFVVDMPGLGSGDIKVQVEDERVLVISGERRREEKEDAKYLRMERRMGKLMRKYVLPENADMEKISAVCRDGVLTVTVEKLPPPEPKKPKTIQVQVA

SEQ ID NO: 7099 - protein, 375 aa, Pisum sativum
MGSNRTIVWFRRDLRIEDNPALAAAARDGSVFPVFIWCPKEEGQFYPGRVSRWWLKQSLAHLDQSLKSLGAKLVLIKTDSTLNALLECVNAIQATKVVFNHLYDPVSLVRDHNIKEKLVELGISVKSYNGDLLYEPWELYDEKGHAFTTFDPFWERCLHKQMEPVSLIPPWQLIPAKGKVERCSIEDLGLENELEKPSNALLGRAWSPGWGNANKALTEFMDKQLLNYSKNRQKVGGDSTSLLSPYLHFGELSVRKVFQMARVKQISWGNEGNSVGKESVTLFLRAIGLREYSRYLCFNFPFTHERALLGHLSFFPWNADPSNFKTWRQGRTGYPLVDAGMRELWATGWMHNRIRVIVSSFAVKMLLLPWKWGMK

SEQ ID NO: 7100 - protein, 250 aa, Solanum tuberosum
MGRGRVQLKRIENKINRQVTFSKRRSGLLKKAHEISVLCDAEVGLIVFSTKGKLFEYANDSCMERLLERYERYSFAERQLVPTDHTSPGSWTLEHAKLKARLEVLQRNQKHYVGEDLESLNMKELQNLEHQLDSALKHIRSRKNQLMHESISVLQKQDRALQEQNNQLSKKVKEREKEVAQQNQWDQQNHEINSSTFVLPQQLDSPHLGEAYQNTNVVDNGEVEGGNSSQQQGAANNTVMPQWMLRHLNG

SEQ ID NO: 7101 - protein, 1081 aa, Candida albicans
MNPTKKPRLSPMQPSVFEILNDPELYSQHCHSLRETLLDHFNHQATLIDTYEHELEKSKNANKAFQQALSEIGTVVISVAMGDLSKKVEIHTVENDPEILKVKITINTMMDQLQTFANEVTKVATEVANGELGGQAKNDGSVGIWRSLTDNVNIMALNLTNQVREIADVTRAVAKGDLSRKINVHAQGEILQLQRTINTMVDQLRTFAFEVSKVARDVGVLGILGGQALIENVEGIWEELTDNVNAMALNLTTQVRNIANVTTAVAKGDLSKKVTADCKGEILDLKLTINQMVDRLQNFALAVTTLSREVGTLGILGGQANVQDVEGAWKQVTENVNLMATNLTNQVRSIATVTTAVAHGDLSQKIDVHAQGEILQLKNTINKMVDSLQLFASEVSKVAQDVGINGKLGIQAQVSDVDGLWKEITSNVNTMASNLTSQVRAFAQITAAATDGDFTRFITVEASGEMDALKTKINQMVFNLRESLQRNTAAREAAELANSAKSEFLANMSHEIRTPLNGIIGMTQLSLDTELTQYQREMLSIVHNLANSLLTIIDDILDISKIEANRMTVEQIDFSLRGTVFGALKTLAVKAIEKNLDLTYQCDSSFPDNLIGDSFRLRQVILNLAGNAIKFTKEGKVSVSVKKSDKMVLDSKLLLEVCVSDTGIGIEKDKLGLIFDTFCQADGSTTRKFGGTGLGLSISKQLIHLMGGEIWVTSEYGSGSNFYFTVCVSPSNIRYTRQTEQLLPFSSHYVLFVSTEHTQEELDVLRDGIIELGLIPIIVRNIEDATLTEPVKYDIIMIDSIEIAKKLRLLSEVKYIPLVLVHHSIPQLNMRVCIDLGISSYANTPCSITDLASAIIPALESRSISQNSDESVRYKILLAEDNLVNQKLAVRILEKQGHSVEVVENGLEAYEAIKRNKYDVVLMDVQMPVMGGFEATEKIRQWEKKSNPIDSLTFRTPIIALTAHAMLGDREKSLAKGMDDYVSKPLKPKLLMQTINKCIHNINQLKELSRNSRGSDFAKKMTRNTPGSTTRQGSDEGSVEDMIGDTPRQGSVEGGGTSSRPVQRRSATEGSITTISEQIDR

SEQ ID NO: 7102 - protein, 655 aa, Ustilago maydis 521
MTPKRKGADARTSRMHDEDDKVLDPKLAEHADEDECETSKPRLAKRQKRSTHSLRSAVVAGGAKVDKQYGSSAYAKSGQGWHRSDFNPNARGRTDSKTPLNQLEEALNAHAPNKANDANDGKNVVYWMRMHDLRIHDNRALAHASSLAAARRKNGKGGHLIALFVITPADYSAHDRGARRIDFVLRTLASLKSQFDKLDIPFVVYTYSGEDRAQVGEKVFSLCEQCDASQLTANIEYEVDELWRDLAMLEAKDKKGVSFSLLHDCYVVPPGRIKTNDGRPYSVFSPWNRRWTESISKDMSLIEASEDPEANPKSIRSHPKLGALFELSKLGTGYGIPEELSGFECKDREYMAKLWPATDQAAHQVLDNFIKGKGGETALDRAANEPSTAEVGANAKDSRLARYAEGRNLLSENGTSRISPYLAAGVVSARECLRRTKQLTKGKLHVGRDSGVAMWNTEISFRDFYAHVLAAWPKVCMGHAFITKYEDVVWETDSSTLDAWKQGRTGYPIVDAAQRQCIQQGYIHNRGRMISAMFLTKHLLHDWRHGERHFSLNFIDQDFASNNGGWQWSASTGTDPQPYFRIFNPLSQSEKCDPHGDYIRHFVPELKNVKGNAIHDPFHRLSKAEFEKLGYPKPIVEHAQARQRALKRYKNPGDQ

SEQ ID NO: 7103 - protein, 206 aa, Malus x domestica
HGSDVAVKILMEQDFHAERFKEFLSEVTIMKRLRHPNIVLFMGAVTKPPNLSIVTEYLSRGSLYRLLHKAGAREALDERRRLSMAYDVAKGMNYLHRRKPPIVHRDLKSPNLLVDKKYTVKVCDFGLSRLKANTFLSSKSAAGTPEWMAPEVLRDEPSNEKSDIYSFGVILWELATMQQPWGNLNPAQVVAAVGFKNKRLEIPRDL

SEQ ID NO: 7104 - protein, 588 aa, Zea mays
  misc_feature (173)..(173): Xaa can be any naturally occurring amino acid
  misc_feature (299)..(299): Xaa can be any naturally occurring amino acid
  misc_feature (559)..(559): Xaa can be any naturally occurring amino acid
  misc_feature (572)..(572): Xaa can be any naturally occurring amino acid
MCGILAVLGCSDWSQAKRARILACSRRLKHRGPDWSGLYQHEGNFLAQQRLAVVSPLSGDQPLFNEDRTVVVVANGEIYNHKNVRKQFTGTHNFSTGSDCEVIMPLYEKYGENFVDMLDGVFAFVLYDTRDRTYVAARDAIGVNPLYIGWGSDGSVWIASEMKALNEDCVRFXSSPPGHLYSSAGGGFRRWYTPHWFQEQVPRTPYQPLVLREAFEKAVIKRLMTDVPFGVLLSGGLDSSLVASVTKRHLVETEAAEKFGTELHSFVVGLEGSPDLKAAREVADYLGTIHHEFHFTVQXGIDAIEEVIYHDETYDVTTIRASTPMFLMARKIKSLGVKMVLSGEGSDELLGGYLYFHFAPNKEEFHRETCRKVKALHQYDCLRANKATSAWGLEVRVPFLDKEFINVAMGMDPEWKMYDKNLGRIEKWVMRKAFDDDEHPYLPKHILYRQKEQFSDGVGYNWIDGLKSFTEQQVTDEMMNNAAQMFPYNTPVNKEAYYYRMIFERLFPQDSARETVPWGPSIACSTPAAIEWVEQWKASNDPSGRFISSHDSAATDHTXAVSRRWPTAAATXANGTVNGKDVAVAIAV

SEQ ID NO: 7105 - protein, 161 aa, Arabidopsis thaliana
MSLIPSIFGGRRSNVFDPFSQDVWDPFEGFFTPSSALANASTARDVAAFTNARVDWKETPEAHVFKADLPGLKKEEVKVEVEDKNVLQISGERSKENEEKNDKWHRVERASGKFMRRFRLPENAKMEEVKATMENGVLTVVVPKAPEKKPQVKSIDISGAN

SEQ ID NO: 7106 - protein, 219 aa, Zea mays
MALDAALDVCSKTPSPSPPTVDSSARGGRRSKRRAGSPASDGGGGVDGNDQPEQEEYLAQCLLMLSHGLPGDGAAPPSAAAKAKAIQQQHQHGRYECSVCGKVYTSYQALGGHKTSHRKPPVVAPAPAPAPGGEADASLSGGTAHAAAEKEKTHRCSVCKRTFQSGQALGGHKRLHYEAKAKDADAVAATAVLQNLDLNLPAEGAPPEPKRARTMLLLA

SEQ ID NO: 7107 - protein, 248 aa, Lotus corniculatus var. japonicus
GRGKMEIKRIENTTNRQVTFCKRRNGLLKKAYELSVLCDAEVALIVFSSRGRLYEYANNSVKATIDRYKKACSDSSGAGSASEANAQFYQQEADKLRVQISNLQNNNRQMMSESLGSMNAKELKNLETKLEKGISRIRSKKNELLFAEIEYMQKREIDLHNNNQLLRAKIAESERNHPNLSILAGSTSNYESMQSQQQQQQQQFDSRGYFQVTGLQPTTHTQYSRQDQISLQPSSQYARQDHMSLQLV

SEQ ID NO: 7108 - protein, 229 aa, Lotus corniculatus var. japonicus
GRGKMEIKRIENTTNRQVTFCKRRNGLLKKAYELSVLCDAEVALIVFSNRGRLYEYANNSVKASIERYKKACSDSSGGGSTSGANAQFYQQEAAKLRVQISNLQNHNRQMLGEALSNMNARDLKNLETKLEKGISRIRSKKNEMLFAEIEYMQKREIDLHNSNQLLRAKIAESDERKNHNFNMLPGTTNFESLQQSQQPFDSRGSFQVTGLQPNNNQCARQDQISLQFV

SEQ ID NO: 7109 - protein, 228 aa, Lotus corniculatus var. japonicus
GRGKMEIKRIENTTNRQVTFCKRRNGLLKKAYELSVLCDAEVALIVSSSRGRLYEYANNSVRGTIDRYKKACAASSNTESVSEANTQFYQQEASKLRRQIRDIQNLNRHILGEALGNLSLKELKNLEGRLEKGLSRVRSRKHETLFADVEFMKKREIELQNHNNYLRAKIAEHERAQQQQQQQQQQQQNLMLSESLPSQSYDRNLFPANLLGSDNQYSRQDQTALQLV

SEQ ID NO: 7110 - protein, 223 aa, Lotus corniculatus var. japonicus
MGRGKIEIKRIENTTNRQVTFCKRRNGLLKKAYELSVLCDAEVALIVFSSRGRLYEYSNNNIRSTIERYKKACSDHSSTSTTTEINAQYYQQESAKLRQQIQMLQNSNRHLMGDALSTLTVKELKQLENRLERGITRIRSKKHEMLLAEIEYFQKREIELENENLCLRTKITDVERIQQVNMVSGQELNAIQALASRNFFNPPMIEDGTSYPQQPDKKILHLG

SEQ ID NO: 7111 - protein, 597 aa, Pisum sativum
MGMNRTIVWFRRDLRIEDNPALAAAARDGSVFPVFIWCPKEEGQFYPGRVSRWWMKQSLVHLDQSLKSLGAGLVIIKTDSTLKALLECVNAVQATKVVFNHLYDPVSLVRDHNIKEKLVEQGVSVQSYNGDLLYEPWEIFDESGHAFTTFDPFWNTCLHMQMKTYSPIPPCQLILAQGKVEKHSIEQLGLEDELEKSSNSSLGRSWSPGWSKSDKALAEFIENYLLHYSGNRLNLGGDSTSLLSPYIHFGELSVRKVFQLARTKQILWTHEGNIIGEESATLFLRAIGFREYSRYLCFSFPFTLERPLLGNLKFFPWNNDPSNFKAWRQGRTGYPLVDAGMRELWATGWIHNKMRVIVSSFAVKMLLIPWKWGMKYFWDTLLDADLESDILGWQYISGSLPDGHKLERLDDPEVLGRKYDPAGEYIRQWLPELARMPAEWIHHPWDAPLTVLTASGVELGQNYPKPIIDIDLAREQLTQAIFKMWETEAATKASSSQDRQVVDENEKLLIPKVFLKDKVPRGATSANDQTVPILQNLKSDDPPNKRQKCTAEEDRKPDKSRNRSDHTEVSCIDQEDCSTAESSSKRQCSSTSSFSVP

SEQ ID NO: 7112 - protein, 1430 aa, Cryptococcus neoformans var. neoformans B-3501A
MVPPARAHTHNTTNTKQAQLSSAYHELANELGTDNISVVGNYTLGRVIGQGTYGSVHLATHRLTGTRAAVKKVPKSFTPHLTRELHHHRRLHHPHIVHLHEIIATESHIWLVTELCSGGELFDYLVERGRILEGEARRLFGELTLAVGWLHMHGVVHRDLKLENVLLDGELRIKLGDLGFAREWQKGRLMDTYCGTTGYASPEMLACQKYLGVETDIWSLGIILYTLLCGGLPFDDDDERVMKELIQKGEYEEPDWLSQEARDLIRGMLQHDPSKRLSIREILTHPWFKMTIVDKVYPNGDVPSIPPSPNPTSPTAAGDDFFAESALRQQQQQQSRLTPHVAGRSPLSTHLPTTPRQNSGSSEAENGDSRTERKASNMQRLNSAEFSTTEKELEQLHLCTSRPAATATGSGAISPRSISSPSMRGKTLRTLPEGQVDVDETPAGLPPPLSLIDEHPHLPVALHSRTPSRTKRRSVSSTLSLERRLSHHSSHNSYITFPPEDYLSKLDPSLLPNPDSSSSSTTTPPARSFTTPSETRLLRQLDDLGLDVGQLKHSVETDACDASAGLWWLLRQKQEERGETDEVVRRREKEVVRREEKVAEYAKEERRKAREAERERERIPTSPMGILGTRPGKRDSIEKSSEGLRFKEEQPPSIPTTPSYTSVIDLGPPVLPVDVDVDVERTAVGRDAPREAAGEEMKSWKRVESPQSVAISSQSSLDPAPTLPPPAAAGGGGAAGAKTQKEDGRDQAGLDPVAVATPMSNANSSTGASTVAKPEPNVNASANANTSANPRLKAKSPSMNMLQRATSVLGGVGKKGDDKDKDKNGMNEKREESTNDSLHPKRGGSSSPNKLKKPMPAGMKGLTSTLSRSESESEGLLAGGGGGGGGGDSPAVSASGSKTVTPGSSPRRKGLTPQGTPRGGLRDAGAKDSSGERASGNGNGNAGGGNEKGKGGKKDSLWTTFRHLFYEDRRRRKRESVTPSASSPLLLPPSDIKLPAGAVVLSRGANSRTSQFKRSNVGYAPSTGSRRTSLDGNRPVYSRRSSSVHTTSRRSSVGSLHFQDHQAMISDLSRRASQRSHGSQTPTSDREYLDYPSAAAPISRPGSSHSIRGGVGGGSRRSSFSVRSPSLHPETFSASAGGPTSTRFKSSVPPPASPLLGYRRRPAGGNDSSRVRHIKVIPESQIMRSSSVASSIRSNASSRASSMDRDRDRDRESEYESGRDDVSLRSGKRQKRRSGSQRSLAQQIHRTRSPLALSLENTYGSNSVANVGLGIGGASRIPKKPLRDVFQKKGKRKDGGDDDWVSEDEDGFACGLGQGRGIAKSFSNANANGTVWMNVNAKTNPARSAAAFPTSKMVAQPTAQGGTSRRRERGRRSSLEEERGRPQEGKGKAKGETVAQGLMGIESLSGRSRRNLPDRSTAPGIIEEEEEDEE

SEQ ID NO: 7113 - protein, 869 aa, Arabidopsis thaliana
MVSLSNQTRFSFHPNNLVVSEKRRLGISGVNFPRKIKLKITCFAAERPRQEKQKKKSQSQSTSDAEAGVDPVGFLTRLGIADRIFAQFLRERHKALKDLKDEIFKRHFDFRDFASGFELLGMHRHMEHRVDFMDWGPGSRYGAIIGDFNGWSPTENAAREGLFGHDDYGYWFIILEDKLREGEEPDELYFQQYNYVDDYDKGDSGVSAEEIFQKANDEYWEPGEDRFIKNRFEVPAKLYEQMFGPNSPQTLEELGDIPDAETRYKQWKEEHKDDPPSNLPPCDIIDKGQGKPYDIFNVVTSPEWTKKFYEKEPPIPYWLETRKGRKAWLQKYIPAVPHGSKYRLYFNTPDGPLERVPAWATYVQPEDEGKQAYAIHWEPSPEAAYKWKYSKPKVPESLRIYECHVGISGSEPKVSTFEEFTKKVTNFFAASSRYGTPDDFKRLVDEAHGLGLLVFLDIVHSYAAADQMVGLSLFDGSNDCYFHYGKRGHHKHWGTRMFKYGDLDVLHFLISNLNWWITEYQVDGYQFHSLASMIYTHNGFASFNNDLDDYCNQYVDRDALMYLILANEILHVQHPNIITIAEDATYYPGLCEPVSQGGLGFDYYVNLSASEMWVSLLDNVPDNEWSMSKIVSTLVANKEYADKMLSYAENHNQSISGGRSFAEILFGGVDNGSPGGKELLDRGISLHKMIRLITFTSGGRAYLNFMGNEFGHPERVEFPTQSNNFSFSLANRRWDLLESGVHHHLFSFDKELMDLDKSKGILSRGLPSIHHVNDANMVISFSRGPFLFIFNFHPSNSYEKYDVGVEEAGEYTMILNSDEVKYGGQGIVTEDHYLQRSISKRIDGQRNCLEVFLPSRTAQVYKLTRILRI

SEQ ID NO: 7114 - protein, 1165 aa, Arabidopsis halleri
  misc_feature (585)..(585): Xaa can be any naturally occurring amino acid
MVSGGGSKTSGAEAASSGHRVNRSRHTSAEQAQSSASKAQRSQNQQPQNHGAGTESTSKAIQQYTVDARLHAVFEQSGESGKSFDYSQSLKTAPYDPSVPEQQITAYLSRIQRGGYTQPFGCLIAVEESTFTIIGYSENAREMLGLMSQSVPSIEEISEVLTIGTDLRSLFKSSSIVLLERAFVAREITLLNPIWIHSKNTGKPFYAILHRVDVGILIDLEPARTEDPALSIAGAVQSQKLAVRAISHLQSLPGGDIKLLCDTVVDSVRDLTGYDRVMVYKFHEDEHGEVVAESKRDDLEPYIGLHYPATDIPQASRFLFKQNRVRMIVDCYASPVRVVQDDRLTQSICLVGSTLRAPHGCHAQYMTNMGSIASLAMAIIINGNEEDGNGVNTGGRNSMRLWGLVVCHHTSARCIPFPLRCACEFLMQAFGLQLNMELQLALQVSEKRVLRMQTLLCDMLLRDSPTGIVTQRPSIMDLVKCNGAAFLYQGKYYSLGVAPTEAQINDIVEWLLANHSDSTGLSTDSLGDAGYPRAAALGDAVCGMAVACITKRDFLFWFRSHTEKEIKWGGAKHHPEDKDDGQRMXPRASFQAFLEVVKSRCQPWETAEMDAIHSLQLILRDSFKESEAMDSKASAPGGVQPHGDDMAEQGLQEIGTVAREMIRLIETATVPIFAVDIDGCINGWNAKIAELTGLSVEEAMGKSLVRDLIYKEYEETADRLLSCALKGDEGKNVEVKLKTFAPELQGKAVFVVVNACSSKDYLNNIVGVCFVGQDVTGHKIVMDKFINIQGDYKAIIHSPNPLIPPIFAADENTCCIEWNTAMEKLTGWPRSEVIGKLLVREVFGSCCRLKGPDALTKFMIVLHNAIGGQETDKFPFPFFDREGKFIQALLTLNKRVSVDGKIIGAFCFLQIPSPELQQALEVQRRQESEYFSRRKELAYIFQFIKNPLSGLRFTNSLLEATDLNEDQKQLLETSVSCEKQISKIVGEMDVISIGDGSFLLERTEFFIGSVINAVVSQVIFVVRERNIQLIRNIPAEIKSMAVYGDQIRLQQVLAEFLLSIVRYAPLEGSVELHLCPVLKQMADGFSAIRLEFRMACAGEGVPPEKVQDMFHSSRWTSPEGLGLSVCRKILKLMNGGVQYIREFERSYFLIVIELPVPLMMMMPSS

SEQ ID NO: 7115 - protein, 189 aa, Arabidopsis thaliana
MVHSKKFRGVRQRQWGSWVSEIRHPLLKRRVWLGTFDTAETAARAYDQAAVLMNGQSAKTNFPVIKSNGSNSLEINSALRSPKSLSELLNAKLRKNCKDQTPYLTCLRLDNDSSHIGVWQKRAGSKTSPNWVKLVELGDKVNARPGGDIETNKMKVRNEDVQEDDQMAMQMIEELLNWTCPGSGSIAQV

SEQ ID NO: 7116 - protein, 190 aa, Cryptococcus neoformans var. neoformans B-3501A
MPNGLPEHNGAPPPPMNNSSIINGNSEWKLCIRDQKEARLIFPRFPEEFKYMTLDISDHPDQNLITIFPTCRDFVEEALSTGGTVLAHCNGGIALSPAIVVGYLMWKFNWTAEHALAHVQNKRYCVSTMSFQNQFKEYEPIYMAQKMVETAAKRETTTSKRQVEEEDEEGDGYRRKQRYVQGEASDMMLD

SEQ ID NO: 7117 - protein, 1045 aa, Cleome hassleriana
GESGKSFDYSRSLKTTTYGSSVPEKQITAYLSKIQRGGYIQPFGCMIAVDESTFKIISYSENAREMLGLMPQSVPSIEKPEILAIGTDVRSLFTPSSTVLLERAFVAREITLLNPVWIHSKNTGKPFYAILHRIDVGIVIDLEPARTEDPALSIAGAVQSQKLAVRAISQLQSLPGGDIKLLCDTVVESVRDLTGYDRVMVYKFHEDEHGEVVAESKRADLEPYIGLHYPATDIPQASRFLFKQNRVRMIVDCHATPVCVIQDERLTQPLCLVGSTLRAPHGCHAQYMANMGSLASLAMAVIINGNEEEAGSVAGGRNSMRLWGLVVCHHTSARCIPFPLRYACEFLMQAFGLQLNMELQLALQMSEKRVLRTQTLLCDMLLRDSPTGIVTQKPSIMDLVKCDGAAFLYQGRYYPLGVAPSEAQIKDIVEWLLANHGDSTGLSTDSLADAGYPGAATLGDAVCGMAVAYITRKDFLFWFRSHTAKEIKWGGAKHHPEDKDDSQRMHPRSSFKAFLEVVKSRSLPWENAEMDAIHSLQLILRDSFKESETVNTRVAVRADQPGGDMAVQGLDELSAVAREMVRLIETATVPILAVDVEGRINGWNGKIAELTGLSVEEAMGKSLVRDLIYKEYEETVEKLLSHALRGEEDKNVEIKMKTFSRELEGQAVFVVVNACSSKDYLNNIVGVCFVGQDVTGQKIVMDKFIHIQGDYKAIVHSPNPLIPPIFAADENTCCLEWNTAMEKLTGWSRAEVIGKMLVGEVFGSCCRLKGPDTLTKFMIVLHNAIGGEETDKFSFPFFDRNGKFVQALLTANKRVSIDGKITGAFCFMQIPSPELQQALAVQRQQETECISRAKELAYICQVIKNPLSGLRFTNLLLEATGLSEDQKQLLETSVSCEKQISRIIGDMNLETIEDGLVEVEKEEFIMGSVINAVVSQVMMLVRERGLQLIRDIPEEIKTMAVYGDQMRIQQVLAEFLLSIIKYAPSQGWVEIHLNPILKHLPDGSSSLRSEFRMACGGEGLPPELVRDMFHGSRWTTPEGLGLSVC

SEQ ID NO: 7118 - protein, 481 aa, Methylobacillus flagellatus KT
MTKSLVWFRRDLRDYDHAALYHALKDSEQVVCAFVFDTDILDGLPRDDRRVEFIWESVRELKLALQERGGDLLVRHGKATEEIPALASVLGVECVYCNRDYEPAAVKRDDTVSQQLGTQGIAFKSFKDQVIFERDEIMTKSGTPFSVFTPYKNACLRKLDDFHLKAYPVDRYIHHLAQSAPQPMPSLESLAFARSNLKQLRLPTGMSGGMALFEDFSERMPRYRDARDFPALKGPSYLSVHLRFGTVSIRHLARTAWQQGGAGAETWLNELLWRDFYFQVLYHHPQVAEGHSFKPEFEHIPFPNGESLFKAWCEGRTGYPLVDAAMRQINQTGYMHNRLRMVAAGFLVKDLLIDWRWGERYFAEKLIDFDLAANNGGWQWAASTGCDAQPWFRIFNPVTQSEKFDPEGKFIRKYVPELQPCDDKEIHAPWLIPPLRQQALGLVIGKDYPAPVVDHAMRREQVLSLYRQASSRKKWPASSVL

SEQ ID NO: 7119 - protein, 350 aa, Haloarcula marismortui ATCC 43049
MLQRAEPQDFERVLSSMCTVPHPSAREAAERFLATNPGDPGTYETIAGLEREAVEYLGDITGLSDPAGYVASGGTEANLQAIRIARNRADTDDPNVVAPVHAHFSFTKAADVLGVELRTAPAADYRVNMAAMAELVDEDTVCVVGVAGSTEYGYVDPIPAIADLAETVDALCHVDAAWGGFYLPFTDHDWHFGHADIDTMTIDPHKVGQAAVPAGGLLARDRTLLDELAVETPYLESTDQLTLTGTRSGAGVASAVAAMESLWPAGYRQQYETSMANADWLADQLSARGHDVVGPELPLVAADLSMPMTDELRDRGWRVSKTGAGEMRVVCMPHVTRSMLRSFVADLDWY

SEQ ID NO: 7120 - protein, 604 aa, Neurospora crassa
MSLSRHVDPEEIIHHLKDIKLQEKGSGSQRQNHLTPYNSSYASQEDIPKYKIPENGTPGDTVYAMLRDELDLDGRPNLNMASFVNTYIEKDAQKLFVENLGKNLSDNDEYPAMISFSDRCVSILAHLWGVQKGEKAIGTATVGSSEAVHLGGLAMKRRWQEKRRAEGKDAYKPNIIMGANAQVALEKFARYFDVEARILPVSAQSNYCLDPALVKENLDENTIGVFVILGSTYTGHYEPVEEIHKILDDFESQTGIDIPIHVDAASGGFVAPFTYAKTGGHKWNFELPRVKSINVSGHKYGLVTPGVGWIVWRDESFLPKHLIFELHYLGGTEYSYTLNFSRPGAQVIVQYYNLIHLGFQGYRAVVENCLSNARLLSKALEATGWYTCVSDIHRPPQKQAGSVKSGSSGYDGENDQSCCSESQNDDQKAESEESKTHASSSSLSSSKDTPETDRNREETSADYTPGLPVVSFRFTDEFQQEYPHVKQETVSLLMRARQWIIPNYALPPNEDQTEILRVVIRESFSFDLIDRLVTDLVSVTETLMENDEVDLSLLQQHQGGRRRPLTKDEKRIEKEEREREERKGEERGEEKGKRMGEGIHRSVC

SEQ ID NO: 7121 - protein, 684 aa, Ustilago maydis 521
MSKHVRVLYWFRTDLRLHDSPALQAALDLKPAALFPVWCWDPNYVYKHRVGVNRFRFLLESMIALSKNITSTQSNSQLLVVRGEPTELLPELWKRWSITHLVFEKDPSAYGRRRDQLILEAAEKSNVKVVAVQGHHLYDPEQVVNKNKGKPTMSMSTLQKIVADMGDVPKPIDAPEDLPLPTLKDSKSKSLQDTLPELARSLEGLPYYTGKGREGPESIDLNSTELGGQRDKKVSCYDTVQGEASELFSAPTLASLGMDASKVKDTIKGGEPIALEKLANICKDAKYVATFAKPKTSPGQSAEDPSTTLLSPYLKFGCLSVRKLWWDAEEAKNRYKGGSKTGPPENLNGQLLFRDMYACAEYAIGDAFGRVRGNEVCRYMDWYLPTHYDENGEVVLPRPAGDAVSEARLSAYKLGQTGFPWIDALMRQLRLEGWMHHLGRHSVAAFLTRGQCWISWERGAEIFDEYLIDWDPCSNPGNWMWLSCSAFFTQYFRLYGLATFPAKYDKTGALVRKYCPELAKFPDKYIYEPFNAPKEVQQKAGCIIGKDYPLPMLDEKEAKAENMARMKICYQANLYGTSKEVLEGKADEMLRKKHGFKDAPKEFDWNNRPGAKIPKWARAPHGEEHTTKGAPGHEDGPPLTKEEGESGDDSDDVVYKQEDEQKEERTSKKRKAAAKVEGTSKKKE

SEQ ID NO: 7122 - protein, 477 aa, Listeria monocytogenes str. 4b F2365
MTESKFPKDFLWGGAVAANQCEGAYLEDGKGLSLVDILPTVEDGRWEALFNPAKALATDYGFYPSHESIDFYHRYKEDIKLMAEMGFKCFRMSISWPRIFPNGDETTPNEKGLAFYDAVFDECHKYGIEPVVTINHFDTPLEVFKKYGGWKNRKCIDFYLNFCEAIFTRYKDKVKYWMTFNEINMILHLPYIGGGLDVTKEDNPEEVKYQAAHHQLVASALATKLGHEINPENQIGCMLAAGNTYPMTCNPKDVWKSIEADREGYFFIDVQARGYYPSYTKRFFKEHNINIKMEDGDLDALRDHTVDYVAFSYYSSRLTSADPEKNKETEGNVFATLKNPYLKASEWGWQIDPLGLRITMNTIYDRYQKPLFIVENGLGAVDTVAEDGSITDDYRIDYMREHVREMGEAIEDGVELLGYTPWGCIDLVSAGSGEMKKRYGFIYVDRDNKGNGTLNRSKKKSFDWYKKVIETNGKDID

SEQ ID NO: 7123 - protein, 202 aa, Leptospira interrogans serovar Lai str. 56601
MVRRYGCTVYSHPGGIGKIPHATHPVQKGDKILSSAKEYLEILDTPGHTFCHVCILLVENQKPTAIFTGDTLFNAGVGNCLRGGDPTILAKTILEQFYPLEEEILLYPGHDYLETNLKFTLSLNPSNQDAIDALEECSRLPKNIEFLTTNLGKERRINTFLQCDHPSSELLKNVSIKISPKRLLDQNPTELFILIRSLRDKW

SEQ ID NO: 7124 - protein, 506 aa, Bartonella henselae str. Houston-1
MVIDKSFGAPRITKDGVSVAKEIELEDKFENMGAQMLREVASKTNDIAGDGTTTATVLGQAIVQEGVKAVAAGMNPMDLKRGIDAAVDEVVANLFKKAKKIQTSAEIAQVGTISANGAAEIGKMIADAMEKVGNEGVITVEEAKTAETELEVVEGMQFDRGYLSPYFVTNAEKMVADLDDPYILIHEKKLSNLQSLLPVLEAVVQSGKPLLIIAEDVEGEALATLVVNKLRGGLKIAAVKAPGFGDRRKAMLEDIAILTSGQVISEDVGIKLENVTLDMLGRAKKVNISKENTTIIDGAGQKSEINARVNQIKVQIEETTSDYDREKLQERLAKLAGGVAVIRVGGATEVEVKEKKDRVDDALNATRAAVEEGIVAGGGTALLRAANALTVKGSNPDQEAGINIVRRALQAPARQIATNAGEEAAIIVGKVLENNADTFGYNTATGEFGDLIALGIVDPVKVVRSALQNAASIASLLITTEAMVAEVPKKDTPVPPMPGGGMGGMG

SEQ ID NO: 7125 - protein, 753 aa, Escherichia coli O157:H7
MSQQNEKNPHQHQSPLHDSSEAKPGMDSLAPEDGSHRPAAEPTPPGAQPTASGSLKAPDTRNEKLNSLEDVRKGSENYALTTNQGVRIADDQNSLRAGSRGPTLLEDFILREKITHFDHERIPERIVHARGSAAHGYFQPYKSLSDITKADFLSDPNKITPVFVRFSTVQGGAGSADTVRDIRGFATKFYTEEGIFDLVGNNTPIFFIQDAHKFPDFVHAVKPEPHWAIPQGQSAHDTFWDYVSLQPETLHNVMWAMSDRGIPRSYRTMEGFGIHTFRLINAEGKATFVRFHWKPLAGKASLVWDEAQKLTGRDPDFHRRELWEAIEAGDFPEYELGFQLIPEEDEFKFDFDLLDPTKLIPEELVPVQRVGKMVLNRNPDNFFAENEQAAFHPGHIVPGLDFTNDPLLQGRLFSYTDTQISRLGGPNFHEIPINRPTCPYHNFQRDGMHRMGIDTNPANYEPNSINDNWPRETPPGPKRGGFESYQERVEGNKVRERSPSFGEYYSHPRLFWLSQTPFEQRHIVDGFSFELSKVVRPYIRERVVDQLAHIDLTLAQAVAKNLGIELTDDQLNITPPPDVNGLKKDPSLSLYAIPDGDVKGRVVAILLNDEVRSADLLAILKALKAKGVHAKLLYSRMGEVTADDGTVLPIAATFAGAPSLTVDAVIVPCGNIADIADNGDANYYLMEAYKHLKPIALAGDARKFKATIKVADQGEEGIVEADSADGSFMDELLTLMAAHRVWSRIPKIDKIPA

SEQ ID NO: 7126 - protein, 124 aa, Glycine max
MGSEGPRAITIHVTGFKKFQGVPENPTEAIVNNLKEYVERRGLPAGVTLGSCTVLDVAGDGALPQLYQTMESAISKTDSVSNANVVWLHLGVNSGAVRFAIEHQAANEATFRCPDELGWQPQQL

SEQ ID NO: 7127 - protein, 418 aa, Zea mays
MAPTAHHQAARDDELEKSRRKPGGGGKAAAVRCHPVLAEERKASIRGVVGDLLAMAGGGRRSLISLGVGDASSHACFRRGGEFAAEAVAHARLVRRLRLLCAVLRLPRRPPDLELEPRGFLRSHAYHPSRHGCSLSLLHACCCAVCRAEPTDQTNSAVAAHLSTGAVHRTHEADVFMTAGGTGAITAIATVLGGAPGANVLLPRPGFAPYEAACERRGWEADLAGVRALADAATAALVVINPNNPCGAVYSAHHLRQLAETARELGIPIVADEVYAHMVFGGSRFVPMASLAHIAPVVSIGALSKRFMLPGWRLGWLAFCDPNGALKHVRAATEMLLNVTSGPASIVQAAVPKILSAEHHEFHRNVVHLLESAADALYRRVNQIEALRCYSKPEGSMFMMVEINTSILHGVANDMDFA

SEQ ID NO: 7128 - protein, 466 aa, Lactococcus lactis subsp. lactis Il1403
MLYGKENRDEAEFLEPIFGSESEQVDLPKYKLAQQSIEPRVAYQLVQDEMLDEGNARLNLATFCQTYMEPEAVKLMSQTLEKNAIDKSEYPRTTEIENRCVNMIADLWNASEKEKFMGTSTIGSSEACMLGGMAMKFSWRKRAEKLGLDINAKKPNLVISSGYQVCWEKFCIYWDIEMREVPMDKEHMSINLDKVMDYVDEYTIGVVGIMGITYTGRYDDIKALDNLIEEYNKQTDYKVYIHVDAASGGLYAPFVEPELEWDFRLKNVISINTSGHKYGLVYPGVGWVLWRDKKYLPEELIFKVSYLGGELPTMAINFSHSASQLIGQYYNFVRYGFDGYKAIHERTHKVAMFLAKEIEKTGMFEIMNDGSQLPIVCYKLKEDSNRGWNLYDLADRLLMKGWQVPAYPLPKNLENEIIQRLVIRADFGMNMAFNYVQDMQEAIEALNKAHILYHEEPENKTYGFTH

SEQ ID NO: 7129 - protein, 99 aa, Chenopodium rubrum
LGTPNVGEKKECPHSLLPMRKAFDGTFIAAGGYDREDGNKAVMKSYTDLVAYGRLFLANPDLPRRFELDAPLNKYHRDTFYISDPIVGYTDYPFLEDAM

SEQ ID NO: 7130 - protein, 373 aa, Glycine max
MSAVESAEHNNIRGVPTHGGRYVQYNIYGNLFEVSRKYVPPIRPVGRGAYGIVCAAVNAETGEEVAIKKIGNAFDNRIDAKRTLREIKLLRHMDHANIMSIKDIIRPPQKENFNDVYLVSELMDTDLHQIIRSNQQLTDDHCRYFLYQLLRGLKYVHSANVLHRDLKPSNLLLNANCDLKIADFGLARTTSETDFMTEYVVTRWYRAPELLLNCSEYTAAIDIWSVGCILGEIITRQPLFPGKDYVHQLRLITELIGSPDDASLGFLRSDNARRYVKQLPQYPKQNFSARFPTMSPGAVDLLEKMLIFDPNRRITVDEALSHPYMSPLHDINEEPVCTRPFSFDFEQPSFTEEDIKELIWRESVKFNPATIYV

SEQ ID NO: 7131 - protein, 283 aa, Oenococcus oeni PSU-1
MSILDETFQLNNGNQIPKVAFGTWRLKDGDEAYQAVAAALKIGYRHIDTAFHYFNEPSVGQAIKDSGIKREDIFLTTKLPAEIKNHDDILKNFQESLDRLQTDYVDLYLIHAPWPWADINLDYRYDGANREAWQAMEEIYKSGRAKAIGVSNFDVHDLKNIQQIWSVKPAVNQIEFYVGWTQPKIAAYTKSLDIQLEAYSPLATGGLATQPDIQKIAEKYQVSVPRVALKYVLQKNVLPLPRATKAEHVKSNAELDFEISAADMEVLDKLPDTGQARHNVTMG

SEQ ID NO: 7132 - protein, 372 aa, Oenococcus oeni PSU-1
MTNYQFLQTFEFKNGIKIKNRIVIPPMTECSSFEDGNVTKNELDYFALRTGGAGIFITPASNVSSLGKGFEGQLSCASDDMLPSLTQVANTIKVNGTKAILQLHHAGRISDSKILRGQQAVGPSAVASLRPGSEIPRELTNEEILQIISDFGQATRRAIEAGFDGIELHGAKTYLIQQFFSPHSNRRSDDWGGSLKKRMKFPLAVVEQVHKIVERYADRPFIIGYRISPEEIETPGIRLADTLALIDVLKKQPIDYLHISTRDVWQTSKNDSDDQIPVVDQIKEHTKNEVPLIAVGNIAKPEEAEKVIEDGFNFVALGREMLREPQWVEKVQNGQEAGINYSLNETDLKQLRITPPLWKFLTKKIHSKLTAD

SEQ ID NO: 7133 - protein, 347 aa, Psophocarpus tetragonolobus
GGELFDRIVQKGHYSERQAATLIKTIVEVVEACHSLGVMHRDLKPENFLFDTLHEDAKLKATDFGLSVFYKPGESFCDVVGSPYYVAPEVLRKLYGPESDVWSAGVILYILLSGVPPFWAETEPGIFRQILLGKIDFQSEPWHSISDSAKDLIRRMLDQNPKTRLTAHEVLRHPWIVDDNLAPDKPLDSAVLSRLKQFSAMNKLKKMALRVIAERLSEEEIGGLKELFKMIDTDNSGTITFDELKDGLKRVGSELMESEIKDLMDAADIDKSGTIDYGEFIAATVHLNKLEREENLVSAFSYFDKDGSGYITLDEIQQACKDFGLDDVHIDDMIKEIDQDNDGQIDY

SEQ ID NO: 7134 - protein, 359 aa, Ralstonia solanacearum
MNALFAPVRVGRHTLQNRLAMAPMTRSRAEPDGTPGELAADYYAQRASVGLIVTEGTQPSDDGQGYLTTPGIYTDAHVAGWKAVTSAVHAKGGHLFIQLMHAGRMSHPDNTPHHRPGVAPSAIAPGAPMFTATGMQDIPAPRALTTEEVRRTVDDFRLAARRAIEAGTDGVEIHGANAYLIQQFFAPSANTRTDAYGGSIENRARFAIEVAAAIADEIGADRTGIRLSPGTTMWGIDEGAEGPDLYRYLVAELDKLGLAYLHVMHQGDEPLLADLRRRWKQPLIVNRPGRPREQVGADVASGLADLEAYGQMVLANPDFVARLKAHAPMNEAQRNTFFGGSAPGYTDYPTLGETAGASA

SEQ ID NO: 7135 - protein, 489 aa, Bacillus cereus ATCC 10987
MPQDRKAEVQKHAYERKEIMPDNSQSLPRHMQKELPHEFSVNPLFAREGESVVPRFHISDEGMLPETAYQIVHDEITLDGNARLNLATFVSTWMEPAAEQLYAKSFDKNMIDKDEYPQTAEIEERCVRILANLWHSPSPLTTMGVSTTGSSEACMLGGLALKRRWQNARKSEGKPLDRPNIVFSSAVQVVWEKFANYWEVEPRYVKVSPEHPQLDPQGVLAAVDENTIGVVPILGETYTGLYEPVAEIAKALDDLQARTGLDIPMHVDAASGGFIAPFLQPDLVWDFQLPRVKSINVSGHKYGLVYPGLGWIIWREAEDLPEDLIFRVSYLGGNMPTFALNFSRPGAQVLLQYYNYLRLGKSGYYDIQRASQKVALFLSKAIQKMEPFELLSDGSDIPVFAWRLKEGYTSNWNLYDLSRQLRVFGWQVPAYPLPPDMESVTIMRVVVRNGFSMDLAHLFLRNLKQTVAFLDSLDGPMPHDTKCNNGFHH

SEQ ID NO: 7136 - protein, 1306 aa, Arabidopsis thaliana
MEVCNCIEPQWPADELLMKYQYISDFFIAIAYFSIPLELIYFVKKSAVFPYRWVLVQFGAFIVLCGATHLINLWTFTTHSRTVALVMTTAKVLTAVVSCATALMLVHIIPDLLSVKTRELFLKNKAAELDREMGLIRTQEETGRHVRMLTHEIRSTLDRHTILKTTLVELGRTLALEECALWMPTRTGLELQLSYTLRHQHPVEYTVPIQLPVINQVFGTSRAVKISPNSPVARLRPVSGKYMLGEVVAVRVPLLHLSNFQINDWPELSTKRYALMVLMLPSDSARQWHVHELELVEVVADQVAVALSHAAILEESMRARDLLMEQNVALDLARREAETAIRARNDFLAVMNHEMRTPMHAIIALSSLLQETELTPEQRLMVETILKSSNLLATLMNDVLDLSRLEDGSLQLELGTFNLHTLFREVLNLIKPIAVVKKLPITLNLAPDLPEFVVGDEKRLMQIILNIVGNAVKFSKQGSISVTALVTKSDTRAADFFVVPTGSHFYLRVKVKDSGAGINPQDIPKIFTKFAQTQSLATRSSGGSGLGLAISKRFVNLMEGNIWIESDGLGKGCTAIFDVKLGISERSNESKQSGIPKVPAIPRHSNFTGLKVLVMDENGVSRMVTKGLLVHLGCEVTTVSSNEECLRVVSHEHKVVFMDVCMPGVENYQIALRIHEKFTKQRHQRPLLVALSGNTDKSTKEKCMSFGLDGVLLKPVSLDNIRDVLSDLLEPRVLYEGIDCRSVLDDILKQKGNNKIETLNRIMASALRRLVEQQQWRYLVSQSTRSPKLIHGFFSFSSKTNPNPNKQQQILIDYISKSLQSNDTWETLSTKFSSIDLSDSLIETILLRFKNPETAKQALSFFHWSSHTRNLRHGIKSYALTIHILVKARLLIDARALIESSLLNSPPDSDLVDSLLDTYEISSSTPLVFDLLVQCYAKIRYLELGFDVFKRLCDCGFTLSVITLNTLIHYSSKSKIDDLVWRIYECAIDKRIYPNEITIRIMIQVLCKEGRLKEVVDLLDRICGKRCLPSVIVNTSLVFRVLEEMRIEESMSLLKRLLMKNMVVDTIGYSIVVYAKAKEGDLVSARKVFDEMLQRGFSANSFVYTVFVRVCCEKGDVKEAERLLSEMEESGVSPYDETFNCLIGGFARFGWEEKGLEYCEVMVTRGLMPSCSAFNEMVKSVSKIENVNRANEILTKSIDKGFVPDEHTYSHLIRGFIEGNDIDQALKLFYEMEYRKMSPGFEVFRSLIVGLCTCGKVEAGEKYLKIMKKRLIEPNADIYDALIKAFQKIGDKTNADRVYNEMISVR

SEQ ID NO: 7137 - protein, 464 aa, Bartonella quintana
MAGDGTTTATVLGKGIVQEGVKAVAAGMNPMDFKRGIDAAVEEVVGNLFKKAKKIQNSGEIGQVGKISANGGGEIGKMIADAMEKVGNEGVIIVEEAKTAETELEVVEGMQFDRGYLSPYFVTNADKMVADLDDPYILIHEKKLSNLQSLLPVLEAVVQSGKLLLIIAEDVEGEALATLVVNKLRGGLKIAAVKAPGFGDRRKAMLEDIAILTSGQVISEDVGIKLENVTLDMLGRAKKVNISKENTTIIDGAGKKAEINARVNQIKVQIEETTSDYDREKLQERLAKLAGGVAVIRVGGATEVEVKEKKDRVDDALNATRAAVEEGIVAGGGTALLRAANALAIKGSNPDQEAGINIVRRALQAPARQIATNAGEEAAIIVGKVLENNADTFGYNTATGQFGDLIALGIVDPVKVVRSALQNAASIASLLITTEAMVAEVPKKDTPMPPMPGGGMGGMEYAEF

SEQ ID NO: 7138 - protein, 256 aa, Rhodobacter capsulatus
MTLELTPIPCLTDNYAWLWHDTATDTVVVVDVPEAAPVLKVLTDRRWQLHHILITHHHADHIAGVEALAQATGAKVAGAAADAHRLPPLDHPVAPGDVLHLGMEAAQVIAADGHTLGHIAWYLPGAGLLFSGDSLMSWGCGRLFEGTPAQMFDTLTRLAALPPETRVCSGHEYTAANGRFALSLEPGNGRLHDRMDRVTALRLAGEPSLPVTLGEERATNPFLRADDAALRAALGLPGDAAPLAVFTAARARKDRF

SEQ ID NO: 7139 - protein, 544 aa, Francisella tularensis subsp. tularensis
MAAKQVLFSDEARAKMLDGVNTLANAVKVTLGPKGRNVVLDKSFGTPTITKDGVSVAKEIELEDKFENMGAQIVKEVASKTADVAGDGTTTATVLAQALLTEGLKAVAAGMNPMDLKRGIDKATARLVEELKALSKPCSDPKSIEQVGTISANSDATVGKLIADAMAKVGKEGVITVEEGKGFEDELDVVEGMQFDRGYLSPYFATNQENMTTDLENPYILIVDKKISNIRDLLPILEGVSKSGRALLIIAEDVESEALATLVVNNMRGVVKVCAVKAPGFGDRRKAMLEDIATLTGATFVSEDLSMKLEETNMEHLGTASRVQVTKDNTTIIDGAGEKEAIAKRINVIKANIAEANSDYDREKLQERLAKLSGGVAVIKVGAVTEAEMKEKKDRVDDALHATRAAVEEGIVAGGGVALIRAQKALDGLTGENDDQNYGIALLRKAIEAPLRQIVSNAGGESSVVVNQVKANQGNYGYNAANDTYGDMVEMGILDPTKVTRSALQHAASIAGLMITTEAMIGEIKEAAPAMPMGGGMGGMPGMM

SEQ ID NO: 7140 - protein, 474 aa, Bartonella clarridgeiae
MRLREVASKTNDIAGDGTTTATVLGQAIVQEGVKAVAAGMNPISSRWELNAAVEEVVENLFKKAKKIQTSAEIAQVGTISANGASEIGKMIADAMEKVGNEGVITVEEAKTAETELEVVEGMQFDRGYLSPYLVTNAEKMVTDLDDPYILIHEKKLSNLQSLLPVLEAVVQSGKPLLIIAEDVEGEALATLVVNKLRGGLKIAAVKAPGFGDRRKAMLEDIAILTAGQVISEDVGIKLENVTLDMLGRAKKVNISKENTTIIDGAGHKAEITARVSQIKAQIEETTSDYDREKLQERLAKLAGGVAVIRVGGATEVEVKEKKDRVDDALNATRAAVEEGIVAGGGTALLRAANALTIKGKNPDQEAGIHIVRRALQAPARQIATNAGEEAAIIVGKVLENSSDTFGYNTATGQFGDLIALGIVDPVKVVRSALQNAASIASLLITTEAMVAELPKKETPMPPMGGGGMGGMGGM

SEQ ID NO: 7141 - protein, 155 aa, Triticum aestivum
  misc_feature (2)..(4): Xaa can be any naturally occurring amino acid
  misc_feature (72)..(72): Xaa can be any naturally occurring amino acid
  misc_feature (123)..(123): Xaa can be any naturally occurring amino acid
VXXXVPYDPLALRKAFEKAVVKRLMTDVPFGVLLSGGLDSSLVAAVTVRHLAGTKAAKRWGTKLHSFCVGLXGMELGTMHHEFTFTVQDGIDAIEDVIYHTETYDVTTIRASTPMFLMSRTTXQVISGEGSDEIFGGYLYFHKAPNKEELHREPR

SEQ ID NO: 7142 - protein, 483 aa, Bartonella doshiae
MVIDKSFGAPRITKDGVSVAKEIELEDKFENMGAQMLREVASKTNDIAGDGTTTATVLGQAIVQEGVKAVAAGMNPMDLKRGIDAAVEEVVANLFKKAKKIQTSAEIAQVGTISANGAAEIGKMIADAMEKVGNEGVITVEEAKTAETELEVVEGMQFDRGYLSPYFVTNAEKMVADLDDPYILIHEKKLSNLQSLLPVLEAVVQSGKPLLIIAEDVEGEALATLVVNKLRGGLKIAAVKAPGFGDRRKAMLEDIAILTSGQVISEDVGIKLENVTLDMLGRAKKVNISKENTTIIDGAGQKAEINARVNQIKAQIEEQHSDYDREKLQERLAKLAGGVAVIRVGGATAVEVQVKKDRVDDACHATRAAVEEGIVAGGGTALLRAANALTVKGSNPDQEAGINIVRRALQAPARQIASNAGEEAAIIVGKVLENNADTFGYNTATGQFGDLISLGIVDPVKVVRSAKPNCADIHHTGGRSSMH

SEQ ID NO: 7143 - protein, 503 aa, Bartonella grahamii
MVIDKSFGAPRITKDGVSVAKEIELEDKFENMGAQMLREVASKTNDIAGDGTTTATVLGQAIVQEGVKAVVADMNPMDLKRGIDAAVDEVVANLFKKAKKIQTSAEIAQVGTISANGAAEIGKMIADAMEKVGNEGVITVEEAKTAETELEVVEGMQFDRGYLSPYFVTNAEKMVADLDDPYILIHEKKLSNLQSLLPVLEAVVQSGKPLLIIAEDVEGEALATLVVNKLRGGLKIAAVKAPGFGDRRKAMLEDIAILTSGQVISEDVGIKLENVTLDMLGRAKKVNISKENTTIIDGAGQKSEITARVNQIKAQIEETTSDYDREKLQERLAKLAGGVAVIRVGGATEVEVKEKKDRVDDALNATRAAVEEGIVAGGGTALLRAANALTVKGSNPDQEAGIHIVRRALQAPARQIATNAGEEAAIIVGKVLENNADTYGYNTATGEFGDLIALGIVDPVKVVRSALQNAASIASLLITTEAMVAEVPKKDTPMPPMPVAEWC

SEQ ID NO: 7144 - protein, 736 aa, Lycopersicon esculentum
MDCNCFDPLLPADELLMKYQYISDFFIAVAYFSIPIELVYFVQKSAVFPYRWVLVQFGAFIVLCGATHLINLWTSTPHTRTVAMVMTTAKFSTAAVSCATAVMLVHIIPDLLSVKTRELFLKNKAAELDREMGLIRTQEETGRYVRMLTHEIRSTLDRHTILKTTLVELGRALQLEECALWMPTRTGVELQLSYTLHHQNPVGFTVPIQLPVINQVFSANCAVKISPNSAVARLRPTRKYIPGEVVAVRVPLLHLSNFQTNDWPELSPKSYALMVLMLPSNSARQWHVHELELVDVVADQVAVALSHAAILEESMRARDLLIEQNVALDLARREAETAVRARNDFLGVMNHEMRTPMHAVVALSSLLQESELIPEQRLMVETILKSSNLLATLINDVLDLSRLEDGSLQLDVGTFNLHALFREVLNLIKPVAAVKKLFVTLSLSSDFPEVAIGDEKRLMQILLNVVGNAVKFSEEGSVSVSAVNAKSESLIDPRAPEFFPVQSENHFYLRVQVKDTGSGINPQDFPKLFCKFAQNQEPATKNSAGTGLGLAICKRFVNLMEGHIWIESEGVGKGSTAIFIVKLGIPGRLNESKLPFTAGLPANHMQMTFQGLKVLVMDDNGFSRMVTKSLLVHLGCDVTTIGSGDECLRILTREHKVLIMDASITGMNCYDVAVSVHEKFGKRLERPLIVALTGNTDQVTKENCLRVGMDGVILKPVSIDKMRSVLSGLLEHGTVL

SEQ ID NO: 7145 - protein, 483 aa, Bartonella elizabethae
MKLEDNFENMGAQMLREVASKTNDIAGDGTTTATVLGQAIVQEGVKAVAAGMNPMDLKRGIDAAVDEVVANLFKKAKKIQTSAEIAQVGTISANGAEEIGKMIANAMEKVGNEGVITVEEAKTAETELEVVEGMQFDRGYLSPYFVTNAEKMVADLDDPYILIHEKKLSNLQSLLPVLEAVVQSGKPLLIIAEDVEGEALATLVVNKLRGGLKIAAVKAPGFGDRRKAMLEDIAILTSGQVISEDVGIKLENVTLDMLGRAKKVNISKENTTIIDGAGQKAEITARVNQIKAQIEETTSDYDREKLQERLAKLAGGVAVIRVGGATEVEVKEKKDRVDDALNATRAAVEEGIVAGGGTALLRAASALSVKGSNPDQEAGINIVRRALQAPARQIATNAGEEAAIIVGKVLENNTDTFGYNTATGEFGDLIALGIVDPVKVVRSALQNAASIASLLITTEAMVAEMPKKEAAAPPMPAGGMGGM

SEQ ID NO: 7146 - protein, 635 aa, Lycopersicon esculentum
MESCDCIEALLPTGDLLVKYQYLSDFFIAVAYFSIPLELIYFVHKSACFPYRWVLMQFGAFIVLCGATHFISLWTFFMHSKTVAVVMTISKMLTAAVSCITALMLVHIIPDLLSVKTRELFLKTRAEELDKEMGLIIRQEETGRHVRMLTHEIRSTLDRHTILKTTLVELGRTLDLAECALWMPCQGGLTLQLSHNLNNLIPLGSTVPINLPIINEIFSSPEAIQIPHTNPLARMRNTVGRYIPPEVVAVRVPLLHLSNFTNDWAELSTRSYAVMVLVLPMNGLRKWREHELELVQVVADQVAVALSHAAILEDSMRAHDQLMEQNIALDVARQEAEMAIRARNDFLAVMNHEMRTPMHAVIALCSLLLETDLTPEQRVMIETILKSSNLLATLINDVLDLSRLEDGILELENGTFNLHGILREAVNLIKPIASLKKLSITLALALDLPILAVGDAKRLIQTLLNVAGNAVKFTKEGHISIEASVAKPEYARDCHPPEMFPMPSDGQFYLRVQVRDTGCGISPQDIPLVFTKFAESRPTSNRSTGGEGLGLAICRRFIQLMKGNIWIESEGPGKGTTVTFVVKLGICHHPNALPLLPMPPRGRLNKGSDDLFRYRQFRGDDGGMSVNAQRYQRSL

SEQ ID NO: 7147 - protein, 206 aa, Arabidopsis thaliana
METVGRPRGRPRGSKNKPKAPIFVTIDPPMSPYILEVPSGNDVVEALNRFCRGKAIGFCVLSGSGSVADVTLRQPSPAAPGSTITFHGKFDLLSVSATFLPPLPPTSLSPPVSNFFTVSLAGPQGKVIGGFVAGPLVAAGTVYFVATSFKNPSYHRLPATEEEQRNSAEGEEEGQSPPVSGGGGESMYVGGSDVIWDPNAKAPSPY

SEQ ID NO: 7148 - protein, 1037 aa, Saccharomyces cerevisiae
MTVANTETHSAAKPSSTIGPWKLGETLGFGSTGKVQLAQHERTGHRTAVKVISKSIFNNNGNHSNDDSVLPYNIEREIVIMKLLSHPNVLSLYDVWETNNNLYLILEYAEKGELFNLLVDHGPLPEREAINCFRQIIIGISYCHALGIVHRDLKPENLLLDSFYNIKIADFGMAALQTDADLLETSCGSPHYAAPEIVSGLPYEGFASDVWSCGVILFALLTGRLPFDEENGNVRDLLLKVQKGQFEMPNDTEISRDAQDLIGKILVVDPRQRIKIRDILSHPLLKKYQTIKDSKSIKDLPRENTYLYPLADSNNHTSASIDDSILQNLVVLWHGRHADDIVSKLKENGTNKEKILYALLYRFKLDSVRGSNKKNRNKIKKTKKNKRSSTLSSSSSLLLNNRSIQSTPRRRTSKRHSREFSSSRKRSSFLLSSNPTDSSPIPLRSSKRITHINVASANTQATPSGVPNPHKRNSKKRSSKRLSYMPNTKRSSLTSKSLSNFTNLIDDDDWEYIEKDAKRTSSNFATLIDEIFEPEKFELAKREKAELQRKVQEAKRQSVNAQKINEDEFGSEVSDGMKELKKINDKVSSPLINYEFSQQELLQDIDTLLTNRYQLSSYTRPISRLDPGLTPVTETLPNNLKEKTALLQDTEKKIIETIRRSKFLGSLLNVRGGLSPGKSELAPIEESPIVSTTPLIYNDRMEPRRISDVEVPHFTRKSKHFTTANNRRSVLSLYAKDSIKDLNEFLIKEDPDLPPQGSTDNESRSEDPEIAESITDSRNIQYDEDDSKDGDNVNNDNILSDFPQGVGISQEYDMKDKNPNQSPISKSAEPTLVVKLPSLSSFQGKNASGLGLYQREPSKVTLPSLTSNNSSVGENIEDGAEKGTESEKIAASLSDDDLKEDNDKKDNDTVNAPTTVKKPPNSVLLKKFSKGKILELEIHAKIPEKRLYEGLHKLLEGWKQYGLKNLVFNITNMIITGKLVNDSILFLRSTLFEIMVLPNGDGRSLIKFNKKTGSTKTLTKLATEIQIILQKEGVLDK

SEQ ID NO: 7149 - protein, 204 aa, Pichia pastoris
MASRGTSRQQYDLTMKLLLVGDSGVGKSCLLLRFVDDSFNPSFITTIGIDFKIRTVEINGKKVKLQIWDTAGQERFRTITTAYYRGAMGIILVYDVTDERSFNSVHNWYQTLNQHANEDAQLFLVGNKCDDEESRQVTKEQGEQLASELGVPFLEASAKSNKNVDAIFLELAKRFEEKMRNTQQGPGSAGIDVNSSNDTKSSCC

SEQ ID NO: 7150 - protein, 593 aa, Frankia sp. CcI3
MSTLRLWAPEAKTVSLVVAGSAGDSTHEMTAGKRGWWWVNVPSAKHGTDYAFLLDDGSEELPDPRSAWQPGPLGVHGRSRLVDHSTFPWTDGTWRGIALAGSVLYELHVGTFTPEGTFDAAIGKLDHLVELGIDAIELLPVNAFPGRHGWGYDGVGLFAVHEPYGGPDGLKRFVDAAHARGLGVIMDVVYNHLGPDGNYLGRFGPYFTDRYSTPWGPAVNLDAPGSDEVRTFIIDSALSWLRDYHCDGLRLDAVHAFQDSRALHLLEEIAEAVHRLGAQLRRPLFAVAESDLNDPKLVAAPEAGGYGLDGQWCDDIHHALWATLSGERQGYYGDFGSISTLAHALTSGFVHDGGYSTFRGRSHGRPIPPTTPAYRFVTFLQNHDQIGNRAAGDRASATLSDGLLRIGAALLLTSAVTPMLFMGEEWGARTPWQYFTDHTAPGLGDAVREGRRAEFAAHGWEPQDVPDPQDPATFQQSKLDWSEPGREGHSDLLDWHRRLIALRRRLPALTDPAWSSVACTFDEEARWLVVRRGDVAIVVNLAAERQAVPLDGVPFDAPAASAHGFTYMPGRVELDGESVVIIRLLPPVEPTAG

SEQ ID NO: 7151 - protein, 150 aa, Nostoc sp. PCC 7120
MTLIRWNPWQDLNTLQRQLNHLFEEDMLPSTLLERTLTRVPAAELHETAEVIYLKLELPGIDAKDVDLQVTDKAVYISGERKSETKTEDKGVFKSEFQYGKFQRVIPLPARIQNTNVTAEYKDGILNLTLPKAEVEKNKVVKINIESAAG

SEQ ID NO: 7152 - protein, 548 aa, Rickettsia conorii str. Malish 7
MATKLIKHGSKAREQMLEGIDILADAVKVTLGPKGRNVLIEQSFGSPKITKDGVTVAKSIELKDKIRNAGAQLLKSAATKAAEVAGDGTTTATVLARALAREGNKLVAAGYNPMDLKRGMDLAVNAVVEEIKKSSKKINSQEEIAQVGTISSNGDKEIGEKIAKAMEEVGKEGVITVEEAKNFSFDVEVVKGMMFDRGYLSPYFVTNSEKMVAELENPFILLFEKKLSNLQPMLPILEAVVQSQRPLLIIAEDVEGEALATLVVNRLRGGLKVAAVKAPGFGDRRKAMMEDIAILTKGELITEDLGMKLENVSIKSLGTAKRVTISKENTVIVDGNGDKKNIEDRVLQIKSQIAETTSDYDKEKLQERLAKLSGGVAVLKVGGATEVEVKERKDRVEDALAATRAAVEEGVVAGGGVTLLHASQPLTKLKVENKDQQAGIEIVIEALKDPLKQIVENAGENGGVVVGKLLEHKDKNYGFNAQDMQYVDMIKAGIIDPAKVVRTALQDAASVASLIITTETLIVDEPSSDKAEPMPMRGGMGGMGGMDF

SEQ ID NO: 7153 - protein, 493 aa, Staphylococcus xylosus
MKRKLTGLFGAPVSDRENSMTAGPRGPLLMQDIYFLEQMAHFDREVIPERRMHAKGSGAFGTFTVTNDITKYTCASIFAEVGKQTEMFARFSTVAGERGAGDAERDIRGFALKFYTDEGNWDLVGNNTPVFFFRDPKLFPSLNHVVKRNPKTNMKDPQANWDFWTLLPEALHQITILMTDRGIPKGFRNMHGFGSHTYSMYNDKGERFWVKFHHRTQQGIENYSAEEAEQVMAKDRDSSQRDLFNNIEQGNFPKWKMYIQVMTEEQARNHKDNPFDLTKVWYKDEYPLIEVGEFELNRNPENYFQDVEQAAFAPTNIVPGLDFSPDKMLQGRLFSYGDTQRYRLGVNHWQIPVNQPKGVGMENICPFSRDGHMRILDNNQGASTHYYPNSNGAFEDQPQYKKPALDIQGQAYEYDFREDDDNYFEQPGKLFRLLSSEEQQILFNNTANEMSPVTDALKHRHIRHCYKADPAYGQGVAEAMGIDINEVDLDVAD

SEQ ID NO: 7154 - protein, 142 aa, Glycine max
  misc_feature (105)..(105): Xaa can be any naturally occurring amino acid
  misc_feature (135)..(135): Xaa can be any naturally occurring amino acid
LFRKEIAKYDPICAEIADNIVAQEQLLLQIQEQNAQFAAVFNLDDYKVARERCYKQIAAAVAKYQAIKKNMNDGLNFYVSLQDATGKIQQQCSDFIMTRNIQCRXMIEDVQRKLAGFNLSSSSHNTNTPRSSSVXPDQHSPP

SEQ ID NO: 7155 - protein, 245 aa, Glycine max
MRASNSSSSISIAKRYFFFFFLFIFFALRSSSGDCSEYHHHHSPMATIGGLHDSQGSQNSVETEALARFAVDEHNKKQNSLLEFARVVRAQEQVVAGTLHHLTLEAIEAGEKKLYEAKVWVKPWLNFKELQEFKPAGDVPSFTSADLGVKKDGHQPGWQSVPTHDPQVQDAANHAIKTIQQRSNSLVPYELHEVADAKAEVIDDFAKFNLLLKVKRGQKEEKFKVEVHKNNQGGFHLNQMEQDHS

SEQ ID NO: 7156 - protein, 493 aa, Glycine max
MVFPKPSSESDLFLCSNFASHYARDSLPRFSMPENSMPKEAAYQNIHDELQLDAIPKLNLASFVTTSMEEECNKLIMESINKNYVDMDEYPATTDLHNRCVNMIARMFHAEIGENENATGAGTVGSSEAIMLAGLAFKKKWQNKRKAEGKPYDKPNLVTGSNVQVCWEKFARYFEVELREVEVREGYYVMDPAKAVELVDENTICVAAILGSTYNGEFEDVKLLNDLLLEKNKQTGWDTPIHVDAASGGFIAPFLYPELEWDFRLPLVKSINVSGHKYGLVYAGIGWVIWRTKDDLPEDLVFHINYLGADQPTFTLNFSKGSSQIIAQYYQLIRLGHEGYRSIMENCRDNAMVLKESLEKSGHFNILSKDNGVPVVAFSLKDRSQYDEYKISEMLRRHGWIVPAYPMPPAAQHINVLRVVIRAEFSRTLAERLVFDIYNVLHELEKLHPPKVTNFIKEENKALVETGVKKTALDAHREIIAQESNKRQKIMAA

SEQ ID NO: 7157 - protein, 546 aa, Bradyrhizobium japonicum
MSAKEVKFGVNARDRMLRGVDILANAVQVTLGPKGRNVVLDKSFGAPRITKDGVAVAKEIELDDKFENMGAQMVREVASKAADAAGDGTTTATVLAAAIVREGAKSVAAGMNPMDLKRGIDLAVEAVVADLQKNSKKVTSNDEIAQVGAISANGDQEIGKFLADAVKKVGNEGVITVEEAKSLETELDVVEGMQFDRGYISPYFVTNADKMRVEMDDAYILINEKKLSSLNELLPLLEAVVQTGKPLVIVAEDVEGEALATLVVNRLRGGLKVAAVKAPGFGDRRKAMLQDIAILTGGQAISEDLGIKLENVTLNMLGRAKKVMIDKENTTIVNGAGKKADIEARVAQIKAQIEETTSDYDREKLQERLAKLAGGVAVIRVGGATEVEVKERKDRVDDAMHATRAAVEEGIVPGGGVALLRASEQLKGLRTENDDQKTGVEIVRKALSWPARQIAINAGEDGSIVVGKVLDNEQYSFGFDAQTGEYSNLVSKGIIDPAKVVRIAVQNASSVAGLLITTEAMVAELPKKATAGPAMPAAPGMGGMDF

SEQ ID NO: 7158 - protein, 285 aa, Solibacter usitatus Ellin6076
MKTENVAEIARRQGLNWFTAVVLALLHIGAVAALFMFSWKALAVSVVLYYFATGLGISMGYHRLHTHRSYKVPRWLEYFFAICGTLTLEGGPIFWVATHRVHHQFSDLPGDPHSPRDGAFWSHMGWILWGETNHNNTRMMSKYAPDVAKHKFYTWLNNWHWVPITVLAAILVAWGGLPMFLWAICLRVVFGLHVTWAVNSATHMFGKRRFQTRDDSRNTWWVALFSFGEGWHNNHHAHPTSARHGLAWYEFDPSWLLIKVLKAIGVAKSIKVAHVDSGLAEREAA

SEQ ID NO: 7159 - protein, 848 aa, Pseudomonas synxantha
  misc_feature (233)..(233): Xaa can be any naturally occurring amino acid
  misc_feature (240)..(240): Xaa can be any naturally occurring amino acid
MLNPPPTGNSSRLLQRTGNDATRYLLPVFGRHRNFAGDVIPDEADRLLGWVEVELSHNGMLLRGYRSMFASLLLIAIGLMFTAALALRISRTINSPIGQIKQAVAQLKDGNLETRLPPLGSQELDQLASGINRMAETLQNAQEEMQHSIDQATEEVRQNLETIEIQNIELDLARKEALEASRIKSEFLANMSHEIRTPLNGILGFTHLLQKSELSPRQLDYLGTIEKSADNLXGIINEIXDFSKIEAGKLVLDSVPFNLRDLLQDTLTIFAPAAHAKQLELVSLVYRDTPLALVGDPLRLKQILTNLISNAIKFTREGTSSPGDGRDEQEDSVQLRISVQDTGIGLSNQDVRALFQAFSQADNSLSRQPGGTGLGLVISKRLIEQMGGEIGVDSTPGEGSEFWISLNLPKTRDDVEDLPAPPLLGRRVAVLENHELARQALQHQLEDCGLEVTPFNTLESLTNGITSAHQTEQAISLAVLGVTANDIPPERLNQHLWDLEHLGCKVLVLCPTTEQMLFNQSVPNPNSQLQAKPACTRKLRRSLADLISPRPSRSEPGEPLSSRAPRVLCVDDNPANLLLVQTLLEDMGAKVQAVESGYAAIDAVKQETFDLVLMDVQMPGMDGRQSTEAIRQWESERHGTPLPVVALTAHAMANEKRALLQSGMDDYLTKPISERQLAQVVLKWTGLALRNQGPERVNDGLAQGVQLLVLDHEEGLRLAANKADLAADMLAMLLASLEADRLAITVAREANDNHALIERVHRLHGATRYCGVPQLRAACQRAETLLKQDDAKAMAALDELDMAIARLASVSQSQRLTQFYGQHQSKCGGKPPPTFSQHFHRVNCREPS

SEQ ID NO: 7160 - protein, 413 aa, Cucumis sativus
MAATVSTIGAVNRTTLNNSNYGGLVPNSAFLGSRLKVSSRFTTSKMVTGNFKIVAEQDEEKQTEKDKWRGLAFDTSDDQQDITRGKGLADPLFQAPMGTGTHNAVLSSYEYISAGLRDYSYDNNVDGFYIAPAFMDKLTVHIVKNFLTLPNIKVPLILGVWGGKGQGKSFQCELVFAKMGINPIMMSAGELESGNAGEPAKLIRQRYREAADIIKKGKMCCLFINDLDAGAGRLGGTTQYTVNNQMVNATLMNIADNPTNVQLPGMYNKEENPRVPIIVTGNDFSTLYAPLIRDGRMDKFYWAPTREDRIGICTGIFRTDGVPFEDIVKLVDTFPGQSIDFFGALRARVYDDEVRKWAVGVGVERIGRNLVNSKESPPTFDQPKMTIEKLLEYGNMLVMEQENVKRVKLVTSI

SEQ ID NO: 7161 - protein, 550 aa, Bradyrhizobium japonicum
MSAKEVKFGVDARDRMLRGVDILHNAVKVTLGPKGRNVVLDKSFGAPRITKDGVTVAKEIELEDKFENMGAQMVREVASKSADAAGDGTTTATVLAAAIVREGAKSVAAGMNPMDLKRGIDMAVEAVVADLVKNSKKVTSNEEIAQVGTISANGDAEIGKFISDAMKKVGNEGVITVEEAKSLETELEVVEGMQFDRGYISPYFVTNADKMRVEMDDAYVLINEKKLSQLNELLPLLEAVVQSGKPLVIIAEDVEGEALATLVVNRLRGGLKVAAVKAPGFGDRRKAMLQDIAILTGGQAISEDLGIKLENVTLNMLGRAKKVMIDKENTTIVSGAGKKADIEARVAQIKAQIEETTSDYDREKLQERLAKLAGGVAVIRVGGATEVEVKERKDRVDDAMHATRAAVEEGILPGGGVALLRASEHLKGIRTKNDDQKTGVEIVRKALSYPARQIAINAGEDGSVIVGKILEKDQYSYGYDSQTGEYGNLVSKGIIDPTKVVRVAIQNAASVAALLITTEAMVAEVPKKNTGAGGMPPGGGGMGGMGGMDF

SEQ ID NO: 7162 - protein, 160 aa, Oryza sativa (japonica cultivar-group)
MSLIRRSNVFDPFSLDLWDPFDGFPFGSGSRSSGTIFPSFPRGTSSETAAFAGARIDWKETPEHVFKADVPGLKKEEVKVEVEDGNVSRSAGEASKEQEEKTDKWHRVEASSGKFLRRFRLPENTKPEQIKASMENGVLTVTVPKEEPKKPDVKSIQVTG

SEQ ID NO: 7163 - protein, 486 aa, Schizosaccharomyces pombe
MTATKEESQKLLTSLRSQRDNKVCFDCGAKNPTWSSTTFGIYLCLDCSAAHRNMGVHISFVRFLRSTVLDSWTYAQLRVMRVGGNENARNYFKRHGGVSLLNSKDCRLKYSSKTAKQYLEKLKSLAVEDEANYPDILDMDFLSNTHEGSSAADTTNEDDDFFSAWDKASVKKSDDNLDDKTDLASTSSSVVVESGEKDEPVVVTEEKTMVSPPSRPDSTSTTKSKTSSISSARARPIRASSRPTASKLGASRPQKLGIKKANADIDFDEFEKAVLSSESAPTKKPAAVASKESTVDTLVDNGVEEVKESTSTTVQGKPVKPVLKSAASAKSTKSDDSNLNANFARLGFGQFAAASNARAKAAAKARELKKNEVNAPTYARDHFASQKSISSDQYFGRGSFDPEAAAEAQERLSSFRDATAISSKSYFGEEEDENEEGESSHRPDSAYLRDIAETATEDIEAIKVAIHQGAEKLSDFIQKVGARYNF

SEQ ID NO: 7164 - protein, 228 aa, Glycine max
  misc_feature (218)..(218): Xaa can be any naturally occurring amino acid
EFVEQHLLHYSKNRLKVGGDSTSLLSPLRRPPPPSVRKVFQLARTKQILWANEGNSAGEESATVFLRAIGLREYSRYLCFNFPSTIEKPLLGNLAFFPWKTDPANFKAWRQGRTGYPLVDAGMRELWATGWIHNKIRVIVSSFAVKMLLIPWRWGMKYFWDTLLDADLESDILGWQYISGCLPDGHKLERLDDPAIHGAKFDPEGEYVRQWLPELARXMPAEWIHHPW

SEQ ID NO: 7165 - protein, 463 aa, Bartonella vinsonii subsp. berkhoffii
MAGDGTTTATVLGQAIVQEGVKAVAAGMNPMDLKRGIDAAVDEVVANLFKKAKKIQTSAEIAQVGTISANGAAEIGKMIADAMEKVGNEGVITVEEAKTAETELEVVEGMQFDRGYLSPYFVTNAEKMVADLDDPYILIHEKKLSNLQSLLPVLEAVVQSGKPLLIIAEDVEGEALATLVVNKLRGGLKIAAVKAPGFGDRRKAMLEDIAILTSGQVISEDVGIKLENVTLDMLGRAKKVNISKENTTIIDGAGKKAEINARVNQIKVQIEETTSDYDREKLQERLAKLAGGVAVIRVGGATEVEVKEKKDRVDDALNATRAAVEEGIVAGGGTALLRAANALTVKGKNPDQEAGINIVRRALQAPARQIATNAGEEAAIIVGQGVENNADTYGYNTATGEFGDLIALGIVDPVKVVRSALQNAASIASLLITTEAMVAEMPKKDTPMPPMPGGGMGGMGGMD

SEQ ID NO: 7166 - protein, 209 aa, Streptomyces coelicolor A3(2)
MAPRIERLVTSGQFSLDGGTWDVDNNVWLVADDHEVVVIDAAHDADAIAAAVGDRRLTAIVCTHAHNDHVDAAPRLAERTGATIWLHRDDLPLWQQTHPDRAPDAWLTDGLVIEAAGADLTVLHTPGHAPGAVCLYDPGLGTVFTGDTLFQGGPGATGRSYSHFPTIIDSIRDKLLVLPPETEVRTGHGDSTTIGAEAPHLEEWIKRGH

SEQ ID NO: 7167 - protein, 299 aa, Arabidopsis thaliana
MGDTTKDDGSSQSKAVRGEKRAFFFRKWTRIDLARASAVGAVHLLCLLAPFNYKWEALRFGVILAIVTSLSITFSYHRNLTHKSFKLPKWLEYPFAYSALFALQGHPIDWVSTHRFHHQFTDSDRDPHSPIEGFWFSHVFWIFDTSYIREKCGGRDNVMDLKQQWFYRFLRNTIGLHILTFWTLVYLWGGLPYLTWSVGVGGAIGYHATWLINSACHIWGSRAWNTKDTSRNIWWLGPFTMGESWHNNHHAFEASARHGLEWYQVDLTWYLIWFFQVLGLATDVKLPTDAQKRKMALAR

SEQ ID NO: 7168 - protein, 427 aa, Arabidopsis thaliana
  misc_feature (200)..(200): Xaa can be any naturally occurring amino acid
MASQGCVDWQFSGSDAAEKAAQASLGTYSSEIFSLCDPQGKPILPPLSEEAETSHTAEKAVVKAVLCGTGNAYAPSIGLPVAKRAVAEYLNRDLDNKLTGDDVYMTVGCKQAIELAVSILAKPKANILLPRPGFPWDMVHSIYKHLEVRRYEFIPERDFEIDFNSVREMVDENTFAIFIINPHNPNGNYYTEAHLKQVFXLATLARELGIMVVSDEVYRWSVFGSNPFVPMGKFSSIVPVITLGSISKGWIVPGWRTGWLALHDLNGVFRSTKVLKAAKEFLEITSKPPTVIQAAIPTILEKTPQDFFEKRGIFLKDKVDFGYSKLKNIPTLTCYMKPESCTFLWTKLDPLHFVDIEDDHDFCRKLAKEENLVVLPGIAFGQNNWLRHSIDMETPRLEDAFERLKSFCERHSVIVEASSLKDVNGVN

SEQ ID NO: 7169 - protein, 351 aa, Photorhabdus luminescens subsp. laumondii TTO1
MPTLFDPIRIGDLDLPNRIIMAPLTRNRAEGEGRVPNALMAEYYAQRASAGLIISEATSVTPQGVGYENTPGIWSDEQVAGWRLVTDAVHAAGGRIFIQLWHVGRISDPVFLNGERPVAPSAIAADGHVSLLRPKRPFVVPQALESEEIPGIVEAFRRGAENAKTAGFDGVEIHGANGYLLDQFLQDNANLRTDQYGGSVENRARLLLEVTDACISVWGSSRVGMHLAPRGGHYSMADSNPVATFGYVARELGKRGIAFIFSRDAVVDGDLSKVIKEAFGSTYIANEELTKESAEQVLADGRADAVAFGQLFISNPDLPHRFLVKAPFNEQQPETFMVPGAIGYTDYPALT

SEQ ID NO: 7170 - protein, 338 aa, Vibrio parahaemolyticus RIMD 2210633
MSGMRTLGEFIVEKQADFPHASGDLSSLLASIRLAAKIVNREINAAGLGDITGAVGTENVQGEAQQKLDVYANDKFKAALEARDQVCGVASEEEDEAVAFNKELNQNAKYVVLMDPLDGSSNIDVNVSVGTIFSIYRRVSPIGTPATEEDFLQPGHKQVAAGYVIYGSSTMLVYTTGNGVNGFTYDPSIGSFCLSHENMMIPEDGKIYSINEGNYIRFPQGVKKYIKYCQENVPEDGRPYTSRYIGSLVADFHRNLLKGGIYLYPSTQSHPQGKLRLLYECNPMAFLIEQAGGIASDGVNRIMDIKPTELHQRVPFFVGSKNMVRKVEEFLELHRDEE

SEQ ID NO: 7171 - protein, 510 aa, Saccharomyces cerevisiae
MPTSGTTIELIDDQFPKDDSASSGIVDEVDLTEANILATGLNKKAPRIVNGFGSLMGSKEMVSVEFDKKGNEKKSNLDRLLEKDNQEKEEAKTKIHISEQPWTLNNWHQHLNWLNMVLVCGMPMIGWYFALSGKVPLHLNVFLFSVFYYAVGGVSITAGYHRLWSHRSYSAHWPLRLFYAIFGCASVEGSAKWWGHSHRIHHRYTDTLRDPYDARRGLWYSHMGWMLLKPNPKYKARADITDMTDDWTIRFQHRHYILLMLLTAFVIPTLICGYFFNDYMGGLIYAGFIRVFVIQQATFCINSLAHYIGTQPFDDRRTPRDNWITAIVTFGEGYHNFHHEFPTDYRNAIKWYQYDPTKVIIYLTSLVGLAYDLKKFSQNAIEEALIQQEQKKINKKKAKINWGPVLTDLPMWDKQTFLAKSKENKGLVIISGIVHDVSGYISEHPGGETLIKTALGKDATKAFSGGVYRHSNAAQNVLADMRVAVIKESKNSAIRMASKRGEIYETGKFF

SEQ ID NO: 7172 - protein, 183 aa, Brassica napus
  misc_feature (37)..(37): Xaa can be any naturally occurring amino acid
  misc_feature (47)..(47): Xaa can be any naturally occurring amino acid
  misc_feature (158)..(158): Xaa can be any naturally occurring amino acid
SVDLLFYRKYAIPQPQGYHTITFFCEVLFLCSHTALXLDRDETHALXFSADSYLRVHWKILDQIPGKATGAYSHSQGIKGLRDAIAAGIEARDGFPADPNDIFMTDGASPGVHMMMQLLISSEKDGILCPIPQYPLYSASIALHGGSLVPYYLDEASXGWGLEISELKKQLEDAKSKGITVRA

SEQ ID NO: 7173 - protein, 364 aa, Enterobacter cloacae
SAEKLFTPLKVGAVTAPNRVFMAPLTRLRSIEPGDIPTPLMGEYYRQRASAGLIISEATQISAQAKGYAGAPGLHSPEQIAAWKKITAGVHAEDGRIAVQLYHTGRISHSSIQPGGQAPVSASALNANTRTSLRDENGNAIRVDTTTPRALELDEIPGIVNDFRQAVANAREAGFDLVELHSAHGYLLHQFLSPSSNQRTDQYGGSVENRARLVLEVVDAVCNEWSADRIGIRVSPIGTFQNVDNGPNEEADALYLIEELAKRGIAYLHMSETDLAGGKPYSEAFRQKVRERFHGVIIGAGAYTAEKAEDLIGKGLIDAVAFGRDYIANPDLVARLQKKAELNPQRPESFYGGGAEGYTDYPSL

SEQ ID NO: 7174 - protein, 394 aa, Burkholderia fungorum LB400
MLDFLAHGLLHFSWWQLVLYTAIVTHITIIGVTVYLHRCQAHRALELHPVVSHFFRFWLWMTTGMLTGQWAAIHRKHHAKCETEEDPHSPQTRGIWKVLLEGAELYRTEAKNEETMRKFSHGTPNDWMERNVYTKYPILGVSLMMVLNVALFGVVGLTIWAVQMVWIPFWAAGVVNGLAHFWGYRNFNSADASTNIFPWGIIIGGEELHNNHHTYATSAKLSNKWYEFDIGWMYIRIMSAFRLAKVKKVAPTPRLTTGKLVLDQDTLQAVLANRYEVMARYGKALKRAYRQELAHLKEVGAREKYQLMRGARSWFHKEEAGLDEPQKRQLPQIFASSQKLKTYIDMRNELAAMWERSNASRDQLLVQLQDWCHRAEQSGIKTLQDFAMRLRRYA

SEQ ID NO: 7175 - protein, 233 aa, Zea mays
MCGILAVLGCGDESQGKRVHVLELSRRLKHRGPDWSGLHQVADNYLCHQRLAIIDPASGDQPLYNEDKSIAVAVNGEVYNHEELRARLSGHRFRTGSDCEVIAHLYEEYGESFIDMLDGVFSFVLLDARDNSFIAARDAIGVTPLYIGWGIDGSVWISSEMKGLNDDCEHFEIFPPGNLYSSKEKSFKRWYNPPWFSEVIPSVPYDPLRLRSAFEKAVIKRLMTDVPFGVSLS

SEQ ID NO: 7176 - protein, 472 aa, Cytophaga hutchinsonii
MKIEQLYTGCLAEAAYYIESEGEAIIIDPLRDIQTYVQKIERNNVTLKYIFETHFHADFVSGHLDLAEATGATIVYGPKAETTFNSHIAYDGEKISIGKITLQVLHTPGHTQESSCYLLYDEDGNKHALFTGDTLFIGDVGRPDLAIKSDLTKEDLAGMLYDSLEEKIKPLPDAITIYPAHGAGSACGKNLSKETFDTLGSQKQKNYALKAADKETFIKQVLDDLQPAPSYFNMNALLNKEGPGSVSELIKQGSIAFDVQSFENLQRQTYAVLLDTRDAKEFKKGFIPGSINIGLNGQLAPWAGTLLTNSDKPILIITDPGKEEETIIRLARVGVDQVIGYLKDGYNSWQKANKPEENIETISAAELVEKLDENINILDVRKADEYEKGHLNAAQHLPLDYINDWITTLDKNKTYYVHCAGGYRSVITESILKSRNISNVIDVSGGYGAIKAAMEPTKKRWLNAFFSFMKVK

SEQ ID NO: 7177 - protein, 542 aa, Physcomitrella patens
MEAGGRPMGPATAEYYLPNYKLGKTLGIGSFGKVKVAEHSPTGHKVAIKILNRRKVKMMDMEEKVRREIKILRLFMHPHIIRLYEVIETPADIFVVMEYVKSGELFDYIVEKGRLGEHEARRFFQQIVSGVEYCHRNMVVHRDLKPENLLLDSKSNVKIADFGLSNVMRDGHFLKTSCGSPNYAAPEVISGKLYAGPEVDVWSCGVILYALLCGSLPFDDENIPNLFKKIKGGIYTLPSHLSPGARDLIPRMLLVDPMKRVTIPEIRQHPWFLNHLPRYLAVPPPDTTQQAKRIDEEILERVVALNFDRDLLIDSLLNRVQNKATVAYYLMLDNRRRLSNGYLCSEFNEGKEHLMSPMDAFNGTPRSGYPRTLTHMSSMDRRSASPSGLQHRVVAERKWVLGLQLRSHPKEIMNDVLKTLRDLGINWKKTGAYNLKCRWVAPGQNSNDTTAENHSLPDSPMAGSMPRASSCRWSSEQHGVSGSVAAGNRDNESGVESNVLKFELQLFKLREEKYLLDLQRVVGPTYLFLDLCAAFLAELRVL

SEQ ID NO: 7178 - protein, 484 aa, Listeria monocytogenes str. 4b F2365
MEHNKLKPFPKDFLWGSASAAYQVEGAWDEDGKGPSVWDEFVRIPGTTFKETNGDVAVDNYHRYKEDVALMAEQGLKAYRFSVAWSRVIPHGNGEVNEAGLKFYDNLIDELLSYGIEPVVTLYHWDIPQGLQDEYGGWESRKVVEDFTNYAALLFKRFNGRVKYWVTLNEQNVFISHGYKLAYHPPGVSDDKRMFAANHNANLANASAIAKFRELGTSGKIGPSFAYGPSYSIDANPANVLASENSEEFNAHFWMDVYTWGEYPTATWNWLEEHGLAPEILPGDTELLKKGKPDFMGVNYYRSMTHAFNGKDGVGSGKMNTTGEKGTSEETGVPGLYKNTNNPYLEKTNWDWDIDPTGLRIGLRRITNRYKLPIMITENGLGEYDSLTEDHKIHDEYRIEYIRAHALAIQEAITDGVEMLGYCTWSFTDLLSWLNGYQKRYGFVYVDRDENDEKELKRYKKDSFYWYKKTIEANGANLVEEQGK

SEQ ID NO: 7179 - protein, 546 aa, Tatlockia micdadei
MAKELRFGDDARQQMLAGVNALADAVKATMGPSGRNVVLERSFGAPTVTKDGVSVAKEIEFENRFKNMGAQMVKEVAAKTSDTAGDGTTTATVLARAIVVEGHKAVAAGMNPMDLKRGIDKAVAAVTKKLQEMSKPCKDGKAIAQVGTISANSDQAIGSIIAEAMEKVGKEGVITVEDGNSLENELAVVEGMQFDRGYISPYFINNQQNMSAELEHPFILLVDKKISTIRDMLSVLEAVAKSGPSLLIIAEDVEGEALATLVVNNMRGIVKVCAVKAPGFGDRRKAMLQDIAILTAGEVISEEVGTSLESATLDSLGTAKRVVVTKENTTIIDGEGKAADINARITQIRAQMEETTSDYDREKLQERVAKLAGGVAVIKLVLLPNRMKRKARVEDALHATRAAVEEGIVAGGGVALIRAQKALDGLKGENADQDMGINILRRAIESPLRQIVANAGYEPSVIVNKVAESKDNFGFNAATGEYGDMVEMGILDPTKVTRTALQNAASVASLMLTTECMVADLPKKEEPMGAGEMGGMGGMGGMGGMM

SEQ ID NO: 7180 - protein, 555 aa, Orientia tsutsugamushi
MSKQIVHGDQCRKKIIEGINVVANAVGITLGPKGRCVAIEQSYGPPKITKDGVSVAKAIQLKDKSLNVGAQFVISVASKTADVAGDGTTTATVIADAAVRELNKAEVAGIDIQEVRKGAEKAVEAVIADVRKNSSPVKNEEEIAQVATVSSNGDREIGEKIANAMKQVGQEGVITVEDSKNFNFEVEVVKGMRFDRGYISQYFATNREKMITEFENPYILLLDQKVSTVQPLVPVLEAVAHTGKPLVLIADDVDGEALTALILNNLKGSIKVVAVKAPGFGDRKKEMLEDIAILTNGEVITEQLGIKLEKVNDTSKLGTANRVIVTKDHTTIVHDKNNSDIEKKVNSRCEQIREAIKDTTSDYEKEKLQERLAKLRNGVAVLKVGGATEVEQKERKDRVEDALHATRAAVEEGIVPGGGVALFYASRVLDSLKFDNEDQRVGINIIKKVLEAPVRQIVKNAGGKEDVVVNELSKSTDKNRGFDARTMQYVDMIKAGIVDPTKVVRTALQDAFSVASLVIATSAMITDHEEDNNTGNRSGGGVGGGHHGGMGGMDF

SEQ ID NO: 7181 - protein, 928 aa, Pectobacterium carotovorum subsp. carotovorum
MTKYSLRARMLILILAPTLMIGLLLSSFFVIHRYNQLQTQLADSGTRIIEPLATISAYAITHRQMDTIPTLINTLHRRHSAIIRTISVFDARNQLLATTNVRNNVTLQPLSSDALSYNKLHLHHTNDALILHMPIVNDSEFMPGGVQPGTATPLGYLVIELDTSTIRLQQYQEIFIAALLLLLSLGAAVIFAYRLMRDVTTPIRNMVDTVDRIRRGQLDSRVEGYMLGELDMLKNGINSMAMSLTAYHEEMQQNIDQATYDLRETLEQMEIQNVELDLAKKRAQEAARIKSEFLANMSHELRTPLNGVIGFTRQTLKTSLNTTQTDYLLTIERSANNLLNIINDVLDFSKLEAGKLVLEDIPFSLHSTLDDVVMLLAHTAHEKGLELTLSIQNDVPEQYVGDPLRIQQIITNLLGNAIKFTEQGNIDIRVEKRRQEHHQVQLEVQICDTGIGIAELQQSQLFQAFRQADTSISRRHGGTGLGLVITQRLVKEMGGDISFQSQLNKGSTFWFHITLPLNPHTVPIEPVYTMLQGKHLAYVEYHPIAAQATLDILSQTPLMVSYSPTFEQLPEGEFDILLLAIPAQYRNTLLDYTPRLRDICRRAPCVILALPSLAQMDAEQLKAFGVHACLSKPLAASRLLPLLQNSTLFQLSFLPSDTTSHQGTVRHPARLPLSVMAVDDNPANLKLIGTLLEEQVDTIILCESGTEAIAQAKMHQIDIILMDIQMPGMDGICASELIRQIPHHATTPIIAVTAQTMTGEREHLLSSGMDDYLAKPIDEQMLKSVLTRHARKDPLKRDRADMVGLLSEHDDSQLSLDWALAQQQAANKPELARDLLQMLLDFLPEVQRKIENVLNGQTDDDIIELVHKLHGSCSYSGVPRLKRICRYLEQQLRKGVHANDLEPEWLELLDEIDNVNNAAQPHINPRLP

SEQ ID NO: 7182 - protein, 408 aa, Bartonella henselae str. Houston-1
MAAKEVKFGREARERLLRGVDILANAVKVTLGPKGRNVVIDKSFGAPRITKDGVSVAKEIELEDKFENMGAQMLREVASKTNDIAGDGTTTATVLGQAIVQEGVKAVAAGMNPMDLKRGIDAAVDEVVANLFKKAKKIQTSAEIAQVGTISANGAAEIGKMIADAMEKVGNEGVITVEEAKTAETELEVVEGMQFDRGYLSPYFVTNAEKMVADLDDPYILIHEKKLSNLQSLLPVLEAVVQSGKPLLIIAEDVEGEALATLVVNKLRGGLKIAAVKAPGFGDRRKAMLEDIAILTSGQVISEDVGIKLENVTLDMLGRAKKVNISKENTTIIDGAGQKSEINARVNQIKVQIEETTSDYDREKLQERLAKLAGGVAVIRVGGATEVEVKEKKDRVDDALNATRAAVE

SEQ ID NO: 7183 - protein, 758 aa, Streptomyces avermitilis MA-4680
MSEANPLKRAARKITNSLQDNGATPEEGIPGRPGPESPSVAEPTEPRDPLPPKPDQSGPDTVSPTGQPTGADQARMAQSGSYLTTAQSTRLYDTDHSLKAGPRGPVLLQDHHLREKVMHFDHERIPERVVHARGAAAHGVFQSYGTAASVTKAAFLSEDKETPVFVRFSTVLGSRGSSDTVRDTRGFATKFYTSEGVFDLVGNNIPVFFIQDAIKFPDVIHAGKPHPDREIPQAQSAHDTFWDFVTLHTEATHHTLWNMSDRGIPRSYRMMEGFGVHTFRLVNAEGATTLVKFHWKPKLGVHSLVWEEAQITNGVDPDFHRRDLADAIEAGAHPQWELGIQTFPDTPDQTFEGIDLLDPTNLVPEELAPVQPVGLLTLMRNPSNFFAETEQVAFHVGHLVPGVDVTDDPLLAGRLFSYLDTQITRLGGPNFPQLPINRPHAPVNDMLRDGMHQTAVHRGVAPYRPNSLDGGCPFLAGADTGAFVETPVRVPEAAKVREAPESFADHFSQPRRFWLSMSPIEREHIIAAYTFELGKCYEQAVKERALQVLANIDPNLCAEVATGLGLPAPQPTVPLAEVEASPALSQVGGTWPTDGRVIGIVIGPDGDLRGVSAVREAVLDASMVPLVVAPAGGVFGSGEGMVTVQRTYATARSVEFDAILLAGTPGVGGDAYGARDAKAFPAPAQQATGDPRVGLLVSEAFRHGKAVGAWAGGEAFLEASGVPLDAPGVVVGDSGTGALAQLTGLLGKHRAWDRFRAV

SEQ ID NO: 7184 - protein, 481 aa, Ralstonia metallidurans CH34
MNKLTTAFGAPVVDNQNVQTAGPRGPALLQDVWFLEKLAHFDREVIPERRMHAKGAGAYGTFTVTHDITKYTRANLFSQVGKKTDLFLRFSSVAGERGAADAERDIRGFAIKFYTEEGNWDLVGNNTPVFFLRDPLKFPDLNHAVKRDPRTGMRSAESNWDFWTGLPEALHQVTIVMSDRGIPRTWRHMHGFGSHTYSFINANMERFWVKFHFVTQQGIQNLTDEEAAEITGQDREYHQRDLFESIERGDFPRWKLCVQIMPEAEASKVPYHPFDLTKIWPKKDYPLIEVGVLELNRNPDNFFAEVEQASFAPSTIVPGVGFSPDKMLQGRLFSYGDAARYRVGVNHHQIPVNSPKAAKYVNSYHRDGTMRVDGNRGAAIGYEPNTKGEWAEQPDFREPPLTLEGTADHWNHREDGDYFSQVGALFRLMSPTQQQALFDNTARSIKGVSKHIQQTHIKHCTAADPAYGAGVAAAIEMIEAK

SEQ ID NO: 7185 - protein, 453 aa, Oryza sativa
MGGEEGMAAGRKKRVGRYEVGRTIGQGTFAKVKFAVDADTGAAVAMKVLDKDTILNHRMLHQIKREISIMKIVRHPNIVRLNEVLAGKTKIYIILELITGGELFDKIARQGKLRENEARKYFQQLIDAINYCHSKGVYHRDLKPENLLLDSRGNLKVSDFGLSTLAQKGVGLLHTTCGTPNYVAPEVLSNNGYDGSAADVWSCGVILYVLMAGYLPFEEDDLPTLYDKITAGQFSCPYWFSPGATSLIHRILDPNPKTRITIEQIREDTWFKKTYVAIKRGEDENVDLDDVQAVFDNIEDKYVSEQVTHNDGGPLVMNAFEMITLSQGLDLSALFDRQQEFVKRQTRFVSRKPAKTIVATIEVVAETMGLKVHSQNYKLRLEGVSSNRMSPFAVVLQVFEVAPSLFMVDVRKVAGDTLEYHRFYKNLCNKMESIIWRPIEVSAKSALLRTATC

SEQ ID NO: 7186 - protein, 450 aa, Oryza sativa
MSVSGGRTRVGRYELGRTLGEGTFAKVKFARNADSGENVAIKILDKDKVLKHKMIAQIKREISTMKLIRHPNVIRMHEVMASKTKIYIVMELVTGGELFDKIASRGRLKEDDARKYFQQLINAVDYCHSRGVYHRDLKPENLLLDASGTLKVSDFGLSALSQQVREDGLLHTTCGTPNYVAPEVINNKGYDGAKADLWSCGVILFVLMAGYLPFEDSNLMSLYKKIFKADFSCPSWFSTSAKKLIKKILDPNPSTRITIAELINNEWFKKGYQPPRFETADVNLDDINSIFNESGDQTQLVVERREERPSVMNAFELISTSQGLNLGTLFEKQSQGSVKRETRFASRLPANEILSKIEAAAGPMGFNVQKRNYKLKLQGENPGRKGQLAIATEVFEVTPSLYMVELRKSNGDTLEFHKFYHNISNGLKDVMWKPESSIIAGDEIQHRRSP

SEQ ID NO: 7187 - protein, 328 aa, Escherichia coli
MDKKQVTDLRSELLDSRFGAKSISTIAESKRFPLHEMRDDVAFQIINDELYLDGNARQNLATFCQTWDDENVHKLMDLSINKNWIDKEEYPQSAAIDLRCVNMVADLWHAPAPKNGQAVGTNTIGSSEACMLGGMAMKWRWRKRMEAAGKPTDKPNLVCGPVQICWHKFARYWDVELREIPMRPGQLFMDPKRMIEACDENTIGVVPTFGVTYTGNYEFPQPLHDALDKFQADTGIDIDMHIDAASGGFLAPFVAPDIVWDFRLPRVKSISASGHKFGLAPLGCGWVIWRDEEALPQELVFNVDYLGGQIGTFAINFSAGGSGNCTVL

SEQ ID NO: 7188 - protein, 693 aa, Caulobacter crescentus CB15
MAQRIASHEERRQTALLLALSFAVAAAIVFSENLTRTTLGVAAFWPANAFLAAGLLTLTSVRRLVLIAVFVFFHVAVCLQAGDGPLKALVFATVDGLEAGAVWAAFRRFWNGAPRVRTLRALAQLPAITTPIAAGSALICATVLHFGYGAPFAESLVDWLLRSALGLAVALPATLVLIDAEHRRSFQRPWSEKLLLMFSVVTVALLCAHPAAGAPPVLMFPVTLAAAYRLGARGAALAAFLTIGIIMPMVISVGSSSFNSTQDTVIQARTIQVFMGVLFYTCLAAGLAFGQQNRLKRLLLRREQLTRAARGRALAATEAKTEFLATMSHEIRTPLNSVLGFAQLLAAREDLPPDARRQVNLIDSAGAALLTVVDDILDFSRVEAGQIELLPGPTSAAALLRDTVAIMAPEARAKGLSMDVEIIDPIGVLHDLDADRLRQVLINLLNNAVKFTEEGRIDARLIIEPGDIEDRLRFEVLDTGVGIELDKQGLLFQRFSQTDSSPSRLHGGPGLGLAIAKALIDVMGGKIGVDSVPGRGSCFWVELSAPVAEPAPAPEPAKPPAPGAARILIVDDHPINLEIGAALLTLVGYEVDLAENGKQAVEKAEAGAYDLILMDIHMPLMDGLQATRAIKALRTSTGKAPIIAMSADALPRQVERCYAAGMVDHVAKPIQREVLYAKIERWLHPLRDGDKPA

SEQ ID NO: 7189 - protein, 545 aa, Physcomitrella patens
MDSGGRPVAPVAVEYYLPNYKMGKTLGIGSFGKVKVAEHTPTGHKVAIKILNRRKVKSMDMEEKVRREIKILRLFMHPHIIRLYEVIETPTDIFVVMEYVKSGELFDYIVEKQRLGEDEARRFFQQIVSGVEYCHRNMVVHRDLKPENLLLDSKWNVKIADFGLSNIMRDGHFLKTSCGSPNYAAPEVISGKLYAGPEVDVWSCGVILYALLCGSLPFDDENIPNLFRKIKGGIYTLPSHLSPGARDLIPRMLLVDPMKRVTIPEIRQHPWFLNHLPRYLAVPPPDTLQQAKRIDEEILERVVALNFDRVHLIESLLNRVQNKATVAYYLMLDNRRRLSNGYLGSEFDEGKEQSLSPMSPYGAHGGTPRSTYPRSLIRTPSMDRRGSSSSVLQHRVVAERKWALGVQLRSHPKEIMSDVLDTLRKCDINWKKTGAYNLKCRWVAPNQHLNDRASEHRGIPDSPMAGTTPRVSSGRWSSEQQGISGSVASGNKDDESGVESNVLKFELQLFKMREEKYLLDLQRVEGPTYLFLDLFSAFLIELRVA

SEQ ID NO: 7190 - protein, 848 aa, Zea mays
  misc_feature (351)..(351): Xaa can be any naturally occurring amino acid
MASAAGSSNVMLAIHEKKTTATDLYRPLRLYIASTYSEREAAAADDDLSVVRDALLAYARALALVEPRFPISPDRAHVHSLTFTWHDAFKGNKKCALASIHLEKASVLFNLGAVYSQIAVAADRSTDVGIKTACGAFQSAAGAFAWLRESGVAAKAVAAGTTTVDITPECAGMLEKLMLAQAQECFFEKVIGGGKPPALCSKVARQVGIFYEEAYAALSAPPLSQHFDKTWVSHVQLKAAQFYADACYRYSLDLHQKEEIAEEIARLKIGMSALADAKKAAKGVAAQLMDSVNKLESNMKTNLERAMKENDRVYLMRVPAAGSLGALSAASLVKPTSLSEVLDASKERLFXSSLVPDGSMKALSKYTEMVDNIIRTQAEKLQQASEITRVRLKEMDLPDSILSLEGNITLPLDLKEDVEAVQISGGPAGLESELQQLRDLSRVNQELLVQTEELLQKEANEDAQFRTQFGSRWTRPQSSTLTKNIQDRLNLFASNLKKAADSDSLIERGVKENYPLMSILDKRPIESALPSISRPIMSLDGNEDAIVGALKQSLRQLESLGAHRAGLEDMLKEMKRKDDILPKLMAGVGSHDDLFKKEIAKYDPICADIADNIVAQEQLLLQIQAQNEQFASVFNIEDYKAARERCYKQIAAAVAKYREFKKNINEGLNFYVTLQEAIGKIKQQCSDFIMTRNIQCREMIEDVQRKLAGFSFSSSSHSSMQRNASVPPDQSSPSPPPHAQAPYASPPGVDSRLGYSQTEPRPAYSQPYPPSYGAPPQQPSYGAPHPGQYQPPAHQPPPGHDYGQPAYPGWRGPYYNAPQPQQSAPYPQPPYNAPGAYPPHQSNYYRPQ

SEQ ID NO: 7191 - protein, 672 aa, Cytophaga hutchinsonii
MKEKKGIALIEDDPWLEPYEAEIQDRIIRYKRAVKEIKEHYGDLLTFATGHKYYGINFDEDERGWYYREWAPEAYEVYLTGDFNDWDRRSHPLTRNEFGVWQIFLPYDLYQKRFVHKSKIKVQIVGANGTHDRIPAYITRVVQDTETTDFSGQLWFPQKPFEWTDRDFNLRKIKNPIIYEAHVGMAQEKEGVGTYREFADKIVPRIRQMGYNSIQLMAVMEHPYYGSFGYHVSNFFAPSSRFGTPEDLKYLVDRAHKFGLAVIMDVVHSHAVKNLSEGLNEFDGSDHQYFHPGDRGYHTGWDSKLFDYGKLEVKRFLLSNLRYWLEEYHFDGFRFDGVTSMLYFDHGMKTFDSYDTYFKGGVDFDAVTYLQLANEVTHRYLKDSITIAEDVSGMPGLSRSIRDGGVGFDYRLAMGIPDFWIKYLKHLQDEQWNIYEMWSTLTNRRYKEKTIAYAESHDQAMVGDKTIAFWLMDKEMYFHMQVDDPNPVIDRGIAIHKLLRLFTFALGGEGYLNFMGNEFGHPEWIDFPREGNGWSYQYARRQWSLVDNPKLKYQYLGAFDEAMMRLVRKTRLLAAEPAQQLNMDDHNKVIIFERNNMIFVFNFSVSNSVFDYKFKSFAPGTFEIVLNSDDTRFGGHGRVDDTLEYHTNTEGQLSIYTPNRSVLVFQRKEASE

SEQ ID NO: 7192 - protein, 294 aa, Debaryomyces hansenii CBS767
MAVTLKNNTDTVTLNNGDKIPAVGLGTWQATEKDAAYKSVKAALQNGYRHIDTAAIYGNEEEVGRGIKDSGVPREEIYVTTKLWNADHKKAEEALNTSLKKLGLDYIDLYLIHWPYSVQPDTKQPYSDWDYLDTYKELQKLKATGNVKAIGVSNFTVKQLERLLADKDITIKPAVNQIEAHPLLTQPELTEYLKKNDIVIEAYSPLGSSNSPLFKNETVVAIAEKYQVEPAQVLVSWAIQRDTVVLPKSVTESRIISNLKTFKLSDEDFNTLNNLSQKDGVVRTCNPEFNDFDD

SEQ ID NO: 7193 - protein, 124 aa, Brassica napus
MAPSVAVENLNPKVLKCEYAVRGEIVIHAQRLQQQLQTQPGSLPFDEILFCNIGNPQSLGQQPVTFFREVLALCDHPCLLEKEETKSLFSADAISRAKQILATIPGRATGAYSHSQGIKGLRDA

SEQ ID NO: 7194 - protein, 295 aa, Debaryomyces hansenii CBS767
MTTRTANNTDYYTLNNGEKIPAVGFGTWKATKKEGAHTAVKIALQTGYRHVDTAVMYDNEEEVGRGIKESGIPREEIFVTTKLWNTDHKQVSKAFDSSLQRLGLDYVDLYIMHWPLPLDPKTEKPYEDWNYIDTYKEMQKLVESKKVKSIGISNCNIEQTKKILDDKDITIKPVVNQVEAHPLLPQLELFDFLKQNDIALEAYSPLGSDNSPLFKDDTIIGISQKYNVHLAQVLVSWAVQRGSIVLPKSVTESRIISNLKTFKLREDDFATLNNLSKEVGPVRTNDPDWFDFGKD

SEQ ID NO: 7195 - protein, 478 aa, Brassica napus
MALEYDLLNENVKKCQYAVRGELYLRASELQKEGKKIIFTNVGNPHALGQKPLTFPRQVVALCQAPFLLDDPNVGMLFPADAIARAKHYLSLTSGGLGAYSDSRGLPGVRKEVAEFIQRRDGYPSDPELIFLTDGASKGVMQILNCVIRGEGDGILVPVPQYPLYSATISLLGGSLVPYYLDESENWGLDVNNLRQSVAQARSQGISVRAMVIINPGNPTGQCLSEANLKEILKFCYNEKLGLLGDEVYQQNIYQDERPFISSKKVLMDMGSPFSKGVQLVSFHTVSKGYWGECGQRGGYFEMTNFPPRVVERVRKVASIALSPNVSAQIFMGLMVSPPKPGDISYDQFARESKGILESLRRRAKIMTDGFNSCKNVVCNFTEGAMYSFPQIRLPPGALQAAKQAGKVPDVFYCLKLLEATGISTVPGSGFGQKEGVFHLRTTILPAEEEMPEIMDSFKKFNDEFMAQYENGFGYSRM

SEQ ID NO: 7196 - protein, 482 aa, Listeria monocytogenes str. 4b F2365
MSNTKFPDGFMWGGATAANQFEGGYNSGGKGLACADLFTGGTHTEPRRITAQLEESTFYPSHEAVDFYHHYKEDIKLMAEAGFKVFRMSINWTRIFPTGKEAEPNEEGLQFYEDVFKELKKYQIEPLVTIAHFDIPLALTNEVNGWASRDLIDYYLHYCEVIFKRYKHLVKHWLTFNEINTATMEIGNYLSLGIRHAEGDFLHQKDDPTVRYQALHHQFVASAKAVKLGHSINPEFMIGCMIAYMPRYPRTCEPTDVLLAKQTEAMHSHFCGDVHVKGYYPFYAKTFFKDNGIELEFDPEDEQVLREGTVDFYTFSYYLTLCASNDPAYKNSGKSVIGGAENPYLKTNDWGMQTDPVGLRIALNDLYTRYNIPLMVVENGLGAFDKLEDDGTINDPYRIDYFKEHILQMHKAIQDGVDLIGFTIWGCIDLVSASTGEMAKRYGIIYVEKYDDGTGDYSRKKKASYYWYKDVISSNGEIGLRE

SEQ ID NO: 7197 - protein, 191 aa, Haloarcula marismortui ATCC 43049
MIRNLARGQQAFTSNVFLVTGDRTVLVDVGNEFDVVSTVEEHVDDIDAVAVTHTHYDHVENLDSVVDAFDVPVYGYDTDQDGVEYAIADDETIQLGDHDYRALHTPGHKNDHLCFYSDDAGVLFAGDLVFANGSFGRTDLNEGNRDLLVDSIERVLSVTDEDLQEMHTGHGPSITDAPYQDIELALQAAKF

SEQ ID NO: 7198 - protein, 143 aa, Zea mays
FVIIGIVLFLHCQGDADYLRYHGMQEFDQAMQHLEQKYEFMTSDHQYISRKHEEDKVIVFEKGDLVFVFNFHCNNSYFDYRIGCRKPGVYKVVLDSDAGLFGGFSRIHHAAEHFTADCSHDNRPYSFSVYTPSRTCVVYAPVE

SEQ ID NO: 7199 - protein, 721 aa, Emericella nidulans
MRALGLVGLVGVANAVCPYMTGELGRRDTNPDATEATEEFLSEYYLDDTDSYLTTDVGGPIEDQQSLKAGARGSTLLEDFIFRQKIQRFDHERVPERAVHARGAGAHGVFTSYGDFSNITAASFLSAEGKETPVFVRFSTVAGSRGSSDLARDVHGFATRFYTDEGNFDIVGNNIPVFFIQDAIQFPDLIHAVKPKGDREIPQAATAHDAAWDFFSQQPSTLHTLLWAMAGHGIPRSFRHVDGFGVHTFRLVTEDGSTKLVKFHWKTLQGLASMVWEEAQQISGKNPDYMRQDLFESIEAGRYPEWELNVQIMDEEDQLRFGFDLFDPTKIVPEEYVPLTPLGKMTLNRNPRNYFAETEQVMFQPGHVVRGVDFTEDPLLQGRLFSYLDTQLNRNGGPNFEQLPINQPRVAIHNNNRDGAGQMFIPLNPDAYSPNTLKGSTLKQANQTAGRGFFTAPDRTANGNLVRAKSSTFDDAWSQPRLFWNSLLPAEKQFVVNAIRFENANVKSDVVKNNVIVQLNRISNDLATRVAKAIGVDAPEPDNTYYHDNTTSNIGAFGHRLQSLAGLKIAVLASVDAEESFSAATALKAELSNDNLDVIVVAERFSNGVNQTYSASDAIQFDAVVVAPGAEKLFGAKSAANSSSTLYPAGRPLEILVDAFRFGKPVAALGSGSTAFDNAGINTAVEGVYVADAVDESFANNLEEGLTVFKFLDRFALDSDE

SEQ ID NO: 7200 - protein, 540 aa, Oryza sativa
MLMATVSPARREPTPQAVRASPMPSAAAALVRRGGGGSGGTVLGKYELGRVLGQGSFAKVYQARHLETDECVAIKVLDKEKAVKGGMVHLVKREINVLRRVRHPNIVQLFEVMASKTKIYFVMEYVRGGELFSRVSKGRLREDTARRYFQQLVSAVDFCHARGVFHRDLKPENLLVDENGDLKVSDFGLAAGPDQFDPDGLLHTFCGTPAYVAPEVLRRRGYDGAKADIWSCGVILFALMAGYLPFHDHNIMVLYRKIYNGEFRCPRWFSKDFTRLITRLLDANPKTRITVPEIIESDWFKKGYKPVKFYIEDDKLYNLSDDVLNLEPADPVPPPLGLAPPVPPPPQGDDPDGSGSESDSSVVSCPATLSTGESQRVRGSLPRPASLNAFDIISFSKGFNLSGLFEERGNEIRFVSGEPMSDIVKKLEEIAKVKSFTVRRKDWRVSIEGTREGVKGPLTIGAEIFELTPSLVVVEVKRKAGDNEEYEDFCNMELKPGMQHLVHQMLPAPNGTPVSEKVERSSSLQAPLTLKLIGTEGSMS

SEQ ID NO: 7201 - protein, 487 aa, Streptomyces coelicolor A3(2)
MPENNQKPLTTVAGAPVPDNQNSLTSGPRGPMLLQDVWFLEKLAHFDREVIPERRMHAKGSGAFGTFTVTHDITRYTSAKIFSEIGKKTPLFTRFSTVAGERGAADAERDIRGFAVKFYTDEGNWDLVGNNTPVFFFRDPLKFPDLNHAVKRDPRTNLRNAENNWDFWTNLPEALHQVTIVMSDRGIPASYRHMHGFGSHTYSLINAEGERFWVKFHHRTQQGIKNLTDAEAEALVGKDRESHQRDLFDAIEDGDFPKWKLFIQVMPEADAENYRFHPFDLTKVWSKKDYPLIEVGEWELNRNPDNYFADVEQAAFSPANVVPGISFSPDRMLQGRLFSYGDAQRYRLGVNHHQIPVNAPKNPVNSYHRDGAMRVDGNQGATPGVEPNSYGRWQEQPAYRDPAQAVGAVADRFNYREDDDNYFEQPGNLFRQMSPEQQQVLFENTARAIDGASAQTIERHIGNCTQADPAYGAGVRKAIEALAAGNL

SEQ ID NO: 7202 - protein, 467 aa, Synechocystis sp. PCC 6803
MVHKKIDLNQLSEAESLLTPTYAARGLANSVSKYEMPETEMLPAIAYNLIHDELGLDGNSRLNLATFVTTWMEPEARQLMADTFDKNMIDKDEYPQTAEIELRCVNILSRLWNAPASAEATGCSTIGSSEAAMLGGMAMKWKWRQRRQAAGKPGDRPNLVMGINVQVCWEKFCRYWEVEPRFVPMEGDRYHISPEEAVKLIDENTIGVIGILGSTFDGSYEPIEALNDALETLNQRTGWQVPLHIDAASGGFIAPFLDPDLRWDFRLPWVKSINTSGHKYGLVYPGVGWIIWRDKEELPEELIFHCNYLGGDLPNFALNFSRPGNQVVAQYYNFLRLGKEGYRKIQQTCRDTALYLSGKIAQLGPFELLTDGGDIPVFAWRLKDEVLANTCYTLYDMADKLRERGWLVPAYRMPKNREDLVVQRIVVKEGFSRDMADLLLADMERAIAYFASQPDHKPKQEGSHFSH

SEQ ID NO: 7203 - protein, 644 aa, Streptomyces coelicolor A3(2)
MCGIAGTYHWPDGKAVTDRLTDVLAHRGPDGAGRYSHPAGEGEVHLGHRRLAVVDLSTTGAQPMVSEGLALSYNGELYNAPELRTELESAGVRFRGTSDTEVVLEAWRRWGTDCLPQLRGMFAFAVFDERTGELVLARDQLGIKPLFLLRRGAGLVFASELKALATATGGKLEVDHAALVASLLYYWVPDSRCALREAEKLPPGSWLRCRPDGRVERGRFWNLRDVAAEGRERARSGERPDLAAVVEESTRRHLLSDVPVATFLSGGLDSSYLTALAARDRPGISAYTIGFRAEDARFEAMPDDLRYARQVAERFGVDLHEIEIAPNVLDLLPRMTYHLDEPIGDPAAINTFLICSAAREAGVKVMLSGMGADELFAGYRKHLANVLALRYQRVPRPLRRGVSAAVGRLPVASSRRGYRSVRFAKRFLSFADLPQETAFRRSYTMYDRQELLDLIDPDLAGTVEDVLTEHADVYEDNDLDDFVNRMCLADARMFLPGLNLAYTDRSSMAASTEVRVPYVDVEVVKAAFAVPGDRKIVGRQGKAVLKEAATSVLPREIVYRPKGLFSAPLRAWMSRDLAPLVREVVNDGELVRSGFLRRDALRRLVAEDAAGQRDFSKHLWHVLTLEYWYRGATSGSGDHSSSTA

SEQ ID NO: 7204 - protein, 443 aa, Oryza sativa
MPPSTGSVPPAASTPAAGDEATAAGRVLLGRYELGGLLGRGASAKVYLARDLLTGRDVAIKSFPNPRHGGGLRGGEEDVLLRPAPIEREAAILPRLRHRHVMRLREILATRKKVHFVLDLAAGGELFSLLDASGRMTEDLARHYFRQLISAVRYCHSRGVYHRDIKPENLLLDDAGDLKVADFGLGAVADGALHHTLCGTPAYVAPEILSRKGYNPAKVDIWSCGVVLFVLAAGYLPFNDASLVNMYRKIYAGKFRCPAWFSPELRCLVRRILDPNPATRIDTEEIITHPWFRQDASHFAMAQLMQHGHDEEAKFKTEFKEDDMARDMTAFDILACSPGSDLSGLFGAEPGKERVFVGEPAAAVLSRVEEAGKKEGYMVTREGKKGTGPVYVKGENGGIVAKVCVFKIADAVSVVEVVKGYGAEAARFWKARLEPAMKPPAAI

SEQ ID NO: 7205 - protein, 279 aa, Bacillus thuringiensis serovar konkukian str. 97-27
MKNLQSKAVLNNGVEMPWFGLGVFKVEEGPELVEAIKTAIKAGYRSIDTAAIYGNEKAVGEGIRAGIEATGISREDLFITSKVWNADQGYETTIAAYEESLKKLGLDYLDLYLVHWPSEGKYKDTWRALETLYKEKRVRAIGVSNFQIHHLQDVMKDAEIKPMINQVEYHPRLTQKELQAFCKEQGIQMEAWSPLMQGQLLDNETLQEIAEKHGKTTAQVILRWDLQNGVITIPKSTKEHRIIANADVFNFELTKEDMEKIDALNQNHRVGPDPDNFDF

SEQ ID NO: 7206 - protein, 305 aa, Corynebacterium efficiens YS-314
MSIVGTGNFFGSPEEERDRLVQALQGGKRQTTKPAEIPTVRLNDGNKIPQLGFGVFKVDPAETERVVSEALEAGYRHIDTAAFYNNEEGVGRAIAASGIPREELFVTTKLWPTRFDDAEAGFNESLEKLGMEYVDLFLLHWPAPRNNNFVQAWKVLEQLGERARSIGVCNFLPEHLRQLIDETTIVPAVNQFELHPALQQRDIQEASKAAGIAIESWGPLGQGKYDLSKEAPIAAAARSHGKTLAQVVIRWHLQHGFIVFPKTVNPERMRENLDVLDFELTAEEMVAIDNLERGARGGSHPNDIN

SEQ ID NO: 7207 - protein, 493 aa, Zea mays
MVLSHGVGGSDESVHSTFASRYVRTSLPRYRMPEQSIPKEAAYQIINDELMLDGNPRLNLASFVTTWMEPECDKLIQASVNKNYVDMDEYPVTTELQNRCVNMIAHLFNAPLGDAETAVGVGTVGSSEAIMLAGLAFKRRWQNKMKAAGKPCDKPNIVTGANVQVCWEKFARYFEVELKEVKLSDGYYVMDPQKAVDMVDENTICVAAILGSTLNGEFEDVKLLNDLLTKKNAETGWDTPIHVDAASGGFIAPFLYPELEWDFRLPLVKSINVSGHKYGLVYAGIGWCIWRTKEDLPEELIFHINYLGADQPTFTLNFSKGSSQVIAQYYQLIRLGFEGYKNIMENCQENATVLKQGLEKTGKFNIVSKDNGVPLVAFSLKDSSRHNEFEISDFLRRFGWIVPAYTMPPDAQHVTVLRVVIREDFSRTLAERLVLDIEKVLHELDALPARVPSGDLAALAAAESSEREMEKQRQVISLWKRAVLAKKKTNGVC

SEQ ID NO: 7208 - protein, 364 aa, Malus x domestica
QMGLAENQPCFDLIQEWMVNNPKASICTYEGVQDFQDIAIFQDYHGLPEFRKAVARFMEKVRGDRVTFDPERIVMSGGATGAHESLAFCLADPGDAFLVPTPYYPGFDRDLRWRTGVQLFPVVCESSNNFKVTKEALEEAYKKAQESNIKVKGLLINNPSNPLGTILDKETLKDILRFINDKNIHLVCDEIYAATALCQPSFISISEVMNEVVGCNDDLVHIVYSLSKDLGFPGFRVGIIYSYNDVVVNIARKMSSFGLVSTQTQRLIASMLSDTIFVENFIAKSAMKLSQRHDLFTKGLGQVEITTLKSNAGLFIWMDLRRFLENSTFDDELKLWHIIINKVKLNVSPGCSFHCSEPGWFRVC

SEQ ID NO: 7209 - protein, 275 aa, Xylella fastidiosa Ann-1
MRDPFDMEAERQAWSHSMRLTPLPAFDNNYIWTLIAPDGRAIIVDPGQALPILEAHSKGLIPTAILLTHHHADHIGGVPELLERWPTLPVYAPHDTRIALNYHRIGEGDSLNILGLRFQIIHTPGHTHSHLTFIGNDLLFCGDTLFSLGCGQIFEGTPTQMLASLQRLAALPIQTRVCCGHEYTLSNAAFALHVDPTNTALQKRRQQANAMRLAGLPTLPISLESELNTNPFLRTAAPTIHAATATHLQRTPIDEVEVFATLRHWKNNFPIKNIP

SEQ ID NO: 7210 - protein, 446 aa, Malus x domestica
MAIDIEQRQQPSPGLSKIAVSDTHGEDSPYFAGWKAYDENPYHESSNPSGVIQMGLAENQVSFDLLEKHLEENSEASNWGSKGSKGASGFRENALFQDYHGLLSFRKAMANFMEQIRGGRAKFDPVRVVLTAGATAANELLTFIIADPGDALLVPTPYYPGFDRDLRWRTGVNIVPIHCESSNNFQITPQALEAAYKEAEAKNMRVRGVLITNPSNPLGATIQRAVLEEILDFVTQKNIHLVSDEIYSGSAFSSSEFISVAEIIEDRQYKDAERVHIVYSLSKDLGLPGFRVGTVYSYNDKVVTTARRMSSFTLISSQTQHLLASMLSDKEFTGNYIKTNRKRLRTRYDMIIEGLKKSGIECLKGNAGLFCWMNLSPFLDEPTRECELTLWDSMLHEVKLNISPGSSCHCSEPGWFRVCFANMSEQTLGIALTRIHNFMEKRERAC

SEQ ID NO: 7211 - protein, 341 aa, Beta vulgaris
MDHAADATRTDLMTITRFVLNEQSKRPESRGDFTILMSHIVLGCKFVCSAVNKAGLAKLIGLAGETNIQGEEQKKLDVLSNEVFIKALISSGRTCILVSEEDEEATFVEPSLRGKYCVVFDPLDGCSNIDCGVSIGTIFGIYMVKDLNNATLDDVLQPGKNMVAAGYCMYGSSCTLVMSTGSGVNGFTHDPSLGEFILTHPDIKIPKKGKIYSVNEGNAKNWDGPTTKYVEKCKFPKDGSSPKSLRYIGSMVADVHRTLLYGGIFMYPGDKKSPNGKLRVLYEVFPMSFLMEQAGGQAFTGEQRALDLVPKNIHDRSPVFLGSYDDVEDIKALYAAEQKNA

SEQ ID NO: 7212 - protein, 755 aa, Prochlorococcus marinus subsp. marinus str. CCMP1375
MSTSINIDWLANEGQKLAECRHDNPLGVLGPQQIENKWALRVWMPEADAVNLLLKDGKKKLTNPNHPWIFETSLEENPGSSYQISVERAGISHTQNDPWAFRHEWMGEIDRHLFAEGNHHHIWRRMGAHQTKLDLVEGVMFCLWAPNARSVSVIGDMNSWDGRHHPMQKRLGGIWELFIPHIKKGDLYKYEIRSQEGHCYEKADPYGFQHEVRPAQSSIVSTLDSYKWKDQKWMTQRDKTDQLNKPISVYEMHLGSWMHSSNKTPYIEKDGSTREPVPAADLKPETRFLTYPELTEKLIPYVKARGFTHIELMPISEHPFDGSWGYQVTGWYAPTSRYGTPDEFRAFVDTCHSEGIGVILDWVPGHFPKDEHGLAFFDGKHLYEHADPRIGEHKEWGTLIFNYSRNEVRNFLVANLVYWFEQFHIDGIRVDAVASMLYKDYLRPEGEWIPNEDGGNENFEAVNFLQQANHVLFQHFPGALSIAEESTTWSGVTKPTDMGGLGFNLKWNMGWMHDMLDYFEIDPWFRQFHQNNVTFSICYNYTENFMLSLSHDEVVHGKSHLLHKMPGDDWKKYANTRALLAYMWTHPGKKTLFMGMEFGQRQEWNVWDDLQWELLEHDPHKGIQLLIDDLNCLYKSQPALWKDDFNEYGFQWIDCKDNTNSVISFMRRESSTGEWLVVVANFTPETHANYKVGVPVSGYYAEIFNTDAKKYGGSNTGNLGGKYSTEWNIHEYENALELSLPPLSVLILKYRKNKK

SEQ ID NO: 7213 - protein, 488 aa, Listeria monocytogenes str. 4b F2365
MTDRKNLTTNQGVPVGDNQNSMTAGRKGPTLIEDYVLIEKLAHFDRERVPERVVHARGAGAHGKFVTKKSMKKYTMAKFLQEEGTETEVFARFSTVIHGQHSPETLRDPRGFSVKFYTEEGNYDFVGNNLPVFFIRDAIKFPDVIHSLKPDPRTNIQDGNRYWDFFSLTPEATTMIMYLFSDEGTPASYREIRGSSVHAFKWINEEGKTVYVKLRWIPKAGIVNLSTEQASQIQAKEFNHASRDLYEAIENGDYPEWDLYVQVLDPKDLDNFDFNPLDATKDWFEDVFPYEHVGTMTLDRNPDNIFAETESVGFNPGVLVRGMLPSEDRLLQGRLFSYSDTQRHRVGQNYLQLPINSPKAPVANNQRDGHMPFKQQTSSINYEPNSYDTEPKENPAFIEPEQEIRGDISGRLIAEKPNNFGHAKEVWDRYSDAERAALVKNIVDDWSQVRDDIKIRNLRNFYQVDPEFASRVAAGTGVNLEAHVADLK

SEQ ID NO: 7214 - protein, 593 aa, Pinus sylvestris
MCGILAVFGCLDASQAKRVRVLELSRRLRHRGPDWSGLYQSGHSFLAHQRLAIVDPASGDQPLYNEDRQIVVTVNGEIYNHEKLREQLKSHKFRTGSDCEIVAHLYEDYGEEFVNMLDGMFSFVLLDTRDQSFIAARDAFGITPLYIGWGFDGSVWFASEMKALHDDCESFESFPPGHIYSSKQGGLRRWYNPPWYSENVIPSSPYDPLVLRRAFEKAVIKRLMTDVPFGVLLSGGLDSSLVAAVASRYLAATKAGKQWGDKLHSFCVGLKGSPDLKAAKEVAEYLGTVHHEFHFTVQDGIDAIEDVIYHVETYDVTTIRASTPMFLMSRKIKSLGVKMVLSGEGSDEIFGGYLYFHKAPNKEEFHQETCRKIKALHMYDCLRANKSTSAWGVEARVPFLDKEFVNVAMDIDPERKMVKPDIGRIEKWVLRRAFDDEQNPYLPKHILYRQKGQFSDGVGYSWIDGLKSHAAEHVTDTMLRNAKYIFPHNTPTTKEAYYYRMIFERFYPQNAARLTVPGGPSVACSTAKAVEWDAAWAHNLDPSGRAALGVHASAYQECNAGANDGTGNGNVNTFSKMPGREASVDAREVLIKG

SEQ ID NO: 7215 - protein, 509 aa, Zea mays
MVLSHGVGGSDESVHSTFASRYVRTSLPRYRMPEQSIPKEAAYQIINDELMLDGNPRLNLASFVTTWMEPECDKLIQASVNKNYVDMDEYPVTTELQNRCVNMIAHLFNAPLGDAETAVGVGTVGSSEAIMLAGLAFKRRWQNKMKAAGKPCDKPNIVTGANVQVCWEKFARYFEVELKEVKLSDGYYVMDPQKAVDMVDENTICVAAILGSTLNGEFEDVKLLNDLLTKKNAETGWDTPIHVDAASGGFIAPFLYPELEWDFRLPLVKSINVSGHKYGLVYAGIGWCIWRTKADLPEELIFHINYLGADQPHFTLNFSKVTSRQANLVMAHKTISGSSQVIAQYYQLIRLGFEGYKNIMENCQENATVLKQGLEKTGKFNIVSKDNGVPLVAFSLKDSSRHSEFEISDFLRRFGWIVPAYTMPPDAQHVTVLRVVIREDFSRTLAERLVLDIEKVLHELDALPARVPSGDLAALAAAESSEREMEKQRQVISLWKRAVLAKKKTNGVC

SEQ ID NO: 7216 - protein, 238 aa, Arabidopsis thaliana
MALETLTSPRLSSPMPTLFQDSALGFHGSKGKRSKRSRSEFDRQSLTEDEYIALCLMLLARDGDRNRDLDLPSSSSSPPLLPPLPTPIYKCSVCDKAFSSYQALGGHKASHRKSFSLTQSAGGDELSTSSAITTSGISGGGGGSVKSHVCSICHKSFATGQALGGHKRCHYEGKNGGGVSSSVSNSEDVGSTSHVSSGHRGFDLNIPPIPEFSMVNGDEEVMSPMPAKKLRFDFPGKP

SEQ ID NO: 7217 - protein, 507 aa, Xanthomonas campestris pv. campestris str. ATCC 33913
MRPGSLMVLALLAPTLIAPPVFAQSVLTRDNGAKVGDNQNSQTAGATGPTLLQDVQLIQKLQRFDRERIPERVVHARGTGVKGEFTATADLSNLTKAKVFSAGEKTPVFVRFSSVVHGNHSPETLRDPHGFATKFYTSEGNWDLVGNNFPTFFIRDAIKFPDMVHAFKPDPRTNLDDDSRRFDFFSHVPESTRTLTLLYSNEGTPAGYRFMDGNGVHAYKLVNAQGEVHYVKFHWKTLQGIKNLDPKQVAAVQAKDYSHLTNDLVGAIKKGDYPKWDLYVQVLKPDDLAKFDFDPLDATKIWPDVPEQKVGQMVLNKNVDNFFQETEQVAMAPANLVPGIEPSEDRLLQGRIFSYADTQLYRIGTNGLSLPVNRPRVAVNNGNQDGEANTGHTTSGVNYEPSRLEPRPQDTAARYSELPLSGTTQQAKITLEQNFKQAGELYRSYSKKDRADLVQSFGESLATTDTESKHLVLSFLYKADPEYGAGVTRVAKGDLARVKQLASTLQD

SEQ ID NO: 7218 - protein, 733 aa, Gloeobacter violaceus PCC 7421
MNPTVELRDIEALVTNLHADPFAILGPHRAEDGGAWVVRTYQPGASRVVLLGESGELAMENRRHPDLFECAVPTAPGAYRLRVEDAWGERLIEDAYRFRGSLLSDLDGHLFAEGNHHRIYEKLGAHPAVFEGVAGVYFAVWAPSARNVSVLGDFNRWDGRFHQMRRVERSTGIWELFIPELGEGTVYKFEIKNGFGHIYEKSDPYAFQQELRPKSGSVVADLDRYSWNDGEWLKRRALSNPLKQPLAIYEVHLGSWMRVPEEGDRFLSYTELADKLIPYVKDLGFTHIELLPILEHPFDGSWGYQVLGYYAPTSRFGNPTEFMAFVDRCHQSGIGVILDWVPAHFPKDGHGLALFDGTHLYEHADSRQGEHKEWGTLVFNYGRNEVRNFLIANALFWFERYHIDGIRVDAVAAMLYLDYSRHDGEWVANRYGGRENLEAIGFLRQLNELIFLYYPGALSIAEESTAWPLVTRPPYLGGLGFNLKWHMGWMHDTLAYFRTDPLFRRYRHNDITFSITYTFYENFVLALSHDEVVHMKGSIIGKMPGDGWQKFANLRALFTFMYGHPGKKTLFMGMEFAHGREWNAYQSLDWHLLDYPQHRQMQQFVRALNRLYTGQPALYEEDCNPAGFFWVDCHDVLNSVFTFVRRGKDPSEQLLFVCNFTPTYHPHYRVGVLETGFWQEIFNSDSGIYGGSNKGNLGGLWSENWAIHGQPYSLGLQLPPLGCLVFKRRKEQD

SEQ ID NO: 7219 - protein, 547 aa, Legionella pneumophila
MAKELRFGDDARLQMLAGVNALADAVQVTMGPRGRNVVLEKSYGAPTVTKDGVSVAKEIEFEHRFMNMGAQMVKEVASKTSDTAGDGTTTATVLARSILVEGHKAVAAGMNPMDLKRGIDKAVLAVTKKLQAMSKPCKDSKAIAQVGTISANSDEAIGAIIAEAMEKVGKEGVITVEDGNGLENELSVVEGMQLIAVHSPYFINNQQNMSCELEHPFILLVDKKVSSIREMLSVLEGVAKSGRPLLIIAEDVEGEALATLVVNNMRGIVKVCAVKAPGFGDRRKAMLQDIAILTKGQVISEEIGKSLEGATLEDLGSAKRIVVTKENTTIIDGEGKATEINARITQIRAQMEETTSDYDREKLQERVAKLAGGVAVIKVGAATEVEMKEKKARVEDALHATRAAVEEGIVAGGGVALIRAQKALDSLKGDNDDQNMGINILRRAIESPMRQIVTNAGYEASVVVNKVAEHKDNYGFNAATGEYGDMVEMGILDPTKVTRMALQNAASVASLMLTTECMVADLPKKEEGVGAGDMGGMGGMGGMGGMM

SEQ ID NO: 7220 - protein, 526 aa, Xanthomonas campestris pv. campestris str. ATCC 33913
MTAIQRGFTAASRIIQPAPRCGASSLFSECFMRVAVLSVALSLALFASPGWAQQASPAAAPATADDPEANEAAVSKVPLDEIRRFVAVYNAVKQAYVDPVEDKKLMHAAVRGLLSDLDPHSTYFDKEDAEAFDEQATGAYDGIGVELLQQQDNTLKVIAPIDDTPAARAGVKAGDVIVAIDGKPIDASKAMEPLRGESGSKVTLTIVRDKVAKPFDITLQRETIRVASVRSKLLEPGYGYIRISTFQADTGADFQKNLKQLQAGGKLRGLVLDLRSNPGGLLTSAVQVADDLLDKGNIVSTRGRISISDAKFDATPGDLLGGAPVVVLVDAGSASASEVLAGALRDNQRARIIGSRTFGKGSVQTVLPLDNGDSVKLTTARYYTPSGKSIQASGIVPEVMLTPEPQPGDADVPASLTDFSEATLPGHLRGDAEGEEGYSAGDVLPGDGPINEALAELKQPGSVAKAQAARKAKAQAQKPKAIKPTPEPKPAAPRPPASEQTTPSEPTDKAKPAAPAPAAVPAEPVK

SEQ ID NO: 7221 - protein, 369 aa, Avena sativa
MDGAPVAEFRPTMTHGGRFLLYNIFGNQFEITSKYQPPIMPIGRGAYGIVCSVMNFETREMVAIKKIANAFDNNMDAKRTLREIKLLRHLDHENIVGLRDVIPPSIPQSFNDVYIATELMDTDLHHIIRSNQELSEEHCQYFLYQLLRGLKYIHSANVIHRDLKPSNLLLNANCDLKICDFGLARPSSESDMMTEYVVTRWYRAPELLLNSTDYSAAIDVWSVGCIFMELINRAPLFPGRDHMHQMRLITEVIGTPTDDDLGFIRNEDARRYMRHLPQFPRRPFPGQFPKVQPAALDLIERMLTFNPLQRITVEEALEHPYLERLHDVADEPICTDPFSFDFEQHPLTEDQMKQLIFNEALELNPNFRY

SEQ ID NO: 7222 - protein, 362 aa, Oryza sativa (japonica cultivar-group)
MDRAALTVGPGMDMPIMHDGDRYELVRDIGSGNFGVARLMRSRADGQLVAVKYIERGDKIDENVQREIINHRSLRHPNIIRFKEVILTPTHLAIVMEYASGGELFERICNAGRFSEDEARFFFQQLISGVSYCHSMQVCHRDLKLENTLLDGSTAPRLKICDFGYSKSSVLHSQPKSTVGTPAYIAPEVLLKKEYDGKIADVWSCGVTLYVMLVGAYPFEDPDEPKNFRKTIQRILGVQYSIPDYVHISPECRDLIARIFVANPATRISIPEIRNHPWFLKNLPADLMDDSKMSSQYEEPEQPMQSMDEIMQILAEATIPAAGSGGINQFLNDGLDLDDDMEDLDSDPDLDVESSGEIVYAM

SEQ ID NO: 7223 - protein, 255 aa, Glycine max
MGRGRVELKRIENKINRQVTFAKRRNGLLKKAYELSVLCDAEVALIIFSNRGKLYEFCSSSSMLKTLERYQKCSYGAVEVSKPAKELEQSSYREYLKLKARFESLQRTQRNLLGEDLGPLNIKELEHLERQLDSSLKQVRSTKTQFMLDQLSDLQTKEQMLVEANRSLTVKLEEINSRNHYRQSWEAGDQSMPYGGGGPENSHSHSHSQGFFQPLECNPTLHIGPDYRYNAVASDQITATTQPQQVSGFIPGWML

SEQ ID NO: 7224 - protein, 505 aa, Staphylococcus warneri
MSKQDGKLTGLFGAPVSDRENSMTAGPRGPLLMQDIYFLEQMSHFDREVIPERRMHAKGSGAFGTFTVTNDITQYTSAKMFSEVGKQTEMFARFSTVSGERGAADAERDIRGFALKFYTEDGNWDLVGNNTPVFFFRDPKLFVSLNRAVKRDPRTNMRSAQNNWDFWTGLPEALHQVTILMSDRGIPKDLRHMHGFGSHTYSMYNDKGERVWVKYHFRTQQGIENLTDEEAANVIATDRDSSQRDLFNAIENGDYPKWKMYIQVMTEEQARNHKDNPFDLTKVWYHGDYPLIEVGEFELNRNPNNYFQDVEQAAFAPTNIVPGLDYSPDKMLQGRLFPYGDAQRYRLGVNHWQIPVNQPKGVGIENLCPFSRDGQMRILDDNQGGGPHYYPNNQGVYDSQPEFKKPPFPADGDGYEYNQRQDDDNYFEQPGKLFRLQSDEAKERIFTNTANAMDGVTEDVKRRHIRHCYKADPDYGKGVAKALGIDINSIDLEGEQDETYENFKN

SEQ ID NO: 7225 - protein, 637 aa, Petunia x hybrida
MMESCDCIEALLPHDDLLVKYQYLSDFFIAFAYFSIPLELVYFVHKSSCFPYRWVLMQFGAFIVLCGATHFISLWTFFMHSKTVAVVMTITKMLTAVVSCITALMLVHIIPDLLSVKTRELFLKARAEELDKEMGLIIRQEETGRHVRMLTHEIRSTLDRHTILKTTLVELGRTLDLAECALWMPCQGGLNLQLSHNLNNLLPLGSTVPTNLPIVNEIFSTTQAIQIPHTNPLARMRTTAGRYIPPEVVAVRVPLLHLSNFHINDWPELSARSYAVMVLILPMNGLRKWRDHELELVQVVADQVAVALSHAAILEESMRAHDQLMEQNIALDVARQEAEMAVRARNDFLAVMNHEMRTPMHAVIALCSLLLETDLTPEQRVMIETILKSSNLLATLINDVLDLSRLEDGILELENGTFNLHGILREAVNLIKPIASLKKLSITLALALDLPVLAVGDAKRLIQTLLNVAGNAVKFAKEGHISIEASVAKPEYARDSHPPEVYPMPSDGQFYLRVQVRDSGCGISPQDIPLVFTKFAEAQSTSNRSTGGAGLGLAICRRFIQLMKGNIWIESEGLGKGTTVTFVVKLGVCNHPNAMPLLPTVPRSRLNQGSDDLFRYRQFHGDDSAMSVTVQRYQRSL

SEQ ID NO: 7226 - protein, 483 aa, Bacillus subtilis
MSSNKLTTSWGAPVGDNQNSMTAGSRGPTLIQDVHLLEKLAHFNRERVPERVVHAKGAGAHGYFEVTNDVTKYTKAAFLSEVGKRTPLFIRFSTVAGELGSADTVRDPRGFAVKFYTEEGNYDIVGNNTPVFFIRDAIKFPDFIHTQKRDPKTHLKNPTAVWDFWSLSPESLHQVTILMSDRGIPATLRHMHGFGSHTFKWTNAEGEGVWIKYHFKTEQGVKNLDVNTAAKIAGENPDYHTEDLFNAIENGDYPAWKLYVQIMPLEDAKTYRFDPFDVTKVWSQKDYPLIEVGRMVLDRNPENYFAEVEQATFSPGTLVPGIDVSPDKMLQGRLFAYHDAHRYRVGANHQALPINRARNKVNNYQRDGQMRFDDNGGGSVYYEPNSFGGPKESPEDKQAAYPVQGIADSVSYDHNDHYTQAGDLYRLMSEDERTRLVENIVNAMKPVEKEEIKLRQIEHFYKADPEYGKRVAEGLGLPIKKDS

SEQ ID NO: 7227 - protein, 833 aa, Saccharomyces cerevisiae
MNNAANTGTTNESNVSDAPRIEPLPSLNDDDIEKILQPNDIFTTDRTDASTTSSTAIEDIINPSLDPQSAASPVPSSSFFHDSRKPSTSTHLVRRGTPLGIYQTNLYGHNSRENTNPNSTLLSSKLLAHPPVPYGQNPDLLQHAVYRAQPSSGTTNAQPRQTTRRYQSHKSRPAFVNKLWSMLNDDSNTKLIQWAEDGKSFIVTNREEFVHQILPKYFKHSNFASFVRQLNMYGWHKVQDVKSGSIQSSSDDKWQFENENFIRGREDLLEKIIRQKGSSNNHNSPSGNGNPANGSNIPLDNAAGSNNSNNNISSSNSFFNNGHLLQGKTLRLMNEANLGDKNDVTAILGELEQIKYNQIAISKDLLRINKDNELLWQENMMARERHRTQQQALEKMFRFLTSIVPHLDPKMIMDGLGDPKVNNEKLNSANNIGLNRDNTGTIDELKSNDSFINDDRNSFTNATTNARNNMSPNNDDNSIDTASTNTTNRKKNIDENIKNNNDIINDIIFNTNLANNLSNYNSNNNAGSPIRPYKQRYLLKNRANSSTSSENPSLTPFDIESNNDRKISEIPFDDEEEEETDFRPFTSRDPNNQTSENTFDPNRFTMLSDDDLKKDSHTNDNKHNESDLFWDNVHRNIDEQDARLQNLENMVHILSPGYPNKSFNNKTSSTNTNSNMESAVNVNSPGFNLQDYLTGESNSPNSVHSVPSNGSGSTPLPMPNDNDTEHASTSVNQGENGSGLTPFLTVDDHTLNDNNTSEGSTRVSPDIKFSATENTKVSDNLPSFNDHSYSTQADTAPENAKKRFVEEIPEPAIVEIQDPTEYNDHRLPKRAKK

SEQ ID NO: 7228 - protein, 479 aa, Oceanobacillus iheyensis HTE831
MENVTIKVPNNFMLGAAVSAWQTEGWIGKRDSQDSYLDIWYKNNKHVWHNGYGPAGATNFYQRYEEDIDYMKEIGLTHFRTSINWSRFLIDYENAIVDEEYAAYVDDVIEKLIQNGVEPMICLEHYEVPAVLFEKYGGWESKHVVELFVQYANKVFERYGDKVKHWFTFNEPIVVQTRVYLDAIRWPFEQSTKKWMQWNYNKVLATAKVVNLFKDLQLKDKNGAKIGVILNPEVTYARSTATHDQQAAKMYDLFFNRIFLDPSIKGEYPKELFDVMKKHGITFDFTEEELNLIKDNTVDYVGLNLYFPHRVKARTAGWNEQTPFHPAYYYEIFELPGKKMNPYRGWEIYPQIMYDMGIRMKEEYDNIEWFIAENGMGVENEKRFKDASNMIQDDYRIEFIREHLKWLLKAVEEGVNCKGYMLWAFTDNVSPMNAFKNRYGLVEIDLEDNRNRHLKKSAYWYKQLIESRKFEAENDENYK

SEQ ID NO: 7229 - protein, 469 aa, Vibrio fischeri ES114
MKFAHDFLFGAATASYQVEGAWDQDGKGPTNWDEFTKIPGKTFEGTNGDVAVDHYNRYKEDIALMAEMGLESYRFSISWARIFPNGTGEINQKGIDFYNNLIDECLKYGIVPFVTLYHWDLPLALEKEGAWLNKATGDAYVEFAKLCFNEFGDRVKHFITFNETVVFCALGYMAGAHPPGIQNDPKKYFQATHNVFYAHAKAVIEYKKLNQFGEIGLSHVFSPAFGVDDSEESHFAAMHANQFSMNWFYDPILLGKYPEYVVKQLQEEGNLPDWTDEELQTIFEAAPLNDFMGLNYYQPQRVEKIQGDVEARTITRENSTGSPGNPSYDNVYRTVKMADKKYTKWDWEISPEGFVGGLEMLKEHYGQIKLYITENGLGDEDPIIEGEVCDIPRINFIKEHLGAVKEAVRRGVHIKGYYAWSAIDLLSWLNGYKKQYGFIYVDHQNGLARKKKASFHWFKDVIATRGEDI

SEQ ID NO: 7230 - protein, 119 aa, Metrosideros excelsa
NKINRQVTFSKRRCGLLKKAHEISVLCDAEVALIVFSTKGKLFEYATDACMEKILERYERYSYAERQILTNNAETNGNWTLEHAKLKARMEILQKNQKNLMGEELDSLSLKELQNLEHQ

SEQ ID NO: 7231 - protein, 168 aa, Haloarcula marismortui ATCC 43049
MVASLMVLYGPYTTLTIARSDRDVVQEHLLRDGHSERWGQFELPAEATVVGLAGKTGERSDAFNDIAQSFERDLKLRYGGATVADLAQVLEYGGLFGYPVTSGYPNGKLRVHFESAPLAYLVEAAGGASSDGSQSLLDVEPDGIHDRTPTFLGNAELVDELEAALSET

SEQ ID NO: 7232 - protein, 133 aa, Glycine max
MAAASLRKGNARLPPEVNRALFVRNLPFNISSEEMYDIFGKYGAIRQIRLGNAKDTRGTAYVVYEDIYDAKNAVDHLSGFNVANRYLIVLYSQLNRMSKKTDIKKKEDEITRLQEKYGVGSKTPPPTTPDPAR

SEQ ID NO: 7233 - protein, 204 aa, Hypocrea jecorina
MSDSPQSPPKDVDQGAQSPDEEGQMNDNQEPHSAGGTGYEFEGVKEQDRWLPIANVARIMKNALPDNAKIAKEAKECMQECVSEFISFITSEASEKCQQEKRKTVNGEDILFAMTSLGFENYAEALKVYLSKYREQQNQSNRDRVLENNTWGNAMIPGEKTEPGTTNPEYAPPEGANPPESGAEPNYMYTSHAGHNGAGAGENY

SEQ ID NO: 7234 - protein, 367 aa, Pseudomonas syringae pv. tomato str. DC3000
MNDLSKATDLFSPVQMGSIDLANRIVMAPVTRSRYAEDGVPKDLHATYYAQRATAGMIVAEATNISAQGRGYAATPGIWNEKQVAGWRKVTDAVHAAGGKIVSQLWHVGRFSGVDLQPGGEAPVAPSALQAEGNTYTVDGFVPVSMPRALETDEISGIIAQYRHAAENAKRAGFDGVEVHSANSYLLDQFLRDSTNQRTDHYGGSIENRARLTLEVTQAIVDIWGNDRVGIRLSPVTPDAGNTAPDSNVMGLHGYLIQQLNTLNLAYLHFVEGATATSREVPEGVDMDALSAQFHGPFIGNNNYDLEMAVERRAQGKIDAVAFGRLFISNPDLVARLFHGAELTIAPRESYYGGGAKGYTDWPLGQY

SEQ ID NO: 7235 - protein, 208 aa, Phytolacca americana
KRRNGLLKKAYELSVLCDAEVALVVFSSRGRLYEYANHSVKGTIERYKKACSDQSGAGSVAEANAQYYQQDSAKLRNQIRTITENNRLLSRHMMGEGLSSLTMKELKNLEGKLERGISRIRSKKNELLFAEIEFMQKREIELHNNNQFLRARIAENERAQQSMSLMPGGGDYELVPSQSFDSRNYFQVNALQPNNQYSRQDQTPLQLV

SEQ ID NO: 7236 - protein, 762 aa, Bergeriella denitrificans
MNRNRHIRRGYHPEAGERQIIDSLFAATHSDPFAYLGRHRVNDEREAVRVLRPDAHHIDIIDRHTGAVIMPSEKIDERGLFAAVLPEHAPDYALLVTYHEGEAAVREEDDYRFGSALQHTDAWLLGEGTHLRPYETLGAHFAEMDGVSGVRFAVWAPNARRVSVIGEFNGWDSRRHAMRPHTGNGLWDIFIPGVGLNALYKFSVLDANGNIREKADPYAFGAELRPTTASVVRGLPAKAEAPAFRRRANSVEAPISIYEVHLGSWRRNPENNYWLTYTQLADELVNYVKDMGFTHIELLPLSEYPFDGSWGYQATGLYAPTSRFGSPDELKALIDAAHAAGISVILDWVAGHFPTDDHGLNTFDGTALYEHADPREGYHQDWNTLIYNFGRNEVKNFLQGNALYWIERFGFDGIRVDAVASMIYRNYSRKDGEWIPNRYGGSENLEAIAFLRQTNAVLKSETPGAGSFAEESTSFADVTREAGLNFDFKWNMGWMNDTLRYMQEDPVHRKYHHGKMTFGMMYQYSENFVLPLSHDEVVHGKRSLLGKMPGDCWQQFANLRAYYGFMYGFPGKKLLFMGNEFAQGREWNYQEGLDWHLLDEAGGWHKGVQDYVRDLNHIYTAHAPLYQLDQQPEGFEWLVADDSDNSVFVFERRDRAGNRIIVISNFTPVVREHYRFGVNAPGRYTEILNSDRTQYQGSGIANGADITAENVPSHGKAQSLSLTLPPLATVYLYQKAAPATEIQTALRADKQPAVKDKQAKAK

SEQ ID NO: 7237 - protein, 192 aa, Thalictrum dioicum
KRRNGLLKKAYELSVLCEAEIALVVFSNRGRLYEYANNSVRKTIDRYKKTCGEGSSTLTVSEANLLFYQQESSKMKQQIEILQNSNRHLMGEALSCLSIKELKQLESRLEKGLSRIRSKKNEMLLAEIEYMQKKEIELHNDNIYLREQITVNEKAQQHINSMPGNVYEAITSAPYNSKPNQYGSDATFLQLC

SEQ ID NO: 7238 - protein, 365 aa, Pseudomonas syringae pv. tomato str. DC3000
MSEINKDVPALFNMGSLKLKNRFALAPMTRVSATEQGCATQAMARYYERFAKGGFGLIITEGNYTDRSFSQGYPFQPGLTDDEQALAWRATTDAVHRHGSAVIAQIMHAGALSQANRFVNEAAGPSAIRPKGEQMAFYYGEGRYRVPRAMSDKDIADTLDGFARATRRAVGAAGFDGVEIHGANGYLLDQFLTDYTNQRTDQWGGNVYQRLRLTLDVIAEVKKAAGQAPVGVRISQGKVNDFQHKWAGGERDAEVIFGALADAGVDYIHITEHQAWQPAFAQGEASLVRLARRYAPDVALIANGGLHDPEKAAQVFRDGADIIAVGKGALANPDLPRLLLEGGAIREFDPAILGPIANIKDSELG

SEQ ID NO: 7239 - protein, 690 aa, Sorghum bicolor
MSASSSSLCGGDPAMRSVVWFRRDLRVEDNPALAAAARAGGEVVPAYVWSPEEEGPYYPGRVSRWWISQSLKRLDASLRRLGAGKLVTRRSADAVVALLQLVRDTGATHVYFNHLYDPISLVRDHRLKEMLAAEGIVVQSFNADLLYEPWEVVDDEGQPFTMFTAFWNRCLSMQYDPPAPLLPPKKINSGDLSMCPSEDLIFEDDSERGSNALLARAWTPGWQNADKALTAFLNGPLADYSVNRKKADSASTSLLSPHLHFGELSVRKVFHLVRMKQLVWSNEGNHAAEESCTLFLRSIGLREYSRYLSFNHPSSHERPLLAHLRFFPWVVNESYFKIWRQGRTGYPLVDAGMRELWATGWLHDRIRVVVSSFFVKVLQLPWRWGMKYFWDTLLDADLESDALGWQYITGSLPDSRELDRIDNPQFEGYKFDPHGEYVRRWIPELVRLPTEWIHHPWDAPVSVLQAAGIELGSNYPLPIVELDAAKARLQEALSEMWQLEAASRATMNNGMEEGLGDSSEVPFPEELQMEVDRATANVVMTVRRREDQMVPTMTSSLNRAETEVSADLGNSEDTRAQVPFHAHFHPRVEREDMIQNTEGPALRINGTHQHNIFQQPQNHRREALAPSVSEASSSWTGREGAVVPVWSPPAASGHSETFAADEADVSSRSYLDRHPRSYRLMNWSQLSQSL

SEQ ID NO: 7240 - protein, 200 aa, Pyrococcus abyssi GE5
MKVLVTGFEPFGGDDKNPTMEIVKFLDGKEIGGAKVIGRVLPVSFKRARKELVAILDEIKPDVTINLGLAPGRTHISVERVAVNIIDARIPDNDGEKPIDEPIVENGPAAYFATIPTREIVEEMKRNNIPAVLSYTAGTYLCNFVMYLTLHHSATKGYPRKAGFIHVPYTPDQVIEKKNTPSMSLELEIKGVEIAIRKSL

SEQ ID NO: 7241 - protein, 226 aa, Thalictrum dioicum
MGRGKIEIKRIENTTNRQVTFCKRRNGLLKKAYELSVLCEAEVALVVFSSRGRLYEYSNNSVKKTIERYKKASTDSPNSGSVYEANVQFYQQEASKMRNQIASLQNHNRNLLGESLSNLNIRELRQIEKKIEGGISKIRAKKNELLFSEIEYMQKREIDLQTDNKYLGAMIAANERVPPEHMNLMPANEYHIMSSAPFDSRNFLPANLLDHNNNYSHSDQTTLQLG

SEQ ID NO: 7242 - protein, 148 aa, uncultured soil bacterium
MALVPWTPMHNFAALQGQMNQLLNQFFRGGNGEEAPWGVSAWMPPVDLYETPDEFILSADLPGLTKDDIHLEVHDRTLTLRGERKPAAGMTEAHYQRRERAYGSFQRAFTLPTPVDTDKVQASMKDGILDLHLPKHEAAKPRRIAVQS

SEQ ID NO: 7243 - protein, 200 aa, Houttuynia cordata
NGLLKKAYELSVLCDAEVALVVFSSRGRLYEYANNSVKATIERYKKSNADSTNSGSVAESSSQYYQQESAKLRNQISQLQNAIGRLTPEGIASMNPREVTNAEKEILRSITKIRSKKNEVLSAEIEYMQKREIDLQNDNIYLRSKIAENERVHQHMNVMPGQQYEVMPAHPFDSRNFLEANLLEPNLHYSQQEQTALQLG

SEQ ID NO: 7244 - protein, 216 aa, Sanguinaria canadensis
IENTTNRQVTFCKRRNGLLKKAYELSVLCDAEVALIVFSNRGRLYEYANNSVKSTIERYKKTCQDPSNSGCAVEANTQFYQQEASKLRQQIGFLQNSNRNLTGEALSSMTVKELKQLETRLEKGISRIRSKKNELLFSEIEYMQKREIDLQNDNMYLRAKIAENERAQQHMNLMPGNEYDVMTSSAYDSRNFLQVNLLESTNHHYSRQEQTALQLG

SEQ ID NO: 7245 - protein, 458 aa, Streptomyces cattleya
MAGFLLRCRPEGAVPQHLGAGTGLATEVTRDGADVLVVHGDPLTPGGQAPIHAPLDELIAWTVRAYSRFCAVLVRDDRAVLWSDNGATCPLHYARGADDTLLVATSAGALLPLLGTAPVLGEGDRAVLPGGRFAGVTAVPAGTAVTLAVAGFDTEPLLTRRYHRLPARPTETDPERAVTAVRDALTHAVGRLATGLTEAGVMLSGGVDSSSVAALAAREVTSLSTYTVGTPFGDEFAQAAWFAERLGSKHHELVFEPEQLTALLPEMIRSLETWDLLTLQIAAPACFLLGHIATGARQVMLSGYGADLIFAGLGGTGTETRIERSVAAQTAATAVSNEFNPAYADARDVVVRYPYWTREVMSTALGIRGRLKVRPDTAKWVLRSAVTGILPDEVAWRPKRGIHEGTAMSRMFAAALGSDDRHTQARRLYEMATEVFRDTAAGTDELEGSDEGLAGVAS

SEQ ID NO: 7246 - protein, 92 aa, Brassica napus
TDKYGGSLENRCRFALEVVQAVADEIGADKVGIRLSPFASYSDASDSNPEALGLYMAQALNKLGILYCHMVEPRMVNIGEKLETPHSLRAMR

SEQ ID NO: 7247 - protein, 540 aa, Streptococcus anginosus
MAKDIKFSADARSAMVRGVDILADTVKVTLGPKGRNVVLEKSFGSPLITNDGVTIAKEIELEDHFENMGAKLVSEVASKTNDIAGDGTTTATVLTQAIVREGIKNVTAGANPIGIRRGIETAVATAVEALKANSVPVSNKEAIAQVAAVSSRSEKVGEYISEAMEKVGNDGVITIEESKGMETELDVVEGMQFDRGYLSQYMVTDNEKMVADLDNPYILITDKKISNIQEILPLLENILKTSRPLLIIADDVDGEALPTLVLNKIRGTFNVVAVKAPGFGDRRKAMLEDIAILTGGTVITEDLGLELKDATIEALGQASKVTVDKDSTVIVEGSGDAEAIANRVAVIKSQIESSTSDFDREKLQERLAKLSGGVAVIKVGAATETELKEMKLRIEDALNATRAAVEEGIVSGGGTAFVNVLSAVEALDLSGDEATGRNIVLRALEEPVRQIALNAGFEGSIVIDRLKNSEAGTGFNAATGEWVNMIDAGIIDPVKVTRSALQNAASVASLILTTEAVVANQPEPASPTPAMDPSMMGGMM

SEQ ID NO: 7248 - protein, 179 aa, Zea mays
MVLSHASSGRDDDDAVASTFASRYVRERLPRYRMPERSIPREAAQQIISDELMLDGNPRLNLASFVTTWMEPECDKLIMDSINKNYVDMDEYPVTTELQNRCVNMIAHLFNAPIKEDETAIGVGTVGSSEAIMLAGLAFKRKWQNKRKEQGKPCDRPNIVTGANVQDPGTTNNGCKCWV

SEQ ID NO: 7249 - protein, 540 aa, Streptococcus constellatus
MAKDIKFSADARSAMVRGVDILADTVKVTLGPKGRNVVLEKSFGSPLITNDGVTIAKEIELEDHFENMGAKLVSEVASKTNDIAGDGTTTATVLTQAIVREGIKNVTAGANPIGIRRGIETAVATAVEALKANSVPVSNKEAIAQVAAVSSRSEKVGEYISEAMEKVGNDGVITIEESKGMETELDVVEGMQFDRGYLSQYMVTDNEKMVADLDNPYILITDKKISNIQEILPLLENILKTSRPLLIIADDVDGEALPTLVLNKIRGTFNVVAVKAPGFGDRRKAMLEDIAILTGGTVITEDLGLELKDATIEALGQASKVTVDKDSTVIVEGSGAAEAIANRVAVIKSQIESATSEFDKEKLQERLAKLSGGVAVIKVGAATETELKEMKLRIEDALNATRAAVEEGIVSGGGTAFVNVLNTVEALDLSGDEATGRNIVLRALEEPIRQIAINAGFEGSIVIDRLKNSEVGTGFNAATGEWVDMIEAGIIDPVKVTRSALQNAASVASLILTTEAVVASQPEPASPAPAMDPSMMGGMM

SEQ ID NO: 7250 - protein, 515 aa, Burkholderia sp. 383
MRMKLKNIGLIAAGLATGVFATLQVSASAEQTATAPLPLDQLRLFAEVFGQIKREYVEPVDDKKLLTAAIKGMVSSLDPHSSFLDKTDYDELQEQTKGRFAGLGIEISQEDGLVKVISPIEDTPAFRAGIRPGDLITRINDKPVRGMTLDKAVKQMRGEPGTKVTLTIFRKSDDRTFPVTVTRAIIKVQSVKMKILDPGYAYVRITSFQERTTPDLAQKLQDIARQQPNLKGLVLDLRNNGGGLLQSAVGVAGAFLPPDSVVVSTNGQIADSKQVYRDTYDNYRLPSFDGDPLKNLPPVFKTVPMIVLTNAYSASASEIVAGALQDSKRAQIMGKTTFGKGSVQTVRPMTADTALRLTTAYYYTPSGRSIQNKGITPDVPVDQYADGDPDDVLVTREVDYSNHLANTQDPNEKKEQEDREQRRMDQLRILEEQNDKKTPEQRQKDRDRKPIEFGSADDFMMQQALNKLEGKPVQESKSLLAESTTKSPAGKATASKASGASAKPAAAPKPASAPQ

SEQ ID NO: 7251 - protein, 682 aa, Salmonella enterica subsp. enterica serovar Paratyphi A str.
MNTFFRLTALAGLLALAGQSFAVEDITRADQIPVLKEETQHATVSERVTSRFTRSHYRQFDLDEAFSAKIFDRYLNLLDYSHNVLLASDVEQFAKKKTVLGDELRTGKLDVFYDLYNLAQKRRFERYQYALKVLERPMDFTGNDTFNLDRSKAPWPKDEAELNALWDGKVKFDELSLKLIGKSDKEIRETLTRRYKFAIRRLAQTNSEDVFSLAMTAFAREIDPHTNYLSPRNTEQFNTEMSLSLEGIGAVLQMDDDYTVINSLVAGGPAAKSKSISVGDRIVGVGQAGKPMVDVIGWRLDDVVALIKGPKGSKVRLEILPAGKGTKTRIITLTRERIRLEDRAVKMSVKTVGKEKVGVLDIPGFYVGLTDDVKVQLQKLEKQNVNSIVIDLRSNGGGALTEAVSLSGLFIPSGPIVQVRDNNGKVREDSDTDGVVYYKGPLVVLVDRFSASASEIFAAAMQDYGRALIVGEPTFGKGTVQQYRSLNRIYDQMLRPEWPALGSVQYTIQKFYRVNGGSTQRKGVTPDIIMPTGNEETETGEKFEDNALPWDSIDAAKYVKSDDLAPFGPELLKEHNARIAKDPEFQYIMKDIARFNAMKDKRNIVSLNYAQREKENNEEDALRLARINDRFKREGKPLLKKLDDLPKDYQEPDPYLDETVKIALDLAHLEKEKPAEQAAADK

SEQ ID NO: 7252 - protein, 422 aa, Zea mays
  misc_feature (72)..(72): Xaa can be any naturally occurring amino acid
  misc_feature (214)..(214): Xaa can be any naturally occurring amino acid
MARRRPMDYEELNEKVKKAQYAVRGELYLRASELQKEGKKIIFTNVGNPHALGQKPLTFPRQTALHPVPVRXVVALCQAPFLLDDPNVGLMFPPDAIVRAKRYLAMAPGGLGAYSDARGIPGIRKEVADFIHKRDGYPSDPELIYLTDGASKGVMQILNTIIRNEMDGILVPVPQYPLYSATISLYGGSLVPYYLEEEANWSLDFVNIRQTVAXRAMVMINPGNPTGQCLSEANIKELLQFCYHENLVLLADEVYQQNIYQDERPFISARKVMFDMGPPISSELQVVSFHTVSKGYWGECGQRGGYFEMTNLPPKTVDEIYKVASIALSPNVPGQIFMGVMVNPPKPGDISYLKFAAERLNMLPLRSFSLPPVSTEKMDLCEIFKSIHESLRRRARMMTDGFNSCRNVVCNFTEGAMYSFPQ

SEQ ID NO: 7253 - protein, 225 aa, Meliosma dilleniifolia
MGRGKIEIKRIENTTNRQVTFCKRRNGLLKKAYELSVLCDAEVALIVFSTRGRLYEYANNSVKATIDRYKKACADTSNTGSVSEANAQFYQQESSKLRQQIVILQNSNRHLMGEALSAMTVKELKQLEGRLEKGISRIRSKKNEMLFAEIEYMQKREIDMQNDNMYLRAKIAENERAQQHMSMMPTSEYEAMPPQQFDSRNFLQVNLLEPNHHYSRQEQTALQLG

SEQ ID NO: 7254 - protein, 233 aa, Haemophilus somnus 129PT
MLIPIPALNDNYIWVYKRENLSVIVIDIPEIAALSQFIQAQNLVIGALLITHNHRDHIGALAEFKQFYPHVHIYGPAECADQGVTQVIDAGRLIIDEYHIDVLPTGGHTAQHLSFLIDGHLFCGDTLFSAGCGRVFTGDYSQMFTSLQLLKSLPDETIVCPAHEYTLGNLAFALTTGKNKSAVQKQLEKVKKLRAENKPSLPTTLALEKQINPFLQVESLDEFIELRKAKDVF

SEQ ID NO: 7255 - protein, 1028 aa, Zea mays
  misc_feature (600)..(600): Xaa can be any naturally occurring amino acid
SSQARILAQTTLDAELNAEYEESGDSFDYSKLVEAQRSTPPEQQGRSGKVIAYLQHIQRGKLIQPFGCLLALDEKSFRVIAFSENAPEMLTTVSHAVPNVDDPPKLGIGTNVRSLFTDPGATALQKALGFADVSLLNPILVQCKTSGKPFYAIVHRATGCLVVDFEPVKPTEFPATAAGALQSYKLAAKAISKIQSLPGGSMQALCNTVVKEVFDLTGYDRVMAYKFHEDEHGEVFAEITKPGIEPYLGLHYPATDIPQAARFLFMKNKVRMICDCRARSVKIIEDEALSIDISLCGSTLRAPHSCHLQYMENMNSIASLVMAVVVNENEDDDEPESEQPPQQQKRKKLWGLIVCHHESPRYVPFPLRYACEFLAQVFAVHVNKEFELEKQIREKSILRMQTMLSDMLFKESSPLSIVSGSPNIMDLVKCDEVHGDSTGLSTDSLQDAGYPGAASLGDMICGMAVAKITSKDILFWFRSHTAAEIKWGGAKHDPSDEDDSRRMHPRLSFKAFLEVVKMKSLPWSDYEMDAIHSLQLILRGTLNDALKPAQSSGLDNQIGDLKLDGLAELQAVTSEMVRLMETATVPILAVDGNGLVNGWXQKVADLSGLRVDEAIGRHILTLVEDSSVPIVQRMLYLALQGREEKEVRFELKTHGSKRDDGPVILVVNACASRDMHDHVVGVCFVAQDMTVHKLVMDKFTRVEGDYRAIIHNPNPLIPPIFGADQFGWCSEWNAAMTKLTGWHRDEVIDRMLLGEVFDSSNASCLLKSKDAFVRLCIIINSALAGEEAEKAPIGFFDRDGKYIECLLSVNRKVNADGVVTGVFCFIHVPSDDLQHALHVQQASEQTALRRLKAFSYMRHAIDKPLSGMLYSRETLKGTDLDEEQMRQVRVADNCHRQLNKILADLDQDNITDKSSCLDLDMAEFVLQDVVVSAQILSDFLFVSVKFSPAGGSVDISSKLTKNSIGENLHLIDFELRIKHQGAGVPAEILSQMYGEDNREQSEEGLSLLVSRNLLRLMNGDIRHLREAG

SEQ ID NO: 7256 - protein, 212 aa, Chloranthus spicatus
IENTTNRQVTFCKRRNGLLKKAYELSVLCDAEVALIVFSTRGRLYEYANNSIKSTIERYKKASADSSSTTSIAEANTQYYQQEASKLRQQIHILQNSNRHLMGDALSSLSIKELKQLENRLERGITRIRSKKHELLFAEIEYMQKREADLQNDNMYLRAKIAENENAQQANMLPGPEFDTLPTFDSRNYFQANILEAAPQYSHQDQTALHLG

SEQ ID NO: 7257 - protein, 416 aa, Arabidopsis thaliana
MGLFGTKKIGKYEIGRTIGEGNFAKVKLGYDTTNGTYVAVKIIDKALVIQKGLESQVKREIRTMKLLNHPNIVQIHEVIGTKTKICIVMEYVSGGQLSDRLGRQKMKESDARKLFQQLIDAVDYCHNRGVYHRDLKPQNLLLDSKGNLKVSDFGLSAVPKSGDMLSTACGSPCYIAPELIMNKGYSGAAVDVWSCGVILFELLAGYPPFDDHTLPVLYKKILRADYTFPPGFTGEQKRLIFNILDPNPLSRITLAEIIIKDSWFKIGYTPVYHQLSDSIKDNVAEINAATASSNFINAFQIIAMSSDLDLSGLFEENDDKRYKTRIGSKNTAQETIKKIEAAATYVSLSVERIKHFKVKIQPKEIRSRSSYDLLSAEVIEVTPTNCVIEISKSAGELRLYMEFCQSLSSLLTAEVS

SEQ ID NO: 7258 - protein, 213 aa, Chloranthus spicatus
IENTTNRQVTFCKRRNGLLKKAYELSILCDAEVALVVFSSRGRLFEYSNNSVKTTIDRYKKAHADSNSASVSEANTQFYQQEAAKLRQQLGILQNSNRHMMGESLSSMNIKELKSLEVKLEKGISRIRSKKNELLFSEIEYMQRREMDLQNDNMYLRSKIAENERAQQHMNVLPGPEYDVMPAFDGRNFLPVNLLGSNHHQFSHQDQTALQLG

SEQ ID NO: 7259 - protein, 435 aa, Malus x domestica
MRMLSRNATFNSHGQDSSYFLGWQEYEKNPYHEVHNTNGIIQMGLAENQLCFDLLESWLAKNPEAAAFKKNGESIFAELALFQDYHGLPAFKKAMVDFMAEIRGNKVTFDPNHLVLTAGATSANETFIFCLADPGEAVLIPTPYYPGFDRDLKWRTGVEIVPIHCTSSNGFQITETALEEAYQEAEKRNLRVKGVLVTNPSNPLGTTMTRNELYLLLSFVEDKGIHLISDEIYSGTAFSSPSFISVMEVLKDRNCDENSEVWQRVHVVYSLSKDLGLPGFRVGAIYSNDDMVVAAATKMSSFGLVSSQTQHLLSAMLSDKKLTKNYIAENHKRLKQRQKKLVSGLQKSGISCLNGNAGLFCWVDMRHLLRSNTFEAEMELWKKIVYEVHLNISPGSSCHCTEPGWFRVCFANLPERTLDLAMQRLKAFVGEYYNV

SEQ ID NO: 7260 - protein, 226 aa, Saruma henryi
MGRGKIEIKRIENTTNRQVTFCKRRNGLLKKAYELSVLCEAEVALIVFSSRGRLYEYANNSVRTTIDRYKKASDSSNPASVSETNSQYYQQEATKLRQQIGILQNANRHLMGESLSSMSVKELKQLETRLEKGISRIRSKKNELLFAEIEYMQKREVELQNDNIFLRGKIVENERAQQNMNMLPGGGGYEVMSQHPPYDSRNYLPVNLLEHNQHFSHQEPTALQLG

SEQ ID NO: 7261 - protein, 516 aa, Corynebacterium glutamicum ATCC 13032
MSEKSAADQIVDRGMRPKLSGNTTRHNGAPVPSENISATAGPQGPNVLNDIHLIEKLAHFNRENVPERIPHAKGHGAFGELHITEDVSEYTKADLFQPGKVTPLAVRFSTVAGEQGSPDTWRDVHGFALRFYTEEGNYDIVGNNTPTFFLRDGMKFPDFIHSQKRLNKNGLRDADMQWDFWTRAPESAHQVTYLMGDRGTPKTSRHQDGFGSHTFQWINAEGKPVWVKYHFKTRQGWDCFTDAEAAKVAGENADYQREDLYNAIENGDFPIWDVKVQIMPFEDAENYRWNPFDLTKTWSQKDYPLIPVGYFILNRNPRNFFAQIEQLALDPGNIVPGVGLSPDRMLQARIFAYADQQRYRIGANYRDLPVNRPINEVNTYSREGSMQYIFDAEGEPSYSPNRYDKGAGYLDNGTDSSSNHTSYGQADDIYVNPDPHGTDLVRAAYVKHQDDDDFIQPGILYREVLDEGEKERLADNISNAMQGISEATEPRVYDYWNNVDENLGARVKELYLQKKA

SEQ ID NO: 7262 - protein, 196 aa, Nymphaea sp. EMK-2003
KRRNGLLKKAYELSVLCDAEVALIVFSSRGRLFEYANNNIKATIDRYKKACAESSNANSVTEANAQYYQQEATKLRQQIQILQNANRHLMGESLSNLSVKELKQLENKIERGITRIRSKKNELLFAEIEYMQKRELELQSDNMYLRAKVAESERAQHSNMLPGSDYETMQTFDSRNFFSVNMLQYSNQDQTALHLG

SEQ ID NO: 7263 - protein, 364 aa, Cupriavidus necator
MPEVQRMTLTQFLIEERRRYPDASGGFNGLILNVAMACKEIARAVAFGALGGLHGKASNQAGEAGAVNVQGEIQQKLDVLSNTTFLRVNEWGGYLAGMASEEMEAPYQIPDHYPRGKYLLVFDPLDGSSNIDVNVSVGSIFSVLRAPEGASAVTEQDFLQPGSAQVAAGYALYGPTTMLVLTVGNGVNGFTLDPNLGEFFLTHPNLQVPADTQEFAINASNSRFWEAPVQRYIAECMAGKSGPRGKDFNMRWIASMVAEAHRILMRGGVFMYPRDSKDPAKPGRLRLLYEANPIAFLMEQAGGRASTGRQTLMSVAPGALHQRIGVIFGSRNEVERIEGYHTDQTDPDLPSPLFNERSLFRASA

SEQ ID NO: 7264 - protein, 174 aa, Xanthomonas campestris pv. campestris str. ATCC 33913
MPLTDLQHVPGATAAPADTQGFVFNHTMLRVKDAPRSLDFYTRVLGFRLLDARDFAEAKFSLYFLALLPEGTAVPDDDAARRLWMAGIPGVLELTHNHGTETQDGAVYHDGNSDPRGFGHICISVPDIHAACARFDSLGVPYQKRLEDGRMKHLAFIKDPDGYWVEIISNTPLA

SEQ ID NO: 7265 - protein, 930 aa, Yersinia pestis CO92
MTKYSLRARMMILILAPTLLLGLLLSTSFMVNRYNELQNQIVSAGTNIIEPLAVASEYGMSFRNRDTVRQLINLLHRRHSNIVRSISVFDVDNKLFVTSNYNYNSSQLRLPPGEPVPDSLMLSYRGDSLILRMPIVSESNLSSEQASGQGESDQILGYIAIDLDLQSVRLKQYKEIFISTLLLLFCMCVAILFAYRLMRDVTGPIRNMVNTVDRIRRGQLDSRVEGHMLGELDILKNGINSMAMSLAAYHEEMQQNIDQATSDLRETLEQMEIQNVELGLAKKRAQEASRIKSEFLANMSHELRTPLNGVIGFTRQTLKTSLTPTQTDYLQTIQRSANNLLCIINDVLDFSKLEADKLILEHIPFSLRETLDEVIILLAHTAHEKGLELTLHINNDVPDQVLGDAMRLQQIVTNLLGNAIKFTEEGNIDILVVVKAIASQQVTLMVEIHDTGIGISESQQAQLFQAFRQADASTSRRHGGTGLGLVITERLVKEMGGNISFQSQMSCGSIFRFHLTLELNESIPYRQPDMAHLEGKQLAYIERNSTAARATINILNTTPLQVTHRQSLAQLPEQHYDFLLVGVPIPFRNNMAIHQDKLLTALKIADHVILALPSQSQVEAEQLKQIGAKDCLLKPISSIRLIPLLLAEDTHSKVPSEEQPRKQPKLPFRVMAVDDNPANLKLIGTLLEEQIEETVLCDSGAMAITYAREHTLDIILMDIQMPEIDGIRASEIIHQIPHHQETPIIAVTAHAVKGQQEQLLRLGMADYLAKPIDEARLLQVLSRYQSDNPPLSTASTASTASTASTAESLPLPVPKGAGVIDWAQAVRQAANKEDLARDLLTMLLEFMPQITARVQAILAGADDGDILNLVHKFHGSCACSGVPRLRQLCMTIELQLRQQVNLQDLEPEWLELLDEIENVSEAAKTYLRTE

SEQ ID NO: 7266 - protein, 548 aa, Haemophilus influenzae R2866
MAAKDVKFGNDARVKMLKGVNVLADAVKVTLGPKGRNVILDKSFGAPTITKDGVSVAREIELEDKFENMGAQMVKEVASKANDAAGDGTTTATVLAQAIVNEGLKAVAAGMNPMDLKRGIDKAVSAVVSELKNLSKPCETAKEIEQVGTISANSDSIVGQLISQAMEKVGKEGVITVEDGTGLEDELDVVEGMQFDRGYLSPYFINKPETATVELDNPYLLLVDKKISNIRELLPVLEGVAKAGKPLLIIAEDVEGEALATLVVNTMRGIVKVAAVKAPGFGDRRKAMLQDIAILTAGTVISEEIGMELEKATLEDLGQAKRVVINKDNTTIIDGIGDEAQIKGRVAQIRQQIEESTSDYDKEKLQERVAKLAGGVAVIKVGAATEVEMKEKKDRVDDALHATRAAVEEGIVAGGGVALVRAAAKVAASLKGDNEEQNVGIKLALRAMEAPLRQIVTNAGEEASVVASAVKNGEGNFGYNAGTEQYGDMIEMGILDPTKVTRSALQFAASVAGLMITTECMVTDLPKDDKADLGAAGMGGMGGMGGMM

SEQ ID NO: 7267 - protein, 470 aa, Colwellia psychrerythraea 34H
MLLWLRNDLRTHDNPALHYFLSRNALSQHDSAVPAKAIFFICEQQWQQHDWSPIKIDFIKRHAHALVKELALLNIELELIELDNFTQQKTYLHSYCQLHNITEVVANSEVEFNEQQRDKALYLELKASGIPLTLLEADVIVPKGKVLNQSGIMYKVFTPFKRAWLTYIQQGGFEYLGKVSVKSSAVNKADNQEEDQGSISSTWPLATVFEQQILPKFYQQKISTYKLNRDIPSIKGTSGISPYLAAGVISPRFVLRLLLNKHPDLLVASDSEEFSWLNEIIWREFYRHLLFHEQRLCKHQCYKENYQEMLWHNDAALFDAWCQGRTGYPLVDAAMRQLNQTGWMHNRLRMVVASFLTKHLLIDWRLGEKYFMQHLIDGDLASNNGGWQWAASTGCDAQPYFRIFNPIRQSERFDPKGVFIRKYIPELNNISDKAIHFPHQYIKDNELNIYWPAIVEHKEARLKALAFYKV

SEQ ID NO: 7268 - protein, 158 aa, Zea mays
MSLIRRSNVFDPFSLDLWDPFEGFPFGSGSSSSLFPSFPRTSSETAAFAGARIDWKETPEAHVFKADVPGLKKEEVKVEVEDGNVLQISGERNKEQEEKTDTWHRVERSSGRFLRRFRLPENAKTEQIRAAMENGVLTVTVPKEDAKKPEVKSIQISG

SEQ ID NO: 7269 - protein, 262 aa, Brassica napus
  misc_feature (252)..(252): Xaa can be any naturally occurring amino acid
MAAAVSTVGAINRAPLSLNGSGAGAASVPATTFLGKKVVTASRFTQSNNKKSNGSFKVVAVKEDKQTDGDRWRGLAYDTSDDQQDITRGKGMVDSVFQAPMGTGTHNAVLSSYEYISQGLKQYNLDNMMDGLYIAPAFMDKLVVHITKNFLTLPNIKVPLILGIWGGKGQGKSFQCELVMAKMGINPIMMSAGELESGNAGEPAKLIRQRYREAADMIKKGKMCCLFINDLDAGAGRMGGTTQYTVNNQMVXRTLMNIADNP

SEQ ID NO: 7270 - protein, 207 aa, Mesembryanthemum crystallinum
MASRRRKLLKIIILGDSGVGKTSLMNQFVNKKFSNQYKATIGADFLTKELQFEDRLFTLQIWDTAGQERFQSLGVAFYRGADCCVLTYDVNVMKSFESLNRWREEFLIQASPADPDNFPFVLLGNKIDVDGGSGRVVSEKKAKAWCMSKGNIPYFETSAKDGTNVEEAFQCIAKNAIQNEPEEETYLPDTIDMAGSTRPQSSSACEC

SEQ ID NO: 7271 - protein, 213 aa, Nymphaea sp. EMK-2003
KRRSGLLKKAYELSVLCDAEVALIIFSSRGRLYEYANNSVKATIDRYKKACDSSNSGTVTEANAQYYQHESHKLRQQISKIQQDNRQMLGEGISEMSHRDLKNLESKLERSISKIRSKKNDLLNAEIQYMKKRDDDLQKENIYLRARINENERAHQQQQQQQHVTVMTGGPSSEYEVLPMTFQHVNLLEPSHHQHHHHHHYSAHQERTALQLG

SEQ ID NO: 7272 - protein, 224 aa, Nymphaea sp. EMK-2003
MGRGKIEIKRIENTTNRQVTFCKRRSGLLKKAYELSVLCDAEVALIVFSSRGRLYEYANNSVRGTIERYKKAYAESSSSGAVAETNAQYYQHEAHKLRQQISKIQQDNRQMLGEGVSEMSLRDLKSLENKLERSISKIRGKKNDLLNGEIQYMQNWNEDLQKENTFLRAKVCENERAQQQHISILAAGPAEYELPPAVPFQHINLMESSHHQYSHQERTALQLG

SEQ ID NO: 7273 - protein, 85 aa, Selaginella moellendorffii
EVVSLSPKTLMESDRYICEICNQGFQRDQNLQMHRRRHKVPWKLLKRATPEVRKRVYVCPEPSCLHHDPCHALGDLVGIKKHFRR

SEQ ID NO: 7274 - protein, 142 aa, Zea mays
NRLTALSCSTTRACRSDATRTAGADVDHPPSAFLLLLVLLGCASLASGGAPMAGHVLGGVKENPATANSGEYDGLGRFSGDEHNRRENALLESELVMEANEQVEVGTLHHLTLEDLEAGRKKLYEALDWVKPWLDFQELQEF

SEQ ID NO: 7275 - protein, 202 aa, Hypocrea jecorina
MNPEYDYLFKLLLIGDSGVGKSCLLLRFADDTYTESYISTIGVDFKIRTIELDGKTVKLQIWDTAGQERFRTITSSYYRGAHGICVVYDVTDMDSFNNVKQWLQEIDRYATEGVNKLLVGNKSDMSDKKVVEYTVAKEFADSLGIPFLETSAKNASNVEQAFLTMARQIKERMGTTTANNTKPSVHVGQGQGVGNSSSSSCC

SEQ ID NO: 7276 - protein, 547 aa, Xylella fastidiosa 9a5c
MAAKEIIFSEKARSRMVHGVNLLANAVKATLGPKGRHVVLDKSFGSPIITKDGVSVAKEIELADKFENMGAQMLKEVASKTNDHAGDGTTTATVLAQALIREGCKAVAAGMNPMDLKRGIDKAVIAAVTELKKISKPTSDDKAIAQVATISANSDESIGNIIAEAMKKVGKEGVITIEEGTTLENELDVVEGMQFDRGYSSPYFINNQQSQIVELDNPYILLHDKKISSVRDLLTVLDAVAKESKPLLIVAEEVEGEALATLVVNNIRGIIKVCAVKAPGFGDRRKAMLEDMAVLTGGTVISEEVGLSLEKATTSHLGKAKKVRVSKENTTIIDGIGDNDAINGRVKQIKTQIEETTSDYDREKLQERVAKLAGGVAVIKVGAATEVEMKEKKARVDDALLATRAAVEEGVIPGGGVALIRAITAISNLKGANEDQTHGIQIALRAMEAPLREIVANAGEEPSVILNKVKEGKDNFGYNAATGEFGDMVNLGILDPTKVTRSALQNAASIAGLMITTEAMVAEAPKKDEPTPPAAGGGMGGMGGMDF

SEQ ID NO: 7277 - protein, 217 aa, Meliosma dilleniifolia
KRRNGLLEKAYELSVLCDAEIGLIVFSSRGRLYEYSNNSIKSTIERYKKACTNSSSTTTIVETSAQYYQQEAVKLRQQIQILQNANRHLMGESLGSLSIKELKQLENRLERGITRIRSKKYELLFAEIEYMQKREVELQNDNLYLRTKISENERPQQTMMVPEPGFDAIQTYNSQKQDFEQEIQTYDARNNYLQATNMLEGGPTTYSHPDQTALHLG

SEQ ID NO: 7278 - protein, 173 aa, Pseudomonas syringae pv. tomato str. DC3000
MSLHELNTLPGVTANPEAPTRQFVFNHTMLRVKDITQSLDFYTRVLGFSLVEKRDFPEAEFSLYFLALVDKAQIPDDDAARNEWMKSIPGILELTHNHGTESDANASYHNGNSDPRGFGHICVSVPDVKVACERFEALGVDFQKRLSDGRMNSLAFIKDPDGYWVEIIQPTPL

SEQ ID NO: 7279 - protein, 204 aa, Berberis gilgiana
KRRNGLLKKAYELSVLCDAEVALIVFSARGRLYEYANNSVKTTIERYKKACSDSTNTGSVSEANAQFYQQEATRMRQQIGNLQNANRHLLGQDLSSVSVKDLKQMETRLEKGISRIRSKKNELLFAEIEYMQKREIDLQNDNMYLRAKIAENERAQQQMNLMPGNEYETITSAPYDSRNFLQVNLLPESNNQYSRSDQTALQLG

SEQ ID NO: 7280 - protein, 202 aa, Akebia quinata
RRNGLLKKAYELSVLCDAEVALVVFSNRGRLYEYANNSVKTTIERYKKACIDSSNSGSVSEANAQFYQQESLKLRQQIGNLQNLNRHLMGEALGSMSIKELKQLETRIEKGISRIRSKKNELLFAEIEYMQKREIDLQNDNMYLRAKIAENERAGQHMSLMPGNEYEVMSSAPFDSRNFLQVNLLEPNNHYSHTDQIALQLG

SEQ ID NO: 7281 - protein, 185 aa, Arabidopsis thaliana
MASEARESPANNPGLSTNRDEATKGYIMQQTMFRIKDPKASLDFYSRVLGMSLLKRLDFSEMKFSLYFLGYEDTTTAPTDPTERTVWTFGQPATIELTHNWGTESDPEFKGYHNGNSEPRGFGHIGVTVDDVHKACERFEELGVEFAKKPNDGKMKNIAFIKDPDGYWIEIFDLKTIGTTTVNAA

SEQ ID NO: 7282 - protein, 690 aa, Caulobacter crescentus CB15
MRRTTAHRAFRRTMNLIAGGKPLASALKAIVQAVEAEDPTILCGILLLDADRRRLLMGAAPSLPTFYNQAIEGVEIGPSVGSCGTAAYLGRRVMVDDIQSSPLWVGYQELAAQAGLAACWSEPIKTSDGAVAGTFAIYHREVSKPNKEDIAFIEAAAQLAAFAIDRRRAEEELAASEARARLLAEQALETSRNLSNFFDVSADLLSISNMQGRFVKVNRAWETALGYPIEALEGVPFLPLLHPEDQQSTRVQINRIEVDDEVNGFVNRYRRADGSYCQLEWRARRCDDLVFGVARDVTERLRIQAEMAEARDAAEAANRAKNDFLANMSHEIRTPLNGVIALAAALDETPLTSKQAEMVAMIRRSGETLERLVSDILDVSKIEAGQMTLQPQAFDLGALVDGLLDVTRLRAKEKGVAVRLERSPTAAGGFLGDSVRIGQVLSNLFSNAVKFTDQGEVIVRVDVEEAGNGQAARLFVEVEDTGVGFDAEKAEMIFQRFNQADSTITRRFGGSGLGLSISKTLVEMMGGEITAQSSPGAGSLFRVTLPLSRTQMGPDAEIDAPRSAAPGEGLKVLLAEDHPINQRVVQLILEPCGAAVTVVENGAQAVEAMASGAFDVVLMDMQMPVMDGLAATRAIRAREGEGQRTPIIMLSANAMDVHRREALQAGADLHVPKPITIAALLDSIGQVMAR

SEQ ID NO: 7283 - protein, 507 aa, Symbiobacterium thermophilum IAM 14863
MLSAFSPPLPCDPARSHPTPEFPSSLQDYCEIRGIQSQPPARRDPTMDWLASLRSQIKPYRDRFPSHARLPRAGLPRAEILAEIAAMGAAESPAWRDGYASGAVYHGDEHHIAFLNEVYALQSQSNPLHPDLWPSTAKFEAEVVAMTAHMLGGDAAGGTVCGTVTSGGTESLLLAMKTYRDWARATKGITAPEAVVPVSAHAAFDKAAQYFGIKLVRTPLDADYRADVAAMREAITPNTVVVAGSAPGYPHGVVDPIPEIAALAAEHGIGCHVDACLGGFILPWAERLGYPVPPFDFRLEGVTSVSADTHKYGYGAKGTSVILYRRPDLLHYQYFIAADWPGGLYFSPTFAGSRPGALSATAWAAMLSLGEEGYLDATRRILQAADRLKAGVRAIPSLKILGDPLWVIAVASDELNIYQVMEEMAGRGWRLNGLHRPPAFHVALTLRHTEPGVVDRFLADLQDAVAQVRAHPEKATGMAPVYGMAAAAPPELVRQVLTGFIDLLYEV

SEQ ID NO: 7284 - protein, 374 aa, Colwellia psychrerythraea 34H
MTFSPLFTATELGPYTLKNRIVFPPLTRSRSSQPGNIPNQLMANYYSQRAGAGFMVTEGTQIEPRGQGYAWTPGIHSAEQVQGWKQVTQAVHDAGSIIFCQLWHVGRVSHTSLQPNQAAPVGPSALKADAVKVFIETAPEQGALADPSEPRALSTIEVEELVQMYKQAAVNAKEAGFDGVELHCANGYLVNQFISEHTNDRTDKYGGSLENRLRFLKEITQAVADVMGADKVGVRFAPLFESTDEVRVYLGLVESDPHATYIAAIKALNDIGIAYLSLAEADWDNAPDLPEDFYKAVRNTFDGLVMYAGKYTPEKALRILTEGNGDIFGFGRPFIANPDLPERIKNEWSLNDVDPTSMYGGTDKGYTDYPVYAL

SEQ ID NO: 7285 - protein, 492 aa, Arabidopsis thaliana
MDPYRVRPSSAHDSPFFTTNSGAPVWNNNSSLTVGTRGPILLEDYHLLEKLANFDRERIPERVVHARGASAKGFFEVTHDITQLTSADFLRGPGVQTPVIVRFSTVIHERGSPETLRDPRGFAVKFYTREGNFDLVGNNFPVFFVRDGMKFPDMVHALKPNPKSHIQENWRILDFFSHHPESLHMFSFLFDDLGIPQDYRHMEGAGVNTYMLINKAGKAHYVKFHWKPTCGIKCLSDEEAIRVGGANHSHATKDLYDSIAAGNYPQWNLFVQVMDPAHEDKFDFDPLDVTKIWPEDILPLQPVGRLVLNKNIDNFFNENEQIAFCPALVVPGIHYSDDKLLQTRIFSYADSQRHRLGPNYLQLPVNAPKCAHHNNHHDGFMNFMHRDEEVNYFPSRLDPVRHAEKYPTTPIVCSGNREKCFIRKENNFKQPGERYRSWDSDRQERFVKRFVEALSEPRVTHEIRSIWISYWSQADKSLGQKLATRLNVRPNF

SEQ ID NO: 7286 - protein, 273 aa, Arabidopsis thaliana
MALEAMNTPTSSFTRIETKEDLMNDAVFIEPWLKRKRSKRQRSHSPSSSSSSPPRSRPKSQNQDLTEEEYLALCLLMLAKDQPSQTRFHQQSQSLTPPPESKNLPYKCNVCEKAFPSYQALGGHKASHRIKPPTVISTTADDSTAPTISIVAGEKHPIAASGKIHECSICHKVFPTGQALGGHKRCHYEGNLGGGGGGGSKSISHSGSVSSTVSEERSHRGFIDLNLPALPELSLHHNPIVDEEILSPLTGKKPLLLTDHDQVIKKEDLSLKI

SEQ ID NO: 7287 - protein, 398 aa, Hordeum vulgare subsp. vulgare
VQTPVIVRFSTVVHERGSPETLRDPRGFAVKFYTREGNFDLVGNNMPVFFIRDGMKFPDMVHAFKPSPKTNMQENWRVVDFFSHHPESLHMFTFLFDDVGIPLNYRHMDGFGVNTYTLISRDGKAHLVKFHWKPTCGVKCLLDDEAVTVGGTCHTHATKDLTDSIAAGNYPEWKLFIQTIDADHEDRFDFDPLDVTKTWPEDIIPLQPVGRMVLNKNIDNFFAENEQLAFCPAVTVPGIHYSDDKLLQTRIFSYADTQRHRLGPNYLMLPVNAPKCAHHNNHHDGLMNFIHRDEEVNYFPSRFDPTRHAEKYPMPPRVLSGCREKCIIDKENNFKQAGERYRSFDPARQDRFLQRWVDALTDARVTHEIQSIWVSYWSQCDASLGQKLASRLKIKPNM

SEQ ID NO: 7288 - protein, 664 aa, Clostridium acetobutylicum ATCC 824
MNKYKKLFEPIKIGKCEIKNRFALAPMGPLGLADSEGGFNQRGIDYYTERAKGGTGLIITGVTFVDNEVEEHGMPNCPCPTHNPVQFVRTGREMTERIHAYNSKVFLQMSGGFGRVTIPTNLGEFPPVAPSPIQHRWLDKTCRELTVDEIKSIVKKFGEGAFNAKRAGFDGVQIHAVHEGYLIDQFAISLFNHRTDEYGGSLENRLRFAREIVEEIKNRCGEDFPVTLRYSPKSFIKDLRDGALPGEEFVEKGRDLDEGVEAAKLLVSYGYDALDTDVGSYDSWWWSHPPMYQEKGLYRKYAKLMKDTVDVPVICAGRMDDPDMALEAVENGTCDVISLGRPLLADPDYVNKLRSNKCKSIRPCISCQEGCMGRVQHYSMLNCAVNPQACKERANSLTPIIKSKKVLIVGGGVAGCEAARVLALRGHEPVLYEKSNRLGGNLIPGGAPSFKEDDIALADWYTNTLKELNVEVNLNSEVTKEQILNSKFDTVIVATGSTPKVFPLGDDEKVFTAAEVLLGQKDPGETTVVVGGGLVGCELALDLAKKGKKVTIVEALNKILALNGPLCSANSEMLQKLIPFNGIDVKANSKVKGYKNGLLKMETENGIEELPCDSVILSVGYKEENSLYKELEFEIPEIYLLGDARKVSNIMYGIWDAFEVANHI

SEQ ID NO: 7289 - protein, 343 aa, Oryza sativa (japonica cultivar-group)
MDHAAEAQRTDLMTITRHVLNEQGRHPESRGDFTILLSHIVLGCKFVASAVNKAGLAKLIGLAGDTNVAVQGEEQKKLDVLSNEVFVKALVSSGRTCVLVSEENEEAIIVDAPLRGKYCVCFDPLDGSSNIDCGVSIGTIFGIYMIKDKDNVTLDDVLQPGTDMLAAGYCMYGSSCTLVLSTGNGVNGFTLDPSLGEFILTHPNIKIPNRGKIYSVNEGNAKNWDAPTAKFVEKCKFPQDGSPSKSLRYIGSMVADVHRTLLYGGIFLYPADQKSPNGKLRVLYEVFPMSFLMEQAGGQAFTGKQRALELVPRKIHDRSPIFLGSYDDVEDIKALYASESIIG

SEQ ID NO: 7290 - protein, 204 aa, Helleborus orientalis
KRRNGLLKKAYELSVLCDAEVALIVFSTRGRLYEYSNNSVKKTIERYKKASTDSSGSGSVSEVNAQYYQQEASKLRNQIATLQNSNRNLLGEQLSNLNIRELKQIEKKIETGINKIQSKKNELLFAEIEYMQKREADLQNDNMYLRAKISENERTQQHMSLMPGTNDYEVISSGAFDSRNFLQVNLLGSNDTYSRSDQTALQLG

SEQ ID NO: 7291 - protein, 216 aa, Helleborus orientalis
IENTTNRQVTFCKHRNGLLKKAYELSVLCDAEVALIVFSSRGRLYEYSNNSVKKTIERYKKASTDSSNSGSASEANAQYYQQEAAKLRNQIAALQNSNRNLLGEQLSNLSIRELKQIEKKIETGINKIRSKKNELLFAEIEYMQKREVDLQNDNMFLRAKISENERTQQHMSLMPGTNNYEVISSGPFDSRNFLQVNLLESNNNYSRSDQTALQLG

SEQ ID NO: 7292 - protein, 149 aa, Rhodopseudomonas palustris CGA009
MRYLHTMLRVRNLDTALEFFVGALGLKEVRRIDNDKGKFTLLFLCAPEDEELVKQSKGRPAPTIELTHNWDEESYGEDRFFGHLAFEVDDIYATCERLMKLGITINRPPRDGQMAFVRSPDLQSVELLQKGEALPPQEPWASMPNTGHW

SEQ ID NO: 7293 - protein, 214 aa, Aquilegia alpina
IENTTNRQVTFCKRRNGLLKKAYELSVLCEAEVALIVFSNRGRLYEYANNSVRKTIDRYKKTCGEGSSTLTVSEANLLFYQQESSKMKQQIEILQNSNRHLMGEALSCLSIKELKQLESRLEKGISRIRSKKNEMLLAEIEFMQKREIELHNDNIYLREQITANERAQQHMNSLPGNVYEAITSAPYNSRDFLQVNLRESKPNQYCDSTALQLC

SEQ ID NO: 7294 - protein, 355 aa, Geobacter metallireducens GS-15
MSALFTPFTLRSVTFRNRIFVSPMCQYSSLDGMPTDWHLVHLGSRAVGGAGLVMVEATAVSPEGRISPDDSGIWDDRHGEGFAPITRFIAEQGAVPGIQLAHAGRKASTDLPWRGGLPLGPEARGWQPVAPSPRPFAADYPVPRELTVEEMDDVVSQFRDGAQRALAAGFQVVEIHMAHGYLLHEFLSPLSNRRTDDFGGSLENRIRLPLRVTRAVREVWPADLPLFVRISATDWVEGGWDLDQSVVLARKLREAGVDLVDCSAGFLTPDAVIPFGSGYQTPFATAIRREAGIPTGTVGFITDPAQAEQIVATGLADAVLLAREMLRDPYWPLHAARSLGVNVPWPPQYERAKLP

SEQ ID NO: 7295 - protein, 203 aa, Aquilegia alpina
KRRNGLLKKAYELSVLCEAEVALIVFSSRGRLYEYSNNSVKKTIERYKKASTDSNNSGSVSEANAQFYQQEATKLRNQIASLQNHNRNLLGESLSNLNIRELKQIEKKIEGGISKIRAKKNELLFAEIEYMQKRELDLQTDNKYLRAMIAANERAPEHMNLMPANEYHALSSAPFDSRNFMPANLLDHNNNYSRSDQTTLQLG

SEQ ID NO: 7296 - protein, 725 aa, Aspergillus oryzae
MRALSLASLIGIASAACPYMTGELERRDTGTDDATAATEEFLSQYYMADNDTFLTSDVGGPIEDQNSLQVGDRGPTLLEDFIFRQKIQRFDHERVPERAVHARGVGAHGVFTSYGDYSNITAASFLGAEGKETPVFVRFSTVAGSRGSSDLARDVHGFATRFYTDEGNFDIVGNNIPVFFIQDAILFPDLIHAVKPRGDNEIPQAATAHDSAWDFFSQQPSSLHTLLWAMSGHGIPRSLRHVDGFGIHTFRFVTDNGDSKLVKFHWKSLQGKASMVWEEAQQVSGKNPDFMRQDLFEAIEAGRYPEWELGVQIMDEEDQLKFGFDLFDPTKIVPEEYVPITKLGKMTLNRNPRNYFAETEQVMFQPGHIVRGVDFTEDPLLQGRLFSYLDTQLNRHGGPNFEQLPINQPRVPVHNNNRDGAGQMFIPLNPNAYSPNTLNKGSPKQANQTVGKGFFTAPGRESTGRFTRAVSPSFEDVWSQPRLFYNSLTPAEQQFVVDAIRFENSNVKSSVVRNNVIIQLNRVSNDLARRVARAIGVEEPEADPTYYHNNKTTDVGTFGQKLKKLDGLKVGFLASVETPASIEAASELSKQLSEDGVDVVVVAERLSDGVDQTYSGSDAIQFDAVIVAPGAEGLFSTFSFTAPSNATSSSTLFPAGRPLQIVIDGFRFGKPVGAVGSAATALKNAGIQTSRDGVYVDKSVTSGFVDGIKDGLRTFKFLDRFKLDH

SEQ ID NO: 7297 - protein, 203 aa, Clematis integrifolia
KRRNGLLKKAYELSVLCDAEVALIVFSNRGRLYEYANNSVRKTIDRYKKTCSDPQTALTVSEANTMFYQQETTKMKQQIEILQNSNRHLMGEALSCLSIKELKQLESRLEKGLGRIRSKKNEMLLSEIEYMQKREIDLHNDNLYLRAKISDNEKAQHNMNVLPGNVYEAMTSAPYDARNFLQVNLPDTKEHPYCSGSTALQLC

SEQ ID NO: 7298 - protein, 478 aa, Mycoplasma mycoides subsp. mycoides SC
MMLIFMELIFYIKRIYMFKFKKDFWWGAASSGCQTESDKDKPNLNIMDYWYKQTPTDFYDNKGPNITCDTYSNYKTDVKLMSEIGLNSFRTSIQWTRLIKNLYTGEVDLKQVEFYRNYFLEIKKNNIKLIVNLFHFDTPIELENIGGWTNKKTVELYFLYAKQCFKYFSDLVDYWTTFNEPVVLVDGCYLNKWYYPKISNLKLVVQAAYNTILAHCKVANYFHSYFKNDQNKKISIILNLTPTIPKNSELKHLKAAKIRDELLNKSFLNAVIKGQFSTFLIKFLNENNLMPEYDQLELNEIKKTRIDFLAVNYYQPARVQAPLNNLTSSTELKLENWFLPYTNKNIRINPYRGWEIHPQTLYDIAIDIKNNYDNIPWIVSENGIGVSDENRFLNKQGYIDDQYRIDFIKEHLIYLYKAIEQGSNCFGYQMWTLIDNWSWANGFKNRYGFISLDTKTLKRTIKKSGYWIKQVIKDQGFE

SEQ ID NO: 7299 - protein, 394 aa, Hordeum vulgare subsp. vulgare
VRFSTVIHERGSPETIRDPRGFAVKFYTREGNWDLLGNNFPVFFIRDGIKFPDVIHAFKPNPKSHVQEYWRVFDFLSHHPESLHTFFFLFDDVGIPTDYRHMDGFGVNTYTFVSRAGKSHYVKFHWRPTCGVSCLMDDEATLVGGKNHSHATQDLYDSIDAGNFPEWKLFVQVIDPDEEDRFDFDPLDDTKTWPEDLVPLQPVGRLVLDRNVDNFFNENEQLAFGPGLVVPGIYYSDDKMLQCRVFAYADTQRYRLGPNYLMLPVNAPKCGFKNNHYDGAMNFMHRDEEVDYYPSRHAPLRHAEPASFPVPTRPVVGKREKTRIKKENDFVQPGERYRSWAPDRQDRFVRRFSDALAHPKVSHELRVIWIDFLSKCDKSCGMKVANRLNVKPSM

SEQ ID NO: 7300 - protein, 405 aa, Arabidopsis thaliana
MGKECYYLSWILKFHLLLVLIQLVDSGSTIRFLPGFQGPLPFELETGISDLFELQTTTKNKNAGPIAFKAEEYNGSIPSLVSTTYAWTKVASILYLDQPVGTGFSYSRNPLADIPSDTGVAKPVNEFLHKWLDKHPEFLSNPLYVAGNSYSGIVIPTIVQEISNGNHLDSKPQINLQGFVLGNPATDTDIDLNSRIPFAHGKALISDEHYESLKRSCQGNYISVNPRNTKCLKLLEDFKKCVSGISEEYILKPDCMWLYSCMANLHSLSEYWANEKSVRKALLVNEGTVRKWIRCNTEIAYNKDIRSSVPYHKYISIEGYRSLVFSGDHDMLVPFLGTQAWIRSLNYSIVDDWRPWMVQNQVAGYTRTYANKMTFATVKGGGHTSEYKPVETYIMIKRWLSGQPL

SEQ ID NO: 7301 - protein, 505 aa, Helicobacter pylori J99
MVNKDVKQTTAFGAPVWDDNNVITAGPRGPVLLQSTWFLEKLAAFDRERIPERVVHAKGSGAYGTFTVTKDITKYTKAKIFSKVGKKTECFFRFSTVAGEKGSADAVRDPRGFAMKYYTEEGNWDLVGNNTPVFFIRDAIKFPDFIHTQKRDPQTNLPNPDMVWDFWSNVPESLYQVTWVMSDRGIPKSFRHMDGFGSHTFSLINAKGERFWVKFHFETMQGVKHLTNEEAAEVRKYDPDSNQRDLFDAIAGGDFPKWKMSIQVMPEEDAKKYRFHPFDVTKIWYLQDYPLMEVGIVELNKNPENYFAEVEQAAFTPANVVPGIGYSPDRMLQGRLFSYGDTHRYRLGVNYPQIPVNRPRCPFHSSSRDGYMQNGYYGSLQNYTPSSLPGYKEDKSARDPKFNLAHIEKEFEVWNWDYRAEDSDYYTQPGDYYRSLPADEKERLYDTIGGSLAHVTHKEIVDKQLEHFKKADPKYAEGVKKALEKHQKMMKDMHAKDMHHMKKKK

SEQ ID NO: 7302 - protein, 440 aa, Arabidopsis thaliana
MTLCSLSFGVKSLRYIGVGEEDEDQMFYYFIKSESNPKTDPLLLWLSGGPGCSSFTGLIYENGPLGFKVEAYNGSIPTLVSTTYSWTKVANIIYLDQPVGTGFSYSRNPLADIPSDTGSAKRVDEFLRKWLTKHPEYFSNPFYAGGNSYSGKMVPVIVQEISNGNCIYGKPQIRLQGYVLGSPVTDYDLDRNSRIQFAHGMALISNELYESMKRTCGGNYIFVDPLNTECLELIKDYDNCVSGIYENLILVPKCDLTSPDCHVSILVDFALATKLNHKRRIFTKLLSQSYRSMLSDYWANNESVRRALKVVEGTTGRWERCKWTLQNNKDIKSSIPYHKKNSIQGYRSLIFSGDHDMLTPYVGTQDWIRSLNYSIIDKWRPWMILDQVAGYTTTYANKMTFATVKVTPISTFSIDKNAKLFYITLLNRFVGLICRVAGTR

SEQ ID NO: 7303 - protein, 441 aa, Arabidopsis thaliana
MGSWIPKLLLLQLVLLLTKHADSSSIIKYLPGFEGPLPFELETGYIGVGDEDEDQMFYYFIKSESNPEEDPLLVWLSGGPGCSSFTGLVYENGPLGFKVEAYNGSIPTLVSTTYSWTKVANIIYLDQPVGAGFSYSRNPFADRPSDTGSAKLVNEFVRKWLAKHPDYFSNPFYVTGNSYSGKVIPAIVQEISNGNYICCKPQINLQGYVIGNPVAYYDHDKDSRIPFAHGVALISDELFESLKRSCGGSYSIVDPLNTECLKLIKDYHKCVSGIYQELILKPKCETTSPDCYTYRYLLSIYWANNEIVRRALKVVEGSKGKWERCDLSVRSNQDIKSSIPYHMNNSIKGYRSLVISGDHDMTIPFLGTQAWIRSLNYSITEKWRPWMILDQVAGYTKTYANKMTLATVKVCSFIHILIFFVNIKIESCFTSVVIGLWVWLL

SEQ ID NO: 7304 - protein, 507 aa, Arabidopsis thaliana
TTYHGTTCHSALSFSFLLPLSLTKTLVSFTRRRFSRHRNLQIRLSLHYDPCPVTSTPVIPPIRRHLAFASTKPPFHPSDDYHRFNPSSLSNNNDRSFVHGCGVVDREEDAVVVRSPSRKRKATMDMVVAPSNNGFTSSGFTNIPSSPCQTPRKGGRVNIKSKAKGNKSTPQTPISTNAGSPITLTPSGSCRYDSSLGLLTKKFVNLIKQAKDGMLDLNKAAETLEVQKRRIYDITNVLEGIDLIEKPFKNRILWKGVDACPGDEDADVSVLQAEIENLALEEQALDNQIRQTEERLRDLSENEKNQKWLFVTEEDIKSLPGFQNQTLIAVKAPHGTTLEVPDPDEAADHPQRRYRIILRSTMGPIDVYLVSEFEGKFEDTNGSGAAPPACLPIASSSGSTGHHDIEALTVDNPETAIVSHDHPHPQPGDTSDLNYLQEQVGGMLKITPSDVENDESDYWLLSNAEISMTDIWKTDSGIDWDYGIADVSTPPPGMGEIAPTAVDSTPR

SEQ ID NO: 7305 - protein, 479 aa, Vibrio fischeri ES114
MDYKHNLQCVWFRHDLRTIDNPALQAAVDNQQPTFALFIYSESQWKKHNKAPIQIDLIKRRLVELKNELEQLNIPLIVISSPLFSEIPAKITALFNELSVNALFANKEYEHDERLRDTQVYESLLNTNCYFFDAKCILPVGTIINRTQQPYKVFTPFKKAWKASFYQQQPHITKTGKSVLCDPKLIKKLSLNNDDSFVFSSSNESGSWPVSTKAIIDILRQFCRQKVSQYHNNRDYPEIQGTSQLSPYLAIGAISAKQCALRLHLEANYELNQGEDIWLDELIWREFYTHLLHFYPNLSKNQAFLSYDKYIEWDNNLDHFERWCKGETGFPIVDAAMKQLNTTGWMHNRLRMITASFLVKDLHIDWRWGEQYFMSKLIDGDFASNNGGWQWCASVGCDSSPYFRIFNPITQGKKFDADCTFIKHWLPELKALSNKEIHHPNPAPLLKSDNYPDQIVDHAQQRIKVIEVYKQAKQLDIAS

SEQ ID NO: 7306 - protein, 381 aa, Streptococcus pyogenes M49 591
  misc_feature (81)..(81): Xaa can be any naturally occurring amino acid
MYGDLMTCFEQLLTQLKDWTDVYFNYDESGYGRLRDQKAAQFFKKNGIAVHTYQDHYLHGSQEIINQSGQPYKVFTPYYRXWQNYPKETPIKVELSQGRWLNLETPDDVLRTVESFKDEKYQDVATFDEASKQLNRFIQDQLAAYHANRDFPAQLGTSRLSPFLRIGAIGIRTVYHAVRQAPNSLGQATFLKELAWRDFYNMVYVAYPDQKTQPIQKAFSQIEWVNNPDWFQLWKEGKTGYPIVDAAMLQLQKTGWMHNRLRMIVASFLTKDLLCDWRLGEQYFQQQLIDYDAASNIGGWQWAASTGTDAVPYFRIFNPVTQGKRFDPKGEFIKAYLPQLEHVPEKYLHEPWKMPKNLQESVSCIIGTDYAQPIVDHAKQR

SEQ ID NO: 7307 - protein, 540 aa, Streptococcus pneumoniae
MSKEIKFSSDARSAMVRGVDILADTVKVTLGPKDRNVVLEKSFGSPLITNDGVTIAKEIELEDHFENMGAKLVSEIASKTNDIAGDGTTTATVLTQAIVREGIKNVTAGANPIGIRRGIETAVAAAVEALKNNAIPVANKEAISQVAAVSSRSEKVGEYISEAMEKVGKDGVITIEESRGMETELEVVEGMQFDRGYLSQYMVTDSEKMVADLENPYILITDKKISNIQEILPLLESILQSNRPLLIIADDVDGEALPTLVLNKIRGTFNVVAVKAPGFGDRRKAMLEDIAILTGGTVITEDLGLELKDATIEALGQAARVTVDKDSTVIVEGAGNPEAISHRVAVIKSQIETTTSEFDREKLQERLAKLSGGVAVIKVGAATETELKEMKLRIEDALNATRAAVEEGIVAGGGTALANVIPAEATLELTGDEATGRNIVLRALEEPVRQIAHNAGFEGSIVIDRLKNAELGIGFNAATGEWVNMIDQGIIDPVKVSRSALQNAASVASLILTTEAVVANKPEPVAPAPAMDPSMMGGMM

SEQ ID NO: 7308 - protein, 340 aa, Exiguobacterium sp. 255-15
MKTKLFEAIQIGGLQFRNRVIMAPMCMYSAKEDGLVTNWHVTHYASRAVGGVGGVILEATAVTPDGRISAGDLGVWSDDHIDGLRRIADQVKAAGAKAGIQLAHAGRKSTTAKPPVAPSAIGFDDSYDHPHELTVEEIDVIKQQFVEAALRVEQAGYDFIELHGAHGYLINTFLSPLSNKRQDQYGGSMENRMRFLLEIIDAIQEKSDLSLWVRISAADHAPGGMTAADYIPLAEELLKRNIDLLDCSSGAVVANAVPEVYPGYQVPYAAEIKQATGIKTGAVGLITTATLAEEIIRSERADVILLARELLRQPYWVYHAAAELKDEVSLPKQYERAPIR

SEQ ID NO: 7309 - protein, 550 aa, Cytophaga hutchinsonii
MNIKRWGVITAVAIGSVALLSAFKQTDKYFEIAKNMELFSAVYKEVNLLYVDEVNPSQTMTTGIDAMLESLDPYTNYIPEDKIEDFRTQMTGQYGGIGAVIGERKDKIIILMPYEGFPAQKAGLQIGDEILSVDGIVTTSKNSGDVSKLLRGQADTPLKIKVKRFNTPEPLEFTLVRQKIKISNVPYFGMVNTNTGYIKLSDFTQAASIEVKKALTDLKAKGATQIIFDLRGNPGGLLNEAVNISNIFIPKDKLVVSTKGKVSEWNTKYITELVPDDLNIPIAVLVSGRSASASEIVAGVIQDYDRGVIIGQRSYGKGLVQTTRELPYNSQIKVTTAKYYTPSGRCIQAIDYAHRAADGSVSKFADSLHVAFKTTNGRTVYDGGGVTPDITVVQDSISPILVALVSKSLLFDYATEYRSKHESIGDARTFNLSDRDYQDFVTWLKDKDYSYTTKVEKTLDEMTKQSKQEKYFDAMKDQLDQMKKVIAKDKENDLIKFQSQIMEYLEEEIASRYYLQKGIIESSFDSDKDIQSALEVLNNKTKYNSILSGK

SEQ ID NO: 7310 - protein, 1328 aa, Alternaria brassicicola
MAAETYSSVSAIIRNLARQHDPTRDPSFSAQVSANGAKTAVNAIALPGPESDEKTQLQQELSALCSRIDFLEHKSNHAANQQGQFPLTPAQEPSDEGALYTPAGVFRGNNGPPAQGRRGSNKERAIWVSNWLAAKESNGDPEQPAAALTEEQLNYLRVHLNQQADQIRNQREHIDNLSQEVNKQLTTQSMVFEHGIEDIGALKRELGKHQQANLAFQKALREIGAIVTAVAMGDLSKKVLIHAKEMDPEITLFKRTINTMVDQLQEFASQVTFLAREVGTEGRLGGQANLPGVAGIWAELTDINGMAKNLTDQVREIAVVTTAVAMGDLSRKIERPARGEILQLQQTINSMVDQLQSFATQVTKVARDVGTEGKLGGQAEIAGVKGMWNELTVNVNAMAQNLTTQVRDIAQVTTAVAQGNLTRKVEAECKGEILELKNTINRMVDQLQQFAHEVTKIAREVGSEGRLGGQATVHGVEGTWKDLTENVNGMAMNLTTQVREIAEVTTAVARGDLSRKVKAEVQGEILSLKITINTMVDRLNTFAQEVSKVAREVGTDGILGGQAQVDNVEGKWKDLTNNVNTMAQNLTLQVRSISEVTQAIAKGDMSRRVHVDAEGEIRLLKDTVNDMVMRLDEWSLAVKRVARDVGVDGKMGGQADVRDIDGRWKEITTDVNTMAQNLTSQVRAFGDITNAAMEGKFTQITVEASGEMDELKRKINQMVSSLRESIQRNTAAREAAELANKTKSEFLANMSHEIRTPMNGIIGMTQLTLDTDLTHAQREMLTIVHNLAGQLLTIIDDILDISKIEANRMVMEEIPFSMRGTIFNALKSSASRANERKLNLAYDVSYKVPDYVVGDSFRLRQIILNLVGNAIKLTEPGEVKVAISMAQEQECDPDHYVFQFAVSDTGIGIRGDKLNLIFDTFQQADGSTTRKFGGTGLGLSISKRLVTLMGGRMWVESDAGKGSVFYFTYKVRLGKPAIQAIQPQLVAYKQHTVLFVDQGNTGFSDEITEHLKTLDLVPMVVHSVEEVPETTKRTDMPYDCVIVDNDKTARELRIAERFKYIPLVMLTPHVCISLRSALENGISSYMTTPCLPIDLGNALIPALDGRAAPLVSDHSKSFQILLAEDNAVNQKLAVRILEKYHHRVTVANNGLEAFEHIQKKRYDCVLMDVQMPVMGGFEATAKIREWERDNGIPSTPVIALTAHAMVGDREKCLAAQMDDYLSKPLRQNQLIQTILRCATVGSTMYDHSSEPRYTASSHLPNITLPGKGNDNGGASSSSGGLPSPGKKRPQLEARGFTERGGAQSPNLLAVDQTDNGSVERLLLRSHSS

SEQ ID NO: 7311 - protein, 267 aa, Arabidopsis thaliana
  misc_feature (233)..(233): Xaa can be any naturally occurring amino acid
  misc_feature (243)..(243): Xaa can be any naturally occurring amino acid
FLRMDGSGTGSRSGVESILPNYKLGRTLGIGSFGRVKIAEHALTGHKVAIKILNRRKIKNMEMEEKVRREIKILRLFMHPHIIRLYEVIETPTDIYLVMEYVNSGELFDYIVEKGRLQEDEARNFFQQIISGVEYCHRNMVVHRDLKPEDLLLDSKCDVKIADFGLSNIMRDGHFLKTSCGSPNYAAPEVISGKLYAGPEVDVWSCGVILYALLCGTLPFDDENIPNLFKKDXKGGIYTLPSXILSPGARDFYPPRMLFSLTPMKTS

SEQ ID NO: 7312 - protein, 206 aa, Pennisetum ciliare
MASRRRTLLKVIILGDSGVGKTSLMNQYVNKKFSNQYKATIGADFLTKEVQFEDRLFTLQIWDTAGQERFQSLGVAFYRGADCCVLVYDVNSMKSFDNLNNWREEFLIQASPSDPDNFPFVLLGNKVDVDGGNSRVVSEKKAKAWCASKGNIPYFETSAKEGTNVEDAFQCIVKNALKNEPEEELYVPDTVDVVGGNRAQRSSGCC

SEQ ID NO: 7313 - protein, 188 aa, Legionella pneumophila subsp. pneumophila str. Philadelphia 1
MEVTTMDIKKLAPWNWFKEEEAQNKSVPLSTTGQSCISPLSQLHQEIDRIFDNVLRSVGISNLDIEKTPSNSAQNLLLKPCIDIAATDKEYTITVEVPGVEEDHIKLELSDNTLIIKGEKKHESEKKDKDIYRIERAYGSFQRVLSLPEDANQEDIKAQIKNGVLTITMPRKEVSKPKGKLIDIKKAS

SEQ ID NO: 7314 - protein, 731 aa, Bordetella bronchiseptica RB50
MMRDSPSIQGTLDAATQHALLAGRHADPFSVLGPHQAGAHTVVRVLAPGARTVMAVLPGGQRTPLLPMQPGLFENTVPGLQPGAPAAYRLCIEWEGGIQHTADPYAFGPVLDAAQLDHCAAGGWRYLAGLLGAHAASVDGCAGTRFALWAPNARRVAVVGDFNGWDGRRHAMRLRYPAGVWELFLPDVGPGARYKFQVLGADGHTVLKADPLARQAEAPPATASIVPDERPFAWTDEAWMEQRAARQRCDAPISIYEVHAGSWFDDAGAPRWQSLAARLPEYARSLGFTHIELLPVMAHPFGGSWGYQPLGLFAPAAAHGAPADFAHFVDRCHEAGLGVILDWVPAHFPDDAHGLARLDGTPLYEHADPREGRHPDWNTLIYNYGRREVRAFLIASAIHWLRHYHVDGLRVDAVASMLYRDYSRPAGQWIPNRHGGRENLEAIDFLRELNAAVGVQCPGAITVAEESTAWPGVTAPVANGGLGFDYKWNMGWMHDTLRYMRRDPIHRRHHHHDLSFGMVYAYAERFVLPLSHDEVVHGKGSLLGKMPGERAAQLAQLRLYYAFMWAHPGKKLLFMGGEFGQQGEWNHDAMLQWSLLDDPAHRGLQRLIADLNHVYATLPELHCRDADPSGFAWIVGDDADNSVLAFARVDASHCLVAVCNFTPVPRPGYRFGVPHAGDWRVRVDTGATRYGGAGGGPPICLRSEPIPAHGHPQSLVLDLPGFTALYLRHSE

SEQ ID NO: 7315 - protein, 203 aa, Clematis integrifolia
KRRNGLLKKAYELSVLCDAEVALIVFSSRGRLYEYSNNSVRKTIERYKKASSDTSNTGSVSEANAQFYQNEAGKLRNQIASLQNNNKNLLGESLSNLSIRELKQLEKKIEGGITKIRSKKNELLFAEIEYMQKREIDLQNDNLYLRAKIADNERTQQQMNLMPGNEYEVISSAPFDSRNFLPVNLLEPNNSYSHCDQTTLQLG

SEQ ID NO: 7316 - protein, 584 aa, Bordetella bronchiseptica RB50
MNEPAPHGATVCAPGKIRFRLWAPSAPPALALEIEGRAPIALRPGPDGYAQAIVDGAPGLRYRYRLAADCAVPDPASRLQDGDVHGHSVVVGPDRYPWRHTGWRGRPWQDSVIYEAHAGLCGGYAGLRRRLPEVARLGVTLLELMPIADFPGPRNWGYDGVLPYAPDTAYGTPDELKALIDAAHGLQMGVMLDVVYNHFGPDGNYLHRYAADFFDARADTPWGAAIDYRQQAVQRYFIDNALYWLREYRFDGLRLDAVHAMGRTDWLAGLAREARAACPDRRVHLVVENDANQASLLAQGFDAQWNDDAHHVLHHLLTGERQGYYADYAQAPAALLARALGEGYVYQGQAAPTRGGRARGEPSAHLPPWAFVLFLHNHDQVGNRADGLRLTSLLAPGSPALRAAIALQLLAPHIPLLFMGEEYGSTAPFFYFTSHGPELAAAVRAGRAREFAASMHDCDPPPDPNDPDTYRRSCPWPPPGAERQAWFEYYRELLRLRARLLGGRLTGARADGAAALGPAAVRAAWRLGDGARLTLYANLLPGSVIVPAPPAGQLAYATLAGAGQDLAAGVLRGGCALALWEPAP

SEQ ID NO: 7317 - protein, 216 aa, Ranunculus ficaria
IENTTNRQVTFCKRRNGLLKKAYELSVLCEAEVALIVFSNRGRLYEYSNNSVKKTIERYKKHSTDSSNTGSVSEANAQFYQQEANKLRNQIATLQNSNKNLLGESLSNLSVRELKAIEKKIEGGIAKIRSKKNELLFAEIEYMQKREIDLQNDNMFLRAKIAENERTQQQHMSLMPVNDYEVISSAPYDSRNFLPVNLLDSNHNYSRNDQTTLQLG

SEQ ID NO: 7318 - protein, 203 aa, Ranunculus ficaria
KRRNGLLKKAYELSVLCEAEVALIVFSNRGRLYEYANNSVRKTIDRYKKQCSDASTALTVSEANSLFYQQESSKMKQQIDILQNSNRHLMGEALSCLSIKELKQLESRLEKGLSRIRSKKNEMLLAEIEYVQKREIDLHNDNVYLRQKISENERAQQHMNSLPGNAYEAMTSAPYDARNFLQVNLSDNKDNHYGSSSTALQLC

SEQ ID NO: 7319 - protein, 225 aa, Brassica napus
MALEYESLNENVKKCQYAVRGELYLRASELQKEGKKIIFTNVGNPHALGQKPLTFPRQVVALCQAPFLLDDPNVGMIFPADAIARAKHYLSLTSGGLGAYSDSRGLPGVRKEVAEFIQRRDGYPSDPELIFLTDGASKGVMQILNCVIRGERDGILVPVPQYPLYSATILLLGGSLVPYYLDESENWGLDVNNLRQSVAQARSQGISVRAMVIINPGNPTGQCLS

SEQ ID NO: 7320 - protein, 847 aa, Phaseolus vulgaris
MFNCLCLNPFISVSSTIACTIHTVRSRQHLAPQKSVDLAVGYRNPLGYGFGSGLRRSLHEMVSSRFKGVAVMTDDKSTISSTEEYLENIGIFSIDPSLKPYKDHFKYRLKRYVEQKKLIEEYEGGLEEFAKGYLKFGFNREEGGIVYREWAPAAQEAQIIGDFNGWDGSNHQMEKDQFGVWSIKIPDVDGNPAIPHSSRVKFRFRHGDGVWVDRIPAWIKYATVDPTRFAAPYDGVYWDPPLSERYQFKYPRPPKPKAPRIYEAHVGMSSSEPRINSYREFADEILPRIRANNYNTVQLMAGMEHSYYASFGYHVTNFYAVSSRSGTPEDLKYLIDKAHSLGLQVLMDVIHSHASNNITDGLNGFDVGQTSQDSYFHTGDRGYHKLWDSRLFNYANWEVLRFLLSNLRWWLEEFEFDGFRFDGITSMLYHHHGINIAFTGDYNEYFSEATDVDAVVYLMLANCLIHSILPDATVIAEDVSGMPGIGHQVSGGGIGFDYRLAMAIPDKWIDYLKNKNEYSWSMKEISWSLTNRRYTEKCVSYAESHDQAIVGDKTVAFLLMDEEMYSGMSCLVDASPIVERGIALQKMIHFITMALGGEGYLNFMGNEFGHPEWIDFPREGNGWSYEKCRRQWNLVDTDHLRYKFMNAFDRAMNLLDDKFSFLKSTKQIVSSAHDEDKVIVFERGDLIFVFNFHPENTYEGYKVGCDLPGKYRVALDSDAWKFGGHGRVGHGVDHFTSPEGIPGVPETNFNNRPNSFKVLSPARTCVVYYRVDENQEGSNDSLVGLEDTFAAADVAKIPDKSASIESEYSNNLDGVKETSTSAQISVESEVINLDKVGIVAASLDREI

SEQ ID NO: 7321 - protein, 200 aa, Saxifraga careyana
KRRNGLLKKAYELSVLCDAEVALIVFSTRGRLYEYANNNIRSTIERYKKANSDSLNTGDVVETNTQFYQHESVKLRQQIQMLQNSNRNIMGESLSSLTLKELKQLENRLERGITRIRSKKHEMLLAEIEYMQKREIDLENESIYLRAKIGEAESIEQANVAAANDLHAIQAYVAHNFFQPSLLDAEPSFGYPNKKSPRLG

SEQ ID NO: 7322 - protein, 687 aa, Burkholderia vietnamiensis G4
MRYPHLFKPMQLNQLTLRNRIVSTAHAEVYAEPGGLPGDRYIRYYEEKAKGGVGLAICGGSSPVSIDSPQGWWKSVNLSNDKIIDPLTRLADTMHKHGAKIMIQATHMGRRSSFHGEHWPHLMSPSGVREPVHRGNAKIIEIEEIRRIIGDFAAAAKRVKAAGMDGIEISAAHQHLIDQFWSKRSNHRTDEWGGSLENRLRFGIEVLTAVREAVGKDFCVGLRMCGDEFHEDGLDHEALKEIAQAMSETGLIDYLSVVGSGGDTHNTIANCMPPMALPPEPFVHLAAGIKSVVKIPVMHAQSIRDAGQAERLLANGMIDLVGMTRAQIADPHMVIKIRDGREDEIKQCVGANYCIDRQYNGLDVLCIQNAATSREATMPHIIEKSRGPKRKVVVVGAGPAGLEAARVAKLRGHDVVLFEKNAEVGGQVMIAAKAPQREQMSGIIRWFDMETKRLGVDRRLGVAADEKMIMAEKPDIVVLATGGSSFTWQVSAWGVAEGLAVSSWDILTGKVEPKQNVLLFDGVSTHAGAGVADFMASRGSKVEVVTPDVKVADDCGGTTFPIFYRRLYALGVIPTPNTMLDRVYEEDGKKIAVLRNEYTEELEERAVDQVVIENGSAPNDELYWKLKPESVNRGQIDPHTLFAAEPQPCLSEELGNGRFLLFRVGDCISMHNVHGAIYDSLRLVKDF

SEQ ID NO: 7323 - protein, 604 aa, Pseudomonas syringae pv. tomato str. DC3000
MPLRTDDNWRHGAVLLDPEHTRFALWAPDASYVSVELQDGQSLAMLPQPEGWFVLEARCKAGTRYRFKVDHTLEVPDPASRAQVDDVHSQSIVVDPQAYSWQNTAWNGRPWHEAVIYELHVGAMGGYAAVEKHLARLAALGITAIELMPLAQFPGDRNWGYDGVLHYAPQSSYGTPEQLKHLIDTAHGVGLMVILDVVYNHFGPDGNYLGSYAKEFFRSDLHTPWGDAIDFRRPQVRDFFVDNALMWLLEYRIDGLRMDAVHAIRDETFLPEFATRVRERIEPSRHVWLNLENEFNQASLLDKGFDAQWDDDGHNTLHVLLTGETDAYYSDFAKEPTHKLARLLGEGFVYQGEQTRHGHTRGEPSGHLAPSAFVLFLQNHDQIGNRALGERLPQLCSPDALRAATALLLLSPMIPLMFMGDEWAASEPFLFFTSHHGELADAVREGRRKEFADFAAFADPEKREHIPDPNDIKTFEASRPAFSATELQTEKGLEHRQWVDYYAQLLALRHQEIVPRLQGASFLNTEILGDKAVSARWTLGDGSVLRIDLNLSEQPVATTPAPHAREIFSSAAKSSELSPDAILNPYTAIVSLTASDVLEEQDEQ

SEQ ID NO: 7324 - protein, 212 aa, Saxifraga careyana
KRRNGLLKKAYELSVLCDAEVALIVFSTRGRLYEYSNNSVKQTIERYKKACSGPSNSGSVSEANAQSYQQEASKLHAQINNLQNTNRQMLGEALGSLSPRDLKNLENKVEKGISKIRSKKNELLFSEIEYMKKREIDLHNENQYIRAKIAETERAQQQMSLMPPGGGSTNYDQQLNMHPQQFDSRDFFQVNALQPNNHHYSRQHDQISLQLV

SEQ ID NO: 7325 - protein, 200 aa, Triticum aestivum
  misc_feature (180)..(180): Xaa can be any naturally occurring amino acid
HASEEHRSKSSQKSIDHPSASNTSQIVDSFHQHLESPPIRPTISLIRRSNVFDPFSLDFFDPFDGFPFGSGSNSSGSLVPRTSSDTAAFAGARIDWKETPEAHVFKADVPGLKKEEVKVEVEDGNILQISGERNKEQEEKTDTWHRVERSSGKFLRRFRLPENAKAEQVKASMENGVLTXVTVPKEEAKKPEVKSIQISG

SEQ ID NO: 7326 - protein, 318 aa, Triticum aestivum
PIISCNTWTKKKKKSLCKQAPPRTPPEFPGYRRPTRPGNLTHYPWRADEDRFKSWRQGMTGYPLVDAGMRELWATGWTHNRIRVIVSSFAVKFLQIPWTWGMKYFWDVLLDADIESDILGWQYISGSLPDGHELGRLDNPEVQGQKYDPDGEYVRTWIPELARMPGEWIHHPWDAPSSILEVAGVELGFNYPMPIVELHTARECLDDAISTMWQLDTAEKLAELDGEVVEDNLSHIKSFDVPKVVLKELSPHCDREVPTDDGRNLELQPKELKGTNKQTICVDVIKASKMEDTGSIANSPISRKRSSSGSVFNVPSYV

SEQ ID NO: 7327 - protein, 431 aa, Daucus carota
MKPPFVPSDDYYRFGESRGVADHEADVIIVKSTPSKRKPGNYNEVESSRLSMSPAYTNTVKSPNQTPVSGKGGRVYGRSNATKSLASVPQTPMSNAGSPSPLTPAGSCRYDSSLGLLTKKFINLIKQAEDGTLDLNNAAETLEVQKRRIYDITNVLEGIGLIEKKLKNRIHWKGIDASRPGEMEDDSNVLQAEVEKLSLEEKRLDDRIREMQEKLRDLSEDEANQKWLFVTEEDIKGLECFMNKTLIAIKAPHGTTLEVPDPDEVVDYPQRRYRIILRSTMGPIDVYLVSQFEEKFDEMNSVQPSMSLPLASSTGSNDNPAAETAIVGHGLENGTMTQDGHGVNSDLYTSEDISGGIMKILPSELDNDADYWLLTDPSISMTDMWKTDAGVEWDGASLLNEEFELPCISPRPQTPPSGVADVSTVANGTQR

SEQ ID NO: 7328 - protein, 331 aa, Oryza sativa (indica cultivar-group)
MEANLPPGFRFHPRDEELIVDYLYHKLSGGDGGGGAGEFYGGVAMVDVDLNKCEPWELPAYFLHNLIIFPARARARAAGRRRRADAARVGATEWYFFSLHDRKYATGQRTNRATRSGYWKATGKDRAIVTRRRAAGGEAVAGGEVVGMRKTLVFYQGRAPRGSKTEWVMHEFRVDGHAVADHPSSSTSSSSSNLLKEDWVLCRVFYKSRTANPRPVVSGEAAVSLSGELSLPPPPPLPVAPAVIDGYTGGGYYEQDSSAGCHHHHHRPPTSAALPFKDLTDFRDLLSNMVQGGGAAAAAAKSEGFHLGWSEEESSGYVQQSAMASQAWNPF

SEQ ID NO: 7329 - protein, 363 aa, Caulobacter crescentus CB15
MSLDALFQPFEFKSLKLPNRVVMAPMTRSFSPGGVPTDEVAAYYRRRAENQVGLIVTEGTGVARPASLNDANVPRFHGEKELAAWKKVVDEVHAAGGKIAPQLWHVGAAKGKDVLGKVDSPSGLSKAGGNPFTEPMTDAEIADTIQAFATAAADAKRLGFDTVELHGAHGYLIDQFFWQGTNVRSDAWGGPTIGERGRFAAEILKAVRAAVGPDYPVIIRLSQWKQQEYTARLAETPKEMEAWLQPLADAGADIFHCSQRRFWEPEFEGSDLNFAGWAKKLTGAPTITVGSVGLSGEFIAAFGGEGSQPTSIDNVIGGLERGEYDMVGVGRALLQDPEWVTKIREGRSDELKAFERAALGTLY

SEQ ID NO: 7330 - protein, 334 aa, Haemophilus influenzae 86-028NP
MKTLSEFIVERQAEYPNAKGELSGILSSIRLLAKIIHRDINKAGLTNILGQSGIENVQGESQMKLDLFAHNTMKAALMAREEVAGFASEEEESFIAFDTERGRNAKYIILTDPLDGSSNIDVNVSVGTIFSIYRRVSPIGSPVTLEDFMQPGNKQVASGYIVYGSSTMLVYTTGHGVNGFTYDPSIGTFCLSHENMQMPKEGKIYSINEGQYLKFPQGVKKYIKYCQEEDKATHRPYVSRYIGSLVADFHRNLLKGGIYIYPSATNYPNGKLRLLYEGNPIAFLAEQAGGVATDGYRRILDIEPTALHERVPLFVGSEDMVKKAQEMMEEFKEE

SEQ ID NO: 7331 - protein, 108 aa, Triticum aestivum
  misc_feature (18)..(18): Xaa can be any naturally occurring amino acid
  misc_feature (25)..(26): Xaa can be any naturally occurring amino acid
  misc_feature (34)..(34): Xaa can be any naturally occurring amino acid
  misc_feature (36)..(36): Xaa can be any naturally occurring amino acid
  misc_feature (47)..(47): Xaa can be any naturally occurring amino acid
  misc_feature (54)..(54): Xaa can be any naturally occurring amino acid
  misc_feature (57)..(57): Xaa can be any naturally occurring amino acid
  misc_feature (60)..(61): Xaa can be any naturally occurring amino acid
  misc_feature (66)..(66): Xaa can be any naturally occurring amino acid
  misc_feature (68)..(68): Xaa can be any naturally occurring amino acid
  misc_feature (85)..(85): Xaa can be any naturally occurring amino acid
  misc_feature (91)..(91): Xaa can be any naturally occurring amino acid
  misc_feature (102)..(102): Xaa can be any naturally occurring amino acid
MAAISSTSYFSQSQLPAXGGGSNGXXPRRRRVGXCXMLEAASASGSXGGGAVVXRTXSLXXEDLEXLXGCLDLGFSFSYNEIPGXCGTLPXLELCYSMTRRXLDEQRT

SEQ ID NO: 7332 - protein, 135 aa, Oryza sativa
  misc_feature (11)..(11): Xaa can be any naturally occurring amino acid
  misc_feature (35)..(35): Xaa can be any naturally occurring amino acid
  misc_feature (58)..(58): Xaa can be any naturally occurring amino acid
  misc_feature (72)..(72): Xaa can be any naturally occurring amino acid
  misc_feature (121)..(121): Xaa can be any naturally occurring amino acid
MATDGGGSTPXPKEKKANLRDPYSMKHVLNLTASXDAKSKGFPKDARLTNRRLPAGAXSDRRWLLAMLTHRXFEQNRYILLACIELHATLNVALQICTYTQEKNAILLTYPSAGSCNRTGXCISSKEPRLSDMYT

SEQ ID NO: 7333 - protein, 447 aa, Oryza sativa (japonica cultivar-group)
MAATKSKAAKKGAPLLGKYELGRLLGRGTFAKVYHARSLAPGADPVAVKVLDKPDLAAAGAGMATRVLREVAAMRRLRHPNVLRLHEVLATRSKVYLVMELAPGGDLLSRLASLPSRRLPEHAAQRVFLQLVSALIYCHARGVSHRDVKPQNVLLDAHGNLKVSDFGLAALPDSLRDDGRLHTACGTPAFAAPEVLRRKAYDGAKADAWSCGVILFVLLAGHLPFDDSNIADMCRKAHRREYALPRWVSQPARRLVSRLLDPNPATRLAVAELATHPWFKRSLSLDSQLGSLLGGQPERELAFQAPPPLNAFDIISMSPGLDLSGLFGESKRRREKRFVTTASPERTVERLGQAGAKLGYFMVGKKGVERLPLGGLSGLVAMSMEMSEVSPSMMLVELRLEGGDDGDGDGGAEEFGWEELRAELGDDVVMAWHGCDGGKKDKEGILL

SEQ ID NO: 7334 - protein, 548 aa, Shigella flexneri 2a str. 301
MAAKDVKFGNDARVKMLRGVNVLADAVKVTLGPKGRNVVLDKSFGAPTITKDGVSVAREIELEDKFENMGAQMVKEVASKANDAAGDGTTTATVLAQAIITEGLKAVAAGMNPMDLKRGIDKAVTAAVEELKALSVPCSDSKAIAQVGTISANSDETVGKLIAEAMDKVGKEGVITVEDGTGLQDELDVVEGMQFDRGYLSPYFINKPETGAVELESPFILLADKKISNIREMLPVLEAVAKAGKPLLIIAEDVEGEALATLVVNTMRGIVKVAAVKAPGFGDRRKAMLQDIATLTGGTVISEEIGMELEKATLEDLGQAKRVVINKDTTTIIDGVGEEAAIQGRVAQIRQQIEEATSDYDREKLQERVAKLAGGVAVIKVGAATEVEMKEKKARVEDALHATRAAVEEGVVAGGGVALIRVASKLADLRGQNEDQNVGIKVALRAMEAPLRQIVLNCGEEPSVVANTVKGGDGNYGYNAATEEYGNMIDMGILDPTKVTRSALQYAASVAGLMITTECMVTDLPKNDAADLGAAGGMGGMGGMGGMM

SEQ ID NO: 7335 - protein, 486 aa, Candida albicans SC5314
MTTVEQLETVDITKLNAIAAGTNKKVPRVVAAGLGGKLMGTSDLVKVTAEEITKDSMESLAEKDAREKAKYANKKHISEEPWTLDNFAKKINWLNMILVVFIPVFGAYCAWNYPPQWKTLVLTFVMYAFSGISITAGYHRLYSHKSYDAALPVRLFFAFFGAGAIEGSIKWWGHSHRIHHRYTDTPRDPYDARRGFWFSHMGWMLTKANPKNRARADISDLVADWVVTFQHRHYLLLMITAAFIFPTLVAGLGWGDYWGGFIYAGILKGFAIQQATFCVNSLAHWIGVQPFDDRRTPRDHVLTAFVTFGEGYHNFHHEFPSDYRNALKWYQYDPTKVTIWCLSKLGLAWNLKKFSQNAIEQGLVQQQQKKLDRMKNKLNWGAEIEKLPVWTREEFNERAKQEGLIIISGIIHNVKNFIKEHPGGQALVRASLGKDATKAFNGAVYAHSNAAHNLLATMRVAVVKDGEVNADTFDLQEQMMEKEKQS

SEQ ID NO: 7336 - protein, 608 aa, Brassica rapa
MCGILAVLGCVDNSQATRSRIIKLSRRLRHRGPDWSGLHCYEDCYLAHERLAIIDPISGDQPLYSEDKTVVVTVNGEIYNHKALRESESLKSHKYHTGSDCEVLAHLYEEHGEEFINMLDGMFAFVLLDTKDKSYIAVRDAIGVIPLYIGWGLDGSVWFASEMKALSDDCEQFMAFPPGHIYSSKQGGLRRWYNPPWFSELVPSTPYDPLVLRDTFEKAVIKRLMTDVPFGVLLSGGLDSSLVASVAIRHLEKSDARQWGSKLHTFCIGLKGSPDLKAGKEVADYLGTRHHELHFTVQEGIDAIEEVIYHVETYDVTTIRASTPMFLMSRKIKSLGVKMVLSGEGSDEIFGGYLYFHKAPNKKELHEETCRKATPLEFLDHDVSCAYLLCLNLVCLLLMQIKALYQYDCLRANKSTSAWGVEARVPFLDKAFLDVAMGIDPEWKMIRPDLGRIEKWVLRNAFDDEKNPYLPKHILYRQKEQFSDGVGYSWIDGLKDHANKHVSDAMLTNANFVFPENTPLTKEAYYYRAIFEKFFPKSAARATVPGGPSVACSTAKAVEWDAAWKGNLDPSGRAALGVHVAAYEGDKAEAPRPEKVQKLAEKTAEAIV

SEQ ID NO: 7337 - protein, 700 aa, Burkholderia vietnamiensis G4
MTNSAPSGSQPSAAPQSDSAKARQLDEHCQHPDGEALRTNQGVRIADNQNTLRAGARGPSLLEDFIMREKITHFDHERIPERVVHARGSAAHGVFRVYESMADYTKAAFLQDPAAETPVYVRFSTVQGPRGSADTVRDVRGFAVKFYTEEGNYDLVGNNMPVFFIQDAIKFPDFVHAVKPEAPNEMPTGASAHDTFWDFVSLVPETTHMVLWLMSDRALPASYRAMDGFGVHTFRFVNAAGAEHFVKFHWRPVSGAYSLLWDEAQRIAGHDPDFNRRDLWMAIERGDYPEFELGVQLIDPADARKFDFDLLDPTKLVPEELVPVKPIGRMTLNRNPDNFFAETEQVAFHPGHVVPGIDFTNDPLLQGRLFSYTDTQLSRLGGPNFHELPINRPLCPFANNQRDAMHRQTIAVGQASYEPNSLNGGWPRETPPAPAGGGFETVPEPLEGTKVRVRSESFADHFSQAALFYQSMTDIEQRHIRDAYCFELGKVTKPEIRARVVNEIIARFDAGLAAEVAERLGLPAPQTATTPAVARLAPSLSLVGRAKPTIRSRKIALVATPGVSQALVDQVRSTLAAAGAVPTVVAPTLAPIGSIAPQATLAGMPSVMFDAVFVCGGDGRELANNAEACHFVREAFKHLKPIAAVGSGRQLLSAAHLPDPAEGVCVGHVADLDAVLGAFSGELGRHRVWAREQQAAELPA

SEQ ID NO: 7338 - protein, 247 aa, Datisca glomerata
MALEALNSPTTATPVFHYDDPSLNYLEPWTKRKRSKRTRLDSPHTEEEYLAFCLIMLARGRVASANRRDSQSSIQIQPEATTSATKVSYKCSVCDKAFSSYQALGGHKASHRKLAGGEDQSTSFATTNSATVTTTTASGGGGRSHECSICHKSFPTGQALGGHKRCHYEGSIGGNSIHHHNNTTNSGSNGGMSMTSEVGSTHTVSHSHRDFDLNIPALPEFRSNFFISGDDEVESPHPAKKPRILMK

SEQ ID NO: 7339 - protein, 497 aa, Escherichia coli
MVFPLLVKSNWKNKFENMGAQMVKEVASKANDAAGDGTTTATVLAQAIITEGLKAVAAGMNPMDLKRGIDKAVTAAVEELKALSVPCSDSKAIAQVGTISANSDETVGKLIAEAMDKVGKEGVITVEDGTGLQDELDVVEGMQFDRGYLSPYFINKPETGAVELESPFILLADKKISNIREMLPVLEAVAKAGKPLLIIAEDVEGEALATAVVNTIRGIVKVAAVKAPGFGDRRKAMLQDIATLTGGTVISEEIGMELEKATLEDLGQAKRVVINKDTTTIIDGVGEEAAIQGRVAQIRQQIEEATSDYDREKLQERVAKLAGGVAVIKVGAATEVEMKEKKARVEDALHATRAAVEEGVVAGGGVALIRVASKLADLRGQNEDQNVGIKVALRAMEAPLRQIVLNCGEEPSVVANTVKGGDGNYGYNAATEEYGNMIDMGILDPTKVTRSALQYAASVAGLMITTECMVTDLPKNDAADLGAAGGMGGMGGMGGMM

SEQ ID NO: 7340 - protein, 396 aa, Danthonia spicata
  misc_feature (124)..(124): Xaa can be any naturally occurring amino acid
  misc_feature (181)..(181): Xaa can be any naturally occurring amino acid
  misc_feature (354)..(354): Xaa can be any naturally occurring amino acid
TGYDRVMVYKFHEDEHGEVVAESRRPDLEPYLGLHYPATDIPQASRFLFQQNRVRMIHDCHATAVRVIQDPGLQQALCLVGSTLRAPHGCHAQYMANMGSIASLVMAVIISSGSDDEQMARGGXSSAMKLWGLVVCHHTSPRFIPFPLRYACEFLMQAFGLQLNMELQLAHQMSEKHILRXQTLLCDMLLRDSPTGIVTQSPSIMDLVKCDGAALYYHGKYYPLGVTPTESQIKDIIEWLTVCHGDSTGLSTDSLADAGYLGAAALGDAVCGMAVAYITPSDYLFWFRSHTAKEIKWGGAKHHPDDKDDGLRMHPRSSFKAFLEVVKSRSLPWENAEMDAIHSLQLILRDSFRXAAEGTSNSKAIVBGQVQLGELELRGINELSSVAREMVRLIET

SEQ ID NO: 7341 - protein, 233 aa, Allium sp. AL-2003
VQLKRMENKINRQVTFSKRRNGLLKKAHEISVLCDAEVALIVFSAKGKLYEYSTDSSMEKILERYERYCFAEKSSTMSDIDSQEDWSLEYHKLKAKVESLNNRQRHLMGEQLESLSLREIGQLEQQLENSLKTVRTRKSQELLSSISELQDKEKTLRDENKALENELMKRARAKAILEQQARWKHHNHKQQDNLHNPNINIGNYQTRNNEGGVEPATDVQVRVVRNLLPHWML

SEQ ID NO: 7342 - protein, 161 aa, Zea mays
MSLIRRGSAFDPFSLDLWDPFQGFPFGSGSSSSSSLFPSFGGTTSSETAAFAGARVDWKETPEAHVFKTDVPGLKKEEVKVELEDGNVLQISGERSKEQEEKTDTWHRVERSSGKFLRRFRLPENARTEQISASMENGVLTVTVPKEEAKKADVKSIQISG

SEQ ID NO: 7343 - protein, 1402 aa, Xanthomonas oryzae pv. oryzae KACC10331
MRCRRKELHSHSIVRRYNEVDVRRPELWARNGQREGTNMPKSRWDLRRIYGRRAFFGALLILSAGLIAAIVTGVWLQQHNEREREQRFQYVVRTLTRNISERMSTLEHGLRGARGAVIGAGSDIISRERFTSYSRSRDYPREFPGVLGYGYIHRVAPADEDAFLQNARADGAPDIQRRPLAPWDGERYIVLYFEPESSGNHPLGIDIASDPHRRAAALQAARSGEPIMTSPISLFGYRVPRESGFWLLLAIYREGMPLQTPQQRMVATSGWVYAPFSLAQIVQSALGERDDIALDISDRNEPTHNLYRSGTPAIDSALGPPVVTLLPMYGRTWVITAHPTASFIASLNQNSPWLIGGLVMAGSVLFAALLVLYFSNGLRREEVLRKQMELAALVSHSSEAIVAETPDGRITLWNPAAEAMFGYTAEEAIDQDLTMLLAPQAYAMPEIDHADAALAANASAAQTMHHRDGHQVHVLASKSPIIESEGTLSGHSHFFRDISDRVRSHQRSIDLNASLEHQVAERTGELVKFSVLQRAILAHAGYAIIATDSSGFVTLFNPAAEKMLGYNAAEVIGRRKASQFIEQDELQERARMLADQTGTPVAHTLEAIAALTSLGRSDTSEWTYVSHDGRRLPVLLTLSTLRDDHDQVIGYLGVAVDLTEQKLHEKQLRLAMDAAKSANQSKSDFLANMSHEIRTPMNAILGMLYLLQRSELPGAAQDMVAKIDRSARTLLEIINDILDFSKIEAGRIDLECAPFDLNQLFDNIAELMRSSLSAKPVEMIVEPLPRDSRWLLGDALRINQVLVNLVGNAIKFTEQGEVVLSVRRFPSGDPNKFKLLFSVRDTGIGISKEKQSLIFSPFLQADTSTSRRYGGSGLGLTISRRLIELMGGELEVESVPGRGSEFYFVITLEKSAPPQEQRDLPSLPPEAMPRVLIADDHDAALNNLVRIATELGWRVDAVASGQAALQAIEHAAEPYDIFLLDWRMPDIDGVAIAREIRARATPGPHPVIVMVTAYERRLLEQHPEQQDLDAVMTKPVTGAALHRLFEQLMDQRPGTRAATPTFVARRLEGVHLLLVDDSEINCEVAQRILEGEGAMVTVAHDGEQAVSTLKRTPNLFHLVLMDVQMPVVDGYEATRRLRQIPALASLPVIALTAGAFRPQQEKALAAGMNGFIAKPFNVEELVTAIRHFLQPGTRRIPSLPHETEVYAGPEWEHSEPELLDATRARSLWREREPYARYLTKLLRDNPDPAEVAAEHLRRNELPAIGAMAHKLRGAAGSLALPALADAAGDLETSIDEGHDITASLIALKDVMQRTAEAIQAFLQHGDTDIAADEDGVALDADSVQILTSAFASDNADQIDHALMICAPRLPRTLQEALQRAVEDFDFRRAETTLREWQTTHLH

SEQ ID NO: 7344 - protein, 438 aa, Glycine max
MGEKSNVGGDAINTTLLHGKYELGRLLGHGTFAKVYHARHLKTGKSVAMKVVGKEKVVKVGMMEQIKREISAMNMVKHPNIVQLHEVMASKSKIYIAMELVRGGELFNKIARGRLREEMARLYFQQLISAVDFCHSRGVYHRDLKPENLLLDDDGNLKVTDFGLSTFSEHLRHDGLLHTTCGTPAYVAPEVIGKRGYDGAKADIWSCGVILYVLLAGFLPFQDDNLVALYKKIYRGDFKCPPWFSSEARRLITKLLDPNPNTRITISKIMDSSWFKKPVPKNLMGKKREELDLEEKIKQHEQEVSTTMNAFHIISLSEGFDLSPLFEEKKREEKELRFATTRPASSVISRLEDLAKAVKFDVKKSETKVRLQGQEKGRKGKLAIAADLYAVTPSFLVVEVKKDNGDTLEYNQFCSKELRPALKDIVWRTSPAENPTLA

SEQ ID NO: 7345 - protein, 212 aa, Antirrhinum majus
KAHELSVLCDAEVALIIFSNRGKLYEFCSSTSMLNTLERYQKCNYGPPETNVSTREALELSSQQEYLKLKARYEALQRSQRNLLGEDLGPLNSKELESLERQLDMSLKQIRSTRTQAMLDTLTDLQRKEHALNEANRSLKHRLMDGSQISLQWNPNAEDHVGYGRQPSQPSADGFYHPLECEPTLHIGFQSDQITVAGAGPSVNNYISGWLP

SEQ ID NO: 7346 - protein, 518 aa, Desulfotalea psychrophila LSv54
MAGKDIKYGVKARESVLIGVNTLANAVKVTLGPKGRNVLIEKSFGAPTITKDGVSVAKEIELKDKFENMGAQMVKEVASKTSDVAGDGTTTATVLAQAIYTEGVKLVAAGGNPMEIKRGIDKGVEAVIAELRNIATPTKEQKEIAQVGTISANSDETIGNIIAEAMDKVGKEGVITVEEAKSMETTLDVVEGMQFDRGYLSPYFVTDPERMEVIMDDPYILLVEKKVSNMKDLLPVLEQVAKMGKGLFILAEDVDGEALATLVVNKLRGTINVAAVKAPGFGDRRKAMLEDIAILTGGQVISEDLGIKLENVTLNDLGTCKRIVTDKDATTIVDGAGDAAQLSSRVKQIHAQIADTTSDYDREKLQERLAKLIGGVAVINVGAATEIEMKEKKGRVEDALNATRAAVEEGVVPGGGVAYMRWLDALEALHLEGEQELGKKILSVPLKSLFVRLPIMLAVKVLLLLMQLRSLKDQTVSTQLPKFTKTLSLQVLSILPRLPVQPCKTQLLYPVCFSPPSV

SEQ ID NO: 7347 - protein, 469 aa, Caulobacter crescentus CB15
MALGGAALGLSACEGPGETDLTPKGRQFPKDFVWGVATAAFQTEGSQTADGRGPSIWDVFERVPGHVKNGDTAADATDSYRRYQDDVDLIAGASLSAYRFSMSWSRILPTGAGAVNAAGLDHYSRLVDALLAKGITPYATLFHWDLPQGLQDKGGWANRDTAQRLADYARAVVERLGDRLKNYIILNEAAVHTVFGHVLGDHAPGLKDAALLGPVTHHMNLGQGLAIQALRAARSDLSVGTTMALQPCRPAGGPLAFWNRLASDGLDEIWNLAWLDPLFKGTYPKAMEEPLKGVVRDGDLKTTRQPVDFLGVNYYAPAYVRLDLSAPSKIAAAAAPNSAEQDAFGRHIDPSGLFEVLDRVRREYGAPKMLVTENGCSDPFSSGPAILDDTFRIKYLRRHLEAVLAAREAGCDVRGYFEWTLIDNFEWDLGYTSKFGITTMEAASGRRIPKASYGWFKALAQTGTLPSSP

SEQ ID NO: 7348 - protein, 236 aa, Escherichia coli K12
MGYRSIDTAAAYKNEEGVGKALKNASVNREELFITTKLWNDDHKRPREALLDSLKKLQLDYIDLYLMHWPVPAIDHYVEAWKGMIELQKEGLIKSIGVCNFQIHHLQRLIDETGVTPVINQIELHPLMQQRQLHAWNATHKIQTESWSPLAQGGKGVFDQKVIRDLADKYGKTPAQIVIRWHLDSGLVVIPKSVTPSRIAENFDVWDFRLDKDELGEIAKLDQGKRLGPDPDQFGG

SEQ ID NO: 7349 - protein, 591 aa, Gibberella zeae PH-1
MATAHMAVRTDTFPHSTSRSHSHSHQSMGARIIPIPTPTIKMSPPSNGDPMEITSPAPSSNGNHNSDSEANGNGQSNDRPKNSPAPDSNTVTSNSVNNSNSMPAPPPAAAAVHQPKIVQTAFIHKLYNMLEDPNIQHLISWSASAESFVMSPSADFSKVLSQYFKHTNISSFVRQLNMYGFHKERDVFHTGNPDTTLWEFKHGNGNFKRGDLVGLREIKRRASRHALVHRESNYTKPVTSQPGTPAEPVPLPPDSADARLLNIEHTLFDLSNRLQRSEENAHYMHVKNQAAMETMNRLLHFNQELSRTMLSIVPAESPISRDVIALQGEIQRQVDVLRTIEEPPQEPPYTGRQQYFAGVENAPVSPRQLAQDDQRRGPTLNVPSARSQNFYKPPVPSNLSAGTRRQYGSISGGSTTQSSPLRTAPPPPPPAPHPLSNVETVPGPGSLARRHTAADIRAHGWQPTPSPFASGAPSGAWPPSPSRAAPEEQRIRDSLSTYSLQNASQAHPHSRPTTPPPPFVNGLGGGSDTFGGWSWGSAGRENKNLSVKDHSAPTTRRGSMAHILNPSDTAERSDEDEDPRGDDDRKRKRMQ

SEQ ID NO: 7350 - protein, 1328 aa, Alternaria brassicicola
MAAETYSSVSAIIRNLARQHDPTRDPSFSAQVSANGAKTAVNAIALPGPESDEKTQLQQELSALCSRIDFLEHKSNHAANQQGQFPLTPAQEPSDEGALYTPAGVFRGNNGPPAQGRRGSNKERAIWVSNWLAAKESNGDPEQPAAALTEEQLNYLRVHLNQQADQIRNQREHIDNLSQEVNKQLTTQSMVFEHGIEDIGALKRELGKHQQANLAFQKALREIGAIVTAVAMGDLSKKVLIHAKEMDPEITLFKRTINTMVDQLQEFASQVTFLAREVGTEGRLGGQANLPGVAGIWAELTDINGMAKNLTDQVREIAVVTTAVAMGDLSRKIERPARGEILQLQQTINSMVDQLQSFATQVTKVARDVGTEGKLGGQAEIAGVKGMWNELTVNVNAMAQNLTTQVRDIAQVTTAVAQGNLTRKVEAECKGEILELKNTINRMVDQLQQFAHEVTKIAREVGSEGRLGGQATVHGVEGTWKDLTENVNGMAMNLTTQVREIAEVTTAVARGDLSRKVKAEVQGEILSLKITINTMVDRLNTFAQEVSKVAREVGTDGILGGQAQVDNVEGKWKDLTNNVNTMAQNLTLQVRSISEVTQAIAKGDMSRRVHVDAEGEIRLLKDTVNDMVMRLDEWSLAVKRVARDVGVDGKMGGQADVRDIDGRWKEITTDVNTMAQNLTSQVRAFGDITNAAMEGKFTQITVEASGEMDELKRKINQMVSSLRESIQRNTAAREAAELANKTKSEFLANMSHKIRTPMNGIIGMTQLTLDTDLTHAQREMLTIVHNLAGQLLTIIDDILDISKIEANRMVMEEIPFSMRGTIFNALKSSASRANERKLNLAYDVSYKVPDYVVGDSFRLRQIILNLVGNAIKLTEPGEVKVAISMAQEQECDPDHYVFQFAVSDTGIGIRGDKLNLIFDTFQQADGSTTRKFGGTGLGLSISKRLVTLMGGRMWVESDAGKGSVFYFTYKVRLGKPAIQAIQPQLVAYKQHTVLFVDQGNTGFSDEITEHLKTLDLVPMVVHSVEEVPETTKRTDMPYDCVIVDNDKTARELRIAERFKYIPLVMLTPHVCISLRSALENGISSYMTTPCLPIDLGNALIPALDGRAAPLVSDHSKSFQILLAEDNAVNQKLAVRILEKYHHRVTVANNGLEAFEHIQKKRYDCVLMDVQMPVMGGFEATAKIREWERDNGIPSTPVIALTAHAMVGDREKCLAAQMDDYLSKPLRQNQLIQTILRCATVGSTMYDHSSEPRYTASSHLPNITLPGKGNDNGGASSSSGGLPSPGKKRPQLEARGFTERGGAQSPNLLAVDQTDNGSVERLLLRSHSS

SEQ ID NO: 7351 - protein, 444 aa, Arabidopsis thaliana
MVRRQEEEKKAEKGMRLGKYELGRTLGEGNFGKVKFAKDTVSGHSFAVKIIDKSRIADLNFSLQIKREIRTLKMLKHPHIVRLHEVLASKTKINMVMELVTGGELFDRIVSNGKLTETDGRKMFQQLIDGISYCHSKGVFHRDLKLENVLLDAKGHIKITDFGLSALPQHFRDDGLLHNTCGSPNYVAPEVLANRGYDGAASDIWSCGVILYVILTGCLPFDDRNLAVLYQKICKGDPPIPRWLSPGARTMIKRMLDPNPVTRITVVGIKASEWFKLEYIPSIPDDDDEEEVDTDDDAFSIQELGSEEGKGSDSPTIINAFQLIGMSSFLDLSGFFEQENVSERRIRFTSNSSAKDLLEKIETAVTEMGFSVQKKHAKLRVNQEERTQKGQVGLSVTAEVFEIKPSLNVVELRKSYGDSCLYRQLYERLLKDVGTSSPEQEIVT

SEQ ID NO: 7352 - protein, 483 aa, Proteus mirabilis
  misc_feature (52)..(52): Xaa can be any naturally occurring amino acid
EKKKLTTAAGAPVVDNNNVITAGPRGPMLLQDVWFLEKLAHFDREVIPERRXHAKGSGAFGTFTVTHDITKYTRAKIFSEVGKKTEMFARFSTVAGERGAADAERDIRGFALKFYTEEGNWDMVGNNTPVFYLRDPLKFPDLNHIVKRDPRTNMRNMAYKWDFFSHLPESLHQLTIDMSDRGLPLSYRFVHGFGSHTYSFINKDNERFWVKFHYRCQQGIKNLMDDEAEALVGKDRESSQRDLFEAIERGDYPRWKLQIQIMPEKEASTVPYNPFDLTKVWPHADYPLMDVGYFELNRNPDNYFSDVEQAAFSPANIVPGISFSPDKMLQGRLFSYGDAHRYRLGVNHHQIPVNAPKCPFHNYHRDGAMRVDGNSGNGITYEPNSGGVFQEQPDFKEPPLSIEGAADHWNHREDEDYFSQPRALYELLSDDEHQRMFARIAGELSQASKETQQRQIDLFTKVHPEYGAGVEKAIKVLEGKDAK

SEQ ID NO: 7353 - protein, 145 aa, Alvinella pompejana epibiont 7G3
MLVKRYEPFNEIRRSFDLVNQIINSVDKNVESDNALVDFIPNINTREDSNAYYIEVELAGVKKEDVDIKIDENILSISGEKRFKDNLKAEDYYKIESKYGTFARSFTLPERVDVSKIEAKSEDGIIEIKIPKLTIEKESKKITIK

SEQ ID NO: 7354 - protein, 543 aa, Streptococcus pyogenes M49 591
MAKDIKFSADARAAMVRGVDMLADTVKVTLGPKGRNVVLEKAFGSPLITNDGVTIAKEIELEDHFENMGAKLVSEVASKTNDIAGDGTTTATVLTQAIVHEGLKNVTAGANPIGIRRGIETATATAVEALKAIAQPVSGKEAIAQVAAVSSRSEKVGEYISEAMERVGNDGVITIEESRGMETELEVVEGMQFDRGYLSQYMVTDNEKMVADLENPFILITDKKVSNIQDILPLLEEVLKTNRPLLIIADDVDGEALPTLVLNKIRGTFSVVAVKAPGFGDRRKAMLEDIAILTGGTVITEDLGLELKDATMTALGQAAKITVDKDSTVIVEGSGSSEAIANRIALIKSQLETTTSDFDREKLQERLAKLAGGVAVIKVGAPTETALKEMKLRIEDALNATRAAVEEGIVAGGGTALITVIEKVAALELEGDDATGRNIVLRALEEPVRQIALNAGYEGSVVIDKLKNSPAGTGFNAATGEWVDMIKTGIIDPVKVTRSALQNAASVASLILTTEAVVANKPEPAAPAPAMPAGMDPGMMGGF

SEQ ID NO: 7355 - protein, 242 aa, Gerbera hybrid cultivar
MGKGRLELKRIENKINRQVTFAKRRNGLLKKAYELSVLCDAEVALIVFSTRGKLYEFSSTSSMLKTLERYEKCSFGPPEQRRPAAKEDLQEQSSYQEYMRLKERYDALKRLERNYYGEEIDSLTTSELESLERQLHCSLKQIRTIRTQSLLDKLYEQQKMEHQLYESNKTLRLRLDEEGQAEALQWDAHAHANGMVYAHQHQVSQPMRDTFYHPTGCETTLQIGYQSEQMSAVNHQMQGWPA

SEQ ID NO: 7356 - protein, 1314 aa, Debaryomyces hansenii CBS767
MSSHQRQDSIASLSSTATGNIHPQKIGPWKLGKTLGRGATGRVLLATHQSTGQKAAVKVVSKSELNDDEINKKSADEAGLPYGIEREIIIMKLLTHPNVLRLYDVWETSKALYLVLEYVEGGELFDLLVERGPLQEVEAIKYFRQIILGTAYCHALGICHRDLKPENLLLDSGLNVKLADFGMAALESNGKLLETSCGSPHYAAPEIVSGLKYHGAASDIWSCGVILFALLTGRLPFDDENIRNLLLKVQAGSFEMPCELSPEAVDLIDKMLTVDPMKRIPTERILSHPLLTKYPIPNEDLISVKSLPHPETAYKSLGSEKNIDKQILQNLSILWHDRSQGDIVDCLLKTGSNPEKTFYALLMRYRHNQEESAGSSPTRSNSQNFNNKIGNKDNNRKKRMSQVSASTSRNRPVLFQYKNGIKSSIGNGNGRLSSTSSVSNSPRKSPVRRSSNRYSFAQSPRKFGGTSDETTLHSSSVPRNIYNEIVSAQRNGQGVMPPPLPSKDNMDSKSNPIVDEVSNQDLLSSAKISPTKNKRGSVIRNSISKNRLSRRKSRTSFTPGLKRNSITTKLLSTYAKLAGETDWEFMDKQTKRTSATFATLCDKIFNQEQYDAEDEKLIDEEEKQAKEYERLMEIERKKHEAELRARKELAKQRKREKRKSLLSSRKLSILVKDDANNSEQDITVTDSDALSQPKRQSRNQAMRSISEGHGKESDDLTKEDLENLKRRSVTQPTPRRRKTPVLTRRPVSRLDPLWTAYENEEIERAQDALEAEYRDADFKTKKKINRESMVSVMDDKEVDNEPHVDDDATDEVQDEEAVKAKSRGYELPEPDMERSDLSDEYMSEIRKSRLLNSQLNINAIANGEKEVKSEKRQDKEPKTLIGDVRIPTVTRKSRCFTNSNKRLSVLSMYSTKQSYRDLNSILGDENDENNDVEGQLPQLRTSFADRLDRAGLADAEEEDDEPLDEGSIMDFDQHLANKRSSYYAGDKSRRQSRYSTTKRNSQAPTVDVPAIPKKSNKERDREDDTFVTKDDDVHRRKSAYSAKGANNNDDEDMIFENIKLPNEDRRQSASTAKSNKKKSFQPSAESMLIPNVDNIPEDAKTRKPDPRSQPYEKVRKPKVSNGELKSTGPEGQVKNPLEDTTNEPRENQKRKGSIFRKLSWGSKKTMDNSAAQLPSPADSRAPSVEEKPKSKSGFFRWFSSSSNQPGIESEIRRFKAILPKQEMSSALFALLNSWSNFGLKNLRNDTVGYNITGEISKNNAFNLKNCKFRIKVNPREFNQKSEIVCARVKGSKVTTDTLFKEIEKVLQKEGVMDI

SEQ ID NO: 7357 - protein, 569 aa, Triticum aestivum
MALLAAATLNPTTHLSLRSRAGRNSENLWLRSAASSQKSKGRFCNLTIRAGTPSKPAEPIGPVFTKLKPWQIPKRDWFDKDFLFGASTSAYQIEGAWNEDGKGPSTWDHFCHTYPERISDMTNGDVAANSYHLYEEDVKALKDMGMKVYRFSISWSRILPDGTGKVNQAGIDYYNKLINSLIDNDIVPYVTIWHWDTPQALEDKYGGFLNRQIVDDYKQFAEVCFKNFGDRVKNWFTFNEPHTYCCFSYGEGIHAPGRCSPGMDCAVPEGDSLREPYTAGHHILLAHAEAVQLFKARYNMHGDSKIGMAFDVMGYEPYQDSFLDDQARERSIDYNMGWFLEPVVRGDYPFSMRSLIGDRLPMFTKEEQEKLASSCDIMGLNYYTSRFSKHVDMSPDFTPTLNTDDAYASSETTGSDGNDIGPITGTYWIYMYPKGLTDLLLIMKEKYGNPPVFITENGIADVEGDESMPDPLDDWKRLDYLQRHISAVKDAIDQGADVRGHFTWGLIDNFEWSLGYSSRFGLVYIDKNDGNKRKLKKSAKWFSKFNSVPKPLLKTTNNNATMTAASVSV

SEQ ID NO: 7358 - protein, 238 aa, Oryza sativa (indica cultivar-group)
ENSTNRQVTFAKRRNGLLKKAYELSVLCDAEVALIVFSNRGKLYEFCSTQSMTKTLEKYQKCSYAGPETAVQNRESEQLKASRNEYLKLKARVENLQRTQRNLLGEDLDSLGIKELESLEKQLDSSLKHVRTTRTKHLVDQLTELQRKEQMVSEANRCLRRKLEESNHVRGQQVWEQGCNLIGYERQPEVQQPLHGGNGFFHPLDAAGEPTLQIGYPAEHHEPMNSACMNTYMPPWLP

SEQ ID NO: 7359 - protein, 108 aa, Arabidopsis thaliana
HRDEEVNYFPSRYDQVRHAEKYPTPPAVCSGKRERCIIEKENNFKEPGERYRTFTPERQERFIQRWIDALSDPRITHEIRSIWISYWSQADKSLGQKLASRLNVRPSI

SEQ ID NO: 7360 - protein, 392 aa, Janusia mediterranea
DLEPVNPADVPVTAAGALKSYKLAAKAISRLQSLPSGNISLLCDVLVKEVRDLTGYDRVMVYKFHEDEHGEVVSECRRSDLESYLGLHYPATDIPQASRFLFMKNKVRMICDCLAPSVKVIQDERLPQPLSLCGSTLRSPHGCHAQYMTNMGTIASLVMSVTVNEDDDTMDGDQQQMARKLWGLVVCHHTSPQFVPFPLRYACEFLIQVFGVQITKKVELAAQVREKHILQIQTMLCDMLLRDAPVAIITQSPNVMDLVKCDGAALYFKSKTWFLGVTPTEEQIRDIAEWLLKYHSGNTGLSTDSLMEAGYPGASGLGDAVCGMAAVSITSRDFLFWFRSHTAKEIKWGGAKHDPDDKDDLRKMHPRSSFKAFLEVVKWRSMPWEDMEMDAI

SEQ ID NO: 7361 - protein, 392 aa, Janusia linearis
DLEPVNPADVPVTAAGALKSYKLAAKAISRLQSLPSGNISLLCDVLVKEVRDLTGYDRVMVYKFHEDEHGEVVSECRRSDLESHLGLHYPATDIPQASRFLFMKNKVRMICDCLAPPVKVIQDERLPQPLSLCGSTLRSPHGCHAQYMTNMGTIASLVMSVTVNEDDDTMDGDQQQMTRKLWGLVVCHHTSPQFVPFPLRYACEFLIQVFGVQINKEVELAAQVREKHILQIQTMLCDMLLRDAPVAIITQSPNVMDLVKCDGAALYFKNKTWLLGVTPTEEQIRGIAEWLLKYHSGNTGLSTDSLMEAGYPGASGLGDAVCGMAAVSITSRDFLFWFRSHTAKEIKWGGAKHDPDDKDDLRKMHPRSSFKAFLEVVKWRSMPWEDMEMDAI

SEQ ID NO: 7362 - protein, 492 aa, Zea mays
MDPYKHRPSSGSNSSFWTTNSGAPVWNNNSALTVGQRGPILLEDYHLIEKLAQFDRERIPERVVHARGASAKGFFEVTHDVSHLTCADFLRAPGVQTPVIVRFSTVVHERGSPETLRDPRGFAVKFYTREGNFDLVGNNMPVFFIRDGMKFPDMVHAFKPNPKTNLQENWRIVDFFSHHPESLHMFTFLFDDVGIPLNYRHMEGFGVNTYSLINRDGKPHLVKFHWKPTCGVKCLLDNEAVTVGGTCHSHATKDLYDSIAAGNYPEWKLYIQTIDLDHEDKFDFDPLDVTKTWPEDIIPLQPVGRMVLNKNVDNFFAENEQIAFCPAISVPAIHYSDDKLLQTRIFSYADTQRHRLGPNYLMLPVNAPKCAHHNNHHDGFMNFMHRDEEVNYFPSRFDPARHAEKVPIPPRVLTRCREKCIIQKENNFKQAGERYRSFDPARQDRFIQRWVDALTHPRVTHEHRTIWISYWSQCDAALGQKLPSRLNLKPSM

SEQ ID NO: 7363 - protein, 392 aa, Janusia californica
DLEPVNPADVPVTAAGALKSYKLASKAISRLQSLPSGNISLLCDVLVKEVRDLTGYDRVMVYKFHEDEHGEVVSECRRSDLESYLGLHYPATDIPQASRFLFMKNKVRMICDCLAPPVKVIQDERLPQPLSLCGSTLRSPHGCHAQYMTNMGTIASLVMSVTVNEDDDTMDGDQQQMTRKLWGLVVCHHTSPQSVPFPLRYACEFLIQVFGVQINKEVELAAQVREKHILQIQTMLCDMLLRDAPVAIITQSPNVMDLVKCDGAALYFKNKTWLLGVTPTEEQIRGIAEWLLKYHSGNTGLSTDSLMEAGYPGASGLGDAVCGMAAVSITSRDFLFWFRSHTAKEIKWGGAKHDPDDKDDLRKMHPRSSFKAFLEVVKWRSMPWEDIEMDAI

SEQ ID NO: 7364 - protein, 392 aa, Gaudichaudia mcvaughii
DLEPVNPADVPVTAAGALKSYKLAAKAISRLQSLPSGNISLLCDVLVKEVRDLTGYDRVMMYKFHEDEHGEVVSECCRSDLESYLGLNYPATDIPQASRFLFMKNKVRITCDCLAPSVEVIQDERLTQPLSLCGSTLRSPHGCHAQYMTNMGAIASLVMSVTVNEDDDTMDGDQQHMTRKLWGLVVCHHTSPRFVPFPLRYACEFLIQVFGVQVNKEVELAAQVRERHSLQIQTMLCDMLLREAPVAIITQSPNVMDLVKCDGAALYFKNKTWFLGVTPTEEQIRGIAEWPLKYHSGNTGLSTDGLMEAGYPGASGLGDAVCGMAAVSITSRDFLFWFRSHTAKEIKWGGAKHDPDDKDDLRKMHPRSSFKAFLEVVKWRSTPWEDIEMDAI

SEQ ID NO: 7365 - protein, 379 aa, Methanococcoides burtonii DSM 6242
MEENGKTKEEILLFLKKAKSADASYERVLSSMCTYPHEIAVLAHTQFIESNMGDPGLFPGTFNLEKQVLAMFGKMLHHKNSPEKAGYLTTGGTESNIQAIRSMHNFRHDISRPNIVMPESAHFSFDKVANLSGIEIRKASLDKLLKVDLDSVRSLIDKNTIGLVGIAGTTEFGQLDPINELSKIAIEKGIFLHIDAAFGGFVIPFMDIDYTYDFRLEGVTSMTIDPHKMALSTIPSGGLLFKEPEYFECLEIHTPYLSVNKQYSLTGTRSGAGVASTYAVMKHLGRKGYKKVVSDCMSVTKKLVDGAEKLGINTVIDPVLNIVALDVPEADLVRKKLLDEYGWHVSITRNPRALRIVIMPHIKNETIELFLKDLAKVIK

SEQ ID NO: 7366 - protein, 332 aa, Prosthecochloris aestuarii DSM 271
MNKLITIERHFLEQQKSHPEATGELTDLLNDVAFAAKLVRREVVRAGLADILGMAGTTNVQGEEVKKLDLFANEKIINAIGEHGRFALMGSEENEGTIIPPNNDTGRYILLFDPLDGSSNIDVNVSVGTIFSIYRLTGDDPKEADINDCLQKGSEQVAAGYVIYGSSVMMVYTTGQGVHGFTYDPTIGEFLLSHENITTPERGKYYSINEGSLHQFNDSTVNFINYLKEDDEATGRPYSTRYIGSLVADFHRNLMTGGVFVYPATKGHPNGKLRLMYEANPLAFICEQAGGRATNGKERILDINPTELHQRTPLYIGSKEDVLKAEEFEKEG

SEQ ID NO: 7367 - protein, 579 aa, Glycine max
MCGILAVLGCSDSSQAKRVRVLELSRRLKHRGPDWSGLHQYGDNYLAHQRLAIVDPASGDQPLFNEDKTVVVTVNGEIYNHEELRKQLPNHTFRTGSDCDVIAHLYEEHGENFVDMLDGIFSFALLDTRDNSFIVARDAIGVTSLYIGWGLDGSVWISSELKGLNDDCEHFESFPPGHLYSSKERAFRRWYNPPWFSEAIPSAPYDPLALRHAFEKAVVKRLMTDVPFGVLLSGGLDSSLVAAVTARYLAGTNAAKQWGTKLHSFCVGLEGAPDLKAAKEVADYIGTVHHEFHYTVQDGIDAIEDVIYHIETYDVTTIRASIPMFLMSRKIKSLGVKWVISGEGSDEIFGGYLYFHKAPNKDEFHQETCRKIKALHKYDCLRANKSTFAWGLEARVPFLDKDFIRVAMNIDPEYKMIKKEEGRIEKWVLRRAFDDEEHPYLPKHILYRQKEQFSDGVGYGWIDGLKAHAEKHVTDRMMLNAANIFPFNTPTTKEAYYYRMIFERFFPQNSARLSVPGGPSVACSTAKAVEWDAAWSNNLDPSGRAALGVHASAYGNQVKAVEPEKIIPKMEVSPLGVAI

SEQ ID NO: 7368 - protein, 392 aa, Aspicarpa hirtella
DLEPVNPADVPVTAAGALKSYKLAAKAISRLQSLPSGNISLLCDVLVKEVRDLTGYDRVMVYKFHEDEHGEVVLECRRSDLESYLGLHYPATDIPQASRFLFMKNKVRMICDCLAPPVKVIQDKRLPHPLSLCGSTLRSPHGCHAQYMTNMGTIASLVMTVTVNEDDDMMDGDQQHMTKKLWGLVVCHHTSLRFVPFPLRYACEFFIQVFGVQINKEVELAAQVREKHILQIQTMLCDLLLRDAPVTIITQSPNVMDLVKCDGAALYFKNTTWLLGVTPTEEQIRGIAEWLLKYHSGNTGLSTDSLMEAGYPGASGLGDAVCGMAAVSITSRDFLFWFRSHTAKEIKWGGAKHNPDDKDDLRKMHPRSSFKAFLEVVKWRSMPWEDIEMDAI

SEQ ID NO: 7369 - protein, 251 aa, Brassica oleracea var. italica
MGRGRVEMKRIENKINRQVTFSKRRAGLLKKAHEISILCDAEVSLIVFSHKGKLFEYSSESCMEKVLEHYERYSYAEKQLKVPDSHVNAQTNWSVEYSRLKAKIELLERNQRHYLGEDLESISIKELQNLEQQLDTSLKHIRSRKNQLMHESLNHLQRKEKEILEENSMLAKQIRERESILRTHQNQSEQQNRSHHVAPQPQPQLNPYMASSPFLNMGGMYQGEYPTAVRRNRLDLTLEPIYNCNLGYFAA

SEQ ID NO: 7370 - protein, 479 aa, Thiomicrospira crunogena XCL-2
MKTLVWLQRELRINHHPALEAAMAASDDIIVAYFHDPEQTIGAANTVWLANSLQQLQQDFKTRHGRLWCLEGIFEQQLEQVIQTHQIEQVFYTFQLGHPFKAMQQQALNVCQRCQVPLRAFETENWLHYNQLLNQSGQPYKVFTPFYNTLSRKLSELEPFSDPIDTLEKTARTVCQSGQDQNLPQSLNQILARPWARKIMQHWQVGEHKAWSKFETFITEGLANYEQDRDFPAIDGTSQLSPHLHFGELHSRAIVFELLSLETEPTIANQAIRVWLRQLAWREFARAILWHFPHTETHPFQAKFETFYRPLAEDDSESSKNYQAWCEGRTGVPIIDAGMKQLWETGWMHNRVRMLVASWLTKNADIDWRAGAQWFNDTLVDADPANNTLGWQWVAGCGVDAAPYYRLFNPVRQSEKFDANGQYLRQWLPELKTYSNKHIHAPWLIAPNEKHFCPIIDLTESRQHHLDKVATLKSLNQIH

SEQ ID NO: 7371 - protein, 574 aa, Chlorobium tepidum TLS
MSWFTTQRHSGLCRDFGRRWRRVATISSAIALICAQPLFAVPAAKPNEDFFSIAKSIELLGDVYKNVAQNYVDPVNVSEFMYSGIDGMLGQLDPYTAFLDEEQSGELDEITSGQYAGIGVTLGIFSGDLFIISVIDGQPAAKAGLKVGDQIIAIDGVKVSKKSIDEVRSTIKGSPGTNIRLSIKRDGQGPLTVISLTRGEVRISSVPFFGLFGSSGYVQMNSFSEHSREELSAAIRKIRQEAAKNRVVLNGIVLDLRGNPGGLLTSAVEVAGLFVEKNSRIVSTRGRAADSEQVYVTKTEPQEPTLPLVVMIDGDSASASEIVSGAIQELDRGVILGENSFGKGLVQSIINLPYDHILKMTTAKYYTPSGRLIQKPIARDESRRKVVLSNGDADSTKVFYTRNRRKVYGGGGIRPDVVAKADSLSEYQHKIENSGLLFRYASRFHRKHPEFRLQQLSSEPLYDDFNRFLEKEHFSFRSGAQKTLDSLKTLVQKEAGADKALAGQLDALDKALAASTRRNISRDSLHITAALQREIMRHYDERAALKRAIEDDPVAAKAFALLGDQKRYRSLLKP

SEQ ID NO: 7372 - protein, 270 aa, Glycine max
EGNEKGLQPRINLQGYLLGNPITTRNEGNDQIPFAHGMGLISDELYASLQRNCKGEYENRDSRNVLCLRDLKHYDECLSGINTFYILDRYCKSDSPKKHEAQWRRSLTQKFEASLNSHLRVPDIRCQIFGFFLATQWANDESVRKSLHIREGTIGKWERCYTTDFEEQIFSSFEFHVNLSAKGYRSLIYSGDHDAVVPFMSTQAWIRALNYSIVEDWRPWLLEDQVAGYTRIYSNQMTFATVKGSGHTAPEYKPEEGFAMFSRWIANMPL

SEQ ID NO: 7373 - protein, 217 aa, Chelidonium majus
  misc_feature (211)..(211): Xaa can be any naturally occurring amino acid
VKKAHEISVLCDAEVGLIVFSTKGKLFEFSSESSMDNILERYERQCFVEEELKATHPESEGNWSLEHTKLKARIEILQKNQRHFMGEDLDPLSLKELQNLEHQLDIALKHVRSRKNQLLYASIAELRKKEKALHEQNILLGKKIKQKEEQIAQWSAQQNDAQNSSSFLTQAPQNSQSFLTQALPSLTLRTGYYQTARVVVCEEDGARSNMXMPPWML

SEQ ID NO: 7374 - protein, 362 aa, Dechloromonas aromatica RCB
MIGDTMQFGRTTLSKFVIENTRASHGELGALLIDVAAAVKTISAMVAKGALAGHHGALDSTNVQGEVQKKLDVLTNDAILRHCEWGGQLAGMASEEMDDPYPIPAEYPRGRYLLVFDPLDGSSNSDVNVSVGTIFSIFSRRAAGDAELGDYLRPGSEQVAAGYAIYGPSTMMVLTLGNGTHGFTLDRESGNFILTHANIRVPEDTREFAINTSNERFWEPPVQRYVSECKAGKSGVRGEDFNTRWIASMVAEVHRILIRGGIFMYPKDSKDPSKPGRLRLLYEANPMAMLIEQAGGAASTGRQRILDVVPDSLHQRAPVILGSKNEVERLARYHHEYDTGADRPFVSPLFSERSLFRDESRA

SEQ ID NO: 7375 - protein, 782 aa, Pseudomonas syringae pv. phaseolicola 1448A
MDISLKNRLSFKQARLAVLIGFALGTLLSLFQIAIDYASEDASINREIKSLLEIIQNPASRIAYNIDSELAQELTLGLLRSPAVVSARLTDNNDAVLASVERPMATGRYRVFSDWLFGESRQFQEKLHLNHLPDETIGTLYLTVDTFAFGSHFLQRAEITLLNGFVRSLALAGILTILFYATLTKPLVRVIRELSSRDPRNPDQGKITCPPHHEQDEIGVLVATFNRQFETMGSEFSRRRAAEDRLTEHLNELENIVSARTNELKASNIRLRESNEELQIARSTALDMAHARSAFLAHMSHEIRTPLNGLLGMLALSLDSPLSAEQRQQLMIAHDSGKVLVELLNDILDMSKFDAGHLEIERIPFDLGVLIEDTANLLSQNAAPSVELTCLIAPDFPAMVTGDPTRVRQIVSNLLSNALKFTRFGRVDVRLTHHKDVSGENRVRIEVRDTGIGIAQDAQAKIFQPFTQAETAITRQYGGTGLGLALTNNLCEAMNGTLSIQSQSGFGSQFCAELPLPVHVSAVTQTALRGRVTVVSSAGSGLVELLGNLLPTWGVDLKRRSIDDRPEDVDLDSSPDLVITDCPECLFAIRPTTPVPILLVTAYGNFMPGEQVTALAPLQQQARPLARNALYHTLRRVLGQEETGVRDTKAPEQTAQRMARVLLVEDNPVNQLVAKGILGKLGCEVIISSHGGEALEQLEQGHFDLVLMDCNMPVMDGYEASRQIRSSGRWPNLPIVALTANAMPDERERCKAAGMNDYLAKPFRRAELAGILDQWIPIADIR

SEQ ID NO: 7376 - protein, 219 aa, Chelidonium majus
  misc_feature (12)..(12): Xaa can be any naturally occurring amino acid
GLVKKAHEISVXCDAEVALIVFSTKGKLFEYSTDSGMERILERYERYSYAERELVASELDQGNWSLEYTKLKAKIEILQKNQRHFMGEDLESMSLKELQNLEQQLDTALKQIRSRKNQLMYESISELQKKEKVLQEQNNQLGKKLKEKEKEVAQQQAQWDQQSQGQSSPSFLLSQSLPSLNIGGSYHMRGSNGSEEEGVRPQTTRTNTTLMPPWMVHHL

SEQ ID NO: 7377 - protein, 1299 aa, Nostoc sp. PCC 7120
MTTDRDSSSKKFGLSPEQFAALFPFHLVIDRELKIVQAGEVIQRILEPMVLLDSYLGEHFQISRPKCLTSFEGICQQTRSLFILQAHYQEIQLKGQMLNLESRDHLLFLGSPWITDIADLKNLGLKINDFPLHDSVSDYLFLLQAKNSALADAQKLTTKLKDQKTELQTTALRLRTLIESLQSGILLEDANQHIILVNQEFCDYFRIPLPPQALQGMDCQQALEASKHLFTEPERFICTTDEIIRQGKMFLHQEWELQDGRTLEQNYIPIVVDHKLYGHLWKYRDITQYKKSEVALRLSEERLKLAVDAVEEGLWDWNLVTGEVYRSARWFTMLGYTPMEIGNDIKFRDKLIHPDDIPLMQQRLISHLKGDTPFYEVEIRLLAKSGEWRWILDRGKLVSRDSQGRAIRMVGTHLDITQRKQAEQDLQQQYQHTLLLKQITEEIRQSLQWEKILKTTVTEVQRILQVDRALIFQINSDGSGKVVQEAVMPGWSVTLDQDIYDPCLKDGYLNMYRDGRITAIADVYQGGLKPCYVEFLQQFQVKANLVVPIRVRRNLWGLLIVHQCDRPRQWTELELDLLKHLADQMGIALTQSQLLAQETRQAQLLALQNEELNVAKQVAEKANMAKSNFLATMSHEIRTPMNAIIGMSGLLLDTTLKPEQFDYVETIRNSSHTLLTIINDILDFSKIESGKLELEEQPFDLRLCVEEALDLLAPQAASKGIELMYQLEPDTPTLVVGDITRIRQILWNLVSNAVKFTKIGEICITIGAKQKIYKQTDPTRYEFQFAVQDTGIGIERDRLHRLFKPFSQVDASMTRRYGGTGLGLAISKRLSEIMGGKMWVESQSHQGSIFYFTATLQVNSSAINSAAKVDPELVGKRLLLAVGNANLRKCLTRQLQSLGLDVQAVDSNATALHCLWQHTSLALAVLDVDSPQINGLHLSTKIRAIPQHQNLPLVMLSAKGKQTLEVKQVASEFTAFLHKPLRHYQLHNTLLQIVRGKWLSKSTPQGIIPSYSRLPKPNLPAIDTHLAENLPLKILLVEDVLVNQKIAMNMLHLLGYRTDVANNGLEALEALQRQLYDVVFMDIQMPEMDGWETTHKIRQEFSPTLQPWIIAMTAHARPEDRQQCLAAGMDDYISKPISLEDITTALKKFGSQRQPALESPASVSISAPPAPTPQPKIEEVIDQQTLEYLRNLGGSDEADEDGGGSSIITELIQLYLEDTPAKIQAIQDAATLEDRSQLARIAHALRSPSVSIGAINLGKICETVEDEAKEQSMDQLTALVNQLNNEYQNVVAALKTLIF

SEQ ID NO: 7378 - protein, 218 aa, Corylopsis sinensis
GLVKKAHEISVLCDAEVALIVFSTKGKLFEYSTDSCMEKILERYERYSYAERQLVATDPNSQGNLSLEYSRLKAKVELLQRNQRHFLGEDLDSLSLRELQTMEQQLDTALKRIRSRKNQLMYESISELQKKEKAMQEQNNMLAKKIKEKEKTMTQQAQWEEQNQDPGAASFLLQQPLPCLNIGNTYNQGVGGGAPEVRRNELDLTLEPVYPCHIGCFA

SEQ ID NO: 7379 - protein, 229 aa, Corylopsis sinensis
VQLKRMENKINRQVTFSKRRAGLLKKANEISVLCDAEVGLIVFSTKGKLYDMERIFDRYERYSYAERQLVVTNHESQGSWTIEHAKLKARMEVLQRNQRHFMGENLDSVSLKELQNLEHQLDNALKHIRSRKNLLMQESISELQRKDKSLQEENNSLSKKIKEKENALAHRAQWEQQNQGLNSFPILLSQPPQSLNIGTYQTGCSEGEEGTPFQQRPNTLLPHWMVSHL

SEQ ID NO: 7380 - protein, 338 aa, Listeria innocua Clip11262
MSKLFSEYKLKDVTLKNRIVMSPMCMYSVENKDGIATDFHFAHYVSRAAGGTGLVILEATAVQEVGRISEFDLGLWNDEQVPALKRLVDGLHYHGAKAGIQLAHAGRKAVLPGEIVAPSAIPFDEKSAKPVELTKEAIKEVVADFKRAAYRAKEAGFDVIEIHAAHGYLIHQFLSPISNRREDNYGGPAGNRYKILSDIIKAVKEVWDGPIIVRVSATDYAHGGLQLEDHIPFAKWMKADGVELIDVSTGGLVNVEPPVFPGYQVPFADEIRRGAGIATGALGLITRGEQAEEILCNERADLIIIGRELLRNPYFAKEAAETLGETIEAPKQYSRAWK

SEQ ID NO: 7381 - protein, 539 aa, Tsukamurella tyrosinosolvens
  misc_feature (426)..(426): Xaa can be any naturally occurring amino acid
MAKTIAFDKKARRGLERGLNALADAVKVTLGPKGRNVVLEKKWGAPTITNDGVSIAKEIELEDPYEKIGAELVKEVAKKTDDVAGDGTTTATVLAQALVREGLRNVAAGANPLGLKRGIEKAVEAVTEHLLKAAKEVETKDQIAATAGISAGDPAIGELIAEAMDKVGKEGVITVEESNTFGLQLELTEGMRFDKGFISGYFATDAERQEAVLEDPYVLLVSGKISTVKDLLPLLEKVIQSGKPLAIIAEDVEGEALVTLIVNKIRGTFKSVAIKAPGFGDRRKAMLQDMAILTGGQVISEEIGLSLDTAGLEVLGQARQVVVTKDETTIVDGAGSKEQIAGRVSQIRAEIENSDSDYDREKLQERLAKLAGGVAVIKAGAATEDLKERKHRIEDAVRNAKAAVEEGIVAGGGSSLAQSGTVFDSXALEGDEATGANIVKVALDAPVKQIAVNAGLEPGVVAEKVRNSPAGTGLNAATGVYEDLLAAGINDPVKVTRSALQNAASIAALFLTTEAVVADKPEKAGAPVDPTGGMGGMDF

SEQ ID NO: 7382 - protein, 340 aa, Brassica rapa subsp. pekinensis
MDHEADAYRTDLMTITRFVLNEQSKYPESRGDFTILLSNIVLGCKFVCSAVNKAGLAKLIGLAGDTNIQGEEQKKLDVLSNDVFIKALVSSGRTSVLVSEEDEEATFVESSKRGKYCVVFDPLDGSSNIDCGVSIGTIFGIYTMEHSDEPTTKDVLKPGNEMVAAGYCMYGSSCMLVLSTGTGVHGFTLDPSLGEFILTHPDIKIPKKGNIYSVNEGNAQNWDGPTTKYVERCKYPKDGSPAKSLRYVGSMVADVHRTLLYGGIFLYPADKKSPNGKLRVLYEVFPMAFLMEQAGGQAFTGKKRALDLVPKKIHERSPIFLGSYDDVEEIKALYAAEENN

SEQ ID NO: 7383 - protein, 686 aa, Pseudomonas aeruginosa UCBPP-PA14
MAFEAMFQPIQIGKLTIRNRVLSTAHAEVYATDGGMTTERYVKYYEEKAKGGIGLAICGGSSVVAIDSPQQWWSSVNLSTDRIIPHFQNLADAMHKHGAKIMIQITHMGRRSRWDGYHWPTLMSPSGIREPVHRATCKTIEVEEIWRVIGNYAQAARRAKEGGLDGVELSAVHQHMIDQFWSPRVNKRTDEWGGSFEGRMKFGLEVLKAVRAEVGEDFCVGMRICGDEFHPDGLSHEDMKQIAKYYSDTGMLDFIGVVGSGCDTHNTLANVIPNMTFPPEPFLHLAAGIKEVVDVPVLHAQNIKDPNQATRILEGGYVDMVGMTRAHIADPHLIAKIKMGQVDQIKQCVGANYCIDRQYQGLDVLCIQNAATSREYMGVPHIIEKSAGPKRKVVVVGGGPAGMEAARVAAERGHDVTLFEKKEQLGGQITTAAKAPQRDQIAGITRWYQLELARLGIDLRLGTAADPETILDLRPDVVVLANGGHPFLEQNEHWGAADGLVVSSWDVLDGTVEPGKNVLVYDTICEFSGMSVADFLADKGAQVEIVTDDIKPGVAIGGTTFPTYYRSMYPKEVIMTGDLMLEKVYREGDKLVAVLENEYTGAREERVVDQVVVENGVRPDESLYYALKQGSRNKGQIDVEALFAIQPQPCLSQPGEGYLLFRIGDCVAQRNTHAAIYDALRLCKDF

SEQ ID NO: 7384 - protein, 479 aa, Polaromonas sp. JS666
MGQKLKIAGWISIGAVAGALTTVQLQAVARGGLTPLPLEELQQLAAVFGMVKTDYVEPVDEKKLITDAISGMVASLDPHSVYFDKKSYKEFREGTSGRFVGVGIEISQEDGLVKVVSPIEGSPADRAGLKPNDLITRIDDTAVKGLSLNDAVKKMRGEPKTKVLLTIFRKDENRTFPVTITREEIRTQSVRSKVVEPGYAWIRLSQFQERTVEDFVTKLEQIYKQEPNLKGLVLDLRNDPGGLLDAAVAVSAAFLPENVTVVSTNGQLAESKFTYKASPEFYQRRNGADPLKRLPAAIKKVPLVVLVNEGSASASEIVAGALQDYKRATIMGNQTFGKGSVQTVRPLGPDTGIKLTTARYYTPSGKSIQARGIVPDVMVDDTAEGSPFAALRTREADLEKHLNSGQGSEVKDASREKAREEALKRLEEEAKKTPEQRRPPELGSDKDFQLAQAINQLKGRPVLVSKTAVVEPKNEKKEN

SEQ ID NO: 7385 - protein, 222 aa, Brassica rapa subsp. pekinensis
MAAPPARARADYDYLIKLLLIGDSGVGKSCLLLRFSDGSFTTSFITTIGIDFKIRTIELDGKRIKLQIWDTAGQERFRTITTAYYRGAMGILLVYDVTDESSFNNIRNWIRNIEQHASDNVNKILVGNKADMDESKRAVPTAKGQALADEYGIKFFETSAKTNLNVEEVFFSIGRDIKQRLSDTDSRAEPATIRISQTDQELDCAGHTEVCMLWKLKTNYIN

SEQ ID NO: 7386 - protein, 370 aa, Cucumis melo
QMGLAENQLSFDLLESWLTKNPDAASFKRDGKSIFRELALFQDYHGLPAFKKALVEFMAEIRGNKVTFEANNIVLTAGATSANETLMFCLAEAGDAFLLPTPYYPGFDRDLKWRTGVEIVPIHYTSSNGFQVTQPALEQAYKEAESRNLRVKGVLVTNPSNPLGTTMTRNELDLVFDFITSKGIHLISDEIYSGTVFGSPGFVSAMEVLKERSNEEEEVWKRVHIVYSLSKDLGLPGFRVGAIYSNDVMVVAAATKMSSFGLVSSQTQYLLSAMLSDKKFTRTYISENQKRLKQRQKMLVSGLEKAGIKCLESNAGLFCWVDMRHLLESDTFESELKLWKKIGYEVGLNISPGSSCHCTEPGWFRVCFAN

SEQ ID NO: 7387 - protein, 643 aa, Shewanella oneidensis MR-1
MCGFAGFFNTSNLTDHARILECMGLELFNRGPDSFGIWFNSDDRIGLVHRRLAIVDLSAAGHQPMTSDSGRYIISYNGEIYNHQELRDELESIRQYNWRGHSDTETLLAAIEQWGLKITLQKATGMFGIALWDTLNKELYLARDRFGEKPVYYGLHKDAFIFASQLNAFRAYPDFKPEINRDSITLLLRHNYIPAPYSIYSDIHKLLPATILKLDSNNNISLETYWSAKDIMSNASSTETDLPVGKQVEALENTLKKAVALQMSADVPLGAFLSGGVDSSLIVSLMQAQSNKPVKTFSIGFDDPRFNEAVFAKEVAKHLGTEHTELYLTAEDALEVIPKLAEIYDEPFSDSSQIPTFLVSKIARQYVTVSLSGDAGDELFCGYNRYLMTSKVWKRLSVLPVFLRSFLANVFTFVPVNVWNLFGKLLPSRLQLSNLGDKLHKAAAVLACRDVEQLYLGLVSHWQNPEQVVLGSKEPLTVLTDPKRKANFSDPILQMMAQDTLSYLTDDILVKVDRAAMAVSLETRVPFLDHSVLEHAWRLSLDLKLRDGKTKWCLREILYKYVPKDLIERPKMGFAVPLDAWLRGPLKVWADNLLAAERLRQEGFFDAELIDRMWQEHKSGKRNWQYQLWDILMFQSWYEKYHK

SEQ ID NO: 7388 - protein, 392 aa, Gaudichaudia albida
DLEPVNPADVPVTAAGALKSYKLAAKAISRLQSLPSGNISLLCDVLVKEVRDLTGYDRVMVYKFHEDEHGEVVSECRRSDLESYLGLHYPATDIPQASRFLFMKNKVRMIYDCLAPPVKVIQDKRLPQPLSLCGSTLRSPHGCHAQYMTNMGTIASLVMSVTVNEDDDTMDGDQQHMTKKLWGLVVCHHTSPRFVPFPLRYACEFLIQVFGVQINKEVELAAQVREKHILQIQTMLCDMLLRDAPVTIITQSPNVMDLVNCDGAALYFKNKTWLLGVTPTEEQIRGIAEWLLKYHSGNTGLSTDSLMEAGYPGASGLGDAVCGMAAVSITSRDFLFWFRSHTAKEIKWGGAKHDPDDKDDLRKMHPRSSFKAFLEVVKWRSMPWEDIEMDAI

SEQ ID NO: 7389 - protein, 353 aa, Saccharomyces cerevisiae
MPKRIVYNISSDFQLKSLLGEGAYGVVCSATHKPTGEIVAIKKIEPFDKPLFALRTLREIKILKHFKHENIITIFNIQRPDSFENFNEVYIIQELMQTDLHRVISTQMLSDDHIQYFIYQTLRAVKVLHGSNVIHRDLKPSNLLINSNCDLKVCDFGLARIIDESAADNSEPTGQQSGMTEYVATRWYRAPEVMLTSAKYSRAMDVWSCGCILAELFLRRPIFPGRDYRHQLLLIFGIIGTPHSDNDLRCIESPRAREYIKSLPMYPAAPLEKMFPRVNPKGIDLLQRMLVFDPAKRITAKEALEHPYLQTYHDPNDEPEGEPIPPSFFEFDHYKEALTTKDLKKLIWNEIFS

SEQ ID NO: 7390 - protein, 474 aa, Arabidopsis thaliana
MDPYKYRPASSYNSPFFTTNSGAPVWNNNSSMTVGPRGPILLEDYHLVEKLANFDRERIPERVVHARGASAKGFFEVTHDISNLTCADFLRAPGVQTPVIVRFSTVIHERGSPETLRDPRGFAVKFYTREGNFDLVGNNFPVFFIRDGMKFPDMVHALKPNPKSHIQENWRILDFFSHHPESLNMFTFLFDDIGIPQDYRHMDGSGVNTYMLINKAGKAHYVKFHWKPTCGVKSLLEEDAIRVGGTNHSHATQDLYDSIAAGNYPEWKLFIQIIDPADEDKFDFDPLDVTKTWPEDILPLQPVGRMVLNKNIDNFFAENEQLAFCPAIIVPGIHYSDDKLLQTRVFSYADTQRHRLGPNYLQLPVNAPKCAHHNNHHEGFMNFMHRDEEVNYFPSRYDQVRHAEKYPTPPAVCSGKRERCIIEKENNFKEPGERYRTFTPERQERFIQRWIDALSDPRITHEIRSIWISYWSQV

SEQ ID NO: 7391 - protein, 392 aa, Gallardoa fischeri
DLEPVNPADVPVTAAGALKSYKLAAKAISRLQSLPSGNISLLCDVLVKEVRDLTGYDRVMVYKFHEDEHGEVVSECRRSDLESYLGLHYPATDIPQASRFLFMKNKVRMICDCLAPPVKVIQDEQLPQPLSLCGSTLRSPHGCHAQYMTNMGTIASLGMSVTVNEDDDMMDGDQHQMTRKLWGLVVCHHTSPRFVPFPLRYACEFLIQVCGVQINKEVELAAQVRKKHILQIQTMLCDMLLRDAPVAIITQSPNVMDLVKCDGAALYFKNKIWLLGVTPTEEQIRDIAEWLLKYHSGNTGLSTDSLMEAGYPGASALGDAVCGMAAVSITSRDLLFWFRSHTAKEIKWGGAKHDPDDKDDLRKMHPRSSFKAFLEVVKWRSKPWKDVEMDAI

SEQ ID NO: 7392 - protein, 392 aa, Peixotoa glabra
DLEPVNPADVPVTAAGALKSYKLAAKAISRLQSLPSGNISLLCDVLVKEVRDLTGYDRVMVYKFHEDEHGEVVSECRRSDLESYLGLHYPATDIPQASRFLFMKNKVRMICDCLAPPVQVIQDERLPQPLSLCGSTLRSPHGCHAQYMTNMGTIASLVMSVTVNEDDDTMDGDQQQMTRKLWGLVVCHHTSPRFVPFPLRYACEFLIQVFGVQITKEVELAAQVRKNHTLQIQTMLCDMLLRDAPVAIITQSPNVMDLVKCDGAALYFKNKTWLLGVTPTEEQIRDIAEWLLKYHSGNTGLSTDSLMEAGYPGASTLGDAVCGMAAVSITSRDFLFWFRSHTAKEIKWGGAKHDPDDKDDLRKMHPRSSFKAFLEVVKWRSMPWEDVEMDAI

SEQ ID NO: 7393 - protein, 392 aa, Ryssopterys timorensis
DLEPVNPADVPVTAAGALKSYKLAAKAISRLQSLPSGNISLLCDVLVKEVRDLTGYDRVMVYKFHEDEHGEVVSECRRSDLESYLGLHYPATDIPQASRFLFMKNKVRMICDCLAPPVKVLQDERLPQPLSLCGSTLRSPHGCHAQYMTNMGTIASLVMSVTINEDDDMMDGDQQQMTRKLWGLVVCHHNSPQFVPFPLRYACEFLIQVFGVQINKEVELAAQVREKHILQIQTMLCDMLLRDAPVAIITQSPNVMDLVKCDGAALYFKNKTWLLGVTPTEEQIRDIAQWLLEYHSGNTGLSTGSLMEAGYSGASALGDAVCGMAAVSITLRDFLFWFRSHTAKEVKWGGAKHDPDDKDDLRKMHPRSSFKAFLEVVKWRSMPWEDIEMDAI

SEQ ID NO: 7394 - protein, 654 aa, Zea mays
MDGCDCIEPLWPTDDLLVKYQYISDFFIALAYFSIPLELIYFVKKSSFFPYRWVLIQFGAFIVLCGATHLINLWTFTTHTKTVAMVMTIAKISTAVVSCATALMLVHIIPDLLSVKTRELFLKNKAEELDREMGLIRTQEETGRHVRMLTHEIRSTLDRHTILKTTLVELGRTLGLEECALWMPSRSGSSLQLFHTLRHQITVGSSVPMNLPVVNQVFSSNRAIIIPHTSSLARVRPLAGRYVPPEVAAVRVPLLHLSNFQINDWPELSAKSFAIMVLMLPSDSARKWHVHELELVEVVADQVRAVSFAMVTITYYFHPEKDVAVALSHAAILEESMRARDLLMEQNVALDLARREAEMAIRARNDFLAVMNHEMRTPMNAIIALSSLLLETELTPEQRLMVETVLKSSNLLATLINDVLDLSKLEDGSLELEIKAFNLHAVFKEVMGFIKPIASIKRLSVSVMLAPDLPLCAIGDEKRLMQTILNISGNAVKFTKEGHITLVASIVKADSLREFRTPEFHPTASDEHFYLKVQVKDTGCGVSPQDLPHVFTKFAHPQSGGNRGFNGSGLGLAICKRFVSLMGGHIWIDSEGTGRGCTATFVIKLGVCDNTNTYQQQLVPLVWPSSADSNLSAPKVLPDGRGSVSLKSRYQRSV

SEQ ID NO: 7395 - protein, 423 aa, Xanthomonas campestris pv. campestris str. ATCC 33913
MSTAPQKPLAIRERLSEVRYEIRGELARRARELEAQGRKLIKLNIGNPGAFGFRAPEHLQRAIADDMGRTDPYTHQQGLPEAREAIAAAYARRQHPDAHPDRIFIGNGVSELIDLSLRALLNPGDEVLVPSPDYPLWSAATILNDGRPVYYRCAPENGFQPDPVEIETLVSSRTRAIVLINPNNPSGASYSRELLERIVAIAVKHNLLLMVDEIYDQVLYDGAAFVPVAPLAGEHPCITFSGLSKVHRACGWRVGWALLSGEQSRINDLRNAMDLLGALRLCANVPGQYAIDAAVNGPDTISALCAPGGRLYETRRAVIEACAASSHLSLVAPAGALYAFPAVVGPAARAFDDHTFALDLMNDEGVLVVPGSSFNVPYRHHFRVTLMPEAAVMRDVFARIDRALTRRAEAVTKVVPLKSRSVA

SEQ ID NO: 7396 - protein, 392 aa, Sphedamnocarpus sp. Davis 03-01
DLEPVNPADVPVTAAGALKSYKLAAKAISRLQSLPSGNISVLCDVLVKEVRDLTGYDRVMVYKFHEDEHGEVVSECRRSDLESYLGLHYPATDIPQASRFLFIKNKVRMICDCLAPPVKVIQDERLPQPLSLCGSTLRSPHGCHSQYMTNMGTIASLVMPVTINEDDDTMDGDQQQMTRKLWGLVVCHHTSPRFVPFPLRYACEFLIQVFGVQINKEVELAAQVREKHILQIQTMLCDMLLRDAPVAIITQSPNEMDLAKSDGTDLYYKNKTWLLGVTPTEEQIRDIAEWLLQYHSGNTGLSTDSLMEAGYPGASALGDSVCGMAAVSITSRDFLFWFRSHTAKEIKWGGAKHDPDDKDDLRKMHPRSSFKAFLEVVKWRSMPWEDVEMDAI

SEQ ID NO: 7397 - protein, 618 aa, Candida albicans SC5314
MSEQAQTQVSADQQQHQHNHHHHHHHHHHNENQSQQQVPIDPAANPANRIGRYQILKTLGEGSFGKVKLAQHLGTGQKVALKIINRKTLAKSDMQGRVEREISYLRLLRHPHIIKLYDVIKSKDEIIMVIEFAGKELFDYIVQRGKMPEDEARRFFQQIIAAVEYCHRHKIVHRDLKPENLLLDDQLNVKIADFGLSNIMTDGNFLKTSCGSPNYAAPEVISGKLYAGPEVDVWSAGVILYVMLCGRLPFDDEFIPALFKKISNGVYTLPNYLSAGAKHLLTRMLVVNPLNRITIHEIMEDEWFKQDMPDYLLPPDLSKNKNSKIDVDEDVIRALSVTMGYDRDEIVNVIEKANKQVAAGNSSSQQSKSSNEILDAYLLMKENHALVKDLKKSKSENIESFLSQSPPPSPFPNAGSTSSAPGVQQSLTYQTLATVPDLSTLPNSTIAILPTSLPSIHRAYMAETKQNGDPSQQHAPPPTKKSKTRWHFGIRSRSYPLDVMGEIYRALKNLGAEWAKPTEEELWTIRVRWKYDTSAQFECGSAPNLMKMQIQLFQLEPNNYLVDFKFDGWESAHGNAGTDSPQSHRQQDLDEVGSFSAYPFLHLATRLIMELAVNSQSG

SEQ ID NO: 7398 - protein, 236 aa, Heuchera americana
VQLRRMENKINRQVTFSKRRGGLVKKAHEISVLCDVEVALIVFSNKGKLFEYSTDSCMEKILERYERYSYAERRLVATGSESQENWSLEYTKLKAKIELLQRSQRQFMGEDLDLLSLRELQNLEQQLDTALKHIRSRKNQLMNQSISDLQKKEKAIQEQNNLLAKKIKEKEKAMSQQAEWEQQNNGASTSNFLNPQPLPCLNISSTYQGGAQPEAMRRNELDLTLEPIYSCHLGCF

SEQ ID NO: 7399 - protein, 686 aa, Pseudomonas syringae pv. phaseolicola 1448A
MAFEAMFQPIQIGKLTIRNRVLSTAHAEVYATDGGMTTDRYVKYYEEKAKGGIGLAICGGSSSVAIDSPQGWWKSVNLATDRIIPHFQNLADAMHRHGAKIMIQITHMGRRSRWDGDHWPTLMSPSGIREPVHRATCKTIEPEEIWRVIGNYASAAARAKAGGLDGVELSAVHQHMIDQFWSPRVNKRTDEWGGSFENRMRFGLEVIKAVRKEVGPDFCVGLRICGDEFHPDGLSHEDMKQIAKYYDDTGMIDFIGVVGSGCDTHNTLANVIPNMSYPPEPFLHLAAGIKEVVKAPVLHAQNIKDPNQATRILEGGYVDMVGMTRAHIADPHLIAKIKMGQIDQIKQCVGANYCIDRQYQGLDVLCIQNAATSREYMGVPHIIEKSTGPKRKVVVVGAGPAGMEAARVSAERGHDVTLFEKKEFIGGQITTASKAPQRDQIAGITRWFQLELARLKVDLRLGVAADAATILDLRPDIVVLAVGGHPFLEQNEHWGAAEGLVVSSWDVLDGKVAPGKNVLVYDTICEFTGMSVADYLADKGSQVEIVTDDIKPGVAIGGTSFPTYYRSMYPKEVIMTGDMMLEKVYREGDKLVAVLENEYTGAREERVVDQVVVENGVRPDEAIYYALKEGSRNKGQIDIDALFAIQPQPSLSQPGDGYLLFRIGDCVAQRNTHAAIYDGLRLCKDF

SEQ ID NO: 7400 - protein, 929 aa, Pseudomonas syringae pv. phaseolicola 1448A
MRWLRIAIASTVGLLTLLFMLSAQAEHGAGWSTLLDEKAHLTLDEIRSARYQNQFSPTELERVAAADRGSAVWLHYRLQPTQHEQLLRIFAPDLSSADMYVMDGDRQIDHLRTGNDVPIEDQRLPSNDFLLPVPQSSASLDIYLRLVSAQKMRPSITLEPAIESAANETQPLLFGLLFGALSMLIVQNLTRYGHTRSRSNLWLAACESLLGLSALLLLNLLRPIDPWNIAQTPSAHLALLLAAVAGLIYTYCFFVHRNARKLDRLLLGNAVLMGIGALLVLFDEKLPINFLTFGLVSLTTLSILAVSMWHWQKGYRSARLFVLGMITFNIGYMVVLPGLLWLSLVPPQWLLLALLSVFCISGLLMSLALSERHRSITEDRFSISRDQAASTAEINAKAEFLAKISHEIRTPMNGVLGMTELLLGTPLSVKQRDYVQTIHSAGNELLTLINEILDITKLESGQIELDDVQFDIGALVEDCLNIFRAKAEQQQVELISQIQPQVPRVINGDPTRLRQTLLSLLENALKKTDEGEILLAVALESSKNGKTRLRISVQDSGESLSDEEREELLHAELHSRNFLASSRLGGHLGLVIARQLIILMDGEFGIQNSGTQGNTLWLNLPLDAKLLEQPTIDLDSPLKDARVLVVDDNDTCRKVLVQQCSAWGLNVSAVASGKEALALLRTKAHLRDYFDVVLLDQNMPGMTGMQLAAKIKEDPSLNHDILLIMLTGISNAPSKIIARNSGIKRILAKPVAGYTLKTTLADELTQLNKGVAAQKPGPVINTPVSVPGDFRILVAEDNSISTKVIRGMLGKLNLNPDTASNGEEALRAMKAQRYDLVLMDCEMPILDGFSATEQLRAWEVGNQRVRTPVVALTAHILTEHKDRARQAGMDGHMAKPIELSQLRELVEHWVAHRDKARGLPSDGEQYRRN

SEQ ID NO: 7401 - protein, 706 aa, Candida glabrata CBS138
MSEHNNENLNLHEGLNLDDDDLENMLKNPNLFTTSPGIDVESIPSATNQNSVNGQDDKSGIKSQNSDTNEVIEDIVNPSIDPYVSTPHNDEMASPEDDIDSINNKDSNKLMTSLVRQNYGPHLGRDNADINSSNFRSHYQNLFDDNYLKTDMGSPVNKNKRKREDDDDDQLYSSQILRGPLSPGGNAHKVDNRLMSYGSNNLNSRQQTPGMENTPSVLNRRFQNKTRPAFVNKVWSMINDPVNSHLIQWSEDGLSLIVVNREKFVHEILPKYFKHSNFASFVRQLNMYGWHKVQDVKSGSIQSSSDDRWQFENEFFVRGREDLLNRIVRQKGTSANATPGTQSNMKYGNGNQIRGLPNVNGQTLRLMNEANMGNTMDITAVLGELEQIKFNQMAISKDLMRINKDNELLWKENMIARERHRTQQQALEKIFRFLRNVVPHADQKLLMDVAEPVSSRIEEAQDISDAPSVSSKSFDFDDGKEDRSRYIPLQDEDGKRPLYLLKNRTMSENSNKSSGGRLASTHNDSSGRISEIPFEEDDLSPPRHEVTDVGHISGQKNVAIDKLKADLHEQEARIKYLEDMVENKTLDSHLNDSMTMPMMPSPSTMLMHDMVEPSTIALGKEATDTSEGKHHGHDQQGQVQGQDQVQGQDQMHSQDQQNDMSAIGGLSELSPGLSPGLSSGLSPGFDIGDYLNSSQNHMTPMYEDKK

SEQ ID NO: 7402 - protein, 210 aa, Heuchera americana
  misc_feature (194)..(194): Xaa can be any naturally occurring amino acid
SVLCDAEVALIVFSNRGKLYEFCSTSNMLKTLERYQKCSYGAVEVNRPCKELESSYREYLKLKGKFEGLQRTQRNLLGEDLGPLNTKELEQLERQLDSSLKLIRSTRTQFMLDQLSDLQNKEQVLMDSNRSLARKLDEISAKNNNLRLSWEGGEQSIPYSQQQAQPQGLFQPLDCNPTLQIGYNSIGSDPDDYXQLMHRMSTGFMPSWML

SEQ ID NO: 7403 - protein, 667 aa, Bradyrhizobium sp. BTAi1
MSQHQPFAQALSPLDVGPLRFRNRIFVPAHTTNFGEHHLPSAQHLAYHRARARGGVGAIIFESIRVHANSLGRPQAVCGFDPACIDPFRRITDAVKAEGAVMLGQIIHLGRQVEGDFERTVAWGASAVPWSISALPPRPMDEFDMEEVIEGHLVTARNLVAAGFDGIELQMAHGHLLQQFMSPLSNKRNDEYGGALENRLRFPARVLAALRAELGAGFCLGIRISGEEYAEGGLGIDEAERIVPMLARQTRIDFINVSHSAYVASYSLATQMADMAFDPAPFRSLPARIRAELRTEGFDTPVFAVCRFTGLDEADAMIAAGHADAVGMARAHLAEPAIVRKSVEGRLDEIRRCIGCNQGCAGMLERNLPIRCLINPIAGLEAQFDEPEALPRGARKKVLVVGGGPAGLEAARVAAALGHDVTLWERSDQLGGQLRTAWLMPKRANFETFVAFQIAALARLGVTTIFNKEASAAEIAAFGADRIILATGSTTTPMPVPGSGPVFTLPDALRAPDRLGAAVAVFDRTGEWGTLAALEHFADLGKAVTLFVPAASYAWRTTIYSTLANSRRLRERKVRIATLRAVRAFDGGTLEVEDLSTGEVARLSGFSALVAVDHNSADQTLYLALRRAGLPVMQAGDNNAPRTALEATYQGHMAARAPFPAASGLTT

SEQ ID NO: 7404 - protein, 544 aa, Brassica napus
MKLLHGLALVFLLAAASCKADEEITCEENNPFTCSNTDILSSKNFGKDFLFGVASSAYQACRGVNVWDGFSHRYPEKSGSDLKNGDTTCESYTRWQKDVDVMGELNATGYRFSFAWSRIIPKGKVSRGVNQGGLDYYHKLIDALLEKNITPFVTLFHWDLPQTLQDEYEGFLDRQIIQDFKDYADLCFKEFGGKVKHWITINQLYTVPTRGYAVGTDAPGRCSPMVDTKHRCYGGNSSPEPYIVAHNQLLAHATVVDLYRTKYKFQKGKIGPVMITRWFLPFDESDPASIEAAERMNQFFHGWYMEPLTKGRYPDIMRQIVGSRLPNFTEEEAELVAGSYDFLGLNYYVTQYAQPKPNPYPSETHTAMMDAGVKLTYDNSRGEFLGPLFVEDEVNGNSYYYPKGIYYVMDYFKTKYGDPLIYVTENGFSTPSSENREQAIADYKRIDYLCSHLCFLRKVIKEKGVNVRGYFAWALGDNYEFCKGFTVRFGLSYVNWEDLDDRNLKESGKWYQRFINGTVKNSAKQDFLRSSLSSQSQKKKLADA

SEQ ID NO: 7405 - protein, 486 aa, Bacteroides fragilis NCTC 9343
MENKKLTAANGRPIADNQNSQTAGPRGPIMLQDPWLIEKLAHFDREVIPERRMHAKGSGAYGTFTVTHDITKYTRAAIFSQVGKQTECFVRFSTVAGERGAADAERDIRGFAMKFYTEEGNWDLVGNNTPVFFLRDPLKFPDLNHAVKRDPRNNMRSANNNWDFWTLLPEALHQVTITMSPRGIPASYRHMHGFGSHTYSFLNAENKRIWVKFHLKTMQGIKNLTDQEAEAIIAKDRESHQRDLYESIERGDFPKWKFQIQLMTEEEADNYRINPFDLTKVWPHKDFPLQDVGILELNRNPENYFAEVEQSAFNPMNIVEGIGFSPDKMLQGRLFSYGDAQRYRLGVNSEQIPVNKPRCPFHAFHRDGAMRVDGNYGSAKGYEPNSYGEWQDSPEKKEPPLKVHGDVFNYNEREYDDDYYSQPGDLFRLMPADEQQLLFENTARAMGDAELFIKQRHVRNCYKADPAYGTGVAQALGIDLEEALKE

SEQ ID NO: 7406 - protein, 370 aa, Deinococcus radiodurans R1
MTVSSAAAPQPASPAAPLLFTPLKLRSLELPNRVVVSPMCTYSATDGVANEFHLVHLGQYALGGAGLILAEATAVSPEGRITPEDLGLWDDRQIVPLGHITDFVHQHGGHIGVQLAHAGRKASTYAPWRGKGAVPAELGGWQVIGPDENSFHDLFPTPAMMGADELRGVVDAFSAAARRAQVAGFDAVEVHAAHGYLLHQFLSPLANTRTDDYGGSFENRTRLLLEVVRAVRHVWPAHLPLFVRLSATDWAEGGWDLEQTVQLSKLLKYEGVDVLDISSGGLTAAQQIEVGPGYQVPFAAAVSRAETEISVMAVGLIETGAQAEAILQAGDADLIALGRPFLRDPHWAQRAARELGLRPVSIDQYARAGW

SEQ ID NO: 7407 - protein, 475 aa, Brassica napus
  misc_feature (299)..(299): Xaa can be any naturally occurring amino acid
MAAAVSTVGAINRAPLSLNGSGAGAASVPATTFLGKKVVTASRFTQSNNKKSNGSFKVVAVKEDKQTDGDRWRGLAYDTSDDQQDITRGKGMVDSVFQAPMGTGTHNAVLSSYEYISQGLKQYNLDNMMDGLYIAPAFMDKLVVHITKNFLTLPNIKVPLILGIWGGKGQGKSFQCELVMAKMGINPIMMSAGELESGNAGEPAKLIRQRYREAADMIKKGKMCVLFINDLDAGAGRMGGTTQYTVNNQMVNATLMNIADNPTNVQLPGMYNKEENARVPIIVTGNDFSTLYAPLIRDXRMEKFYWAPTREDRIGVCKGIFRTDNVKDEDIVTLVDQFPGQSIDFFGALRARVYDDEVRKFVEGLGVEKIGKRLVKSTHGSAVFEQPAMTLEKLMEYGNMLVMEQENVKRVQLADQYLNEAALGDANADAIGRGTFYGKAAQQVNLPVPEGCTDPQADNFDPTARSDDGTCVYNF

SEQ ID NO: 7408 - protein, 629 aa, Cytophaga hutchinsonii
MCGITGIFAFNQIGAFYMINLGKSIELLAHRGPDGRGTFVEELIALGHRRLSVIDTINGRQPMHDSTDRYVLTFNGEIFNYKILREQLIQEAGYTFTTDSDTEVLLNAYIHWGEACLLKLNGFFAFAIYDKQKHEIFVARDRMGVKPLLYYKDEDKFIFASEMKAVLAYNVPKEIDWVSVQQYFTLGYIPEPDSIFKDVKKLEAGSYLLINKAGVISKKYYEIPSSTQTKHQHSFEQAAAHVKELVDASVKDRLVADVPVGAFLSGGLDSSIVVASASKHVENLHTFSVGFKGADFYDETKSAELVAKTFNTSHTTFSLSQTELADNILPCLESMSEPFGDTSSLPLFVLSKKVAPSMKVILSGDGADELFGGYNKHRAEWLIKNPNWQIRFAQLIQPVVKILPGNRNTPMGDKIRQAQKLIEGLTLTDAERYYRWCSVFSEEAHKEMFQENIADNEEYKIRKGGILHAFKKNPYDLNRILYTDLNLVLGSDMLHKVDSMSMANGLEVREPMIDYRLVEYVSTLPSSYKINKNGGKQVLKHAYKDELPAEILSKAKHGFDVPLTKIFSKELKAWILDELLSQKFIEQQHVFKWSYIKNIRNAIDKNSNLDESKIWPLITFQFWWKKFMN

SEQ ID NO: 7409 - protein, 547 aa, Silicibacter sp. TM1040
MAAKDVKFDTDARNRMLKGVNTLADAVKVTLGPKGRNVVLEKSFGAPRITKDGVSVAKEIELEDKFENMGAQMVKEVASRTNDEAGDGTTTATVLAQSIVREGLKQVAAGLNPMDLKRGIDLATDKVVEAIKAMAREVKDSDEVAQVGTISANGEAEIGRQIADAMQKVGNDGVITVEENKGLETETDVVEGMQFDRGYLSPYFVTNADKMTAELEDCLILLHEKKLSSLQPMVPLLEQVIQSQKPLLIIAEDVEGEALATLVVNKLRGGLKIAAVKAPGFGDRRKAMLQDIAILTGGQVISEDLGMKLESVTMDMLGTAKKIQITKDETTIVDGAGEKAEIEARVAQIRAQIEETTSDYDREKLQERVAKLAGGVAVIRVGGMTEVEVKERKDRVDDALNATRAAVQEGVIVGGGVALVQAGKSLEGLTGVNADQNAGIAIVRRALEAPLRQIAENAGVDGAVVAGKIRESEDKNFGFNAQTEEYGDMFSFGVIDPAKVTRTALEDAASIAGLLITTEAMVADKPAKEGAAPAGGMPDMGGMGGMM

SEQ ID NO: 7410 - protein, 192 aa, Apium graveolens var. dulce
GNSIPPIMPIGRGAYGIVCSIMNTETNEMVAIKKIANAFDNYMDAKRTLREIKLLRHLDHENIIALTDVIPPPVRRNFSDVYIATELMDTDLHQIIRSNQVLSEEHCQYFLYQLLRGLKYIHSANIIHRDLKPSNLLLNSNCDLKICDFGLARPNTDDEFMTEYVVTRWYRAPELLLNSSDYTAAIDVWSVG

SEQ ID NO: 7411 - protein, 1003 aa, Burkholderia sp. 383
MPAKLKRLLAHAAAVGRKPFDPGRVRRQQQMLLYGGGSAVTAFIVVCAALVIRLDVQDSLGQARATFLQRGAELHANLQTADRALSAFGIRTEQLWDQGVQPPQDAVQSFSADHGRLLVRAAGGWEPFLAIAEVTPDRPAESYARYLGATLAQIDRSSHYPPSPASADLIGGYLIGLDGAFLGIVGSGNVARARSLPPDIDVPALIARLRPTGETKQKSDMLGGTFTLDRRYDPILGRTIVRFARRLDDAAGHPFAWLIFNGTSDLDDIMMPRSDDEDVAVVDARGRIVFGRQRDPAMIERAMNGTRASSGGHVVVRRVGTRFVISDRLPESGLTLITTFSWRSVASATAVGVSVTLAAALFAISMLWIAIVTFDLRALRPANRRAIRLIESEAFNRTLIRTAPAGLLLLSAADGETMVRNDAVLAYDDGVSGLPLGKRIWQACRERQRAGADERRFVMQQELAVERAGHDTTYLAAHVVRTKFRGVDVLLCTLTDVTARKLTEDKLREARVAADDANKAKSTFLATMSHEIRTPLNAIIGNLELMGRAELPPTEQRRLKTIVSSSDALLNIINDVLDLSKAESNQMALEHIPFDLRRVLQDVASIFRPLADAKGLSLECHVAAELADGYVGDPTRLRQLVSNLVGNAIKFTEHGGITIDARLARGDARAGCVEIAVRDTGVGIPGEALPTLFDVYMQADASIYRRFGGTGLGLPLCRRIARLMDGELTVESRLGEGSTFVATLPLTDAPAGCLDAASEPDAASVASTSPRRDDVPPLRVLVAEDHPASRALLRDQLDALGHDATIVENGMEAMRAYFAHPFDIVLTDLSMPQLDGFALANFLREQGANVPVIAMTAHATDEDRGRCRQVGVAEVVLKPLSIDSLDAALRRHGSRDGAVAGAVDSGVREVAPVMTGEMRRTLREATLRSLAAIEAALSGDDGEVLRVELHSMRGGFALAGDRAARDACAQMEAAVNTGGAAAFELHWAAFRQEMEHALERIDR

SEQ ID NO: 7412 - protein, 508 aa, Oryza sativa (japonica cultivar-group)
MATGVSVENINPKVILGPSSIAECIVTNARREINRYLTFFFQHLQQQLQTQPGSLPFDEIVYCNIGNPQSLGQKPITFFREVLALCNHPNLLEREEIKSLFSTDAIARAKKILSMIPGRATGAYSHSQGIKGLRDEIAAGIASRDGFPANADDIFLTNGASPGVHMMMQLLIRNNRDGIMCPIPQYSLYSASLALHGGALVPYYLDESSGWGLEVSKLKNQLEDARSKGITVRALVVINPGNPTGQILDEQQQYELVKFCKDEELVLLADEVYQENIYVTNKKINSFKKIARSMGYNGDDLQLVSLHSVSKGYYGECGKRGGYMEVTGFSTPVREQLYKIASVNLCSNITGQILASLIMDPPKAGDASYDLYEEEKDNILKSLSRRAKAMESAFNSIDGITCNKTEGAMYLFPRIYLPQKAIEAARAVNKAPDVFYALRLLDTTGIVVTPGSGFGQIIRCYLFTCNSEFLTTQVWSFVKGCRDMAREMHDPAAGGEDTFDDLPLQGIP

SEQ ID NO: 7413 - protein, 1032 aa, Burkholderia sp. 383
MQKRPGAPASSHCDMPYSPLQSIRRYQNISVFGGGIVVTILILIACALGMGSIVYGYLDGERHNFLTGMVQTLNEIKVSETSFRNGVTNAQLIWRETGPVPDSVVDAFYDAGERTAIKPYPSVVFGVSKQPADRTEVARYLSLSVLLARICAASSINRGQTLVGYHYSTRASLLGLVPDSGAGGGALATPEGRVQVMEALRIDFGASPVQGRSTTGRPHVHWLPPFIDPISGAARIRLAAQAQVDGEPFAVIVTEYAPEHLLSWQPEHPVDGVFFVTTGDNQLVAASPGVAGDEARTGRLLALDPSRDRTKPEQAAFRDGFVIFHGTLDATGWTLAYALPWTDVVANVAWRASLLLGASLLTIAIMWILLVRFHRRVFASVYARSQRVFDSEALCRSVIETAPIGLGLISRADGHFMLVSPALAEMIARLGSDYRALSAQAVARYDAFIAGGAAGGTLQTDFVLAEADAGAAPLHLEVSACGARYQEIDVLIVAVADVTARRQLVQQLEEAVRAADSANAAKSSFLAAITHEIRTPLNVILGNLELLDRSALDASQHGRVQTLRAAASGLLGLVSDILDFSKIEAGAMTVEAIEFDVIGVIERTLGAFAPVAKAKGLSLFCEIDASDAQRMRGDPTRLGQVLGNLLSNAIKFTASGHVLVRVSVASAGCGDAELSIAVEDTGIGIAGADRHKLFKAFSQVDASITRRYGGTGLGLALCDRLAAAMGGRIDVASVPGTGSRFTLTVPLGVAVMPLGAQPARGARVPVIVVARTEWQRFALPHLRAWGFDVDVYDRPARIPADRRARAAAIVLFGDSDAWSRAELDSLGGDCPVVLATPDGPPQAYRAGRTIRVSSYALGGFKAALAKAMTDTGVPATQRPASTHVEAVRPDAWRVVLAGIDSVSSTLLREQLHVLGCEVQAAHSAEAALDLLATGAWHVLLVDASLPDMPVCSLANAVRALGMGSDVVVVTSHVAPVDRRRYADAGIDCVLTKPVTLAHLRGALADIARRRGAPEQGVGKEQDVARFAHGGTV

SEQ ID NO: 7414 - protein, 403 aa, Chlorococcum littorale
MQMQMKNTAFKATGAKTAPKAVRVPACKASKSQAGRWAAIDAGNDMSDDQQDITRGRDMVDSLFQGPGSGGGTHSAVLSSEDYLSTASRNFNNVEDGFYISPAFLDKMTIHVAKNFMDLPKIKVPLILGIWGGKGQGKTFQCALAYKKLGISPIVMSAGELESGNAGEPAKLIRQRYREASDSVKKGKMCSLFINDLDAGAGRMGMGTQYTVNNQMVNATLMNIADNPTNVQLPGVYKEVQIPRVPIVCTGNDFSTLYAPLIRDGRMEKYYWNPTREDRIGVCMGIFQEDNVNRGEVEVLVDAFPGQSIDFFGALRARVYDDKVREFVKNTGVENLSKRLINSREGKVVFEKPSMNLDILMKYGKFLTNEQENVKRVQLAEEYMMGASLAGDHGTSLPENYTR

SEQ ID NO: 7415 - protein, 392 aa, Tristellateia madagascariensis
DLEPVNPADVPVTAAGALKSYKLAAKAISRLQSLPSGNISLLCDVLVKEVRDLTGYDRVMVYKFHEDEHGEVVSECRRSDLESYLGLHYPATDIPQASRFLFMKNKVRMICDCLAPPVKVIQDERLPQPLSLCGSTLRSPHGCHAQYMANMGTIASLVMSVTINEDDDTMDGDQQQMARKLWGLVVCHHTSPRFVPFPLRYACEFLIQVFGVQINKELELAAQVREKHILRIQTMLCDMLLRDAPVGIITQSPNVMDLVKCDGAALFYKNKFWLLGITPTEAQIRDIAEWLLEYHSGNTGLSTDSLMEAGYPGASVLGDAVCGMASVSITSRDFLFWFRSHTAKEIKWGGAKHDPDDKDDGRKMHPRSSFKAFLEVVKWRSLPWEDVEMDAI

SEQ ID NO: 7416 - protein, 392 aa, Tristellateia africana
DLEPVNPADVPVTAAGALKSYKLAAKAISRLQSLPSGNISLLCDVLVKEVRDLTGYDRVMVYKFHEDEHGEVVSECRRSDLESYLGLHYPATDIPQASRFLFMKNKVRMICDCLAPQVKVIQDERLPQPLSLCGSTLRSPHGCHAQYMANMGTIASLVMSVTINEDDDTMDGDQQQMARKLWGLVVCHHTSPQFVPFPLRYACEFLIQVFGVQINKEIELAAQVREKHILRIQTMLCDMLLRDAPVGIITQSPNVMDLVKCDGAALFYKNKFWLLGITPTEAQIRDIAEWLLEYHSGNTGLSTDSLMEAGYPGASVLGDTVCGMASVSITSRDFLFWFRSHTAKEIKWGGAKHDPDDKDDGRKMHPRSSFKVFLEVVKWRSLPWEDMEMDAI

SEQ ID NO: 7417 - protein, 392 aa, Heladena multiflora
DLEPVNPFDVPVTAAGALKSYKLAAKAISRLQSLPSGNISLLCDVLVKEVRDLTGYDRVMVYKFHEDEHGEVVSECRRSDLESYLGLHYPATDIPQASRFLFMKNKVRMICDCLAPPVKVIQDERLPQPLSLCGSTLRSPHGCHAQYMANMGTIASLVMSVTINEDDDTMDGDQQQMARKLWGLVVCHHTSTQFVPFPLRYACEFLIQVFGVQINKEVELAAQAREKHILQIQTTLCDMLLRDAPVAIITQSPNVMDLVKCDGAALYYKNKFRLLGVTPTEAQIRDIAEWLLEYHSGNTGLSTDSLMEAGYPGASVLGDAVCGMAAVSITSRDFLFWFRSHTAKEIKWGGAKHDPDDKDDGRKMHPRSSFKAFLEVVKWRSLPWEDMEMDAI

SEQ ID NO: 7418 - protein, 384 aa, Bunchosia armeniaca
DVPVTAAGALKSYKLAAKAISRLQSLPSGNISLQCDVLVKEVRDLIGYDRVMVYKFHDDEHGEVVSECCRSDLESYLGLHYPATDIPQASRFLFMKNKVRMICDCLAPPVKVIQDERLPQPLSLCGSTLRSPHGCHAQYMENMGTIASLVMSVTINEDDDMMDGDQQQMARTLWGLVVCHHTSPRFVPFPLRYACEFLIQVFGVQINKEVELAAQVREKQILRIQTMLCDMLLRDAPVAIITQSPNVMDLVKCDGAALYYKNKFWLLGVTPTEAQIRDIAEWLLEYHSGNTGLSTDSLMEAGYPGASVLGDAVCGMAAVSITSRDFLFWFRSHTAKEIKWGGAKHDPDDKDDGRKMHPRSSFKAFLEVVKWRSLPWEDIEMDAI

SEQ ID NO: 7419 - protein, 631 aa, Alkaliphilus metalliredigenes QYMF
MGKKMISQQDVYLFHEGTNYYGYKSLGAHVTVEGGQKGTRFTAWVPNAKEVRVAGDFNHWQGQQHPMEKIPDSKLWSVFIGGIQEGTLYKYEILGDNGAFYLKIDPYGFLSEPRPNTASIVCELEDYPWQDQKWQQNKVVENSLHRPVMIYEVHLGSWRRKADDSFCNYREIAHELGDYAVEMGYTHVEVMPIMEHPLDDSWGYQITGYYAVTSRYGNPKDFMYFVDYLHQKGIGVILDWVPGHFCADAHGLRQFDGGNVYEYQDANRAINKEWGTVNFDLGKPEVKSFLISNACFWMEMYHIDGLRVDAVANMLYLDYGREHGDWTANQYGGNENLEAVDFLKQLNKAVFQYFPNHFMIAEESTQWPMVTAPIHVGGLGFNYKWNMGWMNDTLKYMELDPIHRKWSHNLLTFSLMYTYTENFILPLSHDEVVHEKKSLLEKMSGNYWEKFANLRCYYGYLMAHPGKKLLFMGGEFGQFIEWNHNKALDWMLLDHEMHRKLHQYMKDLIHFYKEEASLWQNDYQVEGFQWIDPNDYQQSMITFMRRRADDFTIIICNFTTIPREQYRVGVPFKGNYKEVFNSDSTEYGGSGVKNPRVMKAEKVKWHNQSYSIETSIPPLGVLYIRQEKDEE

SEQ ID NO: 7420 - protein, 392 aa, Thryallis longifolia
DLEPVNPADVPVTAAGALKSYKLAAKAISRLQSLPSGNISLLCDVIVKEVRDLTGYDRVMVYKFHEDEHGEVVSECRRSDLESYLGLHYPATDIPQASRFLFMKNKVRMICDCLAPPVKVIQDERLPQPLSLCGSTLRSPHGCHAQYMANMGTIASLVMSVTINEDDDMMDGDQQQMARKLWGLVVCHHTSPRFVPFPLRYACEFLIQVFGVQINKEVEFAAQVSEKHILRIQTMLCDMLLRDAPVAIITQSPSVMDLVKCDGAALYYKNRFWLLGVTPTEAQIRDIAEWLLEYHSGNTGLSTDSLLEAGYPGASVLGDAVCGMAAVSITSRDFLFWFRSHTAKEIKWGGAKHDPDDKDDGRKMHPRSSFKAFLEVVKWRSLPWEDVEMDAI

SEQ ID NO: 7421 - protein, 210 aa, Lycopersicon esculentum
AHEMSVLCDAEVALIIFSNRGKLYEFCSSSSMLKTLERYQKCNYGAPEPNISTREALEISSQQEYLKLKGRYEALQRSQRNLLGEDLGPLNSKELESLERQLDMSLKQIRSTRTQLMLDQLTDYQRKEHALNEANRTLKQRLMEGSQLNLQWQPNAQDVGYGRQTTQTQGDGFFHPLDCEPTLQIGYQNDPITVGGAGPSVNNYMAGWLP

SEQ ID NO: 7422 - protein, 462 aa, Arabidopsis thaliana
MSEEQPHANLAVPAFKTEKEPITQTRNGQSSVWRFGGSDKAAKASTVTLRGVIYMLFDNCGKDVNKTILPLGHGDPSVYPCFRTCIEAEDAVVDVLRSGKGNSYGPGAGILPARRAVADYMNRDLPHKLTPEDIFLTAGCNQGIEIVFESLARPNANILLPRPGFPHYDARAAYSGLEVRKFDLLPEKEWEIDLEGIEAIADENTVAMVVINPNNPCGNVYSHDHLKKVAETARKLGIMVISDEVYDRTIFGDNPFVSMGKFASIVPVLTLAGISKGWVVPGWKIGWIALNDPEGVFETTKVLQSIKQNLDVTPDPATIIQAALPAILEKADKNFFAKKNKILKHNVDLVCDRLKDIPCVVCPKKPESCTYLLTKLELSLMDNIKDDIDFCVKLAREENLVFLPGDALGLKNWVRITIGVEAHMLEDALERLKGFCTRHAKKTETETESLQALKLSDNNLEM

SEQ ID NO: 7423 - protein, 450 aa, Bacillus circulans
MSIHMFPSDFKWGVATAAYQIEGAYNEDGRGMSIWDTFAHTPGKVKNGDNGNVACDSYHRVEEDVQLLKDLGVKVYRFSISWPRVLPQGTGEVNRAGLDYYHRLVDELLANGIEPFCTLYHWDLPQALQDQGGWGSRITIDAFAEYAELMFKELGGKIKQWITFNEPWCMAFLSNYLGVHAPGNKDLQLAIDVSHHLLVAHGRAVTLFRELGISGEIGIAPNTSWAVPYRRTKEDMEACLRVNGWSGDWYLDPIYFGEYPKFMLDWYENLGYKPPIVDGDMELIHQPIDFIGINYYTSSMNRYNPGEAGGMLSSEAISMGAPKTDIGWEIYAEGLYDLLRYTADKYGNPTLYITENGACYNDGLSLDGRIHDQRRIDYLAMHLIQASRAIEDGINLKGYMEWSLMDNFEWAEGYGMRFGLVHVDYDTLVRTPKDSFYWYKGVISRGWLDL

SEQ ID NO: 7424 - protein, 214 aa, Michelia figo
  misc_feature (210)..(210): Xaa can be any naturally occurring amino acid
RPCAEMSMLCDAEVALIVFSSRGKLYEFGSAGVNKTLERYQRCCYTFQDANITDRDTQGWYQEVSKLKAKCDSLQRSQRHLLGEDLGPLSVKELQKLERQLESALTQTRQRKTQIMLEHMEALREKERQLGDINKELKNKLEAKGQGAFRAMQASWESGPLVGNNGFPMHPSQSAAIECEPTLQIGYHSFAAPEASIPRTVVAESNFMPXGMLC

SEQ ID NO: 7425 - protein, 102 aa, Oryza sativa
MSSDGGPVLGGVEPVGNENDLHLVDLARFAVTEHNKKANSLLEFEKLVSVKQQVVAGTLYYFTIEVKEGDAKKLYEAKVWEKPWMDFKELQEFKPVDASANA

SEQ ID NO: 7426 - protein, 568 aa, Zea mays
  misc_feature (200)..(200): Xaa can be any naturally occurring amino acid
  misc_feature (364)..(364): Xaa can be any naturally occurring amino acid
MAPLLAAAMNHAAAHPGLRSHLVGPNNESFSRHHLPSSSPQSSKRRCNLSFTTRSARVGSQNGVQMLSPSEIPQRDWFPSDFTFGAATSAYQIEGAWNEDGKGESNWDHFCHNHPERILDGSNSDIGANSYHMYKTDVRLLKEMGMDAYRFSISWPRILPKGTKEGGINPDGIKYYRNLINLLLENGIEPYVTIFHWDVXPQALEEKYGGFLDKSHKSIVEDYTYFAKVCFDNFGDKVKNWLTFNEPQTFTSFSYGTGVFAPGRCSPGLDCAYPTGNSLVEPYTAGHNILLAHAEAVDLYNKHYKRDDTRIGLAFDVMGRVPYGTSFLDKQAEERSWDINLGWFLEPVVRGDYPFSMRSLAREXRLPFFKDEQKEKLAGSYNMLGLNYYTSRFSKNIDISPNYSPVLNTDDAYASQEVNGPDGKPIGPPMGNPWIYMYPEGLKDLLMIMKNKYGNPPIYITENGIGDVDTKETPLPMEAALNDYKRLDYIQRHIATLKESIDLGSNVQGYFAWSLLDNFEWFAGFTERYGIVYVDRNNNCTRYMKESAKWLKEFNTAKKPSKKILTPA

SEQ ID NO: 7427 - protein, 492 aa, Glycine max
MDPYKHRPSSAFNSPFWTTNSGAPIWNNNSSLTVGARGPILLEDYHLVEKLANFDRERIPERVVHARGASAKGFFEVTHDISHLTCADFLRAPGVQTPVIVRFSTVIHERGSPETLRDPRGFAVKFYTREGNFDLVGNNLPVFFVRDGMKFPDMVHALKPNPKNHIQENWRILDFFSHFPESLHMFTFLFDDLGVPQDYRHMDGFGVNTYTLINKAGKAVYVKFHWKTTSGIKCLLEEEAIKVGGANHSHATQDLHDSIAAGNYPEWKLFVQTIDPEHEDKFDFDPLDVTKTWPEDIIPLQPVGRLVLNKNIDNFFAENEQLAFCPAIVVPGVYYSDDKMLQTRIFSYADSQRHRLGPNYLQLPANAPKCAHHNNHHEGFMNFIHRDEEVNYFPSRYDPVRHAERFPIPPAICSGRREKCGIEKENNFKQPGERYRSWAPDRQDRFARRWVDALSDPRVTHEIRSVWISYWSQADRSLGQKIASHLSTRPNI

SEQ ID NO: 7428 - protein, 370 aa, Mesorhizobium sp. BNC1
MSSKLFTPMRVGSLQLDNRIVIAPMCQYSAENGCMTDWHTIHLGGLALSGAALLTIEATAVTPEGRISYADVGLYSDENEAAMRRVLETVRRWSDMPIAIQLAHAGRKASSEIPWKGGGQIRPGLPGGWQTEAPSAVPFKESENPPIALDRAGLARVRDAFAEATRRSARLGLDAVQIHAAHGYLLHEFLSPLSNRRDDEYGGSLENRMRFPLEVFDAVRAAFPAEQPVTVRVSGTDWAEGGWTIEDTVAFAKALEARGCGAIHVSSGGLSAAQRIPIGPNYQVPLARAVKAAVRMPVVAVGLITEFEQAEAIIGTGDADFVALARTILYDPHWPWHAAAHLGARVKAPKQYLRSQPRRYKDLFAVRADD

SEQ ID NO: 7429 - protein, 390 aa, Echinopterys eglandulosa
DLEPVNPADVPVTAAGSLKSYKLAAKAISRLQSLPSGNISLLCDVLVKEVRELTGYDRVMVYKFLEDEHGDVVSECRRSDLESYLGLHYPATDIPQASRFLFMKNKVRMICDCLAPPVKVIQDERLPQPLSLCGSALRSPHGCHAQYMMGTIASLVMSVTINEDDDTMDGDQQQMARKLWGLVVCHHTSPRFVPFPLRYACEFLIQVFGVQINKEVGLAGQVREKHILRIQTMLCDMLLRDAPVAIITQSPNVMDLVMCDGAALYYKNKFWLLGVTPTEAQIRDIAEWLLKYHSQNTGLSTDSLMEAGYPGASVLGDAVCGMAAVSLTSKDFLFWFRSHTAEGIKWGGATHDPDDKDDGRKMHPRLSFKAFLEVVKWRSLPWEDVEMDAI

SEQ ID NO: 7430 - protein, 392 aa, Dicella nucifera
DLEPVNPADVPVTAAGALKSYNLASKAISRLQSLPSGNISLLCDVLVKEVRDLTGYDRVMVYKFHEDEHGDVVSECRRSDLESYLGLHYPATDIPQASRFLFMKNKVRMICDCLAPPVKVIQDERLPQPLSLCGSTLRSPHGCHAQYMTNMGTIASLVMSVTINEEDETMDGDQQQMTRKLWGLVVCHHTSPRFVPFPLRYACEFLIQVFGVQINKEVELAAQVRENHILQIQTMLCDMLLRDAPVAIITQSPNVMDLVKCDGAALYFKNKTWLLGVTPTEKQIRDIAEWLLEYHSGNTGLSTDSLMEAGYPGASVLGDAVCGMAAVSITSRDFLFWFRSHTAKEIKWGGAKHDPDDKDDGRKMHPRSSFKAFLEVVKWRSIPWEDIEMDAI

SEQ ID NO: 7431 - protein, 450 aa, Thermoanaerobacter brockii
MIKLAKFPRDFVWGTATSSYQIEGAVNEDGRTPSIWDTFSKTEGKTYKGHTGDVACDHYHRYKEDVEILKEIGVKAYRFSIAWPRIFPEEGKYNPKGMDFYKKLIDELQKRDIVPAATIYHWDLPQWAYDKGGGWLNRESIKWYVEYATKLFEELGDAIPLWITHNEPWCSSILSYGIGEHAPGHKNYREALIAAHHILLSHGEAVKAFREMNIKGSKIGITLNLTPAYPASEKEEDKLAAQYADGFANRWFLDPIFKGNYPEDMMELYSKIIGEFDFIKEGDLETISVPIDFLGVNYYTRSIVKYDEDSMLKAENVPGPGKRTEMGWEISPESLYDLLKRLDREYTKLPMYITENGAAFKDEVTEDGRVHDDERIEYIKEHLKAAAKFIGEGGNLKGYFVWSLMDNFEWAHGYSKRFGIVYVDYTTQKRILKDSALWYKEVILDDGIED

SEQ ID NO: 7432 - protein, 466 aa, Brassica napus
MRNLYFLVLFPLSILILVDASLHVKYLPGLEGPLPFELETGYVSVGESGDVELFYYFVKSESNPDKDPLMIWLTGGPGCSSICGLLFANGPLAFKGDEYNGTLPPLELTSFSWTKVANILYLESPAGSGYSYAKTRRAAETSDTKQIHQIDQFLRSWFVDHPEFISNSFYVGGDSYSGKIVPGVVQQISLGNEKGLTPLINIKGYVLGNPAVRTNLEPNHRVSFAHRMGLISDELHESLERNCGGKFFNVDPSNAKCSNGLLAYHQCISEIYIEQILLPNCKVDYVLADISQTLPNIRTSRRRELKEFSRNDSSSLPPPSCFTYRYFLSAFWANDENVRRALGVKKGFGKWSRCNTQNIPYTYDIHNAIPYHVNNSRKGFRALIYSGDHDMMIPFSSTEAWIKSLNYSIVDDWRPWMMNSNQVAGYTRTYANKMTFATIKGGGHTAEYNPDQCSLMFKRWIDGESL

SEQ ID NO: 7433 - protein, 392 aa, Heteropterys thyrsoidea
DLEPVNPADVPVTAAGALKSYKLASKAISRLQSLPSGNISLLCDVLVKEVRDLTGYDRVMVYKFHEDEHGEVVSECRRSDLESYLGLHYPATDIPQASRFLFMKNKVRMICDCLAPPVKVIQDERLPQPLSLCGSTLRSPHGCHAQYMTNMGTIASLVMSVTINEDDDMMDGDQQQMTRKLWGLVVCHHTSPRFVPFPLRYACEFLIQVFGVQINKEVELAAQVREKHILQIQTMLCDMLLRDAPVAIITQSPNVMDLVECDGAALYFKNKTWLLGVTPTEEQIRDIAEWLLEYHSGNTGLSTDSLMEAGYPGASVLGDAVCGMAAVSITSRDFLFWFRSHTAKEIKWGGAKHDPDDKDDLRKMHPRSSFKAFLEVVKWRSMPWEDVEMDAI

SEQ ID NO: 7434 - protein, 381 aa, Heteropterys leona
ETPAGALKSYKLASKAISRLQSLPSGNISLLCDVLVKEVRDLTGYDRVMVYKFHEDEHGEVVSECRRSDLESYLGLHYPATDIPQASRFLFMKNKVRMICDCLAPPVKVIQDETLPQPLSLCGSTLRSPHGCHAQYMTNMGTIASLVMSVTINEDDDMMDGDQQQMTRKLWGLVVCHHASPRFVPFPLRYACEFLIQVFGVQITKEVELAAQVREKHILQIQTMLCDMLLRDAPVAIITQSPNVMDLVKCDGAALYFKNKTWLLGVTPTEEQIRDIAEWLLEYHGGNTGVSTDSLMEAGYPGASILGDAVCGMAAVSITSRDFLFWFRCHTAKEIKWGGAKHDPDDKDDLRKMHPRSSFKAFLEVVKWRSMPWEDIEMDAI

SEQ ID NO: 7435 - protein, 482 aa, Yarrowia lipolytica CLIB122
MVKNVDQVDLSQVDTIASGRDVNYKVKYTSGVKMSQGAYDDKGRHISEQPFTWANWHQHINWLNFILVIALPLSSFAAAPFVSFNWKTAAFAVGYYMCTGLGITAGYHRMWAHRAYKAALPVRIILALFGGGAVEGSIRWWASSHRVHHRWTDSNKDPYDARKGFWFSHFGWMLLVPNPKNKGRTDISDLNNDWVVRLQHKYYVYVLVFMAIVLPTLVCGFGWGDWKGGLVYAGIMRYTFVQQVTFCVNSLAHWIGEQPFDDRRTPRDHALTALVTFGEGYHNFHHEFPSDYRNALIWYQYDPTKWLIWTLKQVGLAWDLQTFSQNAIEQGLVQQRQKKLDKWRNNLNWGIPIEQLPVIEFEEFQEQAKTRDLVLISGIVHDVSAFVEHHPGGKALIMSAVGKDGTAVFNGGVYRHSNAGHNLLATMRVSVIRGGMEVEVWKTAQNEKKDQNIVSDESGNRIHRAGLQATRVENPGMSGMAA

SEQ ID NO: 7436 - protein, 337 aa, Thiomicrospira crunogena XCL-2
MLTPILFSTQERLSMKRLDQVLAADGVNAELELVIKDVMVACKDIAYKLGQGELAGILGATEDENVQGETQKMLDVISNDLLKDILVANPYVRGVGSEEEDYTIAGNADGKYLVTFDPLDGSSNIDVNLSVGTIFSVLEAQDDQSGDNQEVFLQNGRKQVAAGYVLYGPSSLLVMTTGNGVNLFTLDTNIGEFVLTKEALQIPEDTAEFAINMSNQRFWEPEMKQYIDDCLLGEEGPLAKRYNMRWVASMVAEVHRILIRGGIFMYPYDNRDPSKAGKLRLMYEGNPMSMIVEQAGGASSTGRMDIMDVAPQGIHDRVPVVLGSKNEVAKVVAYHTK

SEQ ID NO: 7437 - protein, 392 aa, Tetrapterys microphylla
DLEPVNPADVPVTAAGALKSYKLAAKAISRLQSLPSGNISLLCDVLVKEVRDLTGYDRVMVYKFHEDEHGEVVSECRRSDLESYLGLHYPATDIPQASRFLFMKNKVRMICDCLAPPVKVIQGERLPQPLSLCGSTLRSPHGCHAQYMTNMGTIASLVMSVTINEDDDMMDGDQQQMTRKLWGLVVCHHTSPRFVPFPLRYACEFLIQVFGVQINKEVELAAQVREKHILQIQTMLCDMLLRDAPVAIITQSPNVMDLVKCDGAALYFKNKTWLLGVTPTEEQIRDIAEWLLEYHSGNTGLSTDSLMEAGYPGASVLGDVVCGMAAVSITSRDFLFWFRSHTANEIKWGGAKHDPDDKDDGRKMHPRSSFKAFLEVVKWRSMPWEDVEMDAI

SEQ ID NO: 7438 - protein, 822 aa, Zea mays
LCLVSPSSSPTPLPPPRRSRSHADRAAPPGIAGGGNVRLSVLSVQCKARRSGVRKVKSKFATAATVQEDKTMATAKGDVDHLPIYDLDPKLEIFKDHFRYRMKRFLEQKGSIEENEGSLESFSKGYLKFGINTNEDGTVYREWAPAAQEAELIGDFNDWNGANHKMEKDKFGVWSIKIDHVKGKPAIPHNSKVKFRFLHGGVWVDRIPALIRYATVDASKFGAPYDGVHWDPPASERYTFKHPRPSKPAAPRIYEAHVGMSGEKPAVSTYREFADNVLPRIRANNYNTVQLMAVMEHSYYASFGYHVTNFFAVSSRSGTPEDLKYLVDKAHSLGLRVLMDVVHSHASNNVTDGLNGYDVGQSTQESYFHAGDRGYHKLWDSRLFNYANWEVLRFLLSNLRYWLDEFMFDGFRFDGVTSMLYHHHGINVGFTGNYQEYFSLDTAVDAVVYMMLANHLMHKLLPEATVVAEDVSGMPVLCRPVDEGGVGFDYRLAMAIPDRWIDYLKNKDDSEWSMGEIAHTLTNRRYTEKCIAYAESHDQSIVGDKTIAFLLMDKEMYTGMSDLQPASPTIDRGIALQKMIHFITMALGGDGYLNFMGNEFGHPEWIDFPREGNNWSYDKCRRQWSLVDTDHLRYKYMNAFDQAMNALDERFSFLSSSKQIVSDMNDEEKVIVFERGDLVFVFNFHPKKTYEGYKVGCDLPGKYRVALDSDALVFGGHGRVGHDVDHFTSPEGVPGVPETNFNNRPNSFKVLSPPRTCVAYYRVDEAGAGRRLHAKAETGKTSPAESIDVKASRASSKEDKEATAGGKKGWKFARQPSDQDTK

SEQ ID NO: 7439 - protein, 206 aa, Michelia figo
  misc_feature (107)..(107): Xaa can be any naturally occurring amino acid
  misc_feature (204)..(204): Xaa can be any naturally occurring amino acid
VQLKRMENKINRQVTFSKRRNGLLKKAYELSVLCDAEVALIIFSSRGKLYEFGSAGTNKTLERYQRCCYTPQDVVVSDRETQGWYQEVSKLKAKYESLQRSQRHLLXEDLGPLSVKELQHLERQLEVALSQARQRKTQIMIEQMEELRKKERQLGDINKQLKIKLEAEGQGPFRCIQGSWESGAMVGNNTFSMNAPQAAPLDAXSP

SEQ ID NO: 7440 - protein, 208 aa, Michelia figo
  misc_feature (5)..(5): Xaa can be any naturally occurring amino acid
GLVKXAHEISVLCDAEVAVIVFSTKGKLYEYSTDSRMSRILERYERYSYAERELVLSGPESEGSWCLEYGKLKAKVESLQRNLRHFTGEDLDTLSLKELQQLEHQLDAALKHIRSRKNQIMFDSIAELQRKEKSLREQNNMLEKEIQEKEKAMAQQVQWEQQNQSQSSPSFLLPTLNIGTYHRGNEVEEEGARPPARTNSLMPSWMLC

SEQ ID NO: 7441 - protein, 464 aa, Oryza sativa
  misc_feature (106)..(106): Xaa can be any naturally occurring amino acid
MGNSLGCSASGERLVSAARDGDAVEARMLLELSPALARYSTFGGLNSPLHFAAAKGHLDIVTLLLEKGADVNVRNYCGQTALMHACRHGHWEVVQMLLLFRCNVWXTRADYLSGRTALHFAAHDGLVRARLRYINKPADGGVTALHMAALNGAGSTPLHYAAGGGNAECCQLLLSKGASKLTLNCNGWLPIDVARMFGRRFLEPLLSPNSNSSIPAYQPSNYLALPFMSILNIARPDYVLCRIAIISETVKLGREFGLLHTVASVDDSDLCAVCLERSCSVAAEGCCHEFCIKCALYLCSTSNTRVEFTGPPGSIPCPLCRNGIMSFTKLPSTPTEGLKSSSALTFCNPCMLNTRSVDSPATISKAEIRRNRVAAVSSELVCPLTCSPFPSSALPTCRCSDDDPCDAIETQDGSEVQSPQPSHCASMEMDKREQQDLDRTSCSGMFWSRRSCHREEQCNAEINA

SEQ ID NO: 7442 - protein, 239 aa, Phytolacca americana
  misc_feature (235)..(236): Xaa can be any naturally occurring amino acid
VQLRRMENKINRQVTFSKRRSGLVKKAHEISVLCDAELALIIFSPRGKLFEYSTDSSMEKILERYERYFYAERQLASNDPNTEVNWTFDFAKLKAKLELLQRNHRHYLGQDLDSLNIKDLQSLEQQLDNALKHIRTRKNQLMHESISELHKKEKAMQEQNNMLVKKIKEREKAMAEAQGMQWQRQQNEPPEASNFLLPPPLTSWNTAGDAYHGQIAGEVKRNDLDLTLEPVYSCXXGCF

SEQ ID NO: 7443 - protein, 657 aa, Ashbya gossypii ATCC 10895
MGNAPSRQLSTSKKKRSGSTSNSADDELPQFTRTDTSQSVKSSRSVRSTRSRKSQSGSVPGTPKTASSDANVIALPEGSSRKNSNSHGNIPALSRSNSQHSFTPHQHINEAQQEQRVSPDQLRAPRAASFSNGTGDLPPSMVQMEPKSPILRHFSSSNHMNTSYNENSLTDDDMDANYGVESNDDSHSHRSRRESRRRSSGSSQRRRSGSSQQHLELPFSAHNASRTSSHSSSHSRKSSLSAIGGGNSVYSTPMASPAVRKDDGMDYFCGADTVYGGSKDVLDGAILEKGQEHDHGVDSGAGDVYGHDIPQDPEEIMSTNDGTMPKKKKSIKPLDIDEMIQKLLDAGYLGKRTRNVCLKNSEIAQICHLAREIFLSQPSLLELSPPVKIVGDVHGQYADLLRLFTKCGFPPSSNYLFLGDYVDRGKQSLETILLLLCYKIKYPENFFLLRGNHECANVTRVYGFYDECKRRCNIKTWKLLIDTFNTLPLAAIVAGKIFCVHGGLSPVLNSMDEIRHVSRPTDVPDFGLINDLLWSDPTDSPNEWEDNERGVSYCYNKVAINKFLNKFGFDLVCRAHMVVEDGYEFFNDRSLVTVFSAPNYCGEFDNWGAVMSVSEGLLCSFELLDPLDSAALKQVMKKGRQERKLANKQQQNLQETN

SEQ ID NO: 7444 - protein, 715 aa, Vibrio fischeri ES114
MQLERAAFSDPFSFLGPQYQSQTTALRVWLPGATSVKVRLSGHVEYQLLSDPRHSGIFVLNESIDMTEVHYELIIDWSGTEQILDDPYQYHDISPTDAQVHTPKEMYNHLGAHLFNVVRDGKQIQGVRYLVFAPNASSASVIGDFNQWDGRRHIMQRIDNGLWALFIPEHAVGTKYKFELKGPNGESLPHKMDPYGAHNEQYPSFASVVYDQTSYQWNDAKWQQRPVTEKQKEALSFYELHAGSWKRNENGDFLTYRELAEQLIPYILDMGYTHIELMPVSEHPFYGSWGYQPIGLFSPTSRFGTPDDFKYFVDQCHQVGIGVVLDWVPAHFPSDSHGLANFDGTSLFNDPDPRRGWHNDWQSFIYNYDQPHVREFLVSNALYWFEHFHIDGLRVDAVASMLYLDYSRNDGEWIPNWEGGNHNHGAIALLKWMNEEVYSHYPNAMTIAEESTAFPGVSAPTFAGGLGFGFKWNMGWMHDSLNYIREDPIHRKYHHDTITFPLVYAFSENFILSLSHDEVVYGKGSILDKMPGDEWQKTANLRAYMGYMYGQPGKKLNFMGAEIAQSAEWDHDGQLQWFLTQFERHSGMQSLVRDLNKLYTTEPALYQKDCEPAGFEWRLQDEAEMSVLAHERLGDNGERILVVSNFTPAPREDFRLGMPVAGQYELILNSDAHFYGGSDYSVISEASTEKVESQGLAQSIVITLPPLSTVFYRLK

SEQ ID NO: 7445 - protein, 404 aa, Shewanella sp. MR-7
MRPIIKSNKLDTVCYDIRGPVHKEARRLEDEGHRILKLNIGNPAPFGFEAPEEIVRDVILNLPSAQGYCESKGLFSARKAIVQHYQAQGIFGVDIEDIYIGNGVSELIMMAMQGLLNTDDEILIPSPDYPLWTAAANLAGGKAVHYRCDEDADWFPDLDDIKSKISSRTRGIVLINPNNPTGAVYSKELLLQVVELCREHNLILFADEIYDKILYDEAKHIPAASLSDDILTVTFNGLSKAYRAAGFRVGWMMLSGNLKAAKSYIEGLEMLSSMRLCANVPNQHAIQTALGGYQSINELILPSGRLTVQRDTCYELLNQIPGVSVKKPKGALYAFPKLDMKKFNLRDDERLVLDLLREKKILLVHGSAFNWPEPDHLRVVFLPYKEDLTKALTEFGHFLETYKQ

SEQ ID NO: 7446 - protein, 338 aa, uncultured archaeon GZfos34H10
MATYAHNLFLDSNLGDSGLFPGTKAMEDELIRMIGSLLGNENAHGYISTGGTESNIQAIRAIRNRKRKEGLQEMNIIVPKTAHFSFDKIESLLCLEVKKAGLDDELRVDVNLVKELIDDNTISIVGIAGTTEFGQIDPIKELADIAHNSDIFLHVDAAFGGFVIPFLDAEYQFDFSLDAVSSISVDPHKMGMSTIPAGCILFRDESYLADLAVNTPYLTTNEQCSLIGTRSGAPVAATYAVLKYLGRNGLRAIVDECMLLTRMLVRGAKAMDIYPVIEPVMNVVTLRFPDVDRVAKALEARGWQVSTTRAPKALRLVIMPHVTEDTIEMFLNDLACVT

SEQ ID NO: 7447 - protein, 159 aa, Arabidopsis thaliana
MDLGRFPIISILEDMLEVPEDHNNEKTRNNPSRVYMRDAKAMAATPADVIEHPNAYAFVVDMPGIKGDEIKVQVENDNVLVVSGERQRENKENEGVKYVRMERRMGKFMRKFQLPENADLDKISAVCHDGVLKVTVQNFLLRNQRNQRQFKFKLLEFVL

SEQ ID NO: 7448 - protein, 158 aa, Pisum sativum
MSLIPSFFGNRRSNVYDPFSLDVWDPLKDFPFPSSALSASFPRENSAFVSTRVDWKETPEAHVFKADLPGLKKEEVKVEVEDDRVLQISGERSVEKEDKNDEWHRVERSSGKFLRRFRLPENAKMGQVKASMENGVLTVTVPKEEIKKPDVKSIEISG

SEQ ID NO: 7449 - protein, 174 aa, Xanthomonas campestris pv. vesicatoria str. 85-10
MPLNDLQHVPGANAAPADTHGFVFNHTMLRVKDATQSLDFYTRVLGFRLLDARDFADAKFSLYFLALLPEGTAIPDDDAQRRLWMAGIPGVLELTHNHGTETQDGPVYHDGNSDPRGFGHICISVPDIHAACARFDSLNVPYQKRLEDGRMKHLAFIKDPDGYWVEIISNTPLA

SEQ ID NO: 7450 - protein, 490 aa, Glycine max
MDGGGSTPAAPIPNANAPPPFLSKTYDMVEDPSTDAIVSWSATNNSFIVWDPPQFARDLLPKYFKHNNFSSFVRQLNTYGFRKVDPDRWEFANEGFLKGQKHLLRSITRRKPAHGQNHQQPQQPHGQSSSVGACVEVGKFGLEEEVERLKRDKNVLMQELVRLRQQQQTTDNQLQTMVQRLQGMEQRQQQMMSFLAKAVQSPGFFAQFVQQQNDSNRRITEVNKKRRLKQEGMAETEHAATPDGQIIKYQPMVNEAAKAMLRQIMKWDTSCVESLNKNSDNYVIGDASSSSSGMDSSSSSGWTSGVTLKEVSPASVQSSHVPAATGTQGHVPSTVKPEILSVPQAVASEKVMKDGAHDPPSIPVSQADVMIPDLPPITEMVTGNILDIPEENYMATETDEGYMDSSLGAGGSFPIDFEGISPDADIDDLLANPIWDEILQTSVPEDIDTNVAEASKGNEVQPMENGWGKTQHMDHLTEQMGLLSSDAKRV

SEQ ID NO: 7451 - protein, 917 aa, Pseudomonas sp. PCL1171
MLRKMGIKGRVLLLTLLPTSLMALLLGGYFTWMQLSELQTQLLQRGEMIAEQLAPLVAPPLSSKNTDLLERIATQSLEQPDVRTVSFLAPDRSSLAHAGPTMLNQPPIGNSSHLLQRTGNDATRYLLPVFGRHRNLAGELIPDESDRLLGWVEVELSHNGMLLRGYRSLFASLLLIAIGLICTAALALRISRTINSPISQIKLAVAQLKDGNLETRLPPLGSQELDQLASGINRMAETLQNAQEELQHSIDQATEDVRQNLETIEIQNIELDLARKEALEASRIKSEFLANMSHEIRTPLNGILGFTHLLQKSEMSPRQLDYLGTIEKSADNLLGIINEILDFSKIEAGKLVLDSVPFNLRDLLQDTLTILAPAAHAKQLELVSLVYRDTPLALVGDPLRLKQILTNLVSNAIKFTREGTIVARAMIEDEQEDSVQLRISVQDTGIGLSNQDVRALFQAFSQADNSLSRQPGGTGLGLVISKRLIEQMGGEIGVDSTPGEGSEFWISLNLPKTRDDVEDLPAAPLLGRRVAVLENHELARQALQHQLEDCGLEVTPFNSLENLTNGITSAHQTEQAIDLAVLGVTANDIPPERLNQHLWDLEHLSCKVLVLCPTTEQMLFNQSVPNPNSQLQAKPACTRKLRRALADLISPRPSRSEPGEPLSSRAPRVLCVDDNPANLLLVQTLLEDMGAKVLAVESGYAAIDAVKQETFDLVLMDVQMPGMDGRQSTEAIRQWESERHGTPLPVVALTAHAMANEKRALLQSGMDDYLTKPISERQLAQVVLKWTGLALRNQGPERAPDGLAPGVRLQVLDHEEGLRLAANKADLAADMLAMLLASLEADRQAITAAREANDNNALIERVHRLHGATRYCGVPQLRAACQRAETLLKQDDAKAMTALDELDMAIARLASEARVSA

SEQ ID NO: 7452 - protein, 460 aa, Malus x domestica
GQDSSYFLGWQEYEKNPYHEVHNTNGIIQMGLAENQLCFDLLESWLAKNPEAAAFKKNGESIFAELALFQDYHGLPAFKKAMVDFMAEIRGNKVTFDPNHLVLTAGATSANETFIFCLADPGEAVLIPTPYYPGFDRDLKWRTGVEIVPIHCTSSNGFQITETALEEAYQEAEKRNLRVKGVLVTNPSNPLGTTMTRNELYLLLSFVEDKGIHLISDEIYSGTAFSSPSFISVMEVLKDRNCDENSEVWQRVHVVYSLSKDLGLPGFRVGAIYSNDDMVVAAATKMSSFGLVSSQTQHLLSAMLSDKKLTKNYIAENHKRLKQRQKKLVSGLQKSGISCLNGNAGLFCWVDMRHLLRSNTFEAEMELWKKIVYEVHLNISPGSSCHCTEPGWFRVCFANLPERTLDLAMQRLKAFVGEYYNVPEVNGGSQSSHLSHSRRQSLTKWVSRLSFDDRGPIPGR

SEQ ID NO: 7453 - protein, 222 aa, Glycine max
MGSEGPTTPTTTIHVTGFKKFHGVSENPTETIANNLTEYMNKKGLPKGLVIGSCSILETAGQGALVPLYQRLQSAVIAKDTESSNSNRIIWLHFGVNSGATRFAIENQAVNEANFRCPDEMGWKPQKVPIVPSDGGISRTRETSLPVVEITKALAEKGYEVMVSVDAGRFVCNYVYYHSLRFTEQNGIKSLFVHVPLFVTINEETQMQFAASLLEVLASIPQ

SEQ ID NO: 7454 - protein, 162 aa, Triticum aestivum
SLPSPKNFLAPPRRIPPPQPLPRRTNPPPRLPQGRRFPPEVHFGVNSGASRFALENQAVNEATFRCPDELGWKPQRVPIVPSDGSISRTRETTLPVKELTKSLRKTGYDVMPSDDAGRFVCNYVYYHSLRFAEQHGIKSLFVHVPLFSTVDEEVQIHFVASS

SEQ ID NO: 7455 - protein, 452 aa, Oryza sativa
MAPTAEVAAAPVQEQEKCNGGGGGGFRGAAVRCHPALSTEKKASIRGVVGELLGAAAAAAGAGEERRRSLISLGVGDASSHACFRRGGEFAADAVADAARSGVFDCYAPSCGFPAARRAVADHLSAGARHRTRDADVFMTAGGTGAITAIATVLGGAPGANVLLPRPGFAPYEAACELAGAEPRFYDLLPRRGWEADLAGVRAMADGATAAIVVINPNNPCGAVYSAQHLFQIAETARELGIPIIADEVYAHMVFGGSKFVPMATFAHITPVITIGALSKKFMLPGWRLGWLAFCDPNGALKHVRNATEMLLNVTSGPASIVQAAVPKILSNEHNEFHRNVVNLLESAADALYRRVNQIEALQCYSKPHGSMFMMVEVNTSLLFGVEDDMDFARELIKEESVLVLPGSVIGLKNWIRIFFGAPTSVILEACDRIEAFCQKRAVQVKLLKKKF

SEQ ID NO: 7456 - protein, 481 aa, Chromobacterium violaceum ATCC 12472
MRKHTLTTAAGAPVVDNQNVQTAGPRGPMLLQDVWYLEKLAHFDREVIPERRMHAKGSGAFGTFTVTHDITRYTRAALFSDIGKKTDLFLRFSTVAGERGAADAERDIRGFAVKFYTEEGNWDLVGNNTPVFFLRDPLKFPDLNRAVKRNPYTNMRDANANWDFWTLLPEALHQVTIVMSDRGIPASYRHMHGFGSHTFSLINAKGERHWVKFHFHTQQGIRNLSDAEAEKLVGQDRESAQRDLLECIDRGDFPRWTLYIQVMTEAQADACPFNPFDLTKVWSHKDYPLIEVGVLELNRNPQNYFADVEQAAFNPANVVPGISFSPDRMLQGRLFAYGDAERYRLGVNHHLIPVNAPRCPFHNSYHRDGAMRVDSNAGATIGYEPNSQGKWQQQPAYDEPPLALQGNAYHYDFRADDDDYYSQPGALFRLMTPAQQQALFDNTARAMGGVDEAIKRRHIANCAKADPAYGAGVAKALGLSV

SEQ ID NO: 7457 - protein, 392 aa, Mascagnia anisopetala
DLEPVNPADVPVTAAGALKSYKLAAKAISRLQSLPSGNISLLCDVLVKEVRDLTGYDRVMVYKFHEDEHGEVVSECRRSDLESYLGLHYPATDIPQASRFLFMKNKVRMICDCLAPPVKVIQDERLPQPLSLCGSTLRSPHGCHAQYMTNMGTIASLVMSVTINEDDDMMDGDQQQMTRKLWGLVVCHHTSPRFVPFPLRYACEFLIQVFGVQINKEVELAAQVREKHILQIQTMLCDMLLRDAPVAIITQSPNVMDLVKCDGAALYFKNKTWLLGVTPTEEQIRDIAEWLLDYHSGNTGLSTDSLMEAGYPGASVLGDAVCGMAAVSISSRDFLFWFRSHTAKEIKWGGAKHDPDVKDDGRKMHPRSSFKAFLEVVKWRSMPWEDIEMDAI

SEQ ID NO: 7458 - protein, 482 aa, Pseudomonas fluorescens Pf-5
MSQTKTLTTASGAPVADNQNSRSAGPRGPLLLDDFHLIEKLAHFNRENIPERRVHAKGSGAYGTFTVSRDITEYTSAKLFEAVGKKTPTFLRFSTVGGERGSADTERDPRGFALKFYTEEGNWDIVGNNTPVFFIRDPLKFPDFIHTQKRLPQSNLKSAQMMWDFWSHSPEALHQVTILFSDRGIPDGYRHMHGFGSHTYSLINAKGERHWVKWHYKTKQGIKNLAPADAARLAGTDPDYAQRDLFNAIERGEFPKWSVCIQVMTEAQAAAHYENPFDVTKTWSQKEFPLIEVGELELNRNPLNYFAEVEQAAFGPSNMVPGVGLSPDRMLQGRVFAYADAHRYRVGTNHQQLPVNAPLSPVNSYQRDGSMAFGSNGGAAPNYEPNSYGDAPKQAPRYAEPALALSGAADRYDHREDADYYSHAGALFRLMNDEQKALLINNIVGAMAGVAADVVDRQLQHFYKADPAYGEGIAKALGVSLK

SEQ ID NO: 7459 - protein, 392 aa, Mascagnia chasei
DLEPVNPADVPVTAAGALKSYKLASKAISRLQSLPSGNISLLCDVLVKEVRDLTGYDRVMVYKFHEDEHGEVVSECRRSDLESYLGLHYPATDIPQASRFLFMKNKVRMICDCLAPPVEVIQDERLAQPLSLCGSTLRSPHGCHAHYMTNMGTIASLVMAVTINEDDDMMDGDQQQMTRKLWGLVVCHHTSPRFVPFPLRYACEFLIQVFGVQIHKEVELAAQVREKHILQIQTMLCDMLLRDAPVAIIMQSPNVMDLVKCDGAALYFKKKTWLLGVTPTEEQIRDIAEWLLEYHSGNTGLSTDSLMEAGYPGSSALGDAVCGMAAVSITSRDFLFWFRSHTAKEIKWGGAKHDPDVKDDGRKMHPRSSFKAFLEVVKWRSMPWEDIEMDAI

SEQ ID NO: 7460 - protein, 548 aa, Escherichia coli
MAAKDVKFGNDARVKMLRGVNVLADAVKVTLGPKGRNVVLDKSFGAPTITKDGVSVAREIELEDKFENMGAQMVKEVASKANDAAGDGTTTATVLAQAIITEGLKAVAAGMNPMDLKRGIDKAVTVAVEELKALSVPCSDSKAIAQVGTISANSDETVGKLIAEAMDKVGKEGVITVEDGTGLQDELDVVEGMQFDRGYLSPYFINKPETGAVELESPFILLADKKISNIREMLPVLEAVAKAGKPLLIIAEDVEGEALATLVVNTMRGIVKVAAVKAPGFGDRRKAMLQDIATLTGGTVISEEIGMELEKATLEDLGQAKRVVINKDTTTIIDGVGEEAAIQGRVAQIRQQIEEATSDYDREKLQERVAKLAGGVAVIKVGAATEVEMKEKKARVEDALHATRAAVEEGVVAGGGVALIRVASKLADLRGQNEDQNVGIKVALRAMEAPLRQIVLNCGEEPSVVANTVKGGDGNYGYNAATEEYGNMIDMGILDPTKVTRSALQYAASVAGLMITTECMVTDLPKNDAADLGAAGGMGGMGGMGGMM

SEQ ID NO: 7461 - protein, 366 aa, Pseudomonas fluorescens Pf-5
MTDQNLFTPYTLGALALANRIVLAPLTRNRAGAGFVPSEFAATYYSQRASAGLLISEATQISQQGQGYQDTPGIYTQAQIDGWRTVTDAVHAQGAKIFVQLWHVGRVSHVDLQENGAAPVAPSALRAATKVFVNNRFEDASEPRALDISELPGIVADFRQAAANAIAAGFDGVEIHGANGYLLDQFLKDSANVRTDAYGGSIENRARLLLEVTAAVVNEIGADRTGVRLSPVSPANGVSSSNPQAQFNYVVDQLDALDVVYLHMVEGATGGPRDVAPLDFTALRQRFKNTYIANNGYDLELATSRLAEDQADLIAFGRPFIGNPDLVERLKTGAALSAFNPATLYGGGAAGYIDYPTLVDSSASAS

SEQ ID NO: 7462 - protein, 392 aa, Mascagnia bracteosa
DLEPVNPADVPVTAAGALKSYKLAAKAISRLQSLPSGNISLLCDVLVKEVRDLTRYDRVMVYKFHEDEHGEVVSECRRSDLESYHGLHYPATDIPQASRFLFMKNKVRMICDCLAPPVKVIQDKRLPQPLSLCGSTLRSPHGCHAQYMTNMGTIASLVMSVTVNEEDDMMDGDQQQMTRKLWGLVVCHHTSPRFVPFPLRYACEFLIQVFGVQINKEVELAAQVREKHILQIQTMLCDMLLRDAPVAIITQSPNVMDLVKCDGAALYFKNKTWLLGVTPTEEQIRDIAEWLLEYHSGNTGLSTDSLMEAGYPGASVLGDAVCGMAAVSITSRDFLFWFRSHTAKEIKWGGAKHDPDDKDDGRKMHPRSSFKAFLEVVKWRSMPWDDVEMDAI

SEQ ID NO: 7463 - protein, 275 aa, uncultured bacterium
  misc_feature (32)..(32): Xaa can be any naturally occurring amino acid
  misc_feature (197)..(197): Xaa can be any naturally occurring amino acid
  misc_feature (237)..(237): Xaa can be any naturally occurring amino acid
  misc_feature (241)..(241): Xaa can be any naturally occurring amino acid
MSAEQPRLILNSGQSMPQLGLGAYKVNQDIAXQLVQHALEIGYRRIDTAALYDNEAEVGAAVRKSGLAREEVFVTSKIWNDRHGYHEAKEAIQESIDRLNIDYVDMMLIHWPCPKQDKFVETWHAFEEVLETGLVKGIGVSNFNQPHLEKLLQHSNITPAINQVELHPQLAQNGLREFNERHGIRTEAWAPLGRARXMQHPLLVEIABSLGKSVAQVIIRWHLQIGNLVIPKSSNPXRLAXNFDVFDFELSHHNMSIIATLNTETRIATNPDDMN

SEQ ID NO: 7464 - protein, 393 aa, Mascagnia stannea
VIEPVNPADVPVTAAGALKSYKLAAKAISRLQSLPSGNISLLCDVLVKEVRDLTGYDRVMVYKFHEDEHGEVVSECRRSDLESYLGLHYPATDIPQASRFLFMKNKVRMICDCLAPPVEVIQDERLPQPLSLCGSTLRSPHGCHAQYMTNMGTIASLVMSVTINEDDDMMDGDQQQQMTRKLWGLVVCHHTSPRFVPFPLRYACEFLIQVFGVQINKEVELAAQVREKHILQIQTMLCDMLLRDAPVAIITQSPNVMDLVKCDGAALYFKNKTWLLGVTPTEEQIRDIAEWLLEYHSGNTGLSTDSLMEAGYPGASVLGDGVCGMAAVSITSRDFLFWFRSHTAKEIKWGGAKHDPGDKDDGRKMHPRSSFKAFLEVVKWRSMPWEDVEMDAI

SEQ ID NO: 7465 - protein, 392 aa, Hiptage benghalensis
DLEPVNPADVPVTAAGALKSYKLASKAISRLQSLPSGNISLLCDVLVKEVRDLTGYDRVMVYKFHEDEHGEVVSECRRSDLGSYLGLHYPATDIPQASRFLFMKNKVRMICDCLAPPVKVIQDERLPQPLSLCGSTLRSPHGCHAQYMTDMGTIASLVMSVTINEDDDMMDGDQQQMARKLWGLVVCHHTSPRFVPFPLRYACEFLIQVFGVQINKEVELAAQVREKHILQIQTMLCDMLLRDAPVAIITQSPNVMDLVKRDGAALYFKNKTWLLGVTPTEEQIRDIAEWLLEYHSGNTGLSTDSLMEAGYPGASVLGDAVCGMAAVSITSRDFLFWFRSHTAKEIKWGGAKHDPDDKDDGRKMHPRSSFKAFLEVVKWRSMPWEDVEMDAI

SEQ ID NO: 7466 - protein, 258 aa, Zea mays
  misc_feature (167)..(167): Xaa can be any naturally occurring amino acid
  misc_feature (223)..(223): Xaa can be any naturally occurring amino acid
MAGAGAGGWKKRVGRYEVGRTIGRGTFAKVKFAVDADTGAAFAIKVLDKETIFTHRMLHQIKREISIMKIVRHPNIVRLNEVLAGRTKIYIVLELVTGGELFDRIVRHGKLRENEARKYFQQLIDAIDYCHSKGVYHRDLKPQNLLLDSRGNLKLSDFGLSTLSQNXLVHTTCGTPNYVAPEVLSSNGYDGCAADIWSCGVILYVLMAGYLPFEENDLPHLYXKGAKSLIQRILDPNPRTPIVCVKLSTRTSSYISLY

SEQ ID NO: 7467 - protein, 456 aa, Glycine max
MPEIGQAAVAAAADDTALFGKYELGRILGCGAFAKVHYARNVQTGQSVAVKIINKKKLAGTGLAGNVKREITIMSKLHHPHIVRLHEVLATKTKIFFIMDFVRGGELFGKISKGRFAEDLSRKYFHQLISAVGYCHSRGVFHRDLKPENLLLDENGDLRVSDFGLSAVRDQIRPDGLLHTLCGTPAYVAPEILGKKGYDGAKVDVWSCGVVLFVLAAGYLPFNDPNLMVMYRKIYKGEFRCPRWMSPELRRFISKLLDTNPETRITVDGMTRDPWFKKGYKELKFHEEDYHASGSGSFFGPKDERVVNLNAFDLISFSSGLDLSGMFGGEWGERLVTREPPERVLEAAEEAGAAAGMAVRWKKECGVELEGFNGRFGIGVEVYRLTAELAVVEVRKRGGDAAVRGVWEERLKPLLLGGATTSYSNSSEDEQQHQEEEQQHQEEKQEQEPESKVACE

SEQ ID NO: 7468 - protein, 226 aa, Phytolacca americana
GLVKKAHEISILCDADVALIVFSTKGKLFQYATGSCMEKILERYERYSYAERQLITPDPESHLSWTLEHAKLKARVEILQKNQRNYMGEELDTLSLKELQTLEHQLDSALKQIRSKKNQLMYESISQLQKKDKALQEQNKSLSKEVKEKEKEKEKTMTQQAQWDNQNQDINSSSCLMSDQALPSLNIGMNYQTESGSSSVENEAIQQQNRNNTTIALMPHWMLSHL

SEQ ID NO: 7469 - protein, 273 aa, uncultured bacterium
MASPLVTLNDGRLMPQLGLGVYKVNQDIAVQLVQTAIEIGYRRVDTAALYDNEAEVGAAIRKSGLDREEIFVTSKIWNDRHGYHEAKDAIQESVDRLNIGYVDMMLIHWPCPKQDKFVETWHAFEEVLETGLVKSIGVSNFHQHHLEKLLAAANVVPAINQVELHPQLAQNSLRHFNKQHNIKTEAWAPLGRAKFLENPLLVEIAESLGKSVAQVIIRWHLQLQNLVIPKSSNPDRLAENFDVFDFELSQHQMGIIATLNTETRIATNPDDMN

SEQ ID NO: 7470 - protein, 785 aa, Candida albicans
MNTNLLFIPLKQSSVLDLGDELRQVITNNYFQPASSFNSDLIYITQLRNQVAQIKNVNDELGKTSQDDSILLEYLQVLNALQNKFSDDCVEFAWFDTLAYGPQGPYRYRSLKIEKLNVIYQIGTLYSQIAISESRHTDIGLKRACHYFQLSAGCFMFINNFLIETIKNKNDPLVLSIPLSMQSPTIQCLEYLMLAQAQETIWQKTINNNSMKDSVVARLSIQTSEYYSKALDFGNSSDLIKLEWINHMKVKKLHFLAAAHLRSSTIAADSFQYGEQVAHLRVASQAVDQALKSKKYVNSLVLEDLQGLADVIKVRLRTAEKDNDLVYLKIVPQEKELKTIIGVSMVKSIIPEAFEQKPESNTEIFKELLPYVIIHVAQAMRERQDEYVQTKFHTPISSLNNMLVKFLIDRDLPSSIDSIQQPENIPDSVIHHSQEILKTGGVDFIDKAFKELDKLKLECNHLLQECETRIDLDRSEDDMLRRKQGSTRWTRKSTDDAAQELIKKVDKMKQYLLQANNGDGFVLKKFYDIKPALDVYSSGYKALSQYIPNSQYIELPEQLSIVISDLRSCLARANTLESERKEFLQTLEIRSRDNSILPKLITEYNSNRSKYQTENGEFNFNAFESVYEKHMKLFDSDIKYIARTRDSQMTLEHEIDSINQKFVQEFKSVQNSSNEKRQQVLQYLETAYEKFLEIINNLTEGSKFYTDFIEKGSAVLQECEEYLYRRRVESRDLELAISNSFQQQQQVQEQNEQLSVPRNYSNDKLISPKTSKPGLWNPNSDIQFS

SEQ ID NO: 7471 - protein, 236 aa, Frankia sp. EAN1pec
MSDRLYFRQLLSGRDFAVGDPAATQMVNFVYLIGDRGTGEAVVVDPAYRVGDLLDVLAADDMRLTGALVTHHHADHVGGTAFGIELEGIRELLERTSVPIHLQRDEAEWVRRGTGVGAAELVEHGDDDVVTVGAVDIRLLHTPGHTPGSQCFLVDGRLVAGDTLFLEGCGRMDFPGGDAAAMYDSLRRLGALPDDVTVYPGHRYSAESAAELGVVRKMNYVFRPTSSRQWLAMLGA

SEQ ID NO: 7472 - protein, 631 aa, Ashbya gossypii ATCC 10895
MSQLSAVPLKMTLQVDMQAQLAAIIDSTFYQVSSVFIDDLAAVNDMRNRSLMEADASVSNLEALLEYCKTLFALIAKFPDRQIEFTWFETLGHKAYGKTSNLWKFELFNVIYNIGAVKSLLASSMGNDELKEACRYLQESAGCFQYILSAMERELESVIDEKTIRAVLNLMLAQAQECCWARALRDAMKHSPIARLALQVSNFYEEAHRYARISPVIRTKLVKYINEKSFYFAAVAHYRHALHFEEKQQYGNAVRSLNEAQEKIKGAGWGPEVLPFEKELNDTLNTLQRDNDLIYLQHIPSQCPVINPVSMVKPILIDLLSTGTQKIHLFRNLLPIDVIESSAAFNIRQDKYVEDYVKSPLVALNKLLHNSLPENEALPGMKHLTEEEFDIYAKTLAGLNEFSSQLGERLTVIKSLIDGATTRLPAEANHHADQDNSKDIVEEYNKRIVTLQGYLRQGEEITRETTQIFETVDRDLLTTQLQLAATNNPTMRKVEALTKERYDYIAEVEKKSLQNRILPSLVSNYKETGSLDFEPIFQEHLKMFKKDIEYVQLGKKRNAELIAELNAEEGEESGKIKRLSPRDIQIQDFKHSLHLLEQVKENIEEGQVFYEDLKESIGVLHEDVTDFLNKS

SEQ ID NO: 7473 - protein, 275 aa, uncultured bacterium
MSAEQPRLILNSGQSMPQLGLGAYKVNQDITVQLVQHALEIGYRRIDTAAIYDNEAEVGAAVRKSGLAREEVFVTSKIWNDRHGYHEAKEAIQESIDRLNIDYVDMMLIHWPCPKQDKFVETWHAFEEVLETGLVKGIGVSNFNQPHLEKLLQHSNITPAINQVELHPQLAQNGLRELNERHGIRTEAWAPLGRARFMQHPLLIEIAESLGKSVAQVIIRWHLQIGNLVIPKSSNPDRLAENFDVFDFELSHHNMSIIATLNTETRIATNPDDMN

SEQ ID NO: 7474 - protein, 539 aa, Corynebacterium diphtheriae NCTC 13129
MAKLIAFNQEAREGILKGVDALANAVKVTLGPRGRNVVLQKAFGSPTVTNDGVTIAREIDLSDPFENLGAQLVKSVAVKTNDIAGDGTTTATLLAQAVVTEGLRNVAAGANPIELNRGIAAGSEFVVGKLRERATDVSSAADIANVATVSSRDPEVGDMVAAAMEKVGKDGVVTVEESQSIESYLDVTEGVSFDKGFLSPYFITDTDTQHAVLEQPAILLVRNKISSLPDFLPVLEKALEASKPILIIAEDVEGEPLQTLVVNSIRKTLRAVAVKAPYFGERRKAFMDDLAVVTGATVIDPEVGVNLNEAGAEVFGTARRVTVTKDETIIVDGAGTAEAVENRRAQIRREIENTDSAWDREKAEERLAKLSGGVAVIKVGAATETEVSERKLRVEDAINAARAAAQEGVIAGGGSALVQISKELREFAQEFEGDAKIGVIALANALAKPTYWIADNAGLDGAVVVSKVSELPNGEGFNAATLEYGNLIEQGIIDPVKVTHSAVVNATSVARMVLTTEASVVEKPAAPAPEAGHHHHHHH

SEQ ID NO: 7475 - protein, 238 aa, Pachysandra terminalis
VQLRRMENKINRQVTFAKRRNGLLKKAYELSVLCDAEVALIIFSARGKLYEFCSSSSMQNTLERYQKCSYGPLEPSQPAKETQSSYLEYMRLKARVEGLQRSQRNLFGENLGPLSTKELEQLEHQLEMSLNQIRSTKTQFMLDQLSDLQRKEQMLQEANRSLKRKLEESNAENSLGPSWESGGHGVPFGHQPAQSEGFFQPLECNSTLQIGYNHVGADQMSITVPPQNVNGFVPGWMV

SEQ ID NO: 7476 - protein, 238 aa, Peperomia caperata
  misc_feature (207)..(207): Xaa can be any naturally occurring amino acid
  misc_feature (238)..(238): Xaa can be any naturally occurring amino acid
VQLKRMENKINRQVTFSKRRTGLLKKAHEISVLCDAEVALIVFSTKGKLYEYATNSSSMPGILDRYERHSFTDKEFFIKEGEPPEGAWTLEYAKLKARYELLQKNYRHYLGEDLGSLSGKELQQLEGQLDASLKNVRSRRTQALFHTISDLQKKEKSLLEQNSVMIKKLQDLEKAEKAQQSQLEMQNHERTQNQPPLILLPPPALSXGSFRQENGPSVEGEAAPRVAQKNSLLPPWMX

SEQ ID NO: 7477 - protein, 170 aa, Triticum aestivum
AYLGELQNKFVQKSRLVPVRNSRDIVDPRVRSFTKLPSTPTEGLKSSSALTFCNPCILNTRSVDSPATVCKSEIRRNRVAALSSELVCPLTCSPFPSSALPTCRCSDDDPCGSTETLDGSEVQSPRPSHSTSTELDKRGEQDVDRTTCSGMFWSRRSCQREQQCNAEINA

SEQ ID NO: 7478 - protein, 205 aa, Schizosaccharomyces pombe
MAGKKKHLLKVIILGESGVGKTSIMNQYVNRKFSKDYKATIGADFLTKEVLVDDKVVTLQLWDTAGQERFQSLGVAFYRGADCCVLVYDVNNSKSFETLDSWRDEFLIQASPSNPETFPFILLGNKVDVEEQKRMVSKSKALAFCQARGEIPYFETSAKEAINVQEAFETVAKLALENMDSDDIAADFTDPIHLDMESQKTSCYC

SEQ ID NO: 7479 - protein, 481 aa, Arabidopsis thaliana
  misc_feature (7)..(7): Xaa can be any naturally occurring amino acid
MALKALXYDTLNENVKKCQYAVRGELYLRASELQKEGKKIIFTNVGNPHALGQKPLTFPRQVVALCQAPFLLDDPNVGMLFPADAIARAKHYLSLTSGGLGAYSDSRGLPGVRKEVAEFIQRRDGYPSDPELIFLTDGASKGVMQILNCVIRGNGDGILVPVPQYPLYSATISLLGGTLVPYYLDESENWGLDVANLRQSVAQARSQGITVRAMVIINPGNPTGQCLSEANIREILKFCYNEKLVLLGDEVYQQNIYQDERPFISSKKVLMEMGSPFSKEVQLVSFHTVSKGYWGECGQRGGYFEMTNLPPRVVEEIYKVASIALSPNVSAQIFMGLMVNPPKPGDISYDQFARESKGILESLRRRARLMTDGFNSCKNVVCNFTEGAMYSFPQIRLPTGALQAAKQAGKVPDVFYCLKLLEATGISTVPGSGFGQKEGVFHLRTTILPAEDEMPEIMDSFKKFNDEFMTQYDNNFGYSKM

SEQ ID NO: 7480 - protein, 513 aa, Burkholderia vietnamiensis G4
MRMKLKNIGLIAAGLATGVFATLQISASAEQTATAPLPLDQLRLFAEVFGQIKREYVEPVDDKKLLTAAIKGMVSSLDPHSSFLDKTDYDELQEQTKGRFAGLGIEISQEDGLVKVISPIEDTPAFRAGIRPGDLITRINDKPVRGMTLDKAVKQMRGEPGTKVTLTIFRKSDDRTFPVTVTRAIIKVQSVKMKMLDPGYAYIRITSFQERTTPDLAAKLQDIARQQPNLKGLILDLRNNGGGLLQSAVGVAGAFLPPDSVVVSTNGQIPDSKQVYRDTYDNYRLPSFDGDPLKNLPPIFKTVPMVVLTNAYSASASEIVAGALQDSKRAQIMGKTTFGKGSVQTVRPMTADTALRLTTAYYYTPSGRSIQNKGITPDVPVDQYADGDPDDVLVTREVDYTNHLANTQDPNEKKEQEEREQRRMDQLRLLEEQNDKKTPEQRQKDRDRKPIEFGSADDFMMQQALNKLEGKPVQESKSLLAESTTKSPAGKAASAAKASGAKAAAPKPASAPQ

SEQ ID NO: 7481 - protein, 392 aa, Callaeum septentrionale
DLEPVNPADVPVTAAGALKSYKLAAKAISRLQSLPSGNISLLCDVLVKEVRDLTGYDRVMVYKFHEDEHGEVVSECRRSDLESYLGLHYPATDIPQASRFLFMKNKVRMICDCLAPPVKVIQDERLPQPLSLCGSTLRSPHGCHAQYMTNMGTIASLVMSVTINEDDDMMDGDQQQMTRKLWGLVVCHHTSPRFVPFPLRYACEFLIQVFGVQINKEVELAAQVREKHILQIQTMLCDMLLRDAPVAIITQSPNVMDLVKCDGTALYFKNKTWLLGVTPTEEQIRDIAEWLLEYHSGNTGLSTDSLMEAGYPGASVLGDAVCGMAAVSITSRDFLFWFRSHTAKEIKWGGAKHDPDEKDDGRKMHPRSSFKAFLEVVKWRSMPWEDIEMDAI

SEQ ID NO: 7482 - protein, 392 aa, Mascagnia hippocrateoides
DLEPVNPADVPVTAAGALKSYKLAAKAISRLQSLPSGNISLLCDVLVKEVRDLTGYDRVMVYKFHEDEHGEVVSECRRSDLESYLGLHYPATDIPQASRFLFMKNKVRMICDCLAPPVKVIQDERLPQPLSLCGSTLRSPHGCHAQYMTNMGTIASLVMSVTINEDDDMMDGDQQQMTRKLWGLVVCHHASPRFVPFPLRYACEFLIQVFGVQINKEVELAAQVREKHILQIQTMLCDMLLRDAPVAIITQSPNVMDLVKCDGAALYFKNKIWLLGVTPTEEQIRDIAEWLLEYHSGNTGLSTDSLMEAGYPGASVLGDAVCGMAAVSITSRDFLFWFRSHTAKEVKWGGAKHDPHDKDDGRKMHPRSSFKAFLEVVKWRSMPWEDIEMDAI

SEQ ID NO: 7483 - protein, 371 aa, Arabidopsis thaliana
MASENLNDKISVFKKLKAKSDNKICFDCNAKNPTWASVTYGIFLCIDCSAVHRSLGVHISFVRSTNLDSWSSEQLKMMIYGGNNRAQVFFKQYGWSDGGKTEAKYTSRAADLYKQILAKEVAKSKAEEELDLPPSPPDSTQVPNGLSSIKTSEALKESNTLKQQEKPDVVPVSPRISRSVKKPLGAKKTGKTGGLGARKLTTKSSGTLYDQKPEESVIIQATSPVSAKSARSSFSSRFDYADNVQNREDYMSPQVVSHVAPPKSSGFFEEELEMNGGRFQKKPITSSSKLQIQETDEARKKFTNAKSISSAQYFGNDNNSADLEAKSSLKKFSQSLVLICLETVMEISLLISLRVIFSTAYLSRHNKTYHH

SEQ ID NO: 7484 - protein, 392 aa, Hiraea fagifolia
DLEPVDPADVPVTAAGALKSYKLAAKAISRLQSLPSGNISLLCDVLVKEVRDLTGYDRVMVYKFHEDEHGEVVSECRRPDLESYLGLHYPATDIPQASRFLFMKNKVRMICDCLAPPVKVIQDKRLPQPLSLCGSTLRSPHGCHAQYMTNMRTIASLVMSVTINEDDDTMDGDQQQMTGKLWGLVVCHHTSPRFVPFPLRYACEFLIQVFGVQINKEVELAAQVREKHILQIQTMLCDMLLRDAPVAIITQSPNVMDLVKCDGAALYFKNKIWLLGVTPKEEQIRDIAEWLLEYHSGNTGLSTDSLMEAGYPGASVLGDAVCGMAAVSITSRDFLFWFRSHTAKEIKWGGAKHDPGDKDDGRKMHPRSSFKAFLEVVKWRSMPWEDVEMDAI

SEQ ID NO: 7485 - protein, 273 aa, uncultured bacterium
MASPLVTLNDGRLMPQLGLGVYKVNQDIAVQLVQTAIEIGYRRVDTAALYDNEAEVGAAIRKSGLEREEIFVTSKIWNDRHGYHEAKEAIQESVDRLNIGYVDMMLIHWPCPKQDKFVETWHAFEEVLETGLVKSIGVSNFHQHHLEKLLAAATVVPAINQVELHPQLAQNSLRHFNKQHNIKTEAWAPLGRAKFLENPLLVEIAESLGKSVAQVIIRWHLQLQNLVIPKSSNPDRLAENFDVFDFELSQHQMGIIATLNTETRIATNPDDMN

SEQ ID NO: 7486 - protein, 392 aa, Ectopopterys soejartoi
DLEPVNPADVPVTAAGALKSYKLAAKAISRLQSLPSGNISLLCDVLVKEVRDLTGYDRVMVYKFHEDEHGEVVSECRRSDLESYLGLHYPATDIPQASRFLFMKNKVRMICDCMAPPVEVIQDERLPQPLSLCGSTLRSPHGCHAQYMTNMGTTASLVMSVTINEDDHMMDGDQQQMTKKLWGLVVCHHTNPRFVPFPLRDACEFLIQVFGVQINKEVELAAQVREKHILQIQTMLCDMLLRDAPVAIITQSPNVMDLVKCDGAALYFKNKTWLLGVTPTEEQIRDIAEWLLEYHSGNTGLSTDSLMEAGYPGASALGDAVCGMAAVSITSRDFLFWFRSHTAKEIKWGGAKHDPDDKDDGRKMHPRSSFKAFLEVVKWRSMPWEDVEMDAI

SEQ ID NO: 7487 - protein, 562 aa, Costus speciosus
MAAQLGLPLVSCHRGASQAASSSAHLVPGASAIMQAGNRRQKMRAPALRDRVVFARVVPVDGSVGFAGSSTEQETAVESATPTAVPSKVVLGRSSFPRGFIFGAASAAYQVEGAWNEGGRGPSIWDTFTHDHPEKIADHSNGDKATDSYKKYKEDVKLLKDLGLDSYRFSISWSRILPKGTLQGGINQEGIQYYNDLINELLKNGIRPMVTLFHWDVPQALEDSYKGFRSSEIVNDFKDYADICFKEFGDRVKHWITLNEPWSLSTMGYAFGRHAPGRCSTWYGCPAGDSANEPYEVTHNLLLAHANAVKIYRDNYKATQNGEIGITLNSLWYEPYSKSHEDVEAATRALDFMFGWYMDPLVNGDYPFIMRALVRDRLPFFTHAESELIKGSYDFIGINYYTSNYAQHAPVTEDHTPDNSYFDSYVNQSGEKNGVPIGPLQGSWIYFYPRGLKELLLYVKRRYCNPKIYITENGTAEVEKEKGVPLHDPERKEYLTYHLAQVLQAIREGVRVKGHFTWALTDNFEWDKGYTERFGLIYIDYDKDFNRQPKDSTKWFSKFLRT

SEQ ID NO: 7488 - protein, 392 aa, Stigmaphyllon paralias
DLEPVNPADVPVTAAGALKSYKLAAKAISRLQSLPSGNISLLCDVLVKEVRDLTGYDRVMVYKFHEDEHGEVVSECRRSDLESYLGLHYPATDIPQASRFLFMKNKVRMICDCLAPPVKVIQDERLPQPLSLCGSTLRSPHGCHAQYMTNMGTIASLVMSVTINEDDDTMDGDQQQMTRKLWGLVVCHHTSPRFVPFPLRYACEFLIQVFGVQINKEVELAAQIREKHILQIQTMLCDMLLRDAPVAIITQSPNVMDLVKCDGAALYFKNKTWLLGVTPTEEQIRDIAQWLLEYHSGNTGLSTDSLMEAGYPGASALRDAVCGMAAVSITSRDFLFWFRSHTAKEVKWGGAKHEPDDKDDLRKMHPRSSFKAFLEVVKWRSMPWEDVEMDAI

SEQ ID NO: 7489 - protein, 266 aa, Bordetella parapertussis 12822
MQTAPPLSAVVPLPAFSDNYIWALAHEGQAAVVDPGDAAPVLRWLRATGATLCAILLTHHHPDHVGGVLELVQATGATVYGPAGETLPHCDVRLAEGDRVTLPELALALEVLDVPGHTAGHIAYTGRAAGVERVLFCGDTLFAGGCGRLFEGTPAQMLDSLEKLSALPADTQVCCAHEYTLANLRWALAVEPANRTLQQWYQRAQELRNEGTPTLPSTIGQERETNPFLRTPHAAVAHAAAVWSGRSLATPVEVFAALRQWKNNFK

SEQ ID NO: 7490 - protein, 206 aa, Peperomia caperata
SVLCDAEVAVIVFSTKGKLYEYATDAGMARILDRYEKHTFSNRELELTNLESEGAWSLEYGKLKARFELLQKSHRHYLGEDLGALNMKELQHIEHQLDSALRHVRSRKNQILSDTISDLQTKEKLIHEQNKILQKRIQEKEREITGQPQWEIVPSRQENQNPQPTLFPIPLHTLSIGYCKEDGKAIELGLENEPRPLSQKMPPWML

SEQ ID NO: 7491 - protein, 447 aa, Deinococcus radiodurans R1
MTPAAYCGSMNRNRIALVAGTLALTAAVAAAQMGGYTSQTLANTPEGKSLVQVLNDLNRYYLYPVNQDKVLRGAITGALASLDDEFTYYTEPEDNAVAEQDLSGSFGGIGVTLVAANSDGSGGKVDNVFKDNPAFKGGVHIGDVFLKIGDKDVTGAKLNDIVKLVRGPIGSEVDVTFGRNGKPYTVKLKRDKVNVISVEKTILPGNIGYVALNTFYNEQASAQFRAAIADMKKANVQKLILDLRDNGGGLLSAGVDVADQFLQSGPIVSLRERGGQPEVYGSARKQATDYTGKLVLLVNKNSASASEVVGGALQDNKRATIIGEQTFGKGVAQVPITLPDGGKVAIVNSAWITPKGREIHKKGITPDIVVKDTRFPVPLNFSGSGVAPGTTLTLTVGDQPVKVTADKDGKFTYVGEIKRRDRSDVQGQAVVDVEHDAILKKALETLK

SEQ ID NO: 7492 - protein, 429 aa, Prochlorococcus marinus subsp. pastoris str. CCMP1986
MTTFSGLLVSNHSKATILENNYKEVIDHVWQIVYRDFLDSSGKFERSNWINLRKEFLAKKYSDNNEAYDAIRDMLSNLDDPYTRFLDPKEFNQMRIDTSGELTGVGIQIAKDNESDSIIIISPIEGTPAYEAGIKAKDIILSIDNVSTKGLNIEDAVKLIRGRRGTKVKLEILRNGNSFYKSLLRERIELKSVTSKINKTKDGLLIGYVRLKQFNANASREMKDTLKDLEIKKVSGYVLDLRSNPGGLLESSIDISRQFIDKGIIVSTLSKDGLRETKRGNGKALTKKPLIVLVNEGSASASEIVSGAIRDNNRGKLVGKKTFGKGLVQSMRTLVDGSGLTVTVAKYLTPNGTDINKFGITPDIEVKMNSNPILQREIGTKRDRQYRAGEKELLKIIKKTKLVSQFQPDSANVLAVFKNNENNFVYSLN

SEQ ID NO: 7493 - protein, 1118 aa, Cyrtosia septentrionalis
  misc_feature (1003)..(1003): Xaa can be any naturally occurring amino acid
MSFSRPSQSSSASSRSRQSARIIAQTTVDAKLDAEFDAMGTCFDYSQSIRAPPDEQRSEKVTAYLQHIQRGKLIQPFGCLLALDEKTFKVLAFSENAPEMLTMVSFTVPSVGDHPTIVIGTDVRNLFTSPSTAALQKALGFAEVSLLNPILVHCKSSGRPFYAIVHRVTGCLIVDFEPVKPNDVPMTAAGALQSYKLAAKAISKLQSLPSGSMEKLCNTVIEEVFELTGYDRVMVYKFHEDDHGEVFAEITKPGLESYFGLHYPATDIPQAARFLFMKNKVRMICDCHAKHVKVYQDKKLPFDISFCGSTLRAPHSCHLQYMENMNSIASLVMAVVVNEGEEDGGNEAEENSPPHRRKRLWGLVVCHNESPRFVPFPLRYACEFLMQVFAIHVNKEFELENLVKEKKIMRTQTMLCDMLLREFVPLGIITQTPNIMDLVKCDGAAFLYQDKIWRLGVTPSEPQIYDIVHWLSACHMDSTGLSTDNLHEAGYPGISSLGDVVCGMAVARITSKDMLFWFRSPAAASIRWGGAKHDAADKDDGRRMHPRSSFKAFLEVAKVRSLPWGDHEMNAIHSLQLILRDTLNGIENKAIIDPQLNELKLEGMVEVVTNEMVRLIETATVPILAVDADGLINGWNMKIAQLTGLSDDEARGKHLLTIVEDSSIDVVKRMLLLALQGIEEQNVQFQVKTSGVRRDDGPLILVVNACVSRDIHSNVVGACFVAQDVTGQKFILDKFTKIEGDYKAIVQNPCPLIPPIFGTDEFGWCSEWNLAMTKLSGWKRDEVMDKMLLGEVFGINTSCCRMKSQDALVNFSILISNAFSGQETEKSPFSFMNRSGKHVDCLLSVSRKVDVEGNLTGIFCFVLATGHELQQSQPLVQQETVKRMKALAYIRNEIRNPLSGIMYTRKMLVGTNLDEEQSLLLSTGAKCHNQLNRILEDLNLEDIMNSCLELEMNEFNLKDVVLTAVSQVMLPSEGKGVNVVYDLPDGLLSEYVYGDSLRLQQIXADFLLVCVKYSPDGAQVEITANLKKNTLGKSLQLIHVEIRITHAGNGVAEELLSEMFGSKEETSEEGMSLMVCRKLLRLMNGDVCYLREANKSVFILSAELACASKQPKDVKAAV

SEQ ID NO: 7494 - protein, 438 aa, Campylobacter lari RM2100
MKTKRNLIIAASICSLVTASFIFTNLQAKNPTPSEAEKKIEALSKLTRTMSIIEQYYVDDVNYTDLVDKSIAGLLTNLDAHSSFLDEKGYKELKEQTNGEFGGLGFTITQKDGAITVVAPIEGSPADKAGIKTDDIILRINNESTLGMTLNEAVSKMRGEPKTKVTLTIYRKGDAKPFDVNLKRDIIKVDSVYTKLIENENLLYLRVTNFDKNVVDEASKAIKKHSNVKGIILDLRTNPGGILNQAVGLVNLFVDKGVIVSQKGKIESENVEFKANPSKKITNAPLVVLVNGGSASASEIVSGALQDFKRAIIVGEKTFGKGSVQLILPMDEKGKEGLRLTIAKYYLPSGRTIQAVGVSPDIEVFPGKVSKEENHGFEIKESDLKKHLQAELDKIGHQEKKKDNKEDKNIITKEQINNDIQLKTAIDAIKILNITKGE

SEQ ID NO: 7495 - protein, 320 aa, Neurospora crassa
MATKTFKLNTGANIPALGLANPSPPPPSIGTWQGESTQVKDAVVAALKSGYRLIDTAYCYGNEEHVGAGLKEAFDQGIVKREDVFVVTKLWATYTSRAEEGLEKSLRNLGLEYVDLFLVHWPLLMNPEGNDDRFPKLPNGERDILRDYSHVQIWKNMEKLVGSGRTKAIGVSNYSKRYLEELLPHAKIVPAVNQIENHPQLPQQEIVDFCKEKGIHIMAYSPFGSTGSPVTSAEPVIKIAEKHGVKPTTVLLSYHLYRGSTVLPKSTNPERIEANAKLIELDAEDQKLLNDYSEGLVKEGKVQRYVYPPFGVDFGFPDKS

SEQ ID NO: 7496 - protein, 210 aa, Petunia x hybrida
AHEMSMLCDAEVALIIFSNRGKLYEFCSSSSMLKTLERYQKCNYGAPETNISTREALEISSQQEYLKLKARYEALQRSQRNLLGEDLGPLNSKELESLERQLDMSLKQIRSTRTQLMLDQLQDLQRKEHALNEANRTLKQRLMEGSTLNLQWQQNAQDVGYGRQATQTQGDGFFHPLECEPTLQIGYQNDPITVGGAGPSVNNYMAGWLP

SEQ ID NO: 7497 - protein, 66 aa, Glycine soja
ETRHPVYRGVRRRDSGKWVCEVREPNKKSRIWLGTFPTAEMAARAHDVAAIALRGRSACLNFADSA

SEQ ID NO: 7498 - protein, 479 aa, Arabidopsis thaliana
MENKPSVLTDKYDVGRLLGQGTFAKVYYGRSILTNQSVAIKMIDKEKVMKVGLIEQIKREISVMRIARHPNVVELYEVMATKTRIYFVMEYCKGGELFNKVAKGKLRDDVAWKYFYQLINAVDFCHSREVYHRDIKPENLLLDDNENLKVSDFGLSALADCKRQDGLLHTTCGTPAYVAPEVINRKGYDGTKADIWSCGVVLFVLLAGYLPFHDSNLMEMYRKIGKADFKAPSWFAPEVRRLLCKMLDPNPETRITIARIRESSWFRKGLHMKQKKMEKRVKEINSVEAGTAGTNENGAGPSENGAGPSENGDRVTEENHTDEPTNLNAFDLIALSAGFDLAGLFGDDNKRESRFTSQKPASVIISKLEEVAQRLKLSIRKREAGLFKLERLKEGRKGILSMDAEIFQVTPNFHLVEVKKSNGDTLEYQKLVAEDLRPALSDIVWVWQGEKDELTSQQETEYQQQQQQEQQEQEEPLKF

SEQ ID NO: 7499 - protein, 143 aa, Wolinella succinogenes
MFLTRFDPLRDLKEIERRFLTPFGEGGEGGAKSNLRGFAPVVNTREEEKGYFIEVDLPGVQKEDIHIDVKENTLSITGERKLKEEVKEENYYKVESFFGKFQRSFTLPENVDSDAITAQSKDGVLEIFIPKTAPKDAKRIAIS

SEQ ID NO: 7500 - protein, 404 aa, Solibacter usitatus Ellin6076
MSSRTKYFVVSTSTCLTVLLLIGSVLGRSASPDDTYKHMGVFADVVSRIKSEYVEEPDMKSVTLGALNGMLEAIDPFASYLNADQYRDYLKNKDVKRADVGLILSKKFGYVGVVGTITGSPAAKANFTTGDMIESIGGVATRDMPLAYANMLLQGESGTTVDLSVVRVRHPEPTSVKLTRAVFALPSVESRVIGDKVGYINIDALSPALVKEVAANVQKLQKDGAQKLVLDLRNCATGSPEDGIALANLFMNKGRITYLVGQKVARQNFEADPAKAISSLPLAILTNRGTADAAEVAAAALLDNKRAQVVGERTYGDAAVRRAITMEDGGAIILSVAKYYSPDGGKAIQDTGVTPNNVVSDADAQIDVDDNGEPVPDAAAEKGPEKKVEDDAVVKKALEVLAKG

SEQ ID NO: 7501 - protein, 392 aa, Lasiocarpus sp. Anderson 13834
DLEPVNPADVPVTAAGALKSYKLAAKAISRLQSLPGGNISLLCDVLVKEVRDLTGYDRVMVYKFHEDEHGEVVSECRRSDLESYLGLHYPAIDIPQASRFLFMKNKVRMICDCLAPPVKVIQDKRLSQPLSLCGSTLRSPHGCHAQYMANMGTIASLVMSVTVNEDDDMIDGDQQQMARKLRGLVVCHHTSPRFVPFPLRYACEFLIQVFGVQINKEVELAAQVREKHILRIQTMLCDMLLRDAPVAIITQSPNVMDLVKCDGAALYYKNKFWLLGVTPTEAQIRDIAEWLLEYHSGNTGLSTDSLMEAGYPGASVLGDAVCGMAAVSITSRDFLFWFRSHTAKEIKWGGAKHDPEDKDDGRKMHPRSSFKAFLEVVKWRSLPWEDVEMDAI

SEQ ID NO: 7502 - protein, 392 aa, Ptilochaeta nudipes
DLEPVNPVDVPVTAAGALKSYKLAAKAISRLQSLPGGNISLLCDVLVKEVRDLTGYDRVMVYKFHEDEHGEVVSECRRSDLESYLGLHYPATDIPQASRFLFMKNKVRMICDCLAPPVKVIQDERLSQPLSLCGSTLRSPHGCHAQYMANMGTIASLVMSVTVNEDDDMMDGDQQQMARKLWGLVVCHHTRPRFVPFPLRYACEFLIQVFGVQINKEVELAAQVREKHILRIQTMLCDMLLRDAPVAIITQSPNVMDLVKCDGAALYYKNKFWLLGVTPTEAQIREVAEWLLEYHSGNTGLSTDSLMEAGYPGASVLGDAVCGMAAASITSRDFLLWFRSHTAKEIKWGGAKHDPEDKDDGRKMHPRSSFKAFLEVVKWRSLPWEDVEMDAI

SEQ ID NO: 7503 - protein, 466 aa, Triticum aestivum
IARRHSPAGSVRGSGSGPAGRRRGAAMEDAAEGKTNVLQGRYELGRVLGHGNFGRVHAARDLRTGRGVAVKVVAKDKVERAGMVEQIKREIAVMKMVSHPNIVELHEVLATRTKIYLALELVRGGELFARISRAGRLREDVARRYFRQLISAVDFCHGRGVYHRDLKPENLLLDEAGNLKVADFGLSALAGHARPDGLLHTACGTPAYVAPEVLGGNGYDGAKADIWSCGVILYVLLVGALPFQDENLMSMYRKMQRGGFLCPSWVSKDARKLIGRLLDPNPSSRITIASLVESPWFKKTSPIPSPLLEPVPPAAARGNGEDKDEPPEALNAFHLISLSAGFDLSPLFDQEPATGRGTRGGVMRFATREPASGVISRLEGLATGGAMRVTKSGARGGRLEGAERGRKGRLGVAAEFFSVAPSVLVVDVKKDGGDTMEYRSFCSDELRPALKDIVWAAAAAAAAFPR

SEQ ID NO: 7504 - protein, 392 aa, Ptilochaeta bahiensis
DLEPVNPADVPVTAAGALKSYKLAAKAISRLQSLPGGNISLLCDVLVKEVRDLTGYDRVMVYKFHEDEHGEVVSECRGSDLESYLGLHYPATDIPQASRFLFMKNKVRMICDCLAPPVKVIQDKRLSQPLSLCGSTLRSPHGCHAQYMANMGTIASLVMSVTVNEDDDMMDGDQQQMARKLWGLVVCHHTSPRFVPFPLRYACEFLIQVFGVQINKKVDLAAQVREKHILRIQTMLCDMLFRNAPVAIITQSPNVMDLVKCDGAALYYKNKFWLLGVTPTEAQIREIAEWLLEYHSGNTGLSTDSLMEAGYPGASVLGDAVCGMAAVSITSRDFLFWFRSHTAKEIKWGGAKHDPEDKDDGRKMHPRSSFKAFLEVVKWRSLPWEDVEMDAI

SEQ ID NO: 7505 - protein, 392 aa, Dinemandra ericoides
DLEPVNPADVPVTAAGALKSYKLAAKAISRLQSLPSGNIPLLCDVLVKEVRDLTGYDRVMVYKFHEDEHGEVVSECRRSDMESYLGLHYPATDIPQASRFLFMKNKVRMICDCLSPPVEVIQDERLPQPLSLCGSTLRSPHGCHAQYMANMGTIASLVMSVTVNEDDDMMDGDQQRMARKLWGLVVCHHTSPRFVPFPLRYACEFLIQVFGVQINKEVDLAAQVREKHILRIQTMLCDMLLRDAPVAIITQSPNVMDLVKCDGAALYYKNKFWLLGVTPTEAQIRDIAEWLLEYHRGNTGLSTDSLMEAGYPGASVLGDAVCRMAAVSITSRDFLFWFRSHTAKEIKWGGAKHDPGDKDDGRKMHPRSSFKAFLEVVKWRSLPWEDMEMDAI

SEQ ID NO: 7506 - protein, 573 aa, Arabidopsis thaliana
MKMDKKTIVWFRRDLRIEDNPALAAAAHEGSVFPVFIWCPEEEGQFYPGRASRWWMKQSLAHLSQSLKALGSDLTLIKTHNTISAILDCIRVTGATKVVFNHLYDPVSLVRDHTVKEKLVERGISVQSYNGDLLYEPWEIYCEKGKPFTSFNSYWKKCLDMSIESVMLPPPWRLMPITAAAEAIWACSIEELGLENEAEKPSNALLTRAWSPGWSNADKLLNEFIEKQLIDYAKNSKKVVGNSTSLLSPYLHFGEISVRHVFQCARMKQIIWARDKNSEGEESADLFLRGIGLREYSRYICFNFPFTHEQSLLSHLRFFPWDADVDKFKAWRQGRTGYPLVDAGMRELWATGWMHNRIRVIVSSFAVKFLLLPWKWGMKYFWDTLLDADLECDILGWQYISGSIPDGHELDRLDNPALQGAKYDPEGEYIRQWLPELARLPTEWIHHPWDAPLTVLKASGVELGTNYAKPIVDIDTARELLAKAISRTREAQIMIGAAPDEIVADSFEALGANTIKEPGLCPSVSSNDQQVPSAVRYNGSKRVKPEEEEERDMKKSRGFDERELFLLKMRFSN

SEQ ID NO: 7507 - protein, 392 aa, Mcvaughia bahiana
DLEPVNPADVPVTAAGALKPYKLAAKAISRLQSLPSGNISLLCDVLVKEVRDLTGYDRVMVYKFHEDEHGEVVTECRRSDLESYLDLHYPATDIPQASRFLFMKNKVRMICDCLAPPVKVIQDKRLSQPLSLCGSTLRSPHGCHAQYMANMGAVASLVMSVTINEDDDTVDGDQQQMARKLWGLVVCHHTSPRFVPFPLRYACEFLIQVFGVQITKEVELAAQVREKHILRIQTLLCDMLLRDAPVAIITQSPNVMDLVKCDGAALYYRKKFWLLGVTPTEAQIRDIAEWLLEYHSGNTGLSTDSLLEVGYPGASALGEVVCGMAAVSITSRDFLFWFRSHTAKEIKWGGAKHDPDDKDDSRKMHPRSSFKAFLEVVEWRSLPWEDVEMDAI

SEQ ID NO: 7508 - protein, 197 aa, Lycopersicon esculentum
SVLCDAEVALVVFSNRGRLYEYANNSVKATIERYKKACSDSSNTGSVSEANAQYYQQEASKLRAQIGNLMNQNRNMMGEALAGMKLKELKNLEQRIEKGISKIRSKKNELLFAEIEYMQKREVDLHNNNQYLRAKIAETERAQHQHQQMNLMPGSSSNYHELVPPPQQFDTRNYLQVNGLQTNNHYPRQDQPPIQLV

SEQ ID NO: 7509 - protein, 495 aa, Bordetella parapertussis 12822
MAGPIIRHQYREVCMSTRKFRGFGLVAIGAVAGILLSVGVSAVAQRGSPLPLDELRQLSNVFAAIKNNYVEAVDDKTLIGNAISGMVSNLDPHSAYLDADAFREMQTATQGEFGGLGIEVGAEDGFVKVISPIEDTPAARAGIQAGDLIIKIDDTPTKGMSLNDAVKLMRGAPKSPITLTIMRADRPQPIVVKIVRDIIKVRSVRSKMLDNNVAYLRIAQFQEKTGPDLARHLKELGAKGAPKSLVLDLRNDPGGLLTSAIGVAGAFLPPDALVVSTDGRTPDSRHKYRTTPSEYARGEGNYLNDLPGWVKTVPMVVLVNVGSASASEIVAGALQDHKRAKVLGIRTFGKGSVQVILPLSESTAVKLTTSRYFTPSGRSIQATGIEPDYVVADTADGDLFRLPREADLQRHLSNQQSPDAEVKSNNDDNTEVAGKAFEFGGKDDFQLQQALNLLAGKPVQKGSARAQAKADIKPSEGKTQRITITPTGVEPAKSK

SEQ ID NO: 7510 - protein, 352 aa, Cucumis sativus
MGSGNGFYSTSEFNLDAKWLIDPKHLFVGPKIGEGAHAKVYEGKYKNQIVAIKMVGKGDTPERMARREARFAREVAMLSKVRHKNLVKFIGACKEPMMVIVTELLTGGTLRKFLLNLRPRSLELDVAIGFALDIARAMECLHSHGIIHRDLKPENLILTADHKTIKLADFGLAREESVTEMMTAETGTYRWMAPELYSTVTLKHGDKKHYNHKVDAYSFAIVLWELILNRLPFEGMSNLQPAYAAAFKNMRPSAENLPEDLALIVTSCWREDPNTRPNFSQIIQMLLQSLSRISPRSPVIPPRICASENVVMPPESPCTNSLMAVRHGSGEAPHGMIEETPTTSFFCFNKCY

SEQ ID NO: 7511 - protein, 113 aa, Candida glabrata CBS138
MSSSVPYDPYVTPEQDETNEQSQSKAAALKAEIDDTVGIMRDNINKVAERGERLTSIEDKADNLAISAQGFKRGANRVRKQMWYKDLKMKFCLFVVIICLLVAIVVPIAVHFS

SEQ ID NO: 7512 - protein, 215 aa, Papaver nudicaule
  misc_feature (36)..(36): Xaa can be any naturally occurring amino acid
  misc_feature (168)..(168): Xaa can be any naturally occurring amino acid
RHEMSMLCDAEVALIIFSNRGKLYEFCSSNSMFKTXERYQKCNYGQPEPNVSARESLEHASHQEYLKLKARVEALQRSQRNLLGEDLGPLSGKELEFLEKQLDSSLKQIRSTRTQYMLDQLTDLQRREQMLSDANKTLRRRLEEGAQASQQQWDMQHGVGYSRQQQSXHHQAADHNQGFFHPLECEPTLQIGYQQDQITVAQGAPMGSYMPGWLA

SEQ ID NO: 7513 - protein, 282 aa, Campylobacter lari RM2100
MQELINDIQKAVIEISQELRYLKDFDYTSSQNATGDNQLKLDVKSDEIITRILGQNKNIKSLISEEKQEQLLINENEKYIVAYDPLDGSSLVDVNFAIGSIFAIYENEAKAKNLKAAIYAIYGVRLELVVCFEKPMLYRLNENDEFVFVKELKLNEKGKLNACGGTQKNWSSTHGAFIKALFDEGYRLRYSGAMVSDLHQILLKGGGLFSYPATSDAPNGKLRAYFEVFPFAFIFEKANGLSTNGENDSLLDLEFEKIHASTPCFLGSKYEIEKLKQAYKGL

SEQ ID NO: 7514 - protein, 150 aa, Brassica napus
MAEEIRFFELNTGAKIPSVGLGTWQSDPGLVGNAVEAAVKIGYRHIDCAQIYGNEKEIGLVLKKLFDDGVVKREEIFITSKLWCTDHDPQDVPVALNRTLQDLQLDYVDLYLIHWPVSLKKGSTDLKPENILPTDIPNTWKAMEALFDAG

SEQ ID NO: 7515 - protein, 474 aa, Escherichia coli O157:H7 EDL933
MSVFPEGFLWGGALAANQSEGAFREGGKGLTTVDMIPHGEHRMAVKLGLEKRFQLRDDEFYPSHEATGFYHRYKEDIALMAEMGFKVFRTSIAWSRPFPQGDELTPNQQGIAFYRSVFEECKKYGIEPLVTLCHFDVPMQLVTEYGSWRNRKLVEFFSRYARTCFEAFDGLVKYWLTFNEINIMLHSPFSGAGLVFEEGENQDQVKYQAAHHQLVASALATKIAHEVNPQNQVGCMLAGGNFYPYSCKPEDVWAALEKDRENLFFIDVQARGAYPAYSARVFREKGVTIDKAPGDDEILKNTVDFVSFSYYASRCASAEMNTNNSSAANVVKSLRNPYLQVSDWGWGIDPLGLRITMNMMYDRYQKPLFLVENGLGAKDELAANGEINDDYRISYLREHIRAMGEAIADGIPLMGYTTWGCIDLVSASTGEMSKRYGFVFVDRDDAGNGTLTRTRKKSFWWYKKVIASNGEDLE

SEQ ID NO: 7516 - protein, 210 aa, Papaver somniferum
SVLCDAEVALIVFSTKGKLFEYSTDACMDAILERYERQCCVEEELVGTDQESQGNWSLEHAKLKAKVEVLQRTQRHMMGEDLESFNVKELQNLEHQLDTSLKHIRSKKNQLLYASISELQRKEKALQEQNTILGKKIKEKEQEMGRLDQQQQSNQAQNSCSQAQNSAQNSPTFLLSQELPSLTICTGTYEPAARPIAIQTVMPPWMLRHL

SEQ ID NO: 7517 - protein, 366 aa, Corynebacterium efficiens YS-314
MGTHDTDHPLYSSVTLGNVELNNRIVMAPLTRIRANTDGTPTEMMREYYAQRADFGMIITEGTWPIREGRTWGQQPGIETAEHVTAWRGITDAVHERGGKIIMQIMHGGRISHPELTGTGRTVAPSAIAAPDPIRISTGKVDPVIPHELGLDELATVIDQFVAGARNAMAAGMDGVQIHGANGYLLHEFLAPTTNLRGDAYGASPEKRASFVAEVVTAVAREIGAGNTGLRLSPQHNIQGAIETDDADVLATYTALARSLKHLGLAHVELVHHEPEGELIQTLRREFGAPLIVNTGFSRFTQREVAEELVDKQAADAVSVGRLALANPDLVRRWQLDGPLNEPNPETFYVGGEKGYTDYPVMEYSL

SEQ ID NO: 7518 - protein, 481 aa, Bacteroides thetaiotaomicron VPI-5482
MEDLNFRKGDAKTDVFGSDRMLQPSPVERIPDGPTTPEVAYQMVKDETFAQTQPRLNLATFVTTYMDDYATKLMNEAININYIDETEYPRIAVMNGKCINIVANLWNSPEKDTWKTGALAIGSSEACMLGGVAAWLRWRKKRQAQGKPFDKPNFVISTGFQVVWEKFAQLWQIEMREVPLTLEKTTLDPEEALKMCDENTICVVPIQGVTWTGLNDDVEALDKALDAYNAKTGYDIPIHVDAASGGFILPFLYPDTKWDFRLKWVLSISVSGHKFGLVYPGLGWVCWKGKEYLPEEMSFSVNYLGANITQVGLNFSRPAAQILGQYYQFIRLGFQGYKEVQYNSLQIAKYIHGEIAKMAPFVNYSENVVNPLFIWYLKPEYAKSAKWTLYDLQDKLSQHGWMVPAYTLPSKLEDYVVMRVVVRQGFSRDMADMLLGDIKNAIAELEKLDFPTPTRMAQEKNLPVEAKMFNHGGRRHKTVKK

SEQ ID NO: 7519 - protein, 95 aa, Narcissus pseudonarcissus
KQKIKEITLKLVQHGQLSETNVYNWFQNRRARSKRKQATVLPNNNEPEAEAEFDSPPSERIVKSNDNNIELSSDSKSPISPDQMSLYENMLCSPS

SEQ ID NO: 7520 - protein, 205 aa, Neurospora crassa
MSSRKKVLLKVIILGDSGVGKTSLMNQYVNKKFSASYKATIGADFLTREVLVDDRQVTMQLWDTAGQERFQSLGVAFYRGADCCVLVYDVNNSKSFDALDSWRDEFLIQASPRDPDNFPFVVLGNKIDMEESKRVISTKRAMTFCQSKGNIPYFETSAKEAINVEQAFEVIARNALMQEESEEFSGDFQDPINIHIENDRDGCAC

SEQ ID NO: 7521 - protein, 514 aa, Arabidopsis thaliana
MSGVVRSSPGSSQPPPPPPHHPPSSPVPVTSTPVIPPIRRHLAFASTKPPFHPSDDYHRFNPSSLSNNNDRSFVHGCGVVDREEDAVVVRSPIFPSEIGLEIRGCFGDFDCYLLLLSLIQKLRSVRLSSIRVNFCRLFSFAMSRKRKATMDMVVAPSNNGFTSSGFTNIPSSPCQTPRKGGRVNIKSKAKGNKSTPQTPISTNAVRSFYEISFMSRVTSLLTKKFVNLIKQAKDGMLDLNKAAETLEVQKRRIYDITNVLEGIDLIEKPFKNRILWKGVDACPGDEDADVSVLQLQAEIENLALEEQALDNQIRWLFVTEEDIKSLPGFQNQTLIAVKAPHGTTLEVPDPDEAADHPQRRYRIILRSTMGPIDVYLVSEFEGKFEDTNGSGAAPPACLPIASSSGSTGHHDIEALTVDNPETAIVSHDHPHPQPGDTSDLNYLQEQVGGMLKITPSDVENDESDYWLLSNAEISMTDIWKTDSGIDWDYGIADVSTPPPGMGEIAPTAVDSTPR

SEQ ID NO: 7522 - protein, 371 aa, Burkholderia sp. 383
MTQDPLFQPLRFGALTLPNRIVMPPMTRSRASQPGDEANELMAAYYAQRASAGLIVSEGTYVAPLGKGYAWTPGIHTPSQVAGWRKVTDAVHAAHGRIFAQLWHVGRLSHTSLLGGRQPVSSSPLQAKGVNVFVAGEDGSTPGFVQASEPRVLTIDEIREIVDQYRTAARHAIEAGFDGVELHGANGYLVNQFIDSNANTRTDAYGGSLENRLRFLREVTQALIDGTGDASRVGIRLAPLTTLNGCVDDDPETTYLAAATLLGKLGVGYLHIAEADWDDAPLMPVEFKQQLRAAYPGVLIYAGAYTAERARDAIAAGWADLIAFGRPFVANPDLPERLRTGAALAPHDRNTLFGGGERGLTDYPTLAQAAA

SEQ ID NO: 7523 - protein, 268 aa, Burkholderia sp. 383
MSKIPAFGLGTFRLKGQVVIDSVRNGLEVGYRAIDTAQIYGNEAEVGEAIAASGVAREDLFLTTKIWVDNYAPDKLVPSLEESLRKLRTDHVDLTLIHWPAPDNGVALDTFMTALADAKAQGLTRRIGISNFNIALTKQAIAAVGKDAIATNQIELSPYLQNRKLVEFLNAEGIHVTSYMTLAYGKVLGDPVIGAIAQRHDATPAQVALAWALQLGYSVIPSSTKRENLASNLLAQSLRLTDEDMAQIAALERNGREVDPAGLAPKWD

SEQ ID NO: 7524 - protein, 484 aa, Synechococcus elongatus PCC 6301
MAAPILFWHRRDLRLSDNIGLAAARAQSAQLIGLFCLDPQILQSADMAPARVAYLQGCLQELQQRYQQAGSRLLLLQGDPQHLIPQLAQQLQAEAVYWNQDIEPYGRDRDGQVAAALKTAGIRAVQLWDQLLHSPDQILSGSGNPYSVYGPFWKNWQAQPKPTPVATPTELVDLSPEQLTAIAPLLLSELPTLKQLGFDWDGGFPVEPGETAAIARLQEFCDRAIADYDPQRNFPAEAGTSGLSPALKFGAIGIRQAWRAASAAHALSRSDEARNSIRVWQQELAWREFYQHALYHFPSLADGPYRSLWQQFPWENREALFTAWTQAQTGYPIVDAAMRQLTETGWMHNRCWMIVASFLTKDLIIDWRRGEQFFMQHLVDGDLAANNGGWQWSASSGMDPKPLRIFNPASQAKKFDATATYIKRWLPELRHVHPKDLISGEITPIGRRGYPAPIVNHNLRQKQFKALYNQLKAAIAEPEAEPDS

SEQ ID NO: 7525 - protein, 231 aa, Brassica napus
  misc_feature (106)..(106): Xaa can be any naturally occurring amino acid
MGRGKIEIKRIENSTNRQVTFCKRRNGLLKKAYELSVLCDAEVALIVFSTRGRLYEYANNNIRSTIERYKKASDNTNTHSVQEINAAYYQQESAKLRQQIQTIQNXSNRHLMGDSLSALSVKELKQVENRLEKAISRIRSKKHELLLAEIENLHKREIKLDNESIYLRTKIAEVERFQQHHHQMVSGTEMTAIEALASRNYFAHNIMTIGSGSGAGHGCSYFDPDKKTHLG

SEQ ID NO: 7526 - protein, 392 aa, Burdachia sphaerocarpa
DLEPVNPADVPVTAAGALKSYKLAAKAISRLQSLPSGNISLLCDVLVKEVRDLTGYDRVMVYKFHDDEHGEVVSECRRSDMESYLGLHYPATDIPQASRFLFMKNKVRMICDCLAPPVKVIQDERLPQPLSLCGSTLRSPHGCHAQYMVNMGAIASLIMSVTINEDDDTIDGDEQQMARKLWGLVVCHHTSPRFVPFPLRYACEFLIQVFGVQITKEVELAAQVREKHILRIQTLLCDMLLRDAPVAIITQSPNVMDLVKCDGAALYYKKKFWLLGVTPTEAQIRDIAEWPVEYHSGNTGLSTDSLMEAGYSGASSLGDAVCGMAAVSITSRDFLFWFRSHTAKEIKWGGAKHDPADKDDGRKLHPRSSFKAFLEVVKWRSLPWEDMEMDAI

SEQ ID NO: 7527 - protein, 392 aa, Glandonia macrocarpa
DLEPVNPADVPVTAAGALKSYKLAAKAISRLQSLPSGNISLLCDVLVKEVRDLTGYDRVMVYKFHEDEHGEVVSECHRSDLESYLGLHYPATDIPQASRFLFMKNKVRMICDCLAPPVKVIQDERLPQPLSLCGSTLRSPHGCHAQYMANMGAIASLVMSVTINEDDDMIDGDEQQMARKLWGLVVCHHTSPRFVPFPLRYACEFLIQVFGVQITKEVELAAQVREKHIFRIQTLLCDMLLRDAPVAIITQSPNVLDLVKCDGAALYYKKKFWLLGITPTEAQIRDIAEWLLEYHSGNTGLSTDSLMEAGYPGASSLGDAVCGMAAVSITSRDFLFWFRSHTAKEIRWGGAKHDPDDKDDGRKMHPRSSFKAFLEVVKWRSLPWEDVEMDAI

SEQ ID NO: 7528 - protein, 392 aa, Barnebya dispar
DLEPVNPADVPVTAAGALKSYKFAAKAISRLQSLPSGNIFLLCDVLVKEVRDLTGYDRVMVYKFHEDEHGEVVSECRRSDLESYLGLHYPATDIPQVSRFLFMKNKLRMICDCLAPPVKVIQDENLPQPLSLCGSTLRSPHGCHAQYMTNMGTIASLVMSVTINEDDDMKDCEQPQMPRKLWGLVVCHHTSPRFIPFPLRYACEFLIQVFGVQINKEVELAAQVREKHILRIQTLLCDMLLRDAPVAIITQSPNVMDLVRCDGAALYYKNEFWLLGVTPTEAQIRDIAEWLLECHSGNTGLSTDSLMEAGYPGASVLGDAVCGMAAISITSRDFLFWFRSHTAKEIKWGGAKHDPDDKDDGRKMHPRSSFKAFLEVVKWRSLPWEDIEMDAI

SEQ ID NO: 7529 - protein, 359 aa, Fagus sylvatica
MDKYEVVKDLGAGNFGVARLLRHKETKELVAMKYIERGLKIDENVAREIINHRSLRHPNIIRFKEVVLTPTHLAIVMEYAAGGELFERICTAGKFSEDEARYFFQQLISGVNYCHSMQICHRDLKLENTLLDGSPAPRLKICDFGYSKSSLLHSRPKSTVGTPAYIAPEVLSRREYDGKLADVWSCGVTLYVMLVGAYPFEDQDDPRNFRKTIQKIMAVQYKVPDYVHISQDCKHLFSRLFVANPSRRITLKEIKNHPWFLKNLPRELTESSQAIYYQRDNPSFSLQSVDEIMKIVGEARNPPPSSKIVRGFSWGPDENEEGNEDIDAEVEEEEEEEDEEDEYDKRVKEVHASGEFHIS

SEQ ID NO: 7530 - protein, 692 aa, Saccharomyces cerevisiae
MGNSSSKSSKKDSHSNSSSRNPRPQVSRTETSHSVKSAKSNKSSRSRRSLPSSSTTNTNSNVPDPSTPSKPNLEVNHQRHSSHTNRYHFPSSSHSHSNSQNELLTTPSSSSTKRPSTSRRSSYNTKAAADLPPSMIQMEPKSPILKTNNSSTHVSKHKSSYSSTYYENALTDDDNDDKDNDISHTKRFSRSSNSRPSSIRSGSVSRRKSDVTHEEPNNGSYSSNNQENYLVQALTRSNSHASSLHSRKSSFGSDGNTAYSTPLNSPGLSKLTDHSGEYFTSNSTSSLNHHSSRDIYPSKHISNDDDIENSSQLSNIHASMENVNDKNNNITDSKKDPNEGFNDIMQSSGNKNAPKKFKKPIDIDETIQKLLDAGYAAKRTKNVCLKNNEILQICIKAREIFLSQPSLLELSPPVKIVGDVHGQYGDLLRLFTKCGFPPSSNYLFLGDYVDRGKQSLETILLLFCYKIKYPENFFLLRGNHECANVTRVYGFYDECKRRCNIKIWKTFIDTFNTLPLAAIVAGKIFCVHGGLSPVLNSMDEIRHVVRPTDVPDFGLINDLLWSDPTDSPNEWEDNERGVSYCYNKVAINKFLNKFGFDLVCRAHMVVEDGYEFFNDRSLVTVFSAPNYCGEFDNWGAVMSVSEGLLCSFELLDPLDSAALKQVMKKGRQERKLANQQQQMMETSITNDNESQQ

SEQ ID NO: 7531 - protein, 477 aa, Prosthecochloris aestuarii DSM 271
MKRKTVICWFRQDLRLEDNPALFVAAEEGYVLPVYILDDSSPGTWQMGSATRCWLHHSLVSLNRSFDGKLGIFRGEPLEILKTLARQHKAEKIVWNRCYEPWRMKRDQGIKATLQAEGIEVSSFNGSLLWEPHEVLKQNNTPYRVFTPFFRRGCLNALPPRTPLPAPQRMLMADTIDNSISVQDLNLLPSIPWDSQLISHWSVGENSARQSLLRFLDQGLNGYKEGRDFPGQNHVSRLSPALHFGELSPNTVWYEAKRCGSGQDLDHFLSELGWREFAYTLLYHNHDMPEKNLQSAFDAFPWVHNDETLIRWQQGMTGYPLVDAGMRELWQTGYMHNRVRMITGSFLVKNLLLHWHYGQQWFHDCLLDADLANNSAGWQWIAGCGVDAAPYFRVFNPVRQGEKFDPDGTYTLRFVPELAKLPKKYLFNPWEAPKNILQEAGITLGKTYPEPIVDLAISRNRALSAYASIRKKKIQEK

SEQ ID NO: 7532 - protein, 392 aa, Spachea correae
DLEPVNPADVPVSAAGALKSYKLAARAISRLQSLPSGNISLLCDVLVKEVRDLTGYDRVMVYKFHEDEHGEVVSECRRPDLEAYLGLHYPATDIPQASRFLFMKNKVRMICDCLAPPVKVIQDEKLPQSLSLCGSTLRSPHGCHAQYMANMGSIASLVMSVTVNEDDDMVDGDQQRMARKLWGLVVCHHTSPRFVPFPLRYACEFLIQVFGVQINKEVELAAQGREKHIMQTQTLLCDMLLRDAPVAIVTQSPNVMDLVKCDGAALYYRKKFWLLGVTPTEAQIRDIAEWLLEYHSGNTGLSTDSLMEAGYPGTSVLGNAVCGMAAVKITSRDFLFWFRSHTAKEIKWGGAKHDPDDKDDIRKMHPRSSFKAFLEVVKWRSLPWEDMEMDAI

SEQ ID NO: 7533 - protein, 392 aa, Tricomaria usillo
DLEPVNPADVPVTAAGALKSYKLASKAISRLQSLPSGNMSLLCDVLVKEVRDLTGYDRVMVYKFHEDEHGEVVSECRRSDLESYLGLHYPATDVPQASRFLFMKNKVRMICDCLAPPVKVIQDERLPQPLSLGGSTLRSPHGCHSQYMTNMGTIASLVMSVTINEEDERMDGDQQQMTTKLWGLVVCHHTSPRFVPFPLRYACEFLIQVFGVQIDKEVELVAQVREKHILQIQTMLCGMLLRDAPVAIVTQSPNVMDLVKCDGAALYFKSKTWLRGVTPTEEQIKDIAEWLLKYHSGNTGLSTDSLMEAGYPGASVLGDAVCGMAAVGITSRDFLFWFRSHTAKEINWGGAKHDPDDKDDGRKMHPRSSFKAFLEVVKWRSMPWEDMEMDAI

SEQ ID NO: 7534 - protein, 240 aa, Papaver somniferum
VQLRRMENKINRQVTFSKRRSGLLRPCAEMSVLCDAEVALIVFSTKGKLFEYSTDSGMDRILERYERYSYAERELVTTEIDQGNWSLEYSKLKSKIEILQKNQRHFMGEDLQSMSLKELQNLEQQLDVALKQIRSRKNQLMYESISELQKKEKALQEQNNKLGKQLKEKEKEVAAQQQQASQFSQGQSSPSFLLSQSLPSLNIGSGSYQARGGDNGNEEGNRTQTTRTNTATLMPPWMLN

SEQ ID NO: 7535 - protein, 497 aa, Glycine max
  misc_feature (31)..(31): Xaa can be any naturally occurring amino acid
IEFKDKVKNVGASLVKQVANATNDVAGDEYXGREHFNCLAGTTCATVLTRAIFTEGCKSIAAGMNAMDLRRGISMAVDAVVTNLKSRARMISTSEEIAQVGMISANGEREIGELIAKAMEKVGKEGVITISDGKTLYNELEVVEGMKLDRGYISPYFITNDKNQKCELEDPLILIHEKKISSINAIVKVLELALKRQRPLLIIAEDVESDALATLILNKLRAGIKVCAIKAPGFGENRKAGLQDLAVLTGGALITEELGLKLEKVDLDMLGTCKKITVSKDDTVILDGAGDKKALEERCEQIRSAIENSTSDYDKEKLQERLAKLSGGVAVLKIGGASEAEVGEKKDRVTDALNATKAAVEEGIVPGGGVALLYASRELDKLQTANFGQKIGVQIIQNALKTPVLTIASNAGVEGAVVVGKLLEQENHDLGYDAAKGEYVDMVKAGIIDPLKVIRTALVDAASVSSLMTTTEAVVSELPNDNKDTPAMAGGMGGMGY

SEQ ID NO: 7536 - protein, 209 aa, Ranunculus bulbosus
  misc_feature (24)..(24): Xaa can be any naturally occurring amino acid
  misc_feature (65)..(65): Xaa can be any naturally occurring amino acid
  misc_feature (67)..(67): Xaa can be any naturally occurring amino acid
  misc_feature (89)..(89): Xaa can be any naturally occurring amino acid
  misc_feature (136)..(136): Xaa can be any naturally occurring amino acid
  misc_feature (185)..(185): Xaa can be any naturally occurring amino acid
  misc_feature (191)..(191): Xaa can be any naturally occurring amino acid
AHEISVLCDADVALVIFSIKGKLXEYSTNDRMEGILERYERYSYTSTELVAADPESQECLSMEYXKXKSKVEALQRSQRYFMGEDIGSXGVKELQALEQQLDTSLRQIRSRKNQLMAGSITELQKNEKALLEENIXLKKQAKEKELALSLCEQLNPVERSPYVPLPDAVPALNTSEPTNQSSGSXGEEEVXAQPSQTKTLMPPWMLHHL

SEQ ID NO: 7537 - protein, 321 aa, Phaeosphaeria nodorum
MATDPSKYKLNHSMIRIKDPKRSVQFYEFLGMKLINQIKMPEAKFDLYFLAYDSPKAVSHGNHWTDREGIVELTHNYGTEDDPDYKISNGNTEPHKGFGHLCVSVDNIQAACQRLEDAGYKFQKKLTDGRMRHIAFVLDPDGYWVEVIGQKPLEETESVKDTDTSTYRMNHTMIRVKDKDVSLKFYQDVLGMQLKRTSESPNSGFNLYFLGYGAPASDETANGVNPTADHEGLLELTWNYGTEKEADFKYHNGNDEPQGFGHICIAVDDLEAACARFEEKKVNWKKRLTDGRMKSIAFVLDPDNYWIEVVQNEKLKTRSNV

SEQ ID NO: 7538 - protein, 216 aa, Ranunculus bulbosus
  misc_feature (214)..(214): Xaa can be any naturally occurring amino acid
GLVKKAHEISVLCDAEVALIVFSTKGKLFEYSTDSGMDKILERYERYSYAERELVTNDTDSQGNWSLEYTKLKAKVEILQKNQRHFRGEEIGNLGLKELQNLEQQLDTALKLIRARKNQLLFESISEYQKKEKALNEQNNQLEKQLKEKEKELAKRPQWEQPPNQGQTSQSFTLQSHPCLNIGGNYQGGSSGREDEVPQTQARPTILMPPWMVXHL

SEQ ID NO: 7539 - protein, 161 aa, Glycine max
MSLIPNFFGGRRSNVFDPFSLDVWDPFKDFPFPNTLSSASFPEFSRENSAFVSTRVDWKETPEAHVFKADIPGLKKEEVKVQIEDDKVLQISGERNVEKEDRNNTWHRVERSSGKFMRRFRLPENAKVDKVKASMENGVLTVTVPKEEVKKADVKNIQISG

SEQ ID NO: 7540 - protein, 306 aa, Triticum aestivum
  misc_feature (35)..(35): Xaa can be any naturally occurring amino acid
  misc_feature (38)..(38): Xaa can be any naturally occurring amino acid
  misc_feature (103)..(103): Xaa can be any naturally occurring amino acid
  misc_feature (110)..(110): Xaa can be any naturally occurring amino acid
  misc_feature (120)..(120): Xaa can be any naturally occurring amino acid
  misc_feature (128)..(128): Xaa can be any naturally occurring amino acid
  misc_feature (224)..(224): Xaa can be any naturally occurring amino acid
RGRVGRQSVAEARSKGITVRAMGITPPGTPTWSNXKVXQNLKGPFGPSANTGNLGSGFADEGYATGMFTQVGRPFYKSQERLCLTMGPPSKAGRFRRFSFHTXPKGYWGXECGQPGGYFXELTNIPPXKTVDQIYKVASIALSPNVPGQIFMGLMVNPPKPGDISYLKYSAESKSILESLRRRAQIMTDGFNSCRNVVCNFTEGAMYSFPQIRLPQRAMDVAKXAGKAPDVYYCLKLLEATGISTVPGSGFGQKEGVFHLRTTILPAEEDMPAIMSSFKKFGDSFMEQYPPPPEAVKREEDNRIYI

SEQ ID NO: 7541 - protein, 76 aa, Brassica napus
  misc_feature (3)..(3): Xaa can be any naturally occurring amino acid
  misc_feature (8)..(8): Xaa can be any naturally occurring amino acid
RRXRTEEXPAIANDFRVAARKAKEAGSDGVEVHGAHGDLIDQVLKDKGNDRSDQNGGALENRWRFAVEGVKAAGKE

SEQ ID NO: 7542 - protein, 439 aa, Wolinella succinogenes
MSKTKYALTGFGATVLSLSLLFSSSFAQSPSESQSRLEAYNKLRKVIGTVENYYVDEVTINEIINKAIDGLLSNLDAHSSYLNEKKYEELKVQTDGEFGGVGITISMKDGALTIISPIEDTPGDKAGLKSGDIILKIDDKSTLNMTIDDAINLMRGKPKTKVKLTIVRKNEPKPFVVDIIRDVIKVESVYAKRIENSEMLYVRVTSFDKKVGKRVAEELKKASWAKGVVLDLRNNPGGLLNQAVELTDLFINEGVIVSQKGRISSEDAEFKASKNSPFAQIPLAVLINNGSASASEIVAGALQDHKRAILVGENTFGKGSVQVVLPLDKNEGLRLTIARYYLPSGRTIQALGITPDLIVHPGVAPREKKDDFSIKESELKQHLENELEKIGDKKEVKKEVKSDEDNKSVISEENLWNDIQLKSAMDALKTWSIINPAKK

SEQ ID NO: 7543 - protein, 448 aa, Rhodobacter sphaeroides 2.4.1
MRKYMMAALGGTVAGVLLATQVAGPLIAQEQQRSKSVYEQLDLFGDIFERIRAQYVEEVETDKLIEAAINGMLTSLDPHSSYLPPDDFDDMQVQTRGEFGGLGIEVTQEEGFVKVVSPMDGTPADAAGIQSGDFITHVNGESVLGLTLDQAVDMMRGPVGSEILITVVREGTPEPFDVSIVRDTIKLVAARSRVVGNTVVVRLTTFNDQTFSGLKEGLEKEIKALGGEDKINGVVLDLRNNPGGLLTQAIQVSDAFLDKGEIVSTRGRAAGDGERFNATPGDLIDGKPMVVLINGGSASASEIVAGALQDHRRAIVVGTKSFGKGSVQTVIPLRGEGAMRLTTARYYTPSGRSIQALGVAPDIVVNQPPAKPAVPEEEESPATSAARNRSEADLRGVLSNDSMTEDEKKQLEADRARAEESAKLRDEDYQLAYAVDILKGLSAIEVKP

SEQ ID NO: 7544 - protein, 743 aa, Xanthomonas campestris pv. vesicatoria str. 85-10
MSERQGGQEQRTEADGMTTEGISETSQTLQALANGLPADAFAVLGPKPLAEGRRQVRVLAPGAEAMGLIDPRGKLLARMQASAIDGVFEGILAADGPYRLRIVWPDRVQEVEDPYAFAATLDESLLLQIAAGDGQAVRRALGAQHVHCGDVPGVRFAVWAPHAQRVAVVGDFNGWDVRRHPMRQRIGGFWELFLPRVEAGARYKYAVTAADGRVLLKADPVARQTELPPATASVVPSAAAFAWTDAAWMANRDPGAVPAPLSIYEVHAASWRRDGHNQPLDWPTLAEQLIPYVQQLGFTHIELLPITEHPFGGSWGYQPLGLYAPTARHGSPDGFAQFVDACHRAGIGVILDWVSAHFPDDAHGLAQFDGAALYEHADPREGMHRDWNTLIYNYGRPEVTAYLLGSALEWIEHYHLDGLRVDAVASMLYRDYGRAEGEWVPNAHGGRENLEAVAFLRQLNREIATQFPGVLTIAEESTAWPGVTAAISDGGLGFTHKWNMGWMHDTLGYMQRDPAERAQHHSQLTFGLVYAFDERFVLPLSHDEVVHGTGGLLGQMPGDDWRRFANLRAYLALMWAHPGDKLLFMGAEFGQWADWNHDQSLDWHLLDGARHRGMQQLVGDLNAALRRTPALYRGSHRADGFDWSVADDARNSVLAFVRHDPAGGAPLLAVSNLTPQPHHDYHVGVPRAGLWREILNTDSAHYGGSNLGNSGRLATEPVGMHGHAQRLRLTLPPLATIYLQAEK

SEQ ID NO: 7545 - protein, 164 aa, Zea mays
MADDGGSHEGSGGGGGVREQDRFPPIANISRIMKKAVPANGKIAKDAKETLQECVSEFISFVTSEASDKCQKEKRKTINGDDLLWAMATLGFEEYVEPLKIYLQKYKEMEGDSKLSTKAGEGSVKKDAISPHGGTSSSSNQLVQHGVYNQGMGYMQPQYHNGET

SEQ ID NO: 7546 - protein, 585 aa, Xanthomonas campestris pv. vesicatoria str. 85-10
MNQRNAITPSWGAWPAGEGQVRFALWAPAAKSVDVVFDDSARCALQAGQDGFFSAVIDCAANARYRYSVDGAEPVPDPASRWQPEGVHGPSAVQPTDGYAWQNAQWQGRPWDEAVIYEVHVGTCGGYAGVQAQLPQLAAMGITTIELMPLSAFPGAHNWGYDGVLPYAPVEAYGTPDELKALIDAAHGHGLMVLLDVVYNHFGPDGNYLHSYAAPFFNEDKPTPWGAAIDFRKPPVQRYFLDNALMWLHEYGFDGLRLDAVHAISPNAFLDTLRETVEASLPAGRHVHLVLENEANQASQLQRGYTAQWDDDFHNALHVLLTGEEEGYYAAFADKPTEHLARVLGEGFAYQGEPDPRGHVRGEPSGALPPHKFVVFAQNHDQIGNRARGERLSVLVSPQRLRAALALTALTPMIPLFFMGEPWGAKQPFLFFTDFGPPLDDAVREGRRKEFAHFAAFADEAQRATIPDPNSHTTFAASRAPIADAAHGDGAQWASWFTALLDVRRRWLVPGLAQARAVRASVLADGAVAATWELPGGLWHIAFNVGTQPVPLPPLRGRVAHVENVAADARELPVDGFIAWHEAQA

SEQ ID NO: 7547 - protein, 321 aa, Lyngbya majuscula
MSMPMDVSKKSFKPAKTQKSKTISNDYIKGLQTKHFLLYNVIPTIGTITAIALLWWYPISSVEIGLLIGMWALSMIGMSVGLHRYFAHRAFKTSQTMSVILAILGCMGAQGPVVSWVAVHRRHHEYSDLPGDPHSPNPELLGEGIFGTLRGLWHAHVGWLTNHEYPNPMYYAPELMRDKTISKINRNYVVWIVLGLLIPTILGGIIHGSWIGAVEGLLWGGFVRMFVVDNSILSINSFSHAFGTHPFDSKDQSRNNIWVAIPTFGESWQNNHHTFENSAAIGLKWWQIDLGYCLIWGLEKLGLVWDVKLPTAKMIEAKKLA

SEQ ID NO: 7548 - protein, 1081 aa, Candida albicans SC5314
MNPTKKPRLSPMQPSVFEILNDPELYSQHCHSLRETLLDHFNHQATLIDTYEHELEKSKNANKAFQQALSEIGTVVISVAMGDLSKKVEIHTVENDPEILKVKITINTMMDQLQTFANEVTKVATEVANGELGGQAKNDGSVGIWRSLTDNVNIMALNLTNQVREIADVTRAVAKGDLSRKINVHAQGEILQLQRTINTMVDQLRTFAFEVSKVARDVGVLGILGGQALIENVEGIWEELTDNVNAMALNLTTQVRNIANVTTAVAKGDLSKKVTADCKGEILDLKLTINQMVDRLQNFALAVTTLSREVGTLGILGGQANVQDVEGAWKQVTENVNLMATNLTNQVRSIATVTTAVAHGDLSQKIDVHAQGEILQLKNTINKMVDSLQLFASEVSKVAQDVGINGKLGIQAQVSDVDGLWKEITSNVNTMASNLTSQVRAFAQITAAATDGDFTRFITVEASGEMDALKTKINQMVFNLRESLQRNTAAREAAELANSAKSEFLANMSHEIRTPLNGIIGMTQLSLDTELTQYQREMLSIVHNLANSLLTIIDDILDISKIEANRMTVEQIDFSLRGTVFGALKTLAVKAIEKNLDLTYQCDSSFPDNLIGDSFRLRQVILNLAGNAIKFTKEGKVSVSVKKSDKMVLDSKLLLEVCVSDTGIGIEKDKLGLIFDTFCQADGSTTRKFGGTGLGLSISKQLIHLMGGEIWVTSEYGSGSNFYFTVCVSPSNIRYTRQTEQLLPFSSHYVLFVSTEHTQEELDVLRDGIIELGLIPIIVRNIEDATLTEPVKYDIIMIDSIEIAKKLRLLSEVKYIPLVLVHHSIPQLNMRVCIDLGISSYANTPCSITDLASAIIPALESRSISQNSDESVRYKILLAEDNLVNQKLAVRILEKQGHSVEVVENGLEAYEAIKRNKYDVVLMDVQMPVMGGFEATEKIRQWEKKSNPIDSLTFRTPIIALTAHAMLGDREKSLAKGMDDYVSKPLKPKLLMQTINKCIHNINQLKELSRNSRGSDFAKKMTRNTPGSTTRQGSDEGSVEDMIGDTPRQGTVEGGGTSSRPVQRRSATEGSITTISEQIDR

SEQ ID NO: 7549 - protein, 254 aa, Novosphingobium aromaticivorans DSM 12444
MTLEIHQFPCLSDNYGFLVHDSDSGETACIDTPDAEAYLREANARGWRITQIWNTHWHPDHAGGNEAIKAATGCTVVAPEDDAGKIAGVDRAVAHGDTVQLGSFTAEVIDVGGHTMGHCAYHLPEASVAFVGDALFPLGCGRMFEGTPPQFWASLSRIKALPPGTTLYSAHEYTQSNARFALHADPDNAALRAYADGVEARRARGEWTVPTTLAAELAANPFLRADTPGMAARWGGSSPVDTFAALRAAKDTFR

SEQ ID NO: 7550 - protein, 369 aa, Yersinia pseudotuberculosis IP 32953
MDKLFTPFKVGDTELVNRVVMAPMTRSRATVGDTADELTAKYYQQRASAGLIITEGSQISVQGQGYLFTPGIYNDAQVKGWERVTNAVHNAGGKIYIQLWHVGRISHTGLQNDGQAPVSSVAVKAKNSTCYARDENGQPGLVPVSEPRALSVSEIKDVVQDYVQAAENAIRAGFDGVEIHAANGYLLEQFINGGLNTRQDEYGGADPENRLRFVLEVTDAISQAIGAGKTGIRLAPFGRLFDMHPFEGEEETWLLLAKELSTRSLSYVHLSDQQTLGEQAIPAGFIEKFRAAYDGPLIIAGGFDKQRAEQYLQQGKADLIGFGRPYIANPDLVERMVNDWPLNQVDRATMYGGDEKGYTDYPVWSDTQA

SEQ ID NO: 7551 - protein, 343 aa, Saccharomyces cerevisiae
MSSSVASTENIVENMLHPKTTEIYFSLNNGVRIPALGLGTANPHEKLAETKQAVKLQSKLDNRHIDTAWASREPFVGEAIKELLEDGSIKREDLFITTKVWPVLWDEVDRSLNESLKALGLEYVDLLLQHWPLCFEKIKDPKGISGLVKTPVDDSGKTMYAADGDYLETYKQLEKIYLDPNDHRVRAIGVSNFSIEYLERLIKECRVKPTVNQVETHPHLPQMELRKFCFMHDILLTAYSPLGSHGAPNLKIPLVKKLAEKYNVTGNDLLISYHIRQGTIVIPRSLNPVRISSSIEFASLTKDELQELNDFGEKYPVRFIDEPFAAILPEFTGNGPNLDNLKY

SEQ ID NO: 7552 - protein, 392 aa, Tetrapterys discolor
DLEPVNPADVPVTAAGALKSYKLAAKAISRLQSLPSGNISLLCDVLVKEVRDLTGYDRVMVYKFHEDEHGEVVSECRRSDLESYLGLHYPATDIPQASRFLFMKNKVRMICDCLAPPVKVIQDERLPQPLSLCGSTLRSPHGCHAQYMTNMGTIASLVMSVTVNDDDDMMDGDQQQMTRKLWGLVVCHHTSPRFVPFPLRYACEFLIQVFGVQINKEVELTAQVREKHILQIQTMLCDMLLRDAPVAIITQSPNVMDLVKCDGAALYFKKKTWLLGVTPMEEQVRDIAEWLLEYHSGNTGLSTDSLMEAGYPGASDLGDAVCGMAAVSITSRDFLFWFRSHTAKEIKWGGAKHDPDDKDDGRKMHPRSSFKAFLEVVKWRSVPWEDVEMDAI

SEQ ID NO: 7553 - protein, 56 aa, Zea mays
  misc_feature (41)..(41): Xaa can be any naturally occurring amino acid
VKYVFRHAQPKRPKSLRIYETHVGMSSPEPKINTYVNFRDXVLPRIKKLGYNAVQI

SEQ ID NO: 7554 - protein, 392 aa, Stigmaphyllon sagraeanum
DLEPVNPADVPVTAAGALKSYKLAAKAISRLQSLPSGNISLLCDVLVKEVRDLTGYDRVMVYKFHEDEHGEVVSECRRSDLESYLDLHYPATDIPQASRFLFMKNKIRMICDCMAPPVKVIQDETLPQPLSLCGSTLRSPHGCHAQYMTNMGTIASLVMSVTINEDDDTMDGDQQQMTRKLWGLVVCHHTSPRFVPFPLRYACEFLIQVFGVQINKEVELAAQVREKHILQIQTMLCDMLLRDAPVAIITQSPNVMDLVKCDGAALYFKNKTWLLGVTPTEEQIRDMAQWLLEHHSGNTGLSTDSLMEAGYPGASALGDAVCGMAAVSITSRDFLFWFRSHTAKEVKWGGAKHDPDDKDDLRKMHPRSSFKAFLEVVKWRSMPWEDIEMDAI

SEQ ID NO: 7555 - protein, 743 aa, Bradyrhizobium japonicum USDA 110
MAMGRTFRIKVRMRRFRRQHPRIAFAIRSFMIFSATFGGAYGFVSGSRSENSGYDPHTFAIGASFLFALACLGLATLSMRLRFVNKRLRKLAAHNEALIDRNWELKEAEERARSLFEQQGDLIVLRDHQNRITFANDAYCALAGQARGALVGTRFDFDVLEQGDSARESSGTRVHDQKIATPLGARWIAWREGYVRLDAGQPAELQSVGRDVTDRTETERALSDARDQADAANRAKSRFLAMASHEIRTPLNGIIGMGGLLLDTTLTPEQATYAKAVKTSGEALMALIEELLDYSKIEAGKLDLEQRPFALSTLIEEITELLAPRAQAKTLEIAAYVDERLPLEVVGDAARLRQVLLNLAGNAIKFTASGGVALIVEPGIRPNEISFLVRDTGIGIAAEAQQRIFREFEQADERVARTYGGTGLGLAISERIVKRMGGRITLASEPGKGSTFEVAVPLAPSEARAGQTAFPSPDLTGKSILLIAEGIEASLIARRLERWGSQTCLVTDATVAEALLPERSWHAVLVDRAIGPAIADRLGGVARAHAPQRLVLLTSSSRHEKQSAAFTGFLVKPLRAASLAARLALTPEVASPELAPEPPVEATSAAPARGLSVLVAEDNEINALLMRSLLTKLGHRVVIAVHGEAALESWLAASSAGTPYDLVLMDIQMPQLDGIEATKRIRAHEAATGGHHTPILALTANTLVEDRYACFEAGMNGFLIKPLDRDKLDEALAGLAASRQLAG

SEQ ID NO: 7556 - protein, 392 aa, Lophopterys floribunda
DLEPVNPADVPVTAAGALKSYKLAAKAISRLQSLPSGNISLLCDVLVKEVRDLTGYDRVMVYKFHEDEHGEVVSECRKSDLESYLGLHYPATDIPQASRFLFIKNKVRMICDCLAPPVKVIQDERLPQPLSLCGSTLRSPHGCHAQYMTNMGTIASLVMSVTINEDDDTMDGDQQQTTRKLWGLVVCHHTNPRFVPFPLRYACEFLIQVFGVQINKEVELAAQVREKHILQIQTMLCDMLLRDAPVAIITQSPNVMDLVKCDGAALYFKNKIWLLGVTPTEEQIRDIAEWLLEYHSGNTGLSTDSLMEAGYPGASVLGDAVCGMAAVSITSRDFLFWFRSHTAKEIKWGGAKHDPDDKDDGRKMHPRSSFKAFLEVVKWRSMPWEDVEMDAI

SEQ ID NO: 7557 - protein, 392 aa, Mionandra camareoides
DLEPVNPADVPVTAAGALKSYKLAAKAISRLQSLPSGNISLLCDVLVKEVRDLTGYDRVMAYKFHEDEHGEVVSECRRSDLESYLGLHYPATDIPQASRFLFMKNKVRMICDCLAPPVKVIQDERLPQPLSLCGSTLRSPHGCHAQYMTNMGTIASLGMSVTVNEDDDTMDGDQQQMTRKLWGLVVCHHTSPRFVPFPLRYACEFLIQVFGVQINKEVELAAQVREKHILQIQTMLCDMLLRDAPVAIITQSPNVMDLVKCDGAALYFKNKTWLLGVTPTEEQIRDIAEWLLKYHCGNTGLSTDSLMEAGYPGASALGDAVCGMAAVSITSRDFLFWFRSHTAKEIKWGGAKHDPDDKDDLRKMHPGSSFKAFLEVVKWRSMPWKDVEMDAI

SEQ ID NO: 7558 - protein, 392 aa, Aspicarpa brevipes
DLEPVNPADVHVTAAGALKSYKLAAKAISRLQSLPSGNVSLLCDVLVKEVRDLTGYDRVMMYKFHEDEHGEVVSECRRSDLESYLGLHYPATDIPQASKFLFIKNKVRMICDCLAPSVKVIQDERLTQPLSLCGSTLRSPHGCHAQYMTNMGAIASLVMAVTVNEDEDTMDGDQQHMTRKLWGLVVCHHTSPRFVPFPLRYACEFLIQVFGVQVTKEVELAAQVREKHSLQIQTMLCDMLLRDALVAIITQSPNVMDLVKCDGAALYFKNKTWFLGVTPTEEQIRGIAEWLLKYHSGNTGLSTDSLMEAGYPGASGLGDAVCGMAAVSITSRDFLFWFRSHTAKEIKWGGAKHDPDDKDDLRKMHPRSSFKAFLEVVKWRSTPWEDIEMDAI

SEQ ID NO: 7559 - protein, 207 aa, Ranunculus bulbosus
RHEMSGVCDAEVALIVFSTKGKLFEYSTDSGMDKILERYERYSYAERKLGASDTDSQGNWSLEYTKLKAKVEILQKNQRHFRGEDIANMSLKELQNLEQQLDSALKLIRARKNQLTYESISDLQKKEKVLQEQNNQLEKQLKEKEKELAKREQWEQPNQGQTSRSFTPQSPSSLNIGGSYQGNNGGEGFQTQNRPTILMPPWMLSHL

SEQ ID NO: 7560 - protein, 390 aa, Glycine max
MALLTSQPKNPILHRFTTLHCPLPRLHRTVLGLGSFSHNSALSTKKLNFNPTQTKISLQNNPFTYNLAVTAKANANAAFGEGFKEEGASKHRKILLSEVEVKRERRVFFGRKWNSLDFGTAGIVLAMHLLCVFAPFHFNWPAFWVAVALYIVTGLFGITLSFHRNLSHRSFKLPKWLEYFFAYCGVLALQGNPIDWVSTHRYHHQFCDSERDPHSPTEGFWFSHMSWLFDTNSVLERCGEANNVGDLEKQSFYRFLRSTYLAHPFALGALLYAAGGFPFLVWGMGVRIVWVYHITWFVNSACHVWGNQAWNTRDLSRNNWWVALLAFGECWHNNHHAFEYSARHGLEWWQIDMTWYVVRFLQAIGLATDVKLPTESQKQKMAFNSDSIAT

SEQ ID NO: 7561 - protein, 610 aa, Pseudomonas aeruginosa PAO1
MCGITGWTDWSRDLGEQRSILERMTRTLAPRGPDAEGLWLSRHALLGHRRLAIIDLENGAQPMLAEAGGRVALTYSGEVYNFRELRAELETLGQVFRTRSDTEVVLRAYLQWGEASFVRLRGIYGFALWDEREQSLWLVRDRFGVKPLYYYPTAGGVLFASEPKAIFANPEANPVLDASGIAELFALTTAPTPGHGLYKGLRQVRPGQALRFDRNGVRELVYWALRAERHEEGAEDSAERAGQLLREAVAEQLVADVPLGSLLSGGLDSSAISAFAVAALDGDARRLPTFSVDFPGEGRGFVPTPWQSSWDEPYAQLAANFLGTPHRTVLVAPEEVLEQDEAVLQARDLPGWGELDASLYLLFRQVREHTTVALSGESADEVFGGYPFFHDPSALAHDGFPWLAGKSGPWQLLRREVAERVAAPEYIRARYREALAEVPRLDGEDAAQRRQREVAYLALSRWLPAMLERKDRMSMAVGLEVRVPFCDHRLVEYVWNLPWALKSVAGESKSLLRRALRGHLPQAILERRKSGFPANPDPRYLALLRERVGRLLDDGRSPLFELVDAGRVRQALEQGTPLPSPRASASPTAGLAYLLNLDRWLTRHGVDISL

SEQ ID NO: 7562 - protein, 215 aa, Ranunculus bulbosus
ALRHEMSVLCDAEVGLIIFSARGKLYEFASAGGMSRTLERYHKNSFSNQDSNLAIDRETQSWYQEVSKLKAKYESLQRSQRHLLGEDLGPLNVKELQNLEKQLEGALAQARSRKTQIMLEQMEALRRKERELGDMNKQLKNKYQLEAEGQGSLRAMQGSWESNALNNYSGHPSHSSSMDCEPTLQIGYHQYVSADGGPIQRNNAGENNFIQGWEL

SEQ ID NO: 7563 - protein, 584 aa, Symbiobacterium thermophilum IAM 14863
MWHEWCMSPWSLRAPKGQASRFMGKHVAEPYDLTMNTTAPGGEPVHTSIATKFMIGVTAALVTVLGVNLGLDIRQQRAQAEEDLREQARMVATQVIAMREFIARNQDRINRDSHGHFEFKYLNPAAVGRGVGQIFAEMSDYQYKQTRLQVRMAENMPDAFEVEALRRFASNPDLAEVVGYTGSGQDRVFRYMVPLKMEASCLPCHGPPAGEPDIAGYPKEGLQVGELAGALSITIPTERFEARLTQSTRSRATVIVLATGLSLALIGFLNHQLVARPLAALAGVTRRIGQGRWEVPEEEVRDLRAHQETSPLVDAIQAMSDELQALYRNLERKVAERTRQLQEAHADLEALHRSQTEFYSAMTHEFRTPLTSIIGFSQLLLSPGGDPLTPGQREHLKDILESAQRLLQLVNDLLDASRLQAGQMPLRIAAVDLGEAVQEALAVVRPLAQQREITVTCHIPADLPLVAADDLRVLQILLNLLSNAIKFTQVGGEVALTAEARSDLVQVSVRDNGPGIPPEDHEVIFQLFRRGSAHERTGGSGLGLALAKLLVELHGGRIWVESRPGCGSTFHFTLPVHGGEPRCP

SEQ ID NO: 7564 - protein, 158 aa, Retama raetam
MSLIPSVFGTGRRTNVFDPFSLDIWDPFQDFPLRTIAPSGFDTETAAVANTRIDWKETPEAHVFKADLPGLKKEEVKVEVEEGRVLQISGERTKEKEDKNDTWHRVECSAGRFLRRFRLPENAKVEQVKASLENGVLTVTVPKEEVKKPDVKPVQITG

SEQ ID NO: 7565 - protein, 232 aa, Syringa vulgaris
  misc_feature (231)..(231): Xaa can be any naturally occurring amino acid
RMENKINRQVTFAKRRNGLLKKAYELSVLCDAEVALIIFSNRGKLYEFCSSSSMLRTLERYEKCNYGAPEPHVSSREALELSSQQEYLKLKARYEALQRSQRNLLGEDLGPLNSKELESLERQLDMSLKQIRSTRTQAMLDTLTDLQRKEHALNEANQSLKQRLMEGNHISLQWNQDPEEVGYGREPTQHQPHGFFHPLECEPTLQIGYQNDPMAAAGPSLNNFMSGWLPXI

SEQ ID NO: 7566 - protein, 1489 aa, Candida glabrata CBS138
MSVLIPHQQQRLRASSAAKKAAWNAMNKTVNIVSPHNNVNYVKKPSPKTNSNHLDRVIKSVNDATKRLSEAESINSNNTKSSKRKSRDTVGPWKLGKTLGKGSSGRVRLAKNIENGTLAAIKIVPKRTYNRRMRDQKMKTAGGVSSGTDSKDSSNREDPIKNGTDSALNPYGIEREIVIMKLISHPNVMGLLEVWENKSELYLVLEYVDGGELFDYLVSKGKLSEPEAVHYFTQIIQGVSYCHSFNICHRDLKPENLLLDKKNKVIKIADFGMAALELPNKLLETSCGSPHYASPEIVMGKPYHGGPSDVWSCGIILFALLTGHLPFNDDNIKKLLLKVQAGRFQLPPYLTNDAKDLITRILVTNPEKRLTINEILNHPLIKKYRNPPAHIRKLNLLGRGKSNSDLHVLEYNTPATVCLNSEEDIDQSILKSLQILWHGTPRQRLVERLLVEGATEEKLFYSLLFQYKLKHSKPISATKLQKKIEDVVLENESTKTESKDSSNEPGIDNNNDTSDFTQDGNSSEMVNELHTSAPMLEQKSQFSQHSLKSKETVPISDLPPLPPVIPTFAASSSKAFRRSKSNLSSYLKRPKLENARSRTSLFNSSSNTSITSSSISELNTRPRGNIPLSPSNITLTSLVSSRSLHNSASKKSLKNLQKRTLQNSESKRSLYSQTSISKRSLNLNDYLIGGPSNSAELPPLPKLDSNNEFEMLCDKILNTSALDNILEEEEEDITPSKNTTQTNDVHNEDTIIRKEMHDFEINVNNHQPEFKRQPSDFSVNGPDTSIFSIEPMPEGLGISKKPVRVQPTFNFIIDEDKVDDSIKVKQVSGTGPSNNVLKDISNQINNGKGIENSKLHPTSNNNYKNIRNVTAPEGNFTSKTFSLDPRRNVSQPPKESLFHSLLNNKSSKNAEENTQFESKSKQYNFMNKTAHSEFEKERLNAHRDADRSNDQNVYNETSVLAQSSTIHESPLLSIPSTLLNTSMTFKNLVDMLQENKLDDINETVAKESSAPLRKKSTKLSLAPHSNLVSDLNKRTSGYNTLASVDRSSSDLSYAIDLPTNTNIAEIVYLSGNNKQSSEKNIFMLSNDNNETELFHTDENKTSIKSAVNIFEDPPSDSTSLQTSSSESDSIPKVQRKAVSIETLNASNIITPAADVRVSLYGNNVSNSNTMPRETTEELISRFKLTPEKPQHQVQKRFSSLTQTGRNTDSIALSQSMISMFKDAEENGNNKSVKVLDQVEEENASKLTPTSPKNRVTMLFDDYEAQQNITSDQSNKSSKVIEIPNDSPIKVKVQKASTIFEKEIISAAEADENDHLRIPYESKSKKEIAQVHQQEQKEQQVRKPTESQEKAVQKTTKPSWFSKLIHGFKTTGGSGHTKLIREHSTKMTFEEVHMITVKEFGNNGIDYQLRTLDKKGDREKVEYDCKFVKGNFEFKIKIFNSGFPHQNTIITVKKKGKINSKETTDLFQRFNANIENLIKSAERNIESNPK

SEQ ID NO: 7567 - protein, 277 aa, Brassica oleracea
MNTFPASTEMVGSENESPVTTVVGGDYYPMLAASCPKKPAGRKKFQETRHPIYRGVRLRKSGKWVCEVREPNKKSRIWLGTFKTAEMAARAHDVAALALRGRGACLNYADSAWRLRIPETTCHKDIQKAAAEAALAFEAEKSDVTMEETMAVASQAEVNDTTTDHGMNMEEATAVASQAEVNDTTTDHGVDMEETMVEAVFTEEQSEGFNMAEESTVEAAVVTDELSKGFYMDEEWTYEMPTLLADMAAGMLLPPPSVQWGHNDDLEGDADMNLWSY

SEQ ID NO: 7568 - protein, 207 aa, Syringa vulgaris
ALVQLRRMENKINRQVTFAKRRNGLLKKAYELSVLCDAEVALIIFSNRGKLYEFCSTSNMLKTLERYQKCSYGSLEVNNSTRDLEESSNREYLKLKSKYESLQRHQRHLLGDELGPLNINDLEHLEHQLETSLKHIRSTRTQVMVDQLSDLQAKEKMMVETNTALERKLEEIYAANQLQQSWAGGEQSCAYSQQHLNLRTFFNLWMQ

SEQ ID NO: 7569 - protein, 250 aa, Brassica oleracea
MNSVSTFSELLGSENESPVGGDYCPMLAASCPKKPAGRKKFRETRHPIYRGVRLRKSGKWVCEVREPNKKSRIWLGTFKTAEIAARAHDVAALALRGRGACLNFADSAWRLRIPETTCAKDIQKAAAEAALAFEAEKSDTTTNDHGMNMASQAEVNDTTDHGLDMEETMVEAVFTEEQRDGFYMAEETTVEGVVPEEQMSKGFYMDEEWMFGMPTLLADMAAGMLLPPPSVQWGHNDDFEGDADMNLWNY

SEQ ID NO: 7570 - protein, 720 aa, Xanthomonas campestris pv. vesicatoria str. 85-10
MATRKFTQRSRIREGRPNPLGATWDGLGVNFALYSRNATRVELCLFDERGREQERIALPEYTDEVWHGYLPDARPGQLYGYRVHGPYAPDAGHRFNHNKLLLDPYAKQIVGELKWAPHLFGYIIGHRDKDLSFDRRDSAAFMPKSAVIDPAFTWGQDRPPQTPWNRTVIYEAHVRGLSMLHPAVPPEERGTFSALKTDELIDHISSLGVTAVELLPVHAFVDDQYLLEKGLRNYWGYNTLGFFAPQARYMSTRTVAEFKQMVARLHHAGLEVLLDVVYNHTAEGNELGPTLSFKGIDNASYYRLADDRRFYINDTGTGNTFDLTNVGALRMVMDSLRYWVQEMHVDGFRFDLASILGRERYGFDPSGSFLDAVRQDPVLSQTKLIAEPWDIGPGGYQVGNFPPGWVEWNDKFRDNVRAFWRGDSGQLAELATRLTGSADLFNHSGRRPTASVNFVTAHDGFTLRDLVSYETKHNLANGEDGRDGSDHNISSNYGVEGETNDPAIKQLRRQQMRNLLATLLLSQGTPMLLAGDEFGHSQNGNNNAYCQDNELTWIDWTAATKAAAADQAAFVRRLIRIRQRYPLLHRARFFDGKFDEALGLKDLTWLAPNGTEMDEAAWHDPEARALMLRLDGRSPTTGLREIAANVTLLMLINAASTAVSFTLPAMHDEHWRVLVDTARHGGRVVAGGSEWKAPAHSLTLLAVERDRIVSSARIVSEGAR

SEQ ID NO: 7571 - protein, 222 aa, Pinus radiata
MGRGKIEIKRIENTTNRQVTFCKRRNGLLKKAYELSVLCDAEVALIVFSSRGRLYEFANHSVKRTIERYKKTCVDNNHGGAISESNSQYWQQEAGKLRQQIDILQNANRHLMGDGLTALNIKELKQLEVRLEKGISRVRSKKNEMLLEEIDIMQRREHILIQENEILRSKIAECQNSHNTNMLSAPEYDALPAFDSRNFLHANLIDAAHHYAHQEQTTLQLG

SEQ ID NO: 7572 - protein, 415 aa, Oryza sativa
  misc_feature (393)..(393): Xaa can be any naturally occurring amino acid
PLNITRRSLDEWPRAGSDDVGEWPNPTTPGASKAEGAGSAKPGEGLRLDLSSLRSQGRKDQIAFFDKECSKVADHVYLGGDAVAKNRDILRKNGITHVLNCVGFVCPEYFKSDLVYRTLWLQDSPTEDITSILYDVFDYFEDVREQGGRVFVHCCQGVSRSTSLVIAYLMWREGQSFDDAFQLVKAARGIANPNMGFACQLLQCQKRVHAIPLSPNSVLRMYRMAPHSPYAPLHLVPKMLNEPSPAALDSRGAFIVHVLSSIYVWVGMKCDQVMEKDARAAAFQVVRYEKVQGHIKVVREGSEVPEFWDAFSSAPVNSDSNTKISKDQIDSASKTGPGNRRVESYDADFELVYKAITGGVVPAFSSSGAGDETHLPARESTWSSLRRKFISRXSTSPPFLSPSSLSSDSSISSKY

SEQ ID NO: 7573 - protein, 275 aa, Erwinia carotovora subsp. atroseptica SCRI1043
MTQPKVKLADGNIMPQLGLGVWRASSEDTVIAVNEALSIGYRAIDTAAIYKNEEAVGQALSSANLPREEVFITTKLWNGDHTDPQKALEESLRKLRLDYIDLYLIHWPLPQQNTFVDAWRGLIKLQEQGLAKSIGVSNFHIHHLQRLKEETGVLPVIDQVELHPLLQQKQLHAWNATHHIQTESWSPLAQGGEGVFDHPIIRKLAMKYGKTPAQIVIRWHLDSGLVVIPKSVTPARIKENFEVFDFRLDKDELSEITKLDCGKRLGSDPDEPRND

SEQ ID NO: 7574 - protein, 676 aa, Candida albicans SC5314
MSKSLIQGVLDLDPWLEPFSQPLINRQIEFQKWHKKLIESEGSLIDFANSYKKYGVHTLPSGEIQIIQYIPDVDEVSIVGDFNNWNKDSHKLRKLNEFGTWELTLKPGSIPIDSKYKIAMKTTTKNGGEWIYRLDPWVHRATFAKQHALYEGHFWEDNYQFKNPRPKKNIAAGGIKIYEAHVGISTPEPTIGSYKNFTQNVLPIIRDLGYNTIQLMAIMEHAYYASFGYQVTSFFAISSRYGTPDELKELIDTAHGMGIQVLLDVVHSHSSKNVDDGLNMFNGTDHYLFHGGSRGNHDLWDSRLFNYTNYETLRFLLSNLKYYIDVFQFDGFRFDGVTSMLYKHHGLSVGFSGGYHEYFGDGVDNEAIVYLMLAHQLMNEISTTQNFNLTSIAEDVSGMPTLCRPISDGGIGFNYRLSMAIPDMWIKILKHLTDEQWDLGNIVHTLTNRRYGEKVIAYCESHDQALVGDKTLAFWLMDKEMYTNMSVLSPLTPIIDRGIALHKLIRLVTFALGGDGYLNFEGNEFGHPEWLDFPRQGNGESYHYARRQFNLINDDLLRYKYLYQFDKKMLQLEITNTGEYVSLKHEGDKVLVFEKGKSVYIFNFNPTQSFVDYRIGVELPGTYKLVLDSDSEDLGGHGRLDHNTKYFTFNEPWNNRSNSLLVYIPTRTAIVLEKVE

SEQ ID NO: 7575 - protein, 392 aa, Diplopterys cabrerana
DLEPVNPADVPVTAAGALKSYKLAAKAISRLQSLPSGNISLLCDVLVKEVRDLTGYDRVMVYKFHEDEHGEVVSECRRSDLEPYLGLHYPATDIPQASRFLFMKNKVRMICDCLAPPVKVIQDDRLPQPLSLCGSTLRSPHGCHAQYMTNMGTIASLVMSVTINEDDDTMDGDQQQMTRKLWGLVVCHHTSPRFVPFPLRYACEFLIQVFGVQINKEVDLAVQMREKHILQIQTMLCDMLLRDAPVAIITQSPNVMDLVKCDGAALYFRNKTWLLGVTPTEEQIRDIAEWLLKYHSGNTGLSTDSLMEAGYPGASALGDAVCGMAAVSITSGDFLFWFRSHTAKEIKWGGAKHDPDDKDDLRKMHPRSPFKAFLEVVKWRSMPWEDVEMDAI

SEQ ID NO: 7576 - protein, 309 aa, Yarrowia lipolytica CLIB122
MTSIDFTMNNGKTIPAIGLGTWKSTTEEVAGAVECALTEGGYRHIDTAFNYRNEDAVGLGIKRAMEKGVKREDIFVTTKIWVTYHDRVEENLNMSLERLGLDYVDMLLIHWPVPLNPNGNDPVYPLREDGSRDIDESGSQPKTWKQMEAVLKTGKTKSIGVSNFSIPYLEELLKEAEVVPAVNQVELHPLLPQLELMEFCKKNNIIMTAFSPFGSVGGPLLKNELVLKLADKYKTSPGGILTSYHIGNGTVVIPKSVTNSRIIENGKSAVTLSQEDLKALNDLHKTEGIHRTSKPKWGVDLGFPDFDFC

SEQ ID NO: 7577 - protein, 152 aa, Zea mays
MSLVRRSNVFDPFSMDLWDPFDTMFRSIVPSATSTNSETAAFASARIDWKETPEAHVFKADLPGVKKEEVKVEVEDGNVLVISGQRSREKEDKDDKWHRVERSSGQFVRRFRLPENAKVDQVKAGLENGVLTVTVPKAEEKKPEVKAIEISG

SEQ ID NO: 7578 - protein, 561 aa, Triticum aestivum
  misc_feature (122)..(122): Xaa can be any naturally occurring amino acid
  misc_feature (178)..(178): Xaa can be any naturally occurring amino acid
  misc_feature (184)..(184): Xaa can be any naturally occurring amino acid
MRRRGEEVSGTNTKRRCRLWTKLLTWRGGRIWRPQKRGVEKTLKEVTKRLAQIARDVFKRAYGWGPAFRPSSSFDTKTTTTNAGQPVWNDNEALTVGPRGPILLEDYHLLEKIAHFARERIXPERVVHARGASAKGFFECTHDVTGLTWRRLPPPRRGAAHAPSSSRFSTVIHERGSXPETIRXDPRGFAVKFYTREGNWDLLGNNFPVFFIRDGIKFPDVIHAFKPNPKSHVQEYWRVFDFLSHHPESLHTFFFLFDDVGIPTDYRHMDGFGVNTYTFVSRAGKAHYVKFHWRPTCGVSCLMDDEATLVGGKNHSHATQDLYDSIDAGNFPEWKLFVQVIDPDDEDRFDFDPLDDTKTWPEDLVPLQPVGRLVLDRNVDNFFNENEQLAFGPGLVVPGIYYSDDKMLQCRVFAYADTQRYRLGPNYLMLPVNAPKCGFKNNHYDGAMNFMHRDEEVDYYPSRHAPLRHAEPASFPVPTRPVVGKREKTRIKKENDFVQPGERYRSWAPDRQDRFVRRFADALARPKVSHELRVIWIDFLSKCDKSCGMKVANRLNVKPSM

SEQ ID NO: 7579 - protein, 446 aa, Oryza sativa (japonica cultivar-group)
MRMGKYEMGRALGEGHFGKVKLARHADTGAAFAIKILDRQRILAMKIDEQIKREIATLKLLKHPNVVRLHEVSASKTKIYMVLEYVNGGELFDKIALKGKLSEKEGRKLFQQLMDAVSYCHEKGVYHRDLKPENVLVDAKGNIKVSDFGLSALPQNQRKDGLLHTTCGSPNYIAPEIQVLLNRGYDGSLSDIWSCGVILYVMLTGNLPFDDQNTVVLYQKILKGDARIPKWLSPGAQDILRKILDPNPITRLDITGIRAHEWFRQDYTPAMPFDDDDDNNISDGNLHMTENQDIETSPAISQINAFQLIGMSSCLDLSGFFEKEDVSERKIRFVSNYSPTSLFEKIESTVTEKGFQVQKNSGKLKVIQVCKEPANPRGHGNLLISAEVFEINESLYVVELKRSSGDCSLYRQLCASLSEDLGICKRQQLLKKDSMRQDLCRYNSSF

SEQ ID NO: 7580 - protein, 397 aa, Rhodopirellula baltica SH 1
MLFFRRKRDVGHLLAASHDLFNAPRDQDRSLMSTVVEPKKNRGPGKSKGNADQPNTHVPESTTLELPQTGGKLRLDQPQAEDADGFSSLVAQKAAKKRDLAKPTKADRVRASNISWWAVGWLAMAHIVCLAAPFTFTWTALITALVLHWVAGSLGICLGYHRLLTHTGMKTYNWVRYAFAAIGCFAGEGSPLDWVADHRKHHAHSDLEGDPHSPHDGGIWSHIFWLAFHTHNGDRDAYLTRWVPDLYKDPAMRAFDMLFLPIHIVASFALLGIGYAFGGWELGVSMLVWGMFVRLVAVLHATWMVNSASHMWGYQNYETTDDSRNNWLVAIVAYGEGWHNNHHAYPRMAKHGHKWWEFDITWQAIKLLRAVGLVWDVVDYRTVAEKKARDAKQSAAA

SEQ ID NO: 7581 - protein, 342 aa, Pyrococcus furiosus DSM 3638
MIIIDGSYGEGGGQILRTSIALSAITGEPVKIINIRANRPNPGLRPQHLNAILALKKLANAKVEGAEVGSREVTFIPGELKGGEIRVDIGTAGSITLVLQALLPAMVFAKDTVEFKITGGTDVSWSPPVDYLINVTMFALRKIGIEGEIKLLRRGHYPKGGGIVAGYVKPWIERKELIAEEFENIYKVSGISHATNLPAHVAERQAKAAMEELKVLGVPIEIKKEVSHSLGPGSGIVVWAETECLRLGGDALGKKGKPAEEVGREAAQELLSQVKTKACVDKFLGDQIIPFLAISGGKIKVAEITKHLITNVWVVEQFFGKVFEVKGGVGEKGEVRVVRKAW

SEQ ID NO: 7582 - protein, 799 aa, Zea mays
MAFRVSGAVLGGAVRAPRLTGGGEGSLVFRHTGLFLTRGARVGCSGTHGAMRAAAAARKAVMVPEGENDGLASRADSAQFQSDELEVPDISEETTCGAGVADAQALNRVRVVPPPSDGQKIFQIDPMLQGYKYHLEYRYSLYRRIRSDIDEHEGGLEAFSRSYEKFGFNRSAEGITYREWAPGAFSAALVGDFNNWDPNADRMSKNEFGVWEIFLPNNADGTSPIPHGSRVKVRMDTPSGIKDSIPAWIKYSVQAPGEIPYDGIYYDPPEEVKYVFRHAQPKRPKSLRIYETHVGMSSPEPKINTYVNFRDEVLPRIKKLGYNAVQIMAIQEHSYYGSFGYHVTNFFAPSSRFGTPEELKSLIDRAHELGLLVLMDVVHSHASSNTLDGLNGFDGTDTHYFHSGPRGHHWMWDSRLFNYGNWEVLRFLLSNARWWLEEYKFDGFRFDGVTSMMYTHHGLQVTFTGNFNEYFGFATDVDAVVYLMLVNDLIHGLYPEAVTIGEDVSGMPTFALPVHDGGVGFDYRMHMAVADKWIDLLKQSDETWKMGDIVHTLTNRRWLEKCVTYAESHDQALVGDKTIAFWLMDKDMYDFMALDRPSTPTIDRGIALHKMIRLITMGLGGEGYLNFMGNEFGHPEWIDFPRGPQRLPSGKFIPGNNNSYDKCRRRFDLGDADYLRYHGMQEFDQAMQHLEQKYEFMTSDHQYISRKHEEDKVIVFEKGDLVFVFNFHCNNSYFDYRIGCRKPGVYKVVLDSDAGLFGGFSRIHHAAEHFTADCSHDNRPYSFSVYTPSRTCVVYAPVE

SEQ ID NO: 7583 - protein, 494 aa, Bacillus anthracis str. A2012
MPFATPPVCFGKGNSALKRRVAIIGMVVAFLIGAGGMFAGMSLFGVNPAEVTQTISSGNASTAQGNLAKINEAYALIDSRYVEDVKDEKLVEGAIQGMLSTLKDPYSTYMDKETAKQFSESLDPELEGIGAEVNKTDGKLIIVSPIKGSPAEKIGIKPNDQILSVDGNSVKDLSREEAVLKIRGKKGTTVAIEIKRAGVADPIVFKIKREKIPIFTVFSSVKQESGKDIGYMQITSFAENTAKEFKDQLKELEKKNIKGLVIDVRGNPGGYLNSVEEILGEIMTDKKPMLQVEQRNGEKKKFSTELKERKPYPISVLIDNGSASASEILAGALKEGEGYDLIGEKTFGKGTVQQAVPFKDGSNIKLTMFKWLTPDGNWIHKKGIKPTVEVKQPDYYHATPIQIEKTLSYNANDVQVKHAQEMLKSLGYVPGREDGYFSKETESALKAFQNANKMEATGQLDKKTAEAIQTKIIEKIRSGENDLQLQSALKLMAK

SEQ ID NO: 7584 - protein, 479 aa, Vibrio parahaemolyticus RIMD 2210633
MTNKKLTTAAGCPVAHNQNVMTAGPRGPQLLQDVWFLEKLAHFDREVIPERRMHAKGSGAYGTFTVTHDITKYTRAKIFSEVGKKTELFARFTTVAGERGAADAERDIRGFALKFYTEEGNWDLVGNNTPVFFLRDPLKFPDLNHAVKRDPRTNMRSSTNNWDFWTSLPEAFHQVTIVMSDRGIPASYRHMHGFGSHTFSFINAENERYWVKFHFKTQQGIKNIGDEEAQLLAGKDRESHHRDLYESIERQDFPKWKMYVQIMPELEADEVNFNPFDLTRVWSQKDYPLIPVGEFELNRNPENFYAEVEQSAFNPAAIVPGIGFSPDKMLQGRLFAYGDAQRYRLGVNHHQIPVNAPRCPVHSYHRDGAMRVDGNFGSTLGYEPNYKQEWAEQPDYSEPPLRISGHADHYDHRVDEDYFSQAGDLFRLMNEEQRQALFDNTARAMDGVPDFIKERHVTHAYQADEAYGKGLELALGLAK

SEQ ID NO: 7585 - protein, 588 aa, Thiobacillus denitrificans ATCC 25259
MCGIAGELRFDDRAPDAATMTRMLARLARRGPDAEGQHAAGPLRLGHRRLAIIDLSPRSAQPMVDAATGTALVFNGTIYNYPELRAELIALGHAFHSDGDTEVILRAYLEWGERCVERLHGMFAFAIWHRDELFLARDRLGIKPLYYSENAGSLRFASTPQALLAAGEVDTGLDAVALHHLFTLHAVVPAPRTILNGVRKLAPGTTLTVNLRGELRHRSYWSLHAQRPAETRSEAEWTDAIHDALRRAVQKRIEIADVKVGVLLSGGLDSSLLVALLAELGVSDLMTFSVGFEDHPEERGNEFEYSDPVAAMYGTRHHKYLIPNSEVLRRLPEAVGEMSEPMFAQDAVAFYLLAEQVSRTVKVVQSGQGADEVFGGYFWYPRMAAEAEGSALDRFRRHYFDRDHAEFLELADPRYHGPDYTGELIAARLAEPFADEFIDQVLRTDTTMLITDDPVKRVDNMTMAWGLEARVPFLDHTLVELAATMPPAMKLASEGKHVLKRIARGRVPDAVIDRKKGYFPMPALKYVRGEFLDFMRDILDSQACRQRGLYRRAYVEHLLDAPEQHHTRIQGSKLWHLALLEYWLQTHV

SEQ ID NO: 7586 - protein, 120 aa, Zea mays
  misc_feature (73)..(73): Xaa can be any naturally occurring amino acid
  misc_feature (96)..(96): Xaa can be any naturally occurring amino acid
PRVHPTSSHSYARSGTRIHAKSLFDKPHELALLVLMDVAYSHSCINTVDGLNGIDGTNTHYCHRGAPAHHSMXDSRLFTYGIWLVSRFHLSNATWXLADYKSDGCAYSAVTDMILPHEGL

SEQ ID NO: 7587 - protein, 440 aa, Sinorhizobium meliloti
MIRRASLVLVGALMGATAMGVVYSATMPAVAANSSTYRELAIFGDVFERVRAQYVTPPQDDKLIENAINGMLTSLDPHSSYMNSTDAEDMRTQTRGEFGGLGIEVTMEEDLVKVTSPIDDTPAARAGVLAGDFISKIDGQDVRGLKLEEAVDKMRGAVGTPIKLTILRKGAEKPIELTIVRDVIAVRAVKVRVEGDVGYLRVISFTEKTFEDLKKGIEKIQAEVPADKLKGYVLDLRLNPGGLLDQAINVSDAFLERGEVVSTRGRNPDETRRFNATPGDLAGGKPVVVLVNGGSASASEIVAGALQDLKRATVLGTRSFGKGSVQTIIPLGDAGALRLTTALYYTPSGKSIQGTGITPDIKVEQPLPPELLGKVEAQGESDLRGHIPGQEETEEGSGSVAYVPPETKDDIQLNYAFDLLRGKKTDPSFPANPEQAQLKE

SEQ ID NO: 7588 - protein, 450 aa, Zea mays
  misc_feature (417)..(417): Xaa can be any naturally occurring amino acid
MYRAKRAALSPKVKRRVGKYELGRTIGEGTFAKVRFAKNTENGEPVAIKILDKEKVKRHRLVEQIKREICIMKLVRHPNVVRLFEVMGSKARIFIVLEYVTGGELFEIIATNGRLKEDEARKYFQQLINAVDYCHSRGVYHRDLKLENLLLDAAGNLKVSDFGLSALTEQVKADGLLHTTCGTPNYVAPEVIEDGGYDGATADIWSCGVILFVLLAGYLPFEDDNIIALYKKISEAQFSCPSWFSAGAKNMITRILDPNPTTRITISQILEHPWFKKGYKPPVFDEKYQTSLDDVDAAFGDSEDRHVKEETEDQPTSMNAFELISLNQALNLENLFEAKEEYKRETRFTSQCPPKEIITKIEEAAKPLGFDVQKKKYKMRMENPKAGRKGNLNVATEVFQIAPSLHVVELKKAKGDXTLEFQKFYRSLSTQLKDVVWKCDGEVDGNSAAA

SEQ ID NO: 7589 - protein, 239 aa, Magnaporthe grisea 70-15
MLCAVEYCHRHKIVHRDLKPENLLLDDNLNVKIADFGLSNIMTDGNFLKTSCGSPNYAAPEVISGKLYAGSEVDVWSCGVILGTYVVPHWMSPGAAALIKKMLVVNPVNRATITEIRQDPWFTTELPEYLQPPIEPFFNTGIDPEKAIRPSDIAPNAPPKVQEKLHAEVTDKISKTMGYGKQDVLDALEAEEPSAIKDAYMIVRENKMMQSNRKFLPVLTGFASSTAGPFRISCALQLT

SEQ ID NO: 7590 - protein, 385 aa, Rhodopirellula baltica SH 1
MASNNMNAPASNSSKSALFQPLEIGGLTLRNRIVMAPLTRARAGVERMANEMMAEYYTQRASAGLIISEATVVSEQGIGWPQSPGIYTDEMAESWKVVVDSVHQAGGRIFLQLWHTGRASHSDFHDGELPVAPSAIAIEGDGVHTPSGKKPYEVPRALETSELPGIVEDYRKAAERAKSAGFDGVEVHSANGYLLDEFLQSKSNHREDQYGGSIENRYRLLGEVVDAVTSVWSSDRVGVRLAPNGSFNDMGSPDYIEQFTYVARQLDQYGLAYLHVMDGTGFGFHELGPAMTLADFRKVFSGTLMGNVGYTRESAEEAIVDGAADLIAFGRPFISNPDLVERFENGWPLAEMADMSVWYSHDAEGYTDFPTYQAESKQPESCGVE

SEQ ID NO: 7591 - protein, 192 aa, Triticum aestivum
  misc_feature (157)..(157): Xaa can be any naturally occurring amino acid
  misc_feature (176)..(176): Xaa can be any naturally occurring amino acid
PFLDKEFINVAMSMDPEWKMYDKNLGRIEKWVMRKAFDDEENPYLPKHILYRQKEQFSDGVGYNWIDGLKAFTEQQVTDEMMSNAAQTFPYNTPVNKEAYYYRMIFERLFPQDSARETVPWGPSIACSTPAAIEWVEQWKASNDPSGRFISSHDSAXTTPAAVSWRWWPTAATAPXNGTVNGGNDVAVAIAV

SEQ ID NO: 7592 - protein, 387 aa, Debaryomyces hansenii
MVSDGEFTRTQIFGTVFEITNRYTDLNPVGMGAFGLVCSAIDKLTGQNVAVKKIMKPFLTSVLAKRTYRELKLLKHLRHENLITLDDIFLSPLEDIYFVTELQGTDLHRLLTSRPLEKQFIQYFTYQILRGLKYVHSAGVIHRDLKPSNILINENCDLKICDFGLARIQDPQMTGYVSTRYYRAPEIMLTWQKYDTEVDLWSVGCILSEMIEGKPLFPGKDHVHQFSIITELLGSPPPDVIETICSENTLRFVQSLPHRDPIPFSERFAQCTHVEPEAIDLLAKMLIFDPKKRISALDALSHPYMEPYHDPTDEPVCEVKFDWSFNDADLPVDTWRVMMYSEILDFHQIIGAGANGTTQEQMAQIQQEGIQAPSSQYQQTNQEQKVE

SEQ ID NO: 7593 - protein, 238 aa, Haemophilus influenzae Rd KW20
MLFALPALNDNYIWLYQRENLPLIIVDLPETDKLFAWLEKQNATIEAVLLTHEHDDHTQGVSAFKKRYPTVPIYGPQECEKKGATQIVNEGKILTANYQIDVIPTGGHTKQHVSFLVDNHLFCGDALFSAGCGRVFTGNYALMFEGLQRLNTLPDETIVCPAHEYTLGNLAFAETVLVDKSAVEKSAVEKQRIFVETQRAENKPSLPTTLKLEREINPFLQAKTLEEFTALRKAKDIF

SEQ ID NO: 7594 - protein, 163 aa, Arabidopsis thaliana
HVPSMYPSPNVSAHIFMGLMVNPPKPGDISYDQFARESKGILESLRKRARLMTDGFSSCKNVVCNFTEGAMYSFPQIRLPTGALQAAKQAGKVPDVFYCLKLLEATGISTVPGSGFGQKEGVFHLRTTILPAEDEMPEIMDSFKKFNDEFMTQYDNNFGYSKM

SEQ ID NO: 7595 - protein, 545 aa, Helicobacter pylori
MAKEIKFSDSARNLLFEGVRQLHDAVKVTMGPRGRNVLIQKSYGAPSITKDGVSVAKEIELSCPVANMGAQLVKEDASKTADAAGDGTTTATVLAYSIFKEGLRNITAGANPIEVKRGMDKAPEAIINELKKASKKVGGKEEITQVATISANSDHNIGKLIADAMEKVGKDGVITVEEAKGIEDELDVVEGMQFDRGYLSPYFVTNAEKMTAQLDNAYILLTDKKISSMKDILPLLEKTMKEGKPLLIIAEDIEGEALTTLVVNKLRGVLNIAAVKAPGFGDRRKEMLKDIAVLTGGQVISEELGLSLENAEVEFLGKAKIVIDKDNTTIVDGKGHSHDVKDRVAQIKTQIASTTSDYDKEKLQERLAKLSGGVAVIKVGAASEVEMKEKKDRVDDALSATKAAVEEGIVIGGGAALIRAAQKVHLNLHDDEKVGYEIIMRAIKAPLAQIAINAGYDGGVVVNEVEKHEGHFGFNASNGKYVDMFKEGIIDPLKVERIALQNAVSVSSLLLTTEATVHEIKEEKAAPAMPDMGGMGGMGGMGGMM

SEQ ID NO: 7596 - protein, 163 aa, Zea mays
MDAVMFGLETPLMAALQHLLDVPDGDAGAGGDNKTGGGGATRTYVRDARAMAATPADVKELPGAYAFVVDMPGLGTGDIRVQVEDERVLVVSGERRREEREDDAKYLRMERRMGKFMRKFVLPDNADVDKVAAVCRDGVLTVTVEKLPPPEPKKPKTIEVKVA

SEQ ID NO: 7597 - protein, 335 aa, Bacillus cereus ATCC 14579
MCGITGWVDYKRSLEGERDVVTKMAETLAKRGPDDNKVWIKGNVAFGHKRLIVVDPEGGKQPMTCLKDETNYAICYNGELYNTEDIRKELLRRGYRFKGHSDTEVLLASYIEWKEECVDHLNGIYAFAVWDEQKEQVFIARDRLGVKPLFYKYDSGRLLFGSELKAILSHPDVKAEVTLEGLSEIFGLGPSRTPGHGIYAGIKELRPGHAMTFSKNGLCIWRYWNVESKKHEDSFEETVEKTRFLLQDAITRQLVSDVPLCTFLSGGVDSSAITAIAAKEYERSGKGQLHTYSIDYEDNDKYFKANAFQPNSDAPFINLMTETFQTNPSSLRHFE

SEQ ID NO: 7598 - protein, 437 aa, Arabidopsis thaliana
MGKECYYLSWILKFHLLLVLIQLVDSGSTIRFLPGFQGPLPFELETGYIGVGEAEKDQMFYYFIKSESNPEKDPLLLWLSGGPFCSSFTALIYENGPIAFKAEEYNGSIPSLVSTTYAWTKVASILYLDQPVGTGFSYSRNPLADIPSDTGVAKPVNEFLHKWLDKHPEFLSNPLYVAGNSYSGIVIPTIVQEISNGNHLDSKPQINLQGFVLGNPATDTDIDLNSRIPFAHGKALISDEHYESLKRSCQGNYISVNPRNTKCLKLLEDFKKCVSGISEEYILKPDCMWLYSCMANLHSLSEYWANEKSVRKALLVNEGTVRKWIRCNTEIAYNKDIRSSVPYHKYISIEGYRSLVFSGDHDMLVPFLGTQAWIRSLNYSIVDDWRPWMVQNQVAGYTRTYANKMTFATVKGGGHTSEYKPVETYIMIKRWLSGQPL

SEQ ID NO: 7599 - protein, 363 aa, Pseudomonas syringae pv. syringae B728a
MSALFEPFKLKDVTLRNRIAIPPMCQYSATEGVINDWHHVHLASMARGGAGLLVVEATAVAPEGRITPGCTGIWNDEQAQAFVPVVKAIKAAGCVPGIQIAHAGRKASANRPWEGDDHIAASNSRGWDTIAPSAIAFGANLPKVPRAMTLDDIARVRQNFVDAARRARDAGFEWIELHFAHGYLGQSFFSEHSNQRTDEYGGSFDNRSRFLLETLAAVREVWPENLPLTARFGVIEYDGRDEQTLAESIELARRFKAGGLDLLSVSVGFSTPDANIPWGPAFMGPIAERVRREADIPVTSAWGFGEPKLAEEAVKSGQLDLVSIGRAHLADPHWAYFAAKELGVEKSAWTLPAPYAHWLERYR

SEQ ID NO: 7600 - protein, 313 aa, Ashbya gossypii ATCC 10895
MSTKATLKASTDTVTLNTGAKIPLFGLGTWQSTDDDASSAVAAALKHGYKHIDTASFYKNEELVGKAVKESGIPREELFITTKVWNDQQRDPAGALDLSLKKLGTEYVDLLLMHWPVPFKEPENSTLDAYKVPRGPDGKVTRDEEWDFVKTWHLMQKLLGTGKVKAIGVSNFSINNLEELLNAEGTTVVPAVNQVELHIRLPQLELVEYCQKKGIVVEAYSPLGSSSAPLLKDATVNKVAEKYGVTPAHVLLNYVANRGIVVLPKSVKESRIISNFEYFKMDEEDIKLLNDIHKKEGVQRFVDPDFSPFPLFQ

SEQ ID NO: 7601 - protein, 426 aa, Arabidopsis thaliana
MESPYPKSPEKITGTVLLGKYELGRRLGSGSFAKVHVARSISTGELVAIKIIDKQKTIDSGMEPRIIREIEAMRRLHNHPNVLKIHEVMATKSKIYLVVEYAAGGELFTKLIRFGRLNESAARRYFQQLASALSFCHRDGIAHRDVKPQNLLLDKQGNLKVSDFGLSALPEHRSNNGLLHTACGTPAYTAPEVIAQRGYDGAKADAWSCGVFLFVLLAGYVPFDDANIVAMYRKIHKRDYRFPSWISKPARSIIYKLLDPNPETRMSIEAVMGTVWFQKSLEISEFQSSVFELDRFLEKEAKSSNAITAFDLISLSSGLDLSGLFERRKRKEKRFTARVSAERVVEKAGMIGEKLGFRVEKKEETKVVGLGKGRTAVVVEVVEFAEGLVVADVKVVVEGEEEEEEVESHWSELIVELEEIVLSWHN

SEQ ID NO: 7602 - protein, 493 aa, Saccharomyces cerevisiae
MSNDEGETFATEQTTQQVFQKLGSNMENRVCFDCGNKNPTWTSVPFGVMLCIQCSAVHRNMGVHITFVKSSTLDKWTINNLRRFKLGGNHKARDFFLKNNGKQLLNTANVDAKTKYTSPVAKKYKIHLDKKVQKDMELYPSELVLNGQDSSDSPLDTDSDASRSTSKENSVDDFFSNWQKPSSNSSSKLNVNTGSLAPKNNTTGSTPKTTVTKTRSSILTASRKKPVLNSQDKKKHSILSSSRKPTRLTAKKVDKSQAEDLFDQFKKEAQQEKEDEFTNSSSSTKIRQNDYDSQFMNNSKGNNNNSIDDINTQPDEFNDFLNDTSNSFDTTRKEQQDTLTPKFAKLGFGMTMNDANDLAKQQKESQKIAQGPRYTGRIAERYGTQKAISSDQLFGRGSFDEAANREAHDKLKTFDNATSISSSSYFGEDKEVDEFGNPINSSGSGAGNFDGRNSNNGFIDFNASADDELQMLRDVVEQGAEKLGSYLRDYLRK

SEQ ID NO: 7603 - protein, 557 aa, Cryptococcus neoformans var. neoformans JEC21
MALSQHVDADKLIEECKDHPIKRHLSHKAALYDIPYTSRYEVEDEVPRYRLPSKGVNGRATYQLLHDELMLDGNPNMNLASFVHTWVPDECNRLVQENINKNLVDQDEYPAAQQIHERCISMLSHLWHAPKEATAMGTATTGSSEAIMLGGLALKRRWQEKMKAAGKDIHNPGPNIVMGAEAQVALEKFARYFEVEARLVPIKPESSYVMDPKDVLKYVDENTIGVFVILGSTYTGAFESVKDVAQELDKYEAETGISVPIHVDAASGGFVAPFAYPHYQWDFQIPRVHSINASGHKYGMSTVGVGWIIWRSMEYLPKELIFELHYLGATDYSFNLNFSRPAHPILAQMFTFLNLGFEGYKRIMDKNLTVARLISRALEHSGYFICLSKIHHPKALTESSSSAEQSNILPAVADAANTVLHGKKTTVDDAEYYCEGLPVVSFMFTDEIKKKYPGVKQAWIQMQLRSIGWIVPNYPLAPDCEKTEILRVVVRESLSGDLARKLIHDILQVTEDLLNDAGPSYSMSTATRRHENLDHGKLDNIDAVHIKQHTSTYSKPC

SEQ ID NO: 7604 - protein, 666 aa, Vibrio cholerae O1 biovar eltor str. N16961
MKAEGGFVLKDGRNLRFTHYQLAVDWAGTEQLLDDPYQYHGLYAEYEDLHTPKQMYHHMGAQFVTLERDGKMVSGVRFLVYAPHAAACSLIGAFNHWDGRRHPMQRLDYGIWGIFIPGLPEGTQYKFELKGPHGEGLPHKADPWGFYAEQYPSFASVTYDHRRYQWQDTAWQQRPVTEKRKQALSFYELHVGSWKRGENGEFLNYRELADQLVPYLVEMGYTHVELMPVAEHPFYGSWGYQPVGLFAPTSRYGSPDDFKYFVDLCHQAGIGVVLDWVPAHFPSDSHGLANFDGTPLFHDPDPRRGWHQDWNSYIYDLGREHVRRFLVANALYWFEMFHIDGIRVDAVASMLYLDYSRSHDQWIPNVDGGRENYDAIATFKWMNEEVYKHFPNAMTIAEESTAFPGVSAPTFMGGLGFGFKWNMGWMHDSLSYIKEDPVHRKYHHNTLTFPLIYAFSENYVLSLSHDEVVYGKRSLMYKMPGDEWQQTANLRAYLGYMYGQPGKKLNFMGTELGQTAEWDHDGQLQWFLTQFERHAGIQRLVRDLNHLYQAQTALHQLDCDPRGFEWRLQDNADLSVIAHERMDEAGNRVLVITNFTPVPQQEFRLGVPKTGKYRLLLNTDAKQYNGSDYPVLQDVSTEAISSEGLDQSLLLSVPPLATLFYQWSAK

SEQ ID NO: 7605 - protein, 366 aa, Vibrio parahaemolyticus RIMD 2210633
MTDALFQPIQLGSLSLKNRIVMPPMTRSRASQPGNVANDMMATYYAQRAEAGLIVAEGTQISPMGQGYAWTPGIYSPEQIAGWKKVTDAVHEKGGVIFAQLWHVGRVTHPDNIGGEQPISSSALKAENVKVFIDNGTDEPGFVDVVEPREMTKQDIKNVIEEYRQAALNAIKAGFDGVELHAANGYLVNQFIDSEANNRTDEYGGSIENRLRFLGEVVEAMTQAIGAERVGVRLAPFTSLNGTVDSTPVDTYTAAAALLDKLNVVYIHIAEVDWDDAPDTPHDFKTAVRKAYKGTLIYAGRYNAEKAQHAIESGLADMIGFGRPFVANPDLPSRIKHGYPLAEHDPATLFGGGEKGLVDYPAYHAG

SEQ ID NO: 7606 - protein, 498 aa, Cryptococcus neoformans var. neoformans JEC21
MTEKTPTYTLSEGCPIADATTAQRLGSCPVKGLMLMQDTQLIETLAHFSRERIPERTVHASAVGAWGEFEVTHDNSDITSAAFLNGIGKKSKVLMRISTVGPEAGTAETVRDVRGWSMKIFTEEGNQDFVFNSIPVFFIRDPIKFPSVNRSHKRHPAKHTADSSMFWDFHNNNPEGTHAIMMYFSNRGLPYSLRQINSYSGHTYKLTKSDGSFVYVKLHFKSNQGVKGMTQAEGVRTAGEAPDFHTTDMWDAIERGDYPTWTLYAQVMKPEEAENYRWNIFDMTKVWPHKDFPLRPLGKLTLNRNPENYFSDIEQAAFSPSTMVPGVAPSGDPMLQARMFAYPDAARYRLGVNYQQLPCNRPVSEVYAPYQRDGAMRYMTNYGGDPNYVRSSLKEVNFKGQLGAKGHSTGGNEKHNEWVGRVAAYTSEVTDEDYVQARMFWEVLGKAGDQEDLITNVSCHLSKAIPSVQKGAVEIFAKVNVDLAKSIEDRLAELNKGK

SEQ ID NO: 7607 - protein, 283 aa, Kluyveromyces lactis NRRL Y-1140
MIKQSIRKMHVKAIKMRWLTGGVNYSYLLSTQDKKKSWLIDPAETLEVMNDLGSDEAKSIEALVNTHHHYDHAGGNVSTLAALNEKGNNISRVIAGSQRSPIANDIPDNLHEYTLGNLKILCIRTPCHTQDSTCYYVRDPETKEQAIFTGDTLFTGGCGRFFEGTAEEMDDALNFRLLGNTGDTSNWKNVKVYPGHEYTAGNVSFIRNYIYLKKSDNDHFNKLESFTKEHEVTTGHFTIADELSFNPFMRLDDPIVRRQVGDSQGCWTRAQVMDKLRNMKNKA

SEQ ID NO: 7608 - protein, 484 aa, Oryza sativa (indica cultivar-group)
MFGGGGGGRKPLDYEELNENVKKVQYAVRGELYLRASELQKEGKKIIFTNVGNPHALGQKPLTFPRQVVALCQAPFLLDDPNVGLIFPADAIARAKHYLAMAPGGLGAYSDSRGIPGIRKEVAEFIERRDGYPSDPELIYLTDGASKGVMQMLNTIIRNERDGILVPVPQYPLYSAAISPFGGSLVPYYLEEEANWGLDFVNLRQTVASARSKGITVRAMVIINPGNPTGQCLSEGNIKELLKFCFHENLVLLADEVYQQNIYQDERPFISARKVLFDMGPPMSREVQLVSFHTVSKGYWGECGQRGGYFEMTNLPPKTVDEIYKVASIALSPNVPGQIFMGLMVNPPKPGDISYLKFSAESKSILESLRRRARLMTDGFNSCRNVVCNFTEGAMYSFPQIRLPPKAIDAAKRAGKAADVFYCLKLLEATGISTVPGSGFGQKEGVFHLRTTILPAEEDMPAIMTSFKKFNDTFMDQYDGYSRM

SEQ ID NO: 7609 - protein, 544 aa, Chlamydophila caviae
MAAKNIKYNEDARKKIHKGVKTLAEAVKVTLGPKGRHVVIDKSFGSPQVTKDGVTVAKEIELEDKHENMGAQMVKEVASKTADKAGDGTTTATVLAEAIYSEGLRNVTAGANPMDLKRGIDKAVKVVVDEIKKISKPVQHHKEIAQVATISANNDAEIGNLIAEAMEKVGKNGSITVEEAKGFETVLDVVEGMNFNRGYLSSYFSTNPETQECVLEEALVLIYDKKISGIKDFLPVLQQVAESGRPLLIIAEDIEGEALATLVVNRLRAGFRVCAVKAPGFGDRRKAMLEDIAILTGGQLISEELGMKLENTTLAMLGKAKKVIVSKEDTTIVEGLGSKEDIESRCESIKKQIEDSTSDYDKEKLQERLAKLSGGVAVIRVGAATEIEMKEKKDRVDDAQHATLAAVEEGILPGGGTALVRCIPTLEAFIPILTNEDEQIGARIVLKALSAPLKQIAANAGKEGAIICQQVLSRSSSEGYDALRDAYTDMIEAGILDPTKVTRCALESAASVAGLLLTTEALIADIPEEKSSSAPAMPGAGMDY

SEQ ID NO: 7610 - protein, 435 aa, Arabidopsis thaliana
MKSTPKLLLLLLFIINHHVDSGSIVKFLPGFEGPLPFELETGYIGIGEEEDVQLFYYFIKSERNPKEDPLLLWLSGGPGCSSITGLLFENGPLALKSKVYNGSVPSLVSTTYSWTKTANIIFLDQPIGAGFSYSRIPLIDTPSDTGEVKNIHEFLQKWLSKHPQFSSNPFYASGDSYSGMIVPALVQEISKGNYICCKPPINLQGYILGNPITYFEVDQNYRIPFSHGMALISDELYESIRRDCKGNYFNVDPRNTKCLKLVEEYHKCTDELNEFNILSPDCDTTSPDCFLYPYYLLGYWINDESVRDALHVNKSSIGKWERCTYQNRIPYNKDINNSIPYHMNNSISGYRSLIYSGDHDLVVPFLATQAWIKSLNYSIIHEWRPWMIKDQIAGYTRTYSNKMTFATVKGSGHTAEYKPNETFIMFQRWISGHDL

SEQ ID NO: 7611 - protein, 312 aa, Zea mays
MAESFVLNTGSRIPSVGLGVWQIQPDAANDAIYAAVKAGYRHIDCAAAYNNEKEVGLALKKLFEDGVVKRDDLFITSKLWAANHAPEDVEEGIDTTLQDLQLDYLDLYLIHGPIRIKKGTSTMTPENFLPTDIPATWAAMEKLYDSGKARAIGVSNFSCKKLHDLLAVARVPPAVNQVECHPVWQQDKLRKLCQSNGVHLSAFSPLGSPGSPWINGPSVLKNPIVVSVADKLQKTPAQVALRWGIQMGHSVLPKSANESRIKENIDIFGWSIPEDLMAKFSEIKQVRLLTAEFVVHPQAGYNTLEDFWDGEI

SEQ ID NO: 7612 - protein, 294 aa, Gloeobacter violaceus PCC 7421
MAGYFIPDRFRDRIILHIAKNYAALPKVQTPLILGIHGPKGEGKSFMVDRVLQELQANVIVISSSELESPDAGEPGRLIRLRYREAAELVKVRGRVAAIVIHDIDAGAGFWSATTQYTVNTQLVNAALMAIADNPTNVQLPGSYDPTPLPRIPFVVTGNDFSKLYAPLVRDGRMSKFSWEPTFAEKSEIVAHLFAEDGAALGRYDLERLIQRFGAQPVDFFAAIRSRAYDDMLLQQVKAWGLENVSRNLVNHGGQPPRFEAVRLDLDRCLRWGEQIMSDQQAIESGLVEAYTRR

SEQ ID NO: 7613 - protein, 488 aa, Bacillus cereus ATCC 14579
MNPNNRLTTNQGAPVGDNQNSRTAGRRGPVLLEDYHLVEKLAHFDRERIPERVVHARGAGAHGVFVTKNSMKQYTKAAFLQNEGTETPVFVRFSTVIHGQGSPETARDPRGFAVKFYTEEGNYDIVGNHLPVFFIRDAIKFPDMVHSLKPAPDTNIQTPDRYWDFMTLSPESTHMMTWVFSDYGTPASYREMEGFGVHSFKWINEEGKIVYIKYHWKPQQGVRNLNAKEVQEVQGKDFNHATRDLFDAIEKGNHPKWDLHVQVMQLDEMDSLDFDPLDPTKVWPEDRFPLIEVGTMTLNRNPKNFFAEVEQVAFSPSATVNGIEPSEDKLLQGRLFSYPDTQRYRLGANYLQIPVNCPYAAVHNQQRDGAMQVNQNPSTINYEPSRHAENPVEDPAYRDSTMKVEGYVSREKIEKPNDFKQAGERYRSFSKEEQDNLIANLTNDLKDVNERTKLLAVCNFFRADQEYGMRLAQALNVDITQYVGNAPK

SEQ ID NO: 7614 - protein, 404 aa, Streptococcus pyogenes MGAS8232
MKIIEKSSKLEHVAYDIRGPVLDEANRMIASGEKILRLNTGNPAAFGFEAPDEVIRDLIVNARLSEGYSDSKGIFSARKAIMQYCQLKGFPDVDIEDIYLGNGVSELISMSLQALLDNGDEVLVPMPDYPLWTACVSLGGGKAVHYLCDEEAGWYPDIADIKSKITSRTKAIVVINPNNPTGALYLKEILEDIVALAREHQLIIFADEIYDRLVMDGKEHIAIASLAPDVFCVSMNGLSKSHRIAGFRVGWMVLSGPKDHVKGYIEGLNMLANMRLCSNVLAQQVVQTSLGGHQSVDALLLPGGRIFEQRNFIYEAINAIPGLSAVKPEAGLYLFPKIDRQMYRIDDDEEFVLQLLKQEKVMLVHGRGFNWKDPDHFRIVYLPSVEELEDVQEKITRVLYQYRR

SEQ ID NO: 7615 - protein, 413 aa, Ralstonia solanacearum
MKTIQKSAKLNNVCYDIRGPVLEKAKQMEEEGHQIIKLNIGNLAPFGFDAPEEIQQDMIRNLPNSAGYSDSKGIFAARKAVMHYTQQQGIKNVTLDDIYLGNGASELIALATNALLDAGDELLLPAPDYPLWTAMTSLSGGTPVHYLCDESNGWMPDLDDIRAKITPNTKGIVVINPNNPTGALYSDALLHDIIAIAREHGLVIFADEVYDKVLFDDNRHTAMASLSEDVLTVTFNSLSKSYRSCGYRAGWMVVSGDKRPAKDYIEGLNMLSSMRLCANVPGQWAIQTALGGYQSINDLVAPGGRMRRQRDLAYELITAIPGVSCVKPKAALYMFPRLDPSVYPIDDDQTFIRQLLEEERVLLVQGTGFNWHSPDHFRIVFLPHEDDLREAIGRIARFLERYRQRHGTGIRAA

SEQ ID NO: 7616 - protein, 220 aa, Oryza sativa (japonica cultivar-group)
MALDGKPPVPPPSTPPMDSWACGGRRSKRRGGGGGSSGSSGSSGGGGGGESEEEYLAACLLMLAHGVRDEAEVVGVAAATAKPQHGYECSVCGKVYGSYQALGGHKTSHRKPPSPAAEPAAGEEPSSGGVAGEAKVHRCSICLRTFPSGQALGGHKRLHYEGGAVGDAVKEKNSLKTKAAVATAVLKDFDLNLPAAATTAGDEAESSPPEAKRARLLLLV

SEQ ID NO: 7617 - protein, 56 aa, Zea mays
VKYVFRHAQPKRPKSLRIYETHVGMSSPEPKINTYVNFRDEVLPRIKKLGYNAVQI

SEQ ID NO: 7618 - protein, 270 aa, Brassica napus
  misc_feature (229)..(229): Xaa can be any naturally occurring amino acid
MGRGKVELKRIENKINRQVTFAKRRNGLLKKAYELSVLCDAEIALLIFSNRGKLYEFCSSPSGMTKTVEKYRKHSYATMDPNQSAKDLQEKYQDYLMLKSKVESLQHSQRHLLGEEIAGMGVNELEQLEHQVDASLKQIRSRKAGAMLDQLSDLKTKEEMLLETNRDLRRKLEESDAALTQSMWGAASAGEHSHQQQQQYHQQQPQQQHQQGMSSYQANPPSQENGFFXRPLHGNVALQMSHYNPGVTNASNSATTSQNVINGFFPGWML

SEQ ID NO: 7619 - protein, 545 aa, Campylobacter jejuni subsp. jejuni NCTC 11168
MAKEIIFSDEARNKLYEGVKKLNDAVKVTMGPRGRNVLIQKSFGAPSITKDGVSVAKEVELKDSLENMGASLVREVASKTADQAGDGTTTATVLAHAIFKEGLRNITAGANPIEVKRGMDKACEAIVAELKKLSREVKDKKEIAQVATISANSDEKIGNLIADAMEKVGKDGVITVEEAKSINDELNVVEGMQFDRGYLSPYFITNAEKMTVELSSPYILLFDKKITNLKDLLPVLEQIQKTGKPLLIIAEDIEGEALATLVVNKLRGVLNISAVKAPGFGDRRKAMLEDIAILTGGEVISEELGRTLESATIQDLGQASSVIIDKDNTTIVNGAGEKANIDARVNQIKAQIAETTSDYDREKLQERLAKLSGGVAVIKVGAATETEMKEKKDRVDDALSATKAAVEEGIVIGGGAALIKAKAKIKLDLQGDEAIGAAIVERALRAPLRQIAENAGFDAGVVVNSVENAKDENTGFDAAKGEYVNMLESGIIDPVKVERVALLNAVSVASMLLTTEATISEIKEDKPTMPDMSGMGGMGGMGGMM

SEQ ID NO: 7620 - protein, 279 aa, Pediococcus pentosaceus ATCC 25745
MINSLNDRIMLNNGTAIPGLGLGVFQIPDADTAQVVANGIKNGYRLIDTAQIYGNEAGTGAGIKAGLTATGLKRADLFVTSKVWNDHLSYDETIAAFESSLKKLGLDYLDLYLIHWPGDNAFQDAWRALETLYKQGKIKAIGVSNFQIHHLQALAEFAEITPVINQIETHPQLSQLEMREYAAKHDIKVQAWSPLMQGKILDNAVLAKIAQKYNKSVAQIVLRWDVQQNILLVVKSVRAERMLSNAQIFDFELAPEDMDQINALNENLRVGPNPDEFDF

SEQ ID NO: 7621 - protein, 131 aa, Brassica napus
MVQTKKFRGVRQRHWGSWVAEIRHPLLKRRIWLGTFETAEEAARAYDEAAVLMSGRNAKTNFPLKNNSTIDTSESKTDISSSSSSSSSSSSSSLSSILSAKLRKCCKSPSPSLTCLRLDTTSSHIGVWQKR

SEQ ID NO: 7622 - protein, 554 aa, Shewanella sp. MR-7
MCSIFSILDIQSDAKELRQVALEMSKLMRHRGPDWSGIYASDKAILAHERLAIVDIEHGAQPLLTEDGSLILAVNGEIYNHKELKAQLGDKYSYQTNSDCEVILALYQEYGTEFLDKLNGIFAFVLYDKAKDAYLIGRDHMGIIPLYTGRDAAGNFYVASEMKALMPVCKTVAEFQPGQYLYSTTGEPVQYYTRDWQSFDAVKDNAASQEELREALEAAVKRQLMSDVPYGVLLSGGLDSSVISAITQTFAKRRIEDDDQSGAWWPQLHSFAVGLKGAPDLAAAKKVADAIGTIHHEINFTFQEGLDAIKEVIYHLETYDVTTIRAATPMYLMARKIKAMGIKMVLSGEGADELFGGYLYFHKAPNAQAFHEELVRKLDKLHLFDCLRANKAMAAWGLEARVPFLDKEFMDVAMRINPEAKMSKDGRIEKHILRQAFEHKLPKEVAWRQKEQFSDGVGYSWIDGLKAHAAEQVDDLQLANAKFRFPYNTPETKEAYFYRCFFEEHYPLASAAETVPGGKSVACSTPEALAWDESLRGIIDPSGRAVRSVHAASY

SEQ ID NO: 7623 - protein, 130 aa, Vitis vinifera
DSSNTGSVSEANAQFYQQEASKLRRQIRDIQNLNRHILGEALSSLNFKELKNLETRLEKGISRIRSKKNELLFAEIEYMQKREIELQNSNLFLRAQIAENERAQQQMNLMPGSQYESVPQQPYDSQNLLP

SEQ ID NO: 7624 - protein, 156 aa, Brassica napus
MSMIPSFFGNNRRGGSSFFDPFSLDVWDPFKDFPSSSSFSRENSAIVNARVDWRETPDAHVFKADLPGMKKEEVKVEIEDDSVLKISGERHVEKEDKNDTWHRVERSSGQFTRKFRLPENVKMDQVKAAMENGVLTVTVPKAEMKKPDVKSIQISG

SEQ ID NO: 7625 - protein, 585 aa, Xanthomonas axonopodis pv. citri str. 306
MNQRDAITPAWGAWPAGEGQVRFALWAPEAKNVDVVFANGARSALQAGQDGFFSALIDCAADARYRYSVDGGEPVPDPASRWQPEGVHGPSAVQPTDGYAWQNTQWQGRPWDEAVIYEVHVGTCGGYAGVQAQLPQLAAMGITAVELMPLSAFPGAHNWGYDGVLPYAPVEAYGTPDELKALIDAAHGHGLMVLLDVVYNHFGPDGNYLHSYAAPFFNEDKPTPWGAAIDFRKPPVQRYFLDNALMWLHEYGFDGLRLDAVHAISPNAFLDTLRETIEASLPAGRHVHLVLENEANQASQLQRGYTAQWDDDFHNALHVLLTGEEEGYYAAFADKPTEHLARVLGEGFAYQGEPDPRGHVRGEPSGALPPHKFVVFAQNHDQIGNRARGERLTVLVSPQRLRAALALTALTPMIPLFFMGEPWGAKQPFLFFTDFGPPLDEAVREGRRREFAHFAAFADEAQRATIPDPNSHATFAASRSPIADAAHGDGAQWASWFKALLDVRRQWLVPGLAQARAVRASVLADGAVTATWELPGGLWHIAFNVGTQPVPLPPLRGRVAHVENVAADARQLPVDGFIAWHEAQA

SEQ ID NO: 7626 - protein, 437 aa, Arabidopsis thaliana
MGSTLKHLLLLLLVLIRHVDSAAIVKSLPGLEGRLPFELETGYIGIGEEEDIQLFYYFIKSENNPKEDPLLLWLDGGPGCSSLGGLLFENGPVALKSAVYNGSNPSLFSTTYSWTKMANIIYLDQPVGSGFSYSRTPIGKSSDTSEVKRIHEFLQKWLSKHPQFFSNPFYVTGDSYSGMIVPALVQEISKGNYICCKHLINLQGYVLGNPITYAEHEKNYRIPFSHGMSLISDELYESLKRNCKGNYENVDPRNTKCVRLVEEYHKCTDKINTQHILIPDCDKKGHGITSPDCYYYLYFLIECWANNERVREALHVTKGTKGQWQRCNWTIPYDNNIISSVPYHMDNSINGYRSLIYSGDHDITMPFQATQAWIKSLNYSIVDDWRPWMINDQIAGYTRTYSNKMTFATVKGGGHTAEYLPNESSIMFQRWISGQPL

SEQ ID NO: 7627 - protein, 437 aa, Arabidopsis thaliana
MSLILKFMLLILLVSSHHVRSGSIVKFLPGFKGPLPFELETGYIGIGEEENVQFFYYFIKSDKNPQEDPLIIWLNGGPGCSCLSGLFFENGPLALKNKVYNGSVPSLVSTTYSWTKTANIIFLDQPVGSGFSYSKTPIERTSDTSEVKKIHEFLQKWLIKHPQFLSNPFYVVGDSYSGMIVPALVHEISKGNYICCNPPINLQGYVLGNPITHIEFEQNFRIPYAHGMSLISDELYESLKRICKGNYFSVDPSNKKCLKLVEEYHKCTDNINSHHTLIANCDDSNTQHISPDCYYYPYHLVECWANNESVREALHVDKGSIGEWIRDHRGIPYKSDIRSSIPYHMNNSINGYRSLIFSGDHDITMPFQATQAWIKSLNYSIIDDWRPWMIKGQIAGYTRTYSNKMTFATVKGGGHTAEYLPEESSIMFQRWISGQPL

SEQ ID NO: 7628 - protein, 650 aa, Pseudomonas putida KT2440
MQTAFPLLFEPLQIRGKRLKNRIMSTGHDTCLPTDNLVNDKLIAYQRDRAAGGVGLIVLQVAGVHDSARYTSHVLMATDDACIDGYRQLAEACHAHGTVVLSQLFHPGREIMESADGLLAVAYSASAVPNERFRVMPRALDQAMIDEIVQGYASAARRLHQAGLDGVEVVASHGYLPAQFLNPRVNVRSDGYNGDLDQRLRFLREVLAAVRAATDEQFIIGLRISADERDSQGLSEDESLAAAMALQGQLDYLHIVAGTSASLGGAVHIVPPMAIEPAYLAREAGTFKQQLAIPLFVTGRINQPQEAELILARGQADVCGMTRALICDPSMPAKTERGQVEDVRACIACNQACIGHFHRGLPISCIQRPETGRELQYGHLTPTSSPKRIMIAGGGPAGMKAAAVAAARGHQVTLYEAGPQLGGQVLLAQLLPRRSEFGGASTNLQREMALAGVEVVRNTRVDRALVERERPDLVIAATGATPYWPAFERTGELQVVDAWQLLRNEVKPGRSVLVIDWRCDWIGPGIAERLVREGHQVQLAVNGTHCGESLPLYVRDQLAGELHRLGIPVTPYARLYGSDDNTVYLQHTASGDPMIFEGIDTLVLCMGHQPQDRLATELAGVVDVRRIGDCLAPRTAEEAIHDGLTVAWAL

SEQ ID NO: 7629 - protein, 720 aa, Xanthomonas axonopodis pv. citri str. 306
MATRKFTQRSRIREGRPNPLGATWDGLGVNFALYSRNATRVELCLFDERGREQERIALPEYTDEVWHGYLPDARPGQLYGYRVHGPYAPDAGHRFNHNKLLLDPYAKQIVGELKWAPHLFGYTIGHRDKDLSFDRRDSAAFMPKSAVIDPAFTWGQDRPPQTPWNRTVIYEAHVRGLSMLHPAVPPEERGTFSALKTDELIDHISSLGVTAVELLPVHAFVDDQYLLEKGLRNYWGYNTLGFFAPQARYMSTRTVAEFKQMVARLHHAGLEVLLDVVYNHTAEGNELGPTLSFKGIDNASYYRLADDRRFYINDTGTGNTFDLTNVGALRMVMDSLRYWVQEMHVDGFRFDLASILGRERYGFDPSGSFLDAVRQDPVLSQTKLIAEPWDIGPGGYQVGNFPPGWVEWNDKFRDNVRAFWRGDGGQLAELATRLTGSADLFDHSGRRPTASVNFVTAHDGFTLRDLVSYEGKHNLANGEDGRDGSDHNISSNYGVEGETNDPAIKQLRRQQMRNLLATLLLSQGTPMLLAGDEFGHSQNGNNNAYCQDNELTWIDWTAATKAAAADQAAFVRRLIRIRQRYPLLHRARFFDGKFDEALGLKDLTWLAPNGTEMDEAGWHDPEARALMLRLDGRSPTTGLREIAANVTLLMLINAASTAVSFTLPAMHDEHWRVLVDTARHGGRVVAGGSEWKAPAHSLTLLAVERDRIVSSARIVSEGAR

SEQ ID NO: 7630 - protein, 1040 aa, Cryptococcus neoformans var. grubii
MSRVPSGSQQPQYTQQPLYHPSSVHSQSASVQQTHQQYHPHAGQPMAFQGDPHAYSYDRQSQINTWQANPGAAGSMEYHSAVAGSSRGADPYQPYSQPHRSSPSQPVTAGRTQPASAQQYTPWAPVQASATTTPSSRGGGVKLEDLMSNDSRADGKSQPLSSIPLSVSASFDTRSQFSAGPQGASTEKEKDKERDKATQQQGPSEFIKKLYKMLEEEQAQYGSSRAKKGEKGKRGSVGWGANGTSFVVWDMNDFTTKILPQTFRHSNFSSFVRQLNKYGFSKIKHVDAGTGSIKENIWEFQHPNFQAGGKSDLESIKRKPVAPKKTNNQEGDENSPRYVGLSNEDQSRMHLMEDRINILEDALAKSRSEADEARMREMAMMGLVRDMIGHIAASESEAIGSPAATTGHSPRVLHLLKSLDNLARAYPPEMYHSNIARQPTTMPYTPAQPQSHQSFLNAAYNPAFSGSSVGGAAQAQASPHTDGTGSRGSLSGPSTGEIKPPASSSRLRAASNAGVVPPGSVNASVPVASQPSGNPPAGPVAHVEDPAEDVIEIPNQMQDMYGGESVSIAPLFVETPAWLTEGTTIPLTMYRKQSDGQALKAVYQAFAAGGKLPAGEGQDEDGNAIASGSSTSAAEIMAGSSQMGLQQSYDAGPSTSTGIPLPMDGSPSSESSSRKGKGKKSRGTSLKEQRESKLKPHWAQTPRILVVEDDIVYRTLSKKFLQKFGCETETVENAQGAVDKMNGTKYDLVLMDIFFGPNMDGRKATSLIRQFNNYTPIISMTSNAQPQDVDSYYQSGMNDILAKPFTKNHLFTILDKHLVHLRHAQLYERLIPLGVGVPPLSDQHVQEALAVSAATLQNTNGQLQLENGQTAEAQNEQQDSNGELELGIRNPLAGSGWSDEAYQLVLAQFLQTGVMPDITTISAVSSSPNPNGFDGTIGTSIVFGESSGFSRKRSIEAINDDNWDGQAQTPASAQAQVQAQTQNTIMQGDQQQGMSLQMPTNVGMGMDVNMGNMPESGMMNQDMSNDSDGRETKRARGMAG

SEQ ID NO: 7631 - protein, 466 aa, Lactobacillus brevis
MENTRMKQMRRSNQSSGPALNCHDLPKYKLAKHALEPRPREADRLVRDQLLDEGNSRLNLATFCQTYMEPEAVELMKDTLEKNAIDKSEYPRTAEIENRCVNIIANLWHAPEAESFTGTSTIGSSEACMLAGLAMKFAWRKRAKANGLDLTAHQPNIVISAGYQVCWEKFCVYWDIDMHVVPMDDDHMSLNVDHVLDYVDDYTIGIVGIMGITYTGQYDDLARLDAVVERYNRTTKFPVYIHVDAASGGFYTPFIEPELKWDFRLNNVISINASGHKYGLVYPGVGWVIWRDQQYLPKELVFKVSYLGGELPTMAINFSHSASQLIGQYYNFIRFGFDGYREIQEKTHDVARYLAKSLTKLGGFSLINDGHELPLICYELTADSDREWTLYDLSDRLLMKGWQVPTYPLPKNMTDRVIQRIVVRADFGMSMAHDFIDDLTQAIHDLDQAHIVFHSDPQPKKYGFTH

SEQ ID NO: 7632 - protein, 376 aa, Arabidopsis thaliana
MSAESCFGSSGDQSSSKGVATHGGSYVQYNVYGNLFEVSRKYVPPLRPIGRGAYGIVCAATNSETGEEVAIKKIGNAFDNIIDAKRTLREIKLLKHMDHENVIAVKDIIKPPQRENFNDVYIVYELMDTDLHQIIRSNQPLTDDHCRFFLYQLLRGLKYVHSANVLHRDLKPSNLLLNANCDLKLGDFGLARTKSETDFMTEYVVTRWYRAPELLLNCSEYTAAIDIWSVGCILGETMTREPLFPGKDYVHQLRLITELIGSPDDSSLGFLRSDNARRYVRQLPQYPRQNFAARFPNMSAGAVDLLEKMLVFDPSRRITVDEALCHPYLAPLHDINEEPVCVRPFNFDFEQPTLTEENIKELIYRETVKFNPQDSV

SEQ ID NO: 7633 - protein, 1550 aa, Anabaena variabilis ATCC 29413
MKAQLPDNEVQRIAALLEYKILDTQSEAAFDDITRLASYICGTPIALISLIDQNRQWFKSKVGLERRETPRDEAFCTYTILESDVFIVPDATTDERFATNPLVISDPKIRFYAGVPLTNPEGYSLGTLCVIDYIPRNLSPEQIEALQILGRQVIKQLELRRNLANLVLVNNQHKQAQKIRHPFFKKIAGGFGLASVILVLLGLASYQSEIELIHSSNQVQITQESINNLEKLLSQIKDAETGQRGYILTGKDLYLQPYQTALTNIDQKFAELKNTTVDQVQQQRLVILKPLITAKITELKQTIKLRQNQGFQTALQVIQSDKGQTLMDDIRKVMREMETEEKVRLQQQLQAVKASGQKVIVILAIAIVSGLIILAVVYYLIYCEVIARQSMENILNEERNFISAVLDTVSALVIVLDSQGRIVRFNQACEVITGYSFDEVRGRHFWNLFLLPEDVESSKASFAKFPTDSRVSGIQESENYWVTKDGSRRLIAWSRTILQNHEGSVEYIIGTGIDITERKRADKHLTIQYAITRVLAESTTITEATPQILQAICETLKWDVCEIWMVNQQGNFLSFFDLWDQTSLEMQEFKTQSQPITFASGIGLPGQIWASGQPIWLTDIADDASFLRNQLAAQVGLRGAFGFPIRSGQKILGVITCFSHQVQPHDPDLAKIMDSIGEQVGQFIHRKQAEEELQRQNLRSQLFTEITLKIRQSLQIEEILQITVKEVQKILQTDRVLIYQLLPDGSGSLIIEAVVAGWAAIKGQNITDFYLQTEYQQQYCLQQYRLRHLEAIANLDLAEIQQSHLELLRKFGVKANLVIPILVKDELCGLLIVHQCANSRQWTSFETHLLRQIADQVGIAVAQAQLLEVETRQRQELEVARSQAELASHAKSAFLANMSHEIRTPMNAVLGMTGLMLETLLNQEQRDFMETIRISGDALLTLINEILDLSKLEAGEMALENLNFNLSTCVEEVLDLLAPQAHSKGLEIAALIYRHVPIQLQGDASRLRQILMNLIGNAIKFTSFGEVVMRVELRSETPTTAIIHFAVTDSGLGITLEDQHKLFTPFTQVDASTTRKYGGTGLGLAICKQLVTLMGGEIGVESQLGKGSKFWFEIPFAKQLQPVSFVEDCGLLNNRRLLVVDDHATNRKIIYHQVSRWGMQVDQADRAVAALGMIVEACQQNKPYDVILIDMQMPEMDGMALGKQIKANSAIPPTPLIMLTSTNQRDEVQQAIKIGFAAYLVKPVKSSRLLDTIMSVLKTPSQLEAEKLEVKSQELEKNNLDHSRNRNFTATQAQNSVSTKTRILLAEDNLVNQKVALKQLQSLGYTADVAANGKEVLQLLKQIPYDLILMDCQMPILDGLETTKEIHRWAESSFASGRRPVIIAMTANAMKEDKQMCLDVGMDDYLSKPVMKEQLATALEYWCQLILNARQAVEFDIHSLPIDWEHLHQLSENDTEFELHLLQIFVEDVRARLELAKEAIANTDFQKMAQQVHQLKGASTNLGATAMYLAAERLEQLANNQERRGSMELITEIEESVNQIQAFLTRSQVV

SEQ ID NO: 7634 - protein, 115 aa, Zea mays
  misc_feature (38)..(38): Xaa can be any naturally occurring amino acid
  misc_feature (71)..(71): Xaa can be any naturally occurring amino acid
  misc_feature (89)..(89): Xaa can be any naturally occurring amino acid
LGPSRPAGFNSSPKLLCGISPEGAMYLFPPIRVPPRAXEAARRVGRSADGFYCLKLLEATGISTGPASAFXGEKEGVFHLRTTILPAEXDLPAMMARFEKLNDCLMEEDEGYSMM

SEQ ID NO: 7635 - protein, 415 aa, Yarrowia lipolytica CLIB122
MEDDKTTATPPTEFVWKLYMMLEEGNDNTVFWTPDGRSFVISDTIEFSKTTLPRHFRHKNFSSFVRQLNKYDFHKVKSTNDDGEPVYGENGWEFKHPNFLQFDTSGIDSIRRKLPEKRRAEGPSGYRELEDELHDLKRKHESLQKHFTSLSEDFSNAIGKLSGLQESLKKKEETMNHVFSMLAEFEYRFERLGMSQDDTASFDHIKRRRTDPSAAAQAQAQAQAQAQAQAQAQAQAQATTNYDDHMWPSTTHTWLPLHPPQVRRDSNGKAHPDGHADNTAESTEIHQNGEVQKILIASDDSDCVKICSTLLQKAGQVVEVIPDGVDAVEFLQTSASHVGLVLMETVLPRLDGCSAVELIRSMNRQVPIIMINDGSVNPKLEFLLQSGYVNEVLARPFNKDDFFKAVSPHVSLASY

SEQ ID NO: 7636 - protein, 683 aa, Shewanella sp. ANA-3
MRKLTLATSIATVFVGFSAWAVPPTIQISELPTLKQEAQHKVASKRVTDLYTRSHYHRFALDDAFSAQIFDRYLQQLDYRRNVLTQADVDSFKPYTNQFDDMLSSGDLDPAYKMFDLVQKRRYEGFVYALSLLDKEMDFTVPGDAYEYDREDAAWPKDQAEINELWRQRVKYDALNLKLTGKKWPEIVDILQKRYNNAIKRLTQTNSEDVFQAVMNAFSRSIEPHTSYLSPRNAERFQMEMNLSLEGIGAQLQLEDDYTVIKSLIAGGPAASSEKLSPEDKIVGVGQEGGEIVDVIGWRLDDVVDLIKGPKGSKVILQILPKKGGSNAKPFNLTLVRDKIRLEDRAATSKIIEPKDGEYANRKVGVIQIPGFYMNLSQDVEKELVKLNEAKVEGVVIDLRGNGGGALTEAVLLTGLFIDMGPVVQVRDADGRVSAHRDNDGKTTYAGPLTIMVDRYSASASEIFAAALQDYDRALIVGESSFGKGTVQQHKSLGRIYDMYEKPIGHVQYTIQKFYRINGGSTQLKGVTPNIAYPSALEPGEYGEAEEKNALPWDKVPMAQYGTLNDITPELVASLEKKHLARIQNDVEFNYINQDIADFKKHHKEKTVSLVESERIASREADEKKVLDRTNERRVAHGLAAVKSMEDIKDKDDVEAPDAFLDETAYITLDMADAKKLANAGTK

SEQ ID NO: 7637 - protein, 259 aa, Rubrivivax gelatinosus PM1
MPALVSIKAFADNYIWLFRVGNRAWVVDPGESAGVLGYLDKHHLILEGILLTHHHDDHTGGVEHLRSVRNARVYGPARERLPEPVIRLLHGDEVDALGVRFRVIDVPGHTAGHIAYYAEDFDGRPLLFCGDTLFSGGCGRLFEGTPAQMFASLDRLAGLPGDTLVCCAHEYTVGNLRFANAVEPGNRDVVEHLDRCLALRARDEPTLPSSIKQERLINPFLRCQDPAVANAARRRAAVGHAMDDVAVFAALRAWKDRFA

SEQ ID NO: 7638 - protein, 547 aa, Haemophilus ducreyi 35000HP
MAIKDVKFGNDARVKMLKGVNILADAVKVTLGPKGRNVVLDKAYGAPTITKDGVSVAREIELEDKFENMGAQMVKEVASKANDVAGDGTTTATVLAQSIVSEGLRAVAAGMNPMDLKRGIDKAVAAVVEELKAISKPCETSKEIEQVGTISANSDETVGKLIAQAMEKVGKEGVITVEDGTGLDDALDVVEGMQFDRGYLSPYFINKPEAGTVELDNPYIILVDKKISNIREILPVLEAVAKAGKPLLIIAEDVEGEALATLVVNTMRGIVKVAAVKAPGFGDRRKAMLQDIAILTAGTVISEEIGMELEKATLEELGQAKRVVITKDNTTIIDGIGDEAQIKARVVQIRQQIEDSTSDYDKEKLQERVAKLAGGVAVIKVGAATEVAMKEKKDRVDDALHATRAAVEEGIVPGGGVALVRAANKVSATLTGDNEEQNVGIKLALRAMEAPLRQIVENSGEDASVVARDVKDGSGNFGYNATTEEYGDMLEMGILDPTKVTRSALQFAVSIAGLMITTECMITDLPKEDKLDAQAAMGGMGGMGGMM

SEQ ID NO: 7639 - protein, 435 aa, Saccharomyces cerevisiae
MTTNEEFIRTQIFGTVFEITNRYNDLNPVGMGAFGLVCSATDTLTSQPVAIKKIMKPFSTAVLAKRTYRELKLLKHLRHENLICLQDIFLSPLEDIYFVTELQGTDLHRLLQTRPLEKQFVQYFLYQILRGLKYVHSAGVIHRDLKPSNILINENCDLKICDFGLARIQDPQMTGYVSTRYYRAPEIMLTWQKYDVEVDIWSAGCIFAEMIEGKPLFPGKDHVHQFSIITDLLGSPPKDVINTICSENTLKFVTSLPHRDPIPFSERFKTVEPDAVDLLEKMLVFDPKKRITAADALAHPYSAPYHDPTDEPVADAKFDWHFNDADLPVDTWRVMMYSEILDFHKIGGSDGQIDISATFDDQVAAATAAAAQAQAQAQAQVQLNMAAHSHNGAGTTGNDHSDIAGGNKVSDHVAANDTITDYGNQAIQYANEFQQ

SEQ ID NO: 7640 - protein, 194 aa, Pyrus pyrifolia
MGQQSLIYSFVARGTVILAEYTEFTGNFTSIASQCLQKLPATNNKFTYNCDGHTFNYLVDNGFTYCVVAVEAVGRQVPIAFLERIKEDFTGRYGGGKAATAVANSLNKEFGSKLKEHMQYCVDHPEEISKLSKVKAQVSEVKGVMMENIEKVLDRGEKIELLVDKTENLRSQAQDFRQQGTQMRRKMWLQNMKL

SEQ ID NO: 7641 - protein, 278 aa, Corynebacterium sp.
MTVPSIVLNDGNSIPQLGYGVYKVPPADTQRAVEEALEVGYRHIDTAAIYGNEEGVGAAIAASGIARDDLFITTKLWNDRHDGDEPAAAIAESLAKLALDQVDLYLVHWPTPAADNYVHAWEKMIELRAAGLTRSIGVSNHLVPHLERIVAATGVVPAVNQIELHPAYQQREITDWAAAHDVKIESWGPLGQGKYDLFGAEPVTAAAAAHGKTPAQAVLRWHLQKGFVVFPGSVRREHLEENLDVFDFDLTDTEIAAIDAMDPGDGSGRVSGHPDEVD

SEQ ID NO: 7642 - protein, 205 aa, Oryza sativa (japonica cultivar-group); identical to SEQ ID NO: 164

SEQ ID NO: 7643 - protein, 492 aa, Zantedeschia aethiopica
MDPCKYRPSSSYDASFTTTNAGGPVWNDDVALTVGSRGPILLEDYHLIEKVAHFARERIPERVVHARGASAKGFFECTHDVTHLTFADFLRAPGVQTPVIVRFSTVIHERGSPETIRDPRGFAVKFYTREGNWDLLGNNFPVFFIRDGIKFPDVIHAFKPNPKSNVQEYWRVLDFLSHLPESLHTFCFLYDDVGVPLNYRHMEGFGVNTYTFINKAGKTNYVKFHWKPTCGVKCMLEDEAVVVGGKNHSHATQDLYDSIAAGNYPEWKLFVQVMDPDEEDKYDFDPLDDTKTWPEDLLPLQPVGRLVLNRNIDNFFNENEQLAFSPGIIVPGIYYSDDKMLQCRTFAYGDTQRYRLGPNYLMLPVNAPKCAHKNSHYDGLMNFMHRDEEVNYYPSRHDRLRNAERFPINNRPIIGKREKCTIEKQNDFKQPGERYRSWAPDRQERFVRRWVEALAHPKVTFEIRTIWVSYLSKCDASLGQKVANRLNMKPSM

SEQ ID NO: 7644 - protein, 46 aa, Pseudotsuga menziesii
LRRFRLPDNAKVEEIKAAMENGVLTVTVPKQPEPQPPQPKSIEISG

SEQ ID NO: 7645 - protein, 538 aa, Zea mays
EFGSRAHGISVQSFNGDLLYEPWDVYDENGQAFTTFNKYWEKCMNLPIEISQYLAPTRLVAAPGLANVRCCSIDDLGLESSKDVESSNALLSRAWSPGWRNAENMLEEFVSYGLLEYSEHGMKVGGSTTSLLSPYLHFGELSVRMIYQLVKMRQVKWQNEGKSEAEESVRLFLRSIGFREYSRYLCFNYPFTHERSFLGNLKHYPWLLDEGRFKSWRQGMTGYPLVDAGMRELWATGWTHNRIRVIVSSFAVKFLQIPWIWGMKYFWDVLLDADLESDILGWQYISGSLPDGHELSRLDNPEVQGQKYDPDGEYVRTWIPELARMPTEWIHSPWAAPNSILQVAGVELGFNYPKPIVELHMARECLDDAISTMWQLDTAAKLAELDGEVVDDNLNNIRNFDIPKVVLNKKLSPSTSSMEHRVLSTNGKDEKSQPTEVKALYKQIIRDDMMNDSNMDDTCSTANLKVTRKRSSNDSAFNVPSCSSSLVMESRIHHNEPSSVLYSGYFQKTADRDGTSKVEDNDSEDSGTSISRPSKKAA

SEQ ID NO: 7646 - protein, 102 aa, Glycine max
AFAVSGHKYGLVYAGIGWVIWRSKEDLPEELIFHINYLGADQPTFTLNFSKGSSQVIAQYYQLIRLGYEGYKMVMENCYDNMAVLKERLEKIRKVEIIFQDI

SEQ ID NO: 7647 - protein, 572 aa, Saccharomyces cerevisiae
MCGIFAAFKHEDIHNFKPKALQLSKKIRHRGPDWSGNAVMNSTIFVHERLAIVGLDSGAQPITSADGEYMLGVNGEIYNHIQLREMCSDYKFQTFSDCEPIIPLYLEHDIDAPKYLDGMFAFCLYDSKKDRIVAARDPIGVVTLYMGRSSQSPETVYFASELKCLTDVCDSIISFPPGHVYDSETDKITRYFTPDWLDEKRIPSTPVDYHAIRHSLEKAVRKRLMAEVPYGVLLSGGLDSSLIAAIAARETEKANADANEDNNVDEKQLAGIDDQGHLHTSGWSRLHSFAIGLPNAPDLQAARKVAKFIGSIHHEHTFTLQEGLDALDDVIYHLETYDVTTIRASTPMFLLSRKIKAQGVKMVLSGEGSDEIFGGYLYFAQAPSAAEFHTESVQRVKNLHLADCLRANKSTMAWGLEARVPFLDKDFLQLCMNIDPNEKMIKPKEGRIEKYILRKAFDTTDEPDVKPYLPEEILWRQKEQFSDGVGYSWIDGLRDTAERAISDAMFANPKADWGDDIPTTKEAYWYRLKFDAWFPQKTAADTVMRWIPKADWGCAEDPSGRYAKIHEKHVSA

SEQ ID NO: 7648 - protein, 538 aa, Staphylococcus aureus subsp. aureus MSSA476
MVKQLKFSEDARQAMLRGVDQLANAVKVTIGPKGRNVVLDKEFTAPLITNDGVTIAKEIELEDPYENMGAKLVQEVANKTNEIAGDGTTTATVLAQAMIQEGLKNVTSGANPVGLRQGIDKAVKVAVEALHENSQKVENKNEIAQVGAISAADEEIGRYISEAMEKVGNDGVITIEESNGLNTELEVVEGMQFDRGYQSPYMVTDSDKMVAELERPYILVTDKKISSFQDILPLLEQVVQSNRPILIVADEVEGDALTNIVLNRMRGTFTAVAVKAPGFGDRRKAMLEDLAILTGAQVITDDLGLDLKDASIDMLGTASKVEVTKDNTTVVDGDGDENSIDARVSQLKSQIEETESDFDREKLQERLAKLAGGVAVIKVGAASETELKERKLRIEDALNSTRAAVEEGIVAGGGTALVNVYQKVSEIEAEGDIETGVNIVLKALTAPVRQIAENAGLEGSVIVERLKNAEPGVGFNAATNEWVNMLEAGIVDPTKVTRSALQHAASVAAMFLTTEAVVASIPEKNNDQPNMGGMPGMM

SEQ ID NO: 7649 - protein, 250 aa, Arabidopsis thaliana
MIVPPLVQEIGKGNYQINLQGYILGNPITDTESEQNYQIPYAHGMALISDELYKSMERICKGNYVKVDSLNTKCYKLIKDYQKCIHKLNKYHILLPDCDITSPDCFLYRYTLITFWANNKSVREALQVNKGSIGKWVQCNYKNISYNYDIKSSVAYHMKNSIDGYRSLIYNGDHDMMVPFLATQAWIRSLNYSITDDWKPWMINDQIAGYTRSYSNKMTFATIKGSGHTAEYKPKETSIMFKRWISAQPL

SEQ ID NO: 7650 - protein, 728 aa, Salmonella typhimurium LT2
MSSRIDRDVINALIAGHFADPFSVLGMHQTQAGLEVRALLPDATDVWVIEPKTGRKVGKLECLDARGFFCGVLPRRKNFFRYQLAVTWHGQQNLIDDPYRFGPLIQEMDAWLLSEGTHLRPYETLGAHADTMDGVTGTRFSVWAPNARRVSVVGQFNYWDGRRHPMRLRKESGIWELFIPGAHNGQLYKFELLDANGNLRIKADPYAFEAQMRPETASMICGLPEKVTPGEERQKANQFDAPISIYEVHLGSWRRHTDNNFWLSYRELADQLVPYAKWMGFTHLELLPVNEHPFDGSWGYQPTGLYAPTRRFGTRDDFRYFINAAHAAGLNVILDWVPGHFPSDEFSLAEFDGTHLYEHSDPREGYHQDWNTLIYNYGRREVSNYLVGNALYWMERFGIDALRVDAVASMIYRDYSRKEGEWIPNEFGGRENLEAIEFLRNTNRIIGEQVPGAVSMAEESTDFSGVTRPPETGGLGFWYKWNLGWMHDTLDYMKLDPVYRQYHHDKLTFGMLYNHTENFVLPLSHDEVVHGKKSILDRMPGDAWQKFANLRAYYGWMWAFPGKKLLFMGNEFAQGREWNHDASLDWHLLEGGDNWHHGVQRLVRDLNHTYRHHKALHELDFDAYGFEWLVVDDNERSVLIFVRRDKAGNEIIVASNFTPVPRHDYRFGINQPGRWREILNTDSMHYHGSNTGNGGVVHSDEIESHGRQHSLNLTLPPLATIWLMREGE

SEQ ID NO: 7651 - protein, 130 aa, Zea mays
  misc_feature (102)..(102): Xaa can be any naturally occurring amino acid
GDADYLRYHGMQEFDQAMQHLEQKYEFMTSDHQYISRKHEEDKVIVFEKGDLVFVFNFHCNNSYFDYRIGCRKPGVYKVVLDSDAGLFGGFSRIHHAAEHFXADCSHDNRPYSFSVYTPSRTCVVYAPVE

SEQ ID NO: 7652 - protein, 373 aa, Pseudomonas syringae pv. syringae B728a
MTLFNEFKLGNTPLSNRVVMAPMTRSRAPEDIAAEQIALHYTQRATAGLIVSEGTPISREGQGYLFNPGIYTPEQIQGWKLVTDSVHSVGGRMFAQLWHVGRVSHTSIQIDGKAPVSATTRQAQGAVAFAYGEDGEPGFVPTSAPRPLTTEEVARVVEDFAQAAQNAIDAGFDGVEIHGANGYLLEQFLNPLVNDRGDQYGASNLQDRLRFVFEVVDAACARIGADRVGIRISPYGQLFDMPLYPEIDETYSALCAGMRERGIAYVHVMDQTHFFMAGESSAAQEQALRKLLKHCKAELGNTALILAGDMTRERADALLEENLIDLAAFGQPFIGNPDLVARLKNGWPLTTPDRDTYYGGDAHGYIDYAPYRA

SEQ ID NO: 7653 - protein, 130 aa, Zea mays
  misc_feature (9)..(9): Xaa can be any naturally occurring amino acid
  misc_feature (11)..(11): Xaa can be any naturally occurring amino acid
  misc_feature (15)..(15): Xaa can be any naturally occurring amino acid
GDADYLRYXGXQEFXQAMQHLEQKYEFMTSDHQYISRKHEEDKVIVFEKGDLVFVFNFHCNNSYFDYRIGCRKPGVYKVVLDSDAGLFGGFSRIHHAAEHFTADCSHDNRPYSFSVYTPSRTCVVYAPVE

SEQ ID NO: 7654 - protein, 478 aa, Bacillus cereus ATCC 14579
MKRRVAIIGMVVAFLIGAGGMFAGMSVFGVNPSEVTQTISSGNASTAQGNLAKINEAYALIDSRYVEDVKDEKLVEGAIQGMLSTLKDPYSTYMDKETAKQFSESLDPELEGIGAEVNKTDGKLIIVSPIKGSPAEKIGIKPNDQILSVDGNSVKDLSREEAVLKIRGKKGTTVAIEIKRAGVTDPIVFKIKREKIPIFTVFSSVKQESGKDIGYMQITSFAENTAKEFKDQLKELEKKNIKGLVIDVRGNPGGYLNSVEDILGEIMTNKKPMLQVEQRNGEKKKFSTELKERKPYPISVLIDNGSASASEILAGALKEGEGYDLIGEKTFGKGTVQQAVPFKDGSNIKLTMFKWLTPDGNWIHKKGIAPTVEVKQPNYYHSTPIQIEKTLSYNSNDVQVKHAQEMLKSLGYVPGREDGYFSKETESALKAFQNANEMEATGQLDKKTAEAIQTKIIEKIRSGENDLQLQSALKLMAK

SEQ ID NO: 7655 - protein, 383 aa, Bordetella parapertussis 12822
MNQEAENTKLFAPLSLRGVVLPNRVLISPMSQYSAVDGVVQDWHGYHVAGMARGYPGSVMLEVAAVTRDGRGTPGDLGIWSDEQIAGLAELARIIEAHGVVPAIQIGHAGRKASMQRPWEGGRPLALDSSDEAWQAVGASALPIQDGWPAPRQLAQRELAGLVDSFRAAAARAVQAGYRFVEVHAAHGYLLHSFLSPISNQREDLYGGSLENRMRFPLEVVAAVRAALPDEVPLSVRISAVDGVEHGWQLADSIVFARELKALGVDLVDCSSGGIQGSATAGKGPQAVKRGPGFQVPFAHAVRQEAGIATIAVGLIVEPAQAEAILRQEQADLIAIGREALQNPNWPLHARQALGADRDYSAWPAQYGWWLQRRPKVAWEEGR

SEQ ID NO: 7656 - protein, 335 aa, Agrobacterium rhizogenes
MTITPDIELGAYLLQRKIDPALASLIESIAASATVVADHLKEAAFQNHIGSAGTTNVQGEDQKLLDVLADRVFRETCGEAVSLAAYVSEEAEDVTWLKAPAAGDLILYVDPLDGSSNLEVNLSVGSIFAVSQVQADGDTNVLRKGRDYLCAGYAIYGPSTLFVITFGLGVVGFTLDPSDGQFKLTNARMRVPTETTEFAVNSSRQRFWDEPIRRYVDECLAGSAGPRGQDFNMRWTASMVADVHRILTRGGVFLYPADDSNRRAGGKLRLMYEANPMAFLIEAAGGAASTGTEDILRIQPQAHHQRVSVLLGSSNEIQRLVQFHQIHHSQEEIGS

SEQ ID NO: 7657 - protein, 470 aa, Staphylococcus aureus subsp. aureus MRSA252
MTKTLPEDFIFGGATAAYQAEGATNTDGKGRVAWDTYLEENYWYTAEPASDFYNRYPVDLELSEKFGVNGIRISIAWSRIFPNGYGEVNPKGVEYYHKLFAECHKRHVEPFVTLHHFDTPEVLHKDGDFLNRKTIDYFVDYAEYCFKEFPEVKYWTTFNEIGPIGDGQYLVGKFPPGIKYDFEKVFQSHHNMMVAHARAVKLFKDGGYQGEIGVVHALPTKYPFDPSNPEDVRAAELEDIIHNKFILDATYLGEYSRETMEGVQHILSVNGGKLNITDEDYAILDAAKDLNDFLGINYYMSDWMRGYDGESEITHNATGDKGGSKYQLKGVGQREFDVDVPRTDWDWMIYPQGLYDQIMRVVKDYPNYHKIYITENGLGYKDEFIESEKTVHDDARIDYVRQHLNVIADAIKDGANVKGYFIWSLMDVFSWSNGYEKRYGLFYVDFETQERYPKKSAYWYKELAETKEIK

SEQ ID NO: 7658 - protein, 181 aa, Cryptomeria japonica
DDHGEVVAEMLRPDLEPYLGLHYPATDIPQASRFLFLKNRVRMICDCRAPAVKVRQDKRWCRSLSISGSTLRAPDGCHAQYMANMGSIASLVMAVTVSNSEEGGRRLWGLVVCHHATPRFVPYPLRYACEFLMQVFGVQLNKEVELAARLRERHILRTQTVLCDMLLRDAPVGIVTKTPNI

SEQ ID NO: 7659 - protein, 137 aa, Brassica napus
MALEAMNCPTNSSSFTAREDRNEPTDDLTNDAVFMEPWLKRKRSKRQRSGSPSSSPPRSRPKSQIQDLAEEEYLALCLLMLANNHHQPKRRPQESTTKLSHKCSVCGKAFPSYQALGGHKASHRIKPPTTTADDDST

SEQ ID NO: 7660 - protein, 251 aa, Arabidopsis thaliana
MVNATVARNIAGICGNVISLFLFLSPIPTFITIYKKKKVEEYKADPYLATVLNCALWVFYGLPMVQPDSLLVITINGTGLAIEVVYLAIFFFFSPTSRKVKVGLWLIGEMVFVGIVATCTLLLFHTHNQRSSFVGIFCVIFVSLMYIAPLTIMSKVIKTKSVKYMPFSLSLANFLNGVVWVIYALIKFDLFILIGNGLGTVSGAVQLILYACYYKTTPNDDEDEEDEENLSKVNSQLQLSGNSGQAKRVSA

SEQ ID NO: 7661 - protein, 91 aa, Bacillus anthracis str. A2012
MVLDRNPVDYHSEIEQAAFGTGVLVDGMDFSDDKMLQGRTFSYSDTQRYRVGANYLQLPVNAPKAPVRTNQHRGQMDMRNPKESGEIRILL

SEQ ID NO: 7662 - protein, 319 aa, Gloeobacter violaceus PCC 7421
MSEPAEQPESVKGWTRLTRRRDVLDDPYIHRYQRRHFFFFDILPAIGTVAAVALSWVWPPGPIEGSLLLGLWLVTGFGVTVGYHRLFTHRSFSAAPWVQALLAVSGSMAGQGSVISWVALHRRHHELSDQPGDPHSPNLHGQDPVGRLRGLLHAHLLWMRQHEYPNVVCYASDLLRDRSLLQVNGLYLWWVLLGLAIPALVGWWLHGHVAGLLLGFLWGGAVRMFVLGNIIWSINSFLHSFGPRLFATREHSRNSGWLALASFGESWHNNHHAFPTSASFGLDWYRLDPGYWLIWLLARLGLAWDVKVPSEEQIRLKRA

SEQ ID NO: 7663 - protein, 579 aa, Nocardioides sp. JS614
MTHGPFDVWAPLPRRLRLAVAGETVAMRRGEGDWWTPAGPVPAGAELDYGYLVDDGEAPRPDPRSRRQPGGVHQLSRTFDPASYPWTDQAWTGRQLAGSVVYELHVGTFTPEGTFDAALEKLPHLREIGVDLVELMPVNAFNGTHNWGYDGVGWFAVHEGYGGPAGYQRFVDGCHAAGLGVIQDVVYNHLGPSGNYLPELGPYLKQGANTWGDFLNLDGPGSDEVRRYILDNVRMWLADYHVDGLRLDAVHALNDAGHQHLLEELAAEVAALSAHQRRPLTLIAESDLNDTRLVRPREAGGYGLDAQWSDDFHHAVHVALTGETAGYYADFEPLSALAKVCERGFFHDGTWSSFRGRDHGFPVDLRTMPTWRLVVCSQNHDQIGNRARGDRITEVLDDDQLACAALLTLCGPFTPMLFMGEEWAASTPFQFFTSHPEPDLGTATAEGRIAEFERMGWDPAVVPDPQDPATFERSKLDWAEATRGRHARMLDVYRRLARLRREHEALTDPSFGSVRCTADEHTRVFTMRRGDLLVAVNFGDAAATVETAAATLLFQTGAGLTLDAGRLSLPPHAGALVGP

SEQ ID NO: 7664 - protein, 330 aa, Gloeobacter violaceus PCC 7421
MLYLYLGSTMETDHFPAPSSKYLPGGKVRVTTANAHLQARYRSVGLVTLGIPALGTLAALGLLAFQPLRLLDVALLLGMYVLTVFGLEVGYHRHFAHGAFKASPPVRVTLAVLGGMAASGPLIYWAATHRLHHHFPDEPGDPHSPYLKADRPLERLPGLWHAHTGWMLDSEITNCALLARDLLRDLNVSRLNRRYYLWVLLGLLLPALVGGLASATWMGALQGLLWGGMVRIFLVHQLYIGALNSVCHLLGDRPFATGDLSTNNAWLALPTLGESWHNNHHAFCSSAVTGLEWWQIDPSGWCIRLLAAVGLVWEVKIPNQATIAARRQVR

SEQ ID NO: 7665 - protein, 318 aa, Oryza sativa
MASFAVSGARLGVVRAGGGGGGGGGPAARSGGVDLPSVLFRRKDSFSRGVVSCAGAPGKVLVPGGGSDDLLSSAEPDVETQEQPEESQIPDDNKVKPFEEEEEIPAVAEASIKVVAEDKLESSEVIQDIEENVTEGVIKDADEPTVEDKPRVIPPPGDGQKIYQIDPMLEGFRNHLDYRYSEYKRMRAAIDQHEGGLDAFSRGYEKLGFTRSAEGITYREWAPGAQSAALVGDFNNWNPNADTMTRNEYGVWEISLPNNADGSPAIPHGSRVKAPGEIPYNGIYYDPPEEEKYVFQHPQPKRPNSLRIYESHIGMSSP

SEQ ID NO: 7666 - protein, 370 aa, Ralstonia solanacearum
MSALFQPFSLRGLRLDNRIVISPMCQYSADQGQATAWHQTHLGALSLSGAALLMIEATAVSPEGRITPGCLGLWDDATEAALAGALAAIRPHAQTPIGIQIAHAGRKASSARPWEGGALLPPESGGWETIGPSALPQRPEERPPRTMTEADLARVREAFAATARRAVGLGLAAIELHAAHGYLLHEFLSPLANQRTDAYGGSRENRMRYPLEVFEAVRAAVPDDIPVGVRVSCTDWVEGGWTLADSVAFAQALRARGCDWVDASSGGVSPLQQIPLSSGYQVPFADTIRHQAGIPTIAVGLINEPHEAEAILAEGRADLVAMGRAFLYNPHWAWTAAADLGATIKAPPQYWRAFPRHAKNLFGETHFGAR

SEQ ID NO: 7667 - protein, 675 aa, Chlorobium tepidum TLS
MAAVGQAAQPALLKPTPNQEEAARYIAQYLLQNHYRKVPVNDSLSQQIFKRYLDNLDNNRSYFTAPEVEKLRQEFGAHLADDFVSGNPADGFAIYNQFLKRAREKMAYMKNALEKTTFNFSSPETLELERSKTAPWPANEAELHDLWRKELKYQYLSAKYSGEKGKNIKSEVMKTLDNRLKIFNQQKPEDAFQAYMYAVTTSFDPHTDYFSPDEYENFQIDMSRSLEGIGAKLQMENEYTVVNEIIPGGPAFKSKLLKKGDKIVGVGQGDKGEIIDVIGWRINDVVKKIRGPKGTVVRLKVLPASQAGKGPAKIIRLVRAKVDLQEQAAQKKIIYDNGHKIGVIVLPSFYLDFEGERQQKHNYASTTKDVARIINELKQENVEGIIVDLRENGGGSLEEAVNVTGLFTGRGPVVQVSNALGGKMVLNDENYPMLYRGPLVVLVNRYSASASEIFAAAIQDYGRGLIVGDRTFGKGTVQSIVTIQRPFSMFMKQADLGQLKLTIAKFYRISGGSTQHIGVLPDIVLPSLIDPEVVGEDTYTSSLPWTTISRAAYTPLGFVTKEDIVLLKKEFAEQSAKDKLYQSYLADLATLNRIRQKKSVSLQEKGFQVENKTLKEIQDRWGDQNADTGKKKKTDFILQEAARILDDLVALKSRPAVPAAAPLARPAVRRAVPVK

SEQ ID NO: 7668 - protein, 1300 aa, Aspergillus nidulans FGSC A4
MACADETLTAAAAIIQNLVREAPSSGSPSFEFNFSPQSTNGVDSLPKLPGEPSLAKVRFENELEALVRRIHRMEVQSQQNHTQHAEHTQHLHKRRKSSKDTEPEILDESDGAASDEDEEEGATTLVREEDISYLRNYVQKQAEEISFQKNIITQVREELQLQEVQTRRALTKVENEDVVLLERELRKHQQANEAFQKALREIGGIITQVANGDLSMKVQIHPLEMDPEIATFKRTINTMMDQLQVFGSEVSRVAREVGTEGILGGQAQITGVHGIWKELTENVNIMAKNLTDQVREIAVVTTAVAHGDLSQKIESRAQGEILELQQTINTMVDQLRTFATEVTRVARDVGTEGVLGGQAQIEGVQGMWNELTVNVNAMANNLTTQVRDIATVTKAVAKGDLTQKVQANCKGEIAELKNIINSMVDQLRQFAQEVTKIAKEVGTDGVLGGQATVNDVEGTWKDLTENVNRMANNLTTQVREIADVTTAVAKGDLSKKVTANVQGEILDLKSTINGMVDRLNTFAFEVSKVAREVGTDGTLGGQAKVDNVEGKWKDLTDNVNTMAQNLTSQVRSISDVTQAIAKGDLSKKIEVHAQGEILTLKVTINHMVDRLAKFATELKKVARDVGVDGKMGGQANVEGIAGTWKEITEDVNTMAENLTSQVRAFGEITDAATDGDFTKLITVNASGEMDELKRKINKMVSNLRDSIQRNTAAREAAELANRTKSEFLANMSHEIRTPMNGIIGMTQLTLDTDDLKPYTREMLNVVHNLANSLLTIIDDILDISKIEANRMVIESIPFTVRGTVFNALKTLAVKANEKFLSLTYQVDNTVPDYVIGDPFRLRQIILNLVGNAIKFTEHGEVKLTICKSDREQCAANEYAFEFSVSDTGIGIEEDKLDLIFDTFQQADGSTTRRFGGTGLGLSISKRLVNLMGGDVWVTSEYGHGSTFHFTCVVKLADQSLNVIASQILPYKNHRVLFIDKGENGPEAENVLKMLKKLDLEPLVVRNEDHVPPPEIQDPSGKESGHAYDVIIVDSVNTARMLRTYDDFKYVPIVLVCPLVCVSLKSALDLGISSYMTTPCEPIDLGNGMLPALEGRSTPITTDHSRSFDILLAEDNDVNQKLAVKILEKHNHNVSVVGNGLEAVEAVKQRRYDVILMDVQMPVMGGFEATGKIREYERDSGLSRTPIIALTAHAMLGDREKCIQAQMDEYLSKPLKQNQMMQTILKCATLGGSLLEKSKESRISSSGEMHHVHTGPDGKSQRPGMEGRSITSSSATSRTLASTSAERTEQLSIDRSIVSTS

SEQ ID NO: 7669 - protein, 303 aa, Arabidopsis thaliana
MSISQFPPPASPSPASSSRSLASSSPSPGSFSSSMRLWRPAAQRNLRNQWSNLSNCRQQWIVACSAGRSHATLLVNSYLSQKYMPMMELGVLSDMFDIDKKALKKLFTQQSSYRIKLLSSYKEMVAVVVEMVNASRSLRCYTKLSTGSLIQFSGTKEDSNDAGDCGGIPVFNFWNVSAFEKMAEELVEMFKREVMLKRLLIMELISLSTEVPQPINNSWSDELYHGEFDHLTKCSLYSMEVAKPVLPRVKDYNIGSSSISHTNQPTAEILQIYLTTWLAEVNIDTHRVDEILALVGEEIRVTF

SEQ ID NO: 7670 - protein, 700 aa, Ustilago maydis 521
MYASSVRRSANFTLANGAQIPKLGFGTWKMSKEQATPAVAHAIKTGYRHIDCAWAYRNEDAVAAGIKKAGVPRSQLWLTSKLWNSFHHPEHVEKALDASLKDLGTDYLDLYLMHWPVAFLNSKGSMVPSIRSTGGHPVESEDLSRDFMATYRVMEEMVKKGKVRNIGVSNFNIRRTSEVVDEASIKPVVNQVEVNLGVHNEELRNYAHAHGVTLQAYSPFGSNQNVAKSLEDPVVVDVAQRNNITPAQVLLAWTLGRDIIPISKSVTPERIEENFRVLDIQLAEEEIKHLTNEALSRPIERTVDPTEGWGVADEIFEDGVDQTREMELKGGSYVPPPAHESPAEHRLEPRNDPETPARMLHTAAHPLASSSRSTLVSRRRTAVQAKSSSSFFRGFATTSRVAAVAEVAPPSASEAPAVSESALLRTTSKSALATPGLKFLDGEQRIERETKKMNMYTVRRMSTSTTTQASVRASARVTATSSAVKPTTRKYPAKKSFLYEKYLRLLSDSQMVLVLQHNNLSVAELAQVRSDIAAINLAEGQTSKASLTVVRAGLIKAVTRQLSEKNAAMKSLQPALSGPIALLTCEHLTPAYLSALLNVVDRALGHVPPRAPAVGAKFPETAVANPRLVPLAAVLEGKRLLHVPQTRDVGRIGGLDQLRSQIVGLLSAPAQQLAHVLTHASGQQLAMTLEARKRDLEAKQ

SEQ ID NO: 7671 - protein, 161 aa, Escherichia coli
MKNKSGNSYYREAVDIHSSLELSFILHKYHLRVDEKKSRNVFSAIRDELILDGDSRQNLATFCQTWIDDEIRELLNLSIDRNMIYKDEYPQMAEPEGRCVRMLSDSWSFPDSRHTLGCSTIGSSEAAMLGRLALKWQWCKKREVQGKSTEPDLRSCANMLA

SEQ ID NO: 7672 - protein, 184 aa, Brassica napus
  misc_feature (129)..(129): Xaa can be any naturally occurring amino acid
MTTIYGTNPTAANDLAPKLEYITRTNNQHHVRPGLATRRPWKQMLDLRSFHFPRKIASVITRIKTNVVYFQTNYTIVVLFSVFLSLIWKPFALLILLALIGAWLFLYFLRDEPLTVFDREIDHRVVLIXMSVLTLSVLFLTDAKLNIAVAVVVGVVVVLLHAAVRKTEEINQNEDETSPLLPQV

SEQ ID NO: 7673 - protein, 736 aa, Rhodopirellula baltica SH 1
MNSQLSLSTIQSLVDGSVANPGSLLGRHPVNYRGREATSVRVLEPNAESVWLIDSASGLRRPMRRLHPGGFFEAICDEPITKPSTSRLQMIDKTGKEIKTTSPYTVPSIFSDLDRYLIGEGRHNQLYERLGAQLREVDGVKGVNFAVWAPNARSVQVVGDFNGWDGRGHVAQPVESTGIWELFLPGATVGQKYKFRIQTQHGHWMDKCDPMAFAAELPPLTANIITDINTYSWNDSDWLQQRAEMDPMHTPMNVYEVHLGSWQKGPGRTHGWLDYRDLAKRLVDYCHRMNFTHVELMPISEHPFTGSWGYQSVGYYAPTSRHGSPEDFMFFVDHMHQNGIGVLIDWVPAHFPKDDHGLRQFDGSALYEHADPRQGEHPDWGTMIFNFGRNEVKNFLIANALFWLDKYHIDGLRVDAVASMLYLDYSREDGEWIPNRYGGRENLESIDFLRDFNIAVHENHPGVITAAEESTAWPGVSRPTYDGGLGFTYKWNMGWMNDTLSYMRNEPIHRKFHQNELTFSLIYAFTENFTLPLSHDEVVHGKGSLISQMPGDMWQKFANLRLLYSYMWTHPGKKLLFMGGEIAQWTEWNADDGPQWELLDFDTHRGVQQLVADLNKVVIENPALHWHDFTGDGFEWIDAHNAEDSVLVYLRKGAEGDPPILVCNNFTPVPRDNYRVGVPAQGFWKEIFNSDGEAYGGSNLGNYPGCQTTGIEHHARPDSIEVTLPPLGTTILRLES

SEQ ID NO: 7674 - protein, 310 aa, Bacillus anthracis str. A2012
MAENQDKNSLEEQDVKRETLTTRQGHPVKDNQNIRTIGNRGPATLENYHFIEKISHFDREEVPERVVHARGAGAFGYFETYGKVGDEPAEKYTRAKVFSGAGKKTPLMVRFSTVAGAKDSPETARDPRGFAVKMYTEDGNWDLVGNNLKIFFIRDAMKFPDMIHAFKVDPVSNVSNPQRMFDFVSRTPEATHMITFLFSPWGIPATYRHMQGSGVNTYKWVNEKGEAVLVKYHWEPKQGIRNLTQEDANSIQAMNVSHATQDLYEAIERKDYPEWELFVQIMEDGYHPELDFDPLMIRSFGQRSSSHGYQ

SEQ ID NO: 7675 - protein, 187 aa, Cryptomeria japonica
DEHGEVVAEIRRSDLEPYLGLHYPATDIPQASRFLFMQNRVRMICDCRANPVGVIQVEELKQPLCLVGSTLRAPHGCHAQYMANMGSIASLVMAVIVNGNGNDEEGSSGRVKLWGLVVCHHTSPRAVPFPLRSACEFLMQTFGLQINMEMQLAAQLTENNILRTQTLLCDMLLRDAPIGIVTQSPSI

SEQ ID NO: 7676 - protein, 192 aa, Cryptomeria japonica
DDHGEVISELRRSDLEPYLGLHYPATDLPQASRFLFMKNKVRMICDCQATPVKVVEDKRLPRELVLCGSTLRAPHGCHAEYMSNMGSVASVVIAVTINAKEEDGDTDGQQRQQKGRRLWGLVVCHHTSPRFVPFPMRYACEFLMQVFAIQLNKEVELADQLREKHILRTQTLLCDMLLRDAPMGIIREKPNI

SEQ ID NO: 7677 - protein, 235 aa, Matricaria chamomilla
MIRNNAFDSDFALLESVRRHLLDDNAPPMSCRSNNFLFPHLSDSWGELPLQQNDSEDMLIAKFLNEALPLQQNDSEGIITPEMTSSSENIFFVKSEPETSSFQPKSLGSQKGKHYRGVRRRPWGKYAAEIRDPAKNGARVWLGTYETAEDAAVAYDMAAYRMRGSRALLNFPLRINSGEPEPVRITSKRKTTSPSEGLVVKKVKVELEMSTQAEFPLVYGCYYCVILGPFLVKCF

SEQ ID NO: 7678 - protein, 667 aa, Desulfovibrio vulgaris subsp. vulgaris str. Hildenborough
MPNLRIIVVDDEQIVALDLRRTLEGLGYIVPAVETDADGAIDAAKRLRPDLVLMDIRLRRGDGVDAAHVITNQFDIPVVFLTAFSDEATLSRAMKAGPFGFLVKPFAERELYSTIEVALLKHRAVREIDEARQAAEHASLAKTSFLAGMSHEIRNTLNGIVGMTELVLDTPLSGEQRESLNTVLASSETLLTLLHDVLDFSRLEARQLRLVERPFSLDRLLKQVVQASRSEAERKNISLDFRVTPDVPDRLTGDATRLTQVLANLVGNAVKFTHKGSVIIEVSAIPQDQTLLESLFPDGPPSSLTLLFSIRDTGIGIADEHLRTIFEAFSQGAEETVQRYGGTGLGLAICRNLVEIMGGSIWARSSEGQGSSFHFTCRLRPETPAINTPSEHAQAPTSSATPASGARPLRVLVVDDDATGRTITCKMLRKRGHVCACAHDGATALQRLTADRFDLVLLDVKMHPMGGLELLRRIRNAQYPGVDRNIPVVAVTAHALKGDRERFLASGMTDYIAKPINARAFNAMLDRFALSASSARDIPVIPDRSALLAPSEVVRRHGGDHNLVEPVWKAFCDEAPRHFALLAGALEEGDAQQAARFNKRLRLASEHAGAVALAMLTERVGLCLVEDDTAGARQLVPRLESLLSRTIGLILSGMGTTEVPPIEHTTD

SEQ ID NO: 7679 - protein, 505 aa, Staphylococcus aureus subsp. aureus MSSA476
MSQQDKKLTGVFGHPVSDRENSMTAGPRGPLLMQDIYFLEQMSQFDREVIPERRMHAKGSGAFGTFTVTKDITKYTNAKIFSEIGKQTEMFARFSTVAGERGAADAERDIRGFALKFYTEEGNWDLVGNNTPVFFFRDPKLFVSLNRAVKRDPRTNMRDAQNNWDFWTGLPEALHQVTILMSDRGIPKDLRHMHGFGSHTYSMYNDSGERVWVKFHFRTQQGIENLTDEEAAEIIATDRDSSQRDLFEAIEKGDYPKWTMYIQVMTEEQAKNHKDNPFDLTKVWYHDEYPLIEVGEFELNRNPDNYFMDVEQAAFAPTNIIPGLDFSPDKMLQGRLFSYGDAQRYRLGVNHWQIPVNQPKGVGIENICPFSRDGQMRVVDNNQGGGTHYYPNNHGKFDSQPEYKKPPFPTDGYGYEYNQRQDDDNYFEQPGKLFRLQSEDAKERIFTNTANAMEGVTDDVKRRHIRHCYKADPEYGKGVAKALGIDINSIDLETENDETYENFEK

SEQ ID NO: 7680 - protein, 497 aa, Zea mays
  misc_feature (280)..(280): Xaa can be any naturally occurring amino acid
ITMDPTKFRPSSSHDTTVTTTNAGAPVWNDNEALTVGPRGPILLEDYHLIEKVAHFARERIPERVVHARGASAKGFFECTHDVTSLTCADFLRAPGVRTPVIVRFSTVIHERGSPETIRDPRGFAVKFYTREGNWDLLGNNFPVFFIRDGIKFPDVIHAFKPNPRSHVQEYWRVFDFLSHLPESLHTFFFLFDDVGVPSDYRHMEGFGVNTYTFVSAAGKAQYVKFHWKPTCGVRCILTDEEAALVGGRNHSHATQDLYDSIAAGSFPEWTLYVQVMDPXDTEEQYDFDPLDDTKTWPEDLLPLRPVGRLVLDRNVDNFFNENEQLAFGPGLVVPGIYYSDDKMLQCRVFAYADTQRYRLGPNYLMLPVNAPRCAHHNNHYDGAMNFMHRDEEVDYYPSRHAPLRQAAPPTPLPPRPVAGRREKATIRKPNDFKQPGERYRSWDADRQDRFVRRFADSLGHPKVSQELRSIWIDLLAKCDASLGMKIATRLNMKPNM

SEQ ID NO: 7681 - protein, 192 aa, Cephalotaxus fortunei
DDHGEVISEIRKSDLEPYLGLHYPATDIPQASRFLFMKNRVRMICDCYAPPAKVVEDKRLPRELNLCGSTLRAPHGCHAQYMANMSSIASLVMAVIINEKEEEQGESDGQQQQKGRRLWGLVVRHHTSPRFVPFPLRYACEFLMQVFGIQLNKEVELAAQLKEKHILRTQTLLCDMLLRDAPVGIVTQKPNI

SEQ ID NO: 7682 - protein, 317 aa, Gloeobacter violaceus PCC 7421
MDAKPIFSQATSKGPRKTLDSARLKNHQRLHAVAVSSLSLLGCLAALALVCLGRPPGAVEVGLFLGGFLCTGFGVNIGLHRHFTHRSFQAVTPVRVALAILGSMAAQGPVIFWVALHRLHHEFSDQPGDIHSPHFHGEGWWGSVRGLWHAHVGWTFDHAVPNAAYYAGDLLRDRAIAPISRTYFFWVFLGLLIAAVLGGVLTGTWMGVLTGFLWGGPVRIFCWHNMIWSITSCAHFFGERPFDADDRSTNNFWFAIPTLGESWHNNHHAFPNAAMAGLEWWQIDPSGWVIRALEKLGLVWDVKIPTQAMRRAKARAI

SEQ ID NO: 7683 - protein, 332 aa, Gloeobacter violaceus PCC 7421
MSSPFERAMQSNPPASPLPWQKTIIKSTAAVRNAQRMHALAILSLPAVATAAAAAIALRSGLGLLELGLFLGMYTLTMVGGITVGFHRHFTHCAFQAHPVIRVLLAVLGSMACEGPLIYWVSNHRRHHQYSDRPGDVHSPYIRAQTPLGGLRGFWHAHIGWTFDHDLTNATIFARDLIRDPLIARVSRLYYLWAALGLLLPALLGAWWTRDTNGALLGLLWGGGVRLFCSYHFTNSINSVTHLFGSRPFETGERSTNNPWLALPTGGESWHNNHHAFPNSAVFGLQPWQPDPGAWLIRLLEKLGLAREVKVPSQALIAAKAVRPQPTRSHAG

SEQ ID NO: 7684 - protein, 433 aa, Arabidopsis thaliana
MELTLKLLVLLLFILNHHVGSGSIVKFLPGFEGPLPFELETGYIGIGEEEEVQLFYYFIKSERNPKEDPLLLWLSGGPGCSSITGLLFQNGPLALKSEVYNGSVPSLVSTTYSWTKTANIIFLDQPVGAGFSYSRAPLIDTPTDTGEVKRIHEFLQKWLSKHPQFSSNHFYAGGDSYSGMIVPALVQEISKGNYICCNPPINLKGYVLGNPITHEDDPNYRIPFSHGMALISDELYESIREACKGNYFNVDPRNTKCLKLVEEFHKCTDKLNEFHILSPDCDTASPDCYLYPFYLISFWANDESVRDALHVNKRSIGKWERCNYLSKPYNKDIKSSVPYHMNNSVSGYRSLIYSGDHDLVVPFLATQAWIKSLNYSIIDEWRPWMIRDQITGYTRTYSNKMTFATVKGSGHTAENKPQESFIMFRRWINGQPL

SEQ ID NO: 7685 - protein, 425 aa, Synechococcus elongatus PCC 6301
MAFSNRKLIAGICASAIATVAVVGAGNHWARGQALFQESPKEIIDEVWQVVDRNYVDSVGTFDRNKWRQLRREYLARNYKTREEAYSAVKEMLKTLGDPYTRFMDPDEFKDMQIDTSGELTGVGIQLSQDPDTKELIVVSPIEGSPAAAAGIRSRDVIVKIDQKTTQGMSSDEAVKLIRGPVGSKITLTIRREKETIAFPIVRERIEIHSVSARVQESPTGPVGYIRLRQFSANSAPEMRQAIKDLEAKNVKGYVLDLRSNPGGLLYASIDIARMWLPKGVIVSTKDRSGISEQASANNRALTDKPLVVLVDGGSASASEILSGALQDNNRAVLIGSKTFGKGLVQSVRPLGDGSGLAVTIAKYLTPSGRDINKQGIEPNIVAELTDAQREDLSKNQDQIGTASDPQFQSALKVLTQQIATASNK

SEQ ID NO: 7686 - protein, 423 aa, Aspergillus oryzae
MADLRGRKIFKVFNQDFIVDERYNVTKELGQGAYGIVCAATNIQTGEGVAIKKVTNVFSKKILAKRALREIKLLQHFRGHRNITCLYDMDIPRPDNFNETYLYEELMECDLAAIIRSGQPLTDAHFQSFIYQILCGLKYIHSANVLHRDLKPGNLLVNADCELKICDFGLARGFSIDPEENAGYMTEYVATRWYRAPEIMLSFQSYTKAIDVWSVGCILAELLGGRPFFKGRDYVDQLNQILHYLGTPNEETLSRIGSPRAQEYVRNLPFMPKIPFQRLFPSANPDALDLLDRMLAFDPSSRISVEEALEHPYLHIWHDASDEPTCPTTFDFHFEVVDDVQEMRRMIYEEVVRFRAAVRQQSQAQAAAAAQQQQIAQQTNVPIPENQQGVWKQEEPKPQEALAAGGGVHNDLESSLQRGMDVQ

SEQ ID NO: 7687 - protein, 373 aa, Oryza sativa (japonica cultivar-group)
MVGGGALRRVGKYEVGRTIGEGTFAKVKFAQNTESGESVAMKVVDRSSILKHKMADQIKREISIMKLVRHPNVVLASRKKIFIILEFITGGELFDKIIRHGRLNEADARRYFQQLIDGVDFCHSKGVYHRDLKPENLLLDSQGNLKISDFGLSAWPAQGGALLRTTCGTPNYVAPEVLSHKGYDGALADTWSCGVILYVLLAGYLPFDEVDLTTLYGKIESAEYSFPAWFPNGAKSLIHRILDPNPDKRIRIEEIRNDEWFKKNYEPTREIESEEVNLDDVNAAFDDPEEDADHTLDDEAGPLTLNAFDLIILSQGLNLAALFDRRQDYDKLQNRFLSRKPAKVIMSSMEVVAQSMGYKTHIRNYKTYRHEDL

SEQ ID NO: 7688 - protein, 365 aa, Cryptococcus neoformans var. neoformans JEC21
MADFVKLSIFGTVFEVTTRYVDLQPVGMGAFGLVCSAKDQLSGTSVAIKKIMKPFSTPVLSKRTYRELKLLKHLRHENIISLSDIFISPLEDIYFVTELLGTDLHRLLTSRPLEKQFIQYFLYQILRGLKYVHSAGVVHRDLKPSNILVNENCDLKICDFGLARIQDPQMTGYVSTRYYRAPEIMLTWQKYDVAVDIWSTGCIFAEMLEGKPLFPGKDHVNQFSIITELLGTPPDDVIQTIASENTLRFVQSLPKREKVPFSTKFPNADPVSLDLLEKMLVFDPRTRISAAEGLAHEYLAPYHDPTDEPVAAEVFDWSFNDADLPVDTWKVMMYSEILDFHNLGDISQNEAEGPVTGEVPAAPAS

SEQ ID NO: 7689 - protein, 274 aa, Bacillus clausii KSM-K16
MKMVTLNNGVNMPQLGFGVWQVPDEEATPAVAKALEVGYTSIDTAMIYKNEAGVGKAIKESGIDREKLFITTKVWNADQGYEQTLKAFDASLERLGLDYIDLYLIHWPTPHYDQYIETYKALEKLYNDGRVRAIGVCNFDIDHLERLLDECDITPVLNQVECHPYFAQNELKDFCAKHNIYVEAWSPLDQGGEVLTDEVVEKIAKAHNKTTAQVVLRWHLQNNTIVIPKSVTPSRIEENFDVFDFELSDEEMDAINRLDRNQRRGAKPSEMNTR

SEQ ID NO: 7690 - protein, 282 aa, Staphylococcus aureus subsp. aureus MRSA252
MNHIEISKDVKIPVLGFGVFQIPQEQTAEAVKEAIKAGYRHIDTAQSYLNETEVGQGIEASGIDRSELFITTKVWIENVNYEDTIKSIERSLQRLNLDYIDLVLIHQPYNDVYGSWRALEELKETGKIKAIGVSNFGVDRIVDLGIHNQIQPQVNQIEINPFHQQEEQVAALQQENVVVEAWAPFAEGKNQLFQNQLLQAIADKYNKSIAQVILRWLVERDIVVLAKSVNPERMAQNLDIFDFELTEEDKQQIATLEESNSQFFSHADPEMIKALTSRELDV

SEQ ID NO: 7691 - protein, 193 aa, Cephalotaxus fortunei
DDHGEVISEIVRSDLEPYLGLHYPATDIPQAARFLFMKNRVRMICDCGAPPVRVVEDKRLPREVSLCGSPLRAPHGCHTGYMTNMGSIASLVMAVVIDEKEEGGGDTNGQHEQKKGRRLWGLVVCHHTTPRFVQFPLRYACEFLMQVFGIQLNKEVDLAVQLREKHILRTQTMLCDMLLRDAPLGIIRQKPNI

SEQ ID NO: 7692 - protein, 181 aa, Chamaecyparis lawsoniana
DDHGEVVAEMRRPDLEPYLGLHYPAADIPQASRFLFLKNRVRMICDCRAPAVKVRHDESLGQVLSLQGSTLRAPFGCHAQYMANMGSIASLVMAVTVSDSEEGGRRLWGLVVCHHTTPRFVPYPLRYACEFLMQVFGIQLNKELELASRLRERHIFRTQTLLCDMLLRDTPVGIVTTTPNI

SEQ ID NO: 7693 - protein, 476 aa, Bacillus anthracis str. A2012
MQNKIIVMFQKDFRLYDNPALFEAAQSGEVVPVYVHDETFSMGSASKWWLHHAIIDVKKQLEALGSTLIIRKGSTQEEILSLVEQLGITAVYWNICYDPDRLQSNQKMKMMLEHKGMICKEFNSHLLLEPWVIKKKDNTEYKVFTPFYNAFQKQVIHKPISKVQSIKGGNSLPVSLSVSELHLLPTIPWTSHMESIWEPTEEGAYKTWKEFFSSKLASYSEGRDFPNQNAHSMLAPYLSFGQISVKLIYHYLINKSTESQCSLFEKQVNSFIRQLIWREFSYYLLYHYPFTAYKPLNKSFEHFPWNNEEELLRVWQKGDTGYPFIDAGMRELWQTGFMHNRTRMAVASFLVKHLLIPWQEGAKWFMDTLLDADIANNTMGWQWVAGSGADASPYFRIFNPITQGEKFDKNGEYIRKWVPELKDMPNKYIHKPWEAPEHILQKANIQLGHTYPLPVVDHKAARERALCAYKSMKEFV

SEQ ID NO: 7694 - protein, 683 aa, Photorhabdus luminescens subsp. laumondii TTO1
MNKFVRLAFVLGVSIFGTCYANTNSPVAVPVGIEQLPILKQEPQHSTVSERVTSRFTRSHYRQFDLNGDFSAKIFDRYLNILDYSHNILLASDVAQYADKKKLLGKELENGNLEIPYDLFNLLQKRRFERYQYALSRLEQPMSFDGNDTIDVDRSKAPWPQSVEELNKLWDAKVKYDWLNLKLSGKEDNKIKEMLTKRYQSALKRLTQSQSEDVFQLIMTAFAREIDPHTNYLSPRNTEQFNSEMSLSLEGIGAVLQIDDDYTVINSLVAGGPAAKSKALNVGDKIIGVAQSGKSMVDIIGWRLDDVVALIKGPKGSKVRLEVVSDTKGAKPRTVILTREQIRLEDRAVKMSVKTIGQEKVGVLDIPGFYVGLTDNVKTQLQKLTKQHVSAIVIDLRSNGGGALTEAVSLSGLFLPSGPVVQVRDNNGKVRQDSDTDEVVYYKGPLVVLVDHFSASASEIFAAAMQDYGRALIVGEPTFGKGTVQQYRSLSRIYDQMMRPDWPSLGSVQYTIQKFYRVDGGSTQRKGVTPDIVMPTGVDPAETGESFEDNALPWDSIPPARYTGSKVIAALVPQLNVVHNIRITTDPEFKYINEDIAHYKALKEHKNIVSLNYAQREKENKEADALKLNRINDRFKREGKKPLTSLDDLPKDYQGPDPYLDESVKIALDLAHQPAEKMLAKSK

SEQ ID NO: 7695 - protein, 184 aa, Idiomarina loihiensis L2TR
MSRHFDEAKGLSEQHDPATHDFVFNQTMFRIKDPERTLKFYSEVLGMTLVKRFDFPEMEFTLYFMAAMSPEQRKGWSTDHDKRIEQTFGRPAMLELTHNWGDENDDSVSYHSGNEEPKGFGHIGFAVPDIDAACERFEKMGVEFQKRPNDGKMKGIAFIKDSDGYWIEIFTPDRQPELLKEHLK

SEQ ID NO: 7696 - protein, 157 aa, Triticum aestivum
  misc_feature (85)..(85): Xaa can be any naturally occurring amino acid
  misc_feature (119)..(119): Xaa can be any naturally occurring amino acid
  misc_feature (124)..(124): Xaa can be any naturally occurring amino acid
  misc_feature (127)..(127): Xaa can be any naturally occurring amino acid
  misc_feature (132)..(133): Xaa can be any naturally occurring amino acid
  misc_feature (151)..(153): Xaa can be any naturally occurring amino acid
  misc_feature (155)..(155): Xaa can be any naturally occurring amino acid
HIETYDVTTIRASTPMFLMSRKIKSLGVKMVLSGEGSDEIFGGYLYFHKAPNKKEFHEETCRKIKALHLYDCLRANKATSAWGLXEARVPFLRQKLHQMYNGPGFRNPKMIRRDLGRIXKWVCXKAXDDDEXXYLPKHIFTGKKTFNHGVXXXWXDG

SEQ ID NO: 7697 - protein, 769 aa, Xanthomonas campestris pv. vesicatoria str. 85-10
MRERAAGLRAWSILAVLAALAAALGAGLQWSSLQGPWRAVSAVSAVLAVVCGLCAALAAHRAAQAQHALAQRLEEADLARERLQQELRRHGELEQELLRAKQAAEAATLAKGEFLATMSHEIRTPLNGIIPMLELISSGQLSVDQRDMLQTATGSSLQLLRIVDDILDYSKLEANKLELEITTFNLRELLDGVIQLLQRTAEGRQLRLSLDIEPSVRLLVRGDPIRLRQVLGNLIGNAIKFTERGSVDIQLRRLGETRAQHLLRFQVRDTGIGIAPDQQARLFRSFAQADASTTRLYGGTGLGLAICKRIIDLMGGRIGVESEPGRGSTFWFEIPLLKVIGDLQQATGADAARVMVISSDARLSQRLKRLLDSWGVSHVLMETTQEALERVRRHNDSEGFRCVIADHDTLRYSARAVHRALARPENANSARLIWLYGEEPVPAELQDHATLVPRQSPDETLRALVLPPEPKPAHVTTLASAMIPEPLPPPMANAREVRILLVEDNPVNLLVAQKLLAVLGFEADTATDGEAALASMESTRYDMVFMDCQMPVLDGYAATRRWRAMETESGGRPIPIVAMTANAMAGDRERCLAAGMDDYLSKPVAREQLDACLQRWLPRQALLPGPSSAGQATHDPESASAAAQARALPILDNNVIDELYEVAGADTITILQLFLEDAPLIIEQLEAAAANRDSMQLRDLAHTLKSSSANVGAQAVSNAARRIELAARTGTIERPSVMVALVIAEYARARLALLGQVARLQAAASTTNQ

SEQ ID NO: 7698 - protein, 426 aa, Hordeum vulgare
SKANRFTVMAAENIDEKRNTDKWKGLATDISDDQQDITRGKGIVDSLFQAPTGDGTHEAVLSSYEYVSQGLRKYDFDNTMGGFYIAPAFMDKLVVHLSKNFMTLPNIKIPLILGIWGGKGQGKSFQCELVFAKMGINPIMMSAGELESGNAGEPAKLIRQRYREAADMIKKGKMCCLFINDLDAGAGRMGGTTQYTVNNQMVNATLMNIADAPTNVQLPGMYNKRENPRVPIVVTGNDFSTLYAPLIRDGRMEKFYWAPTRDDRIGVCKGIFQTDNVCDESVVKIVDTFPGQSIDFFGALRARVYDDEVRKWVGSTGIENIGKRLVNSRDGPVTFEQPKMTVEKLLEYGHMLVQEQDNVKRVQLADTYMSQAALGDANQDAMKTGSFYGKGAQQGTLPVPEGCTDQNAKNYDPTARSDDGSCLYTF

SEQ ID NO: 7699 - protein, 671 aa, Parachlamydia sp. UWE25
MNKNWLKIWFVTLMTILVSLEAREQDLLKSSDIDRIMSQILSQHVDKRTMTSKILNSSIAIFINQFDPERIYLLESEIAPYAHLTQKQLDELVEQYKQNNFEFFEQINKVFQNAIERSKKLRHEIEIKDKEALFQTTRPSVQRIEERSFAKDEKELKKRLLENLENFISLYKSRHGELSTSSKKEFVLKTYENHLTEFENQYLYQDDQGKPLSYAQQDNLLTIHILKALASSLDSHTTFYQTHEAYDMKVRLQKEFQGIGLVLRDQGDKIIVSRMLEGGPAAKSGVIQAGDILLGVDGIPTEKLSFDKVMEMLHESKQAQVELSFKRKKKDEIEDKIFKVELQKEEIVLNNNRVDVSEETFGNGIIGKITLHSFYQGNGISSEKDVRDAIIELEKKGNLRGLILDLRENSGGFLSQAVKVAGLFITNGVIVISKYSTGEERFYRDVDGKIAYDGPLVVLISKATASAAEIVAQALQDYGVAIVVGDEHTYGKGTIQTQTVTDDQSTSYFKVTVGKYYTVSGKTPQKNGVKADVIAPGPWSLKNIGEVDSSSLTSDFISDAYEDNLSDIAPDVKSWYLKYYVPTIQKRTDQWKDLIPTLRKNSEYRLAHNKNYQLFLKGKALDLENEEQDEESEWLSTGKKAKNFGVDDLQMQEAVNVIKDMIVLYSIEKKK

SEQ ID NO: 7700 - protein, 412 aa, Brassica napus
  misc_feature (216)..(216): Xaa can be any naturally occurring amino acid
MSSSDNLTDKTAVFRKLKSKSDNKVCFDCSAKDPTWASVTYGIFLCIDCSATHRSLGVHISFVRSTNLDSWSPEQLRTMMFGGNNRAQVFFKQHGWTDGGKIEAKYTSRGAARPRQLLAKEVAKAIAEDAAIALPSSPLAAEGSNGVSSFSVKEELPPKESFTVKQEATSSPKASNTVVPSTFKKPIGAKRTGKTGGLGARKLTTKPTGNLYEQKXPEEVAPVIPAATSTNNGGSKSSGGSSSYAASRFEYNDDFQSGGKSIGGTQVLNHVAPPKSSSSFSDFGMDSYVPKKSSSNSSKAQVEESDEARKKFTNAKSISSAQYFGDQNKNADLESKATLQKFSGSASISSADFFGHDQDDSNDDITASDLINRLSFQAQQDISSIVNIAGETKKKLGTLASGIFSDLQDRML

SEQ ID NO: 7701 - protein, 415 aa, Arabidopsis thaliana
MSKAWKLKLLLLLQLLLLSQHDVDSASVISYLPGFEGLLPFHLETGYIGVGEGEKVQLFYYFIKSENNPEEDPLIIWLTGGPACTALSALAFEIGPLTFKTEGYNGGLPSLVSTSYSWTKVASIIFLDQPVGTGYSYSTTPLSYKPSDTGEAKQTYEFLQKWLVENPQFVSNPIYVGGDSYAGIVVPAIVQQISIGNEHGYKPQINLKGYILGNPSTDLDSDHNSKIPYAHRMGLISDELYESLKRTCQGNYVKVDPTNTKCLKLMEDYGKMYRYLLASHWANDEDVRRELHVVKGSIGKWMRCNWDLPYEKDIKSSVPYHRNNSIIGDYRSLVYSSDHDMMVPYIGTEAWIKSLNYSITDDWRPWFVNNQVIGYTRTYANNMTFATIKGGGHTAEYKPEESFMMFQRWISGRPL

SEQ ID NO: 7702 - protein, 284 aa, Streptococcus agalactiae 2603V/R
MTDTMILNDNHKIPTLGLGTWMIDNDRVAQVVKDAIELGYRHIDTAQAYNNEKGVGVGIKESGITRESLFVTTKIAAEHKDYESATKSIDQSLEALGLDYIDLMIIHSPQPWKEWRETDKHFDQGNLEAWRALEDAQKSGKMKSIGVSNFLEKDLENILKNGHVKPAVNQILAHIGNTPFDLIDYCQSKGIQVEAYSPIAHGQALKSDGIQKMAEKYGVSVAQLCIQYLLQLNLIVLPKASSKEHLQSNLDFDFVISDEDMSILKSLMFDDYGEFSNFPVFSGK

SEQ ID NO: 7703 - protein, 461 aa, Oryza sativa (japonica cultivar-group)
MVNGEAEAECTRASLLGRYEIGRTLGEGNFGKVKYARHLATGAHFAIKILDRNKILSLRFDDQIRREIGTLKLLKHPNVVRLHEVAASKTKIYMVLEYVNGGELFDKIAVKGKLSEHEGRRLFQQLIDAVSYCHDKGVYHRDLKPENVLVDRRGNIKISDFGLSALPQHLGNDGLLHTTCGSPNYIAPEVLQNRGYDGSLSDIWSCGVILYVMLVGYLPFDDRNLVVLYQKIFKGDTQIPKWLSPSARDLLRRILEPNPMKRINIAGIKEHEWFQKDYTPVVPYDDDDDNYLDSVLPIKEQIDEAKQEKPTHINAFQLIGMASALDLSGFFEEEDASQRKIRFTSTHSPKDLFDKIENVVTEMGFQVQRGNSKLKVMKNGRGSKNLRNPSSFLVCTEVVELGPSLYVVELKKSHGDPILYRQLCERLSDELGVCKTEQIQRTESLEDDLESFDSGSSLPGF

SEQ ID NO: 7704 - protein, 166 aa, Oryza sativa (japonica cultivar-group); identical to SEQ ID NO: 138

SEQ ID NO: 7705 - protein, 404 aa, Oryza sativa
MEGKGVLEGRYEMGRVLGHGNFGRVHAARDVRTGRAVAMKVVSKDKVERAGMAEQIKREIAVMKMVSHPSVVELHEVMATRTKVYLALELVRGGELFDRIARHGRVGEGVARRYFRQLVSAVDFCHGRGVYHRDLKPENLLLDEAGNLKVADFGLSALACHARPDGLLHTACGTPAYVAPEVLAGNGYDGAKADLWSCGVILYVLLAGALPFQDDNLVCMYRKMRRGDFCCPPWVTTDARKLIKSLLDPNPGTRITVAGLLETPWFRKTAPVPRPIIADPAAAPVDTRGNAGDDKDEPPEVLNAFHLISLSEGFDLSPLFEHDPAASPGRATARAGGTRFATREAASGVVARLEALAMGGARVAPSLLMVDVKKDGGDAMEYRPFFSEELRPALKDIVWSPAAT

SEQ ID NO: 7706 - protein, 461 aa, Oryza sativa
MVNGEAEAECTRASLLGRYEIGRTLGEGNFGKVKYARHLATGAHFAIKILDRNKILSLRFDDQIRREIGTLKLLKHPNVVRLHEVAASKTKIYMVLEYVNGGELFDKIAVKGKLSEHEGRRLFQQLIDAVSYCHDKGVYHRDLKPENVLVDRRGKYQISDFGLSALPSHLGNDGMLHTTCGSPNYIAPEVLQNRGYDGSLSDIWSCGVILYVMLVGYLPFDDRNLVVLYQKIFKGDTQIPKWLSPSARDLLRRILEPNPMKRINIAGIKEHEWFQKDYTPVVPYDDDDDNYLDSVLPIKEQIDEAKQEKPTHINAFQLIGMASALDLSGFFEEEDASQRKIRFTSTHSPKDLFDKIENVVTEMGFQVQRGNSKLKVMKNGRGSKNLRNPSSFLVCTEVVELGPSLYVVELKKSHGDPILYRQLCERLSDELGVCKTEQIQRTESLEDDLESFDSGSSLPGF

SEQ ID NO: 7707 - protein, 130 aa, Zea mays
GDADYLRYHGMQEFDQAMQHLEQKYEFMTSDHQYISRKHEEDKVIVFEKGDLVFVFNFHCNNSYFDYRIGCRKPGVYKVVLDSDAGLFGGFSRIHHAAEHFTADCSHDNRPYSFSVYTPSRTCVVYAPVE

SEQ ID NO: 7708 - protein, 190 aa, Blechnum spicant
DEHGEVVAEIRKSDLEPYLGLHYPATDIPQASRFLFMKNRVRMISDCLAIPVKVIQDRELRQPLSLAGSTLRAPHGCHSQYMANMGSAASLVMAVTVNDNEEASSSRNHQPKQRKLWGLVVCHHTTPRAVSFPLRSACEFLMQVFGLQLNMEVELAAQMREKHILRTQTLLCDMLLRDAPIGIVSESPNI

SEQ ID NO: 7709 - protein, 459 aa, Zea mays
MEKKPTILMNRYELGRTLGQGTFAKVYHGRNLASGESVAIKVIDKEKVMRVGMIDQIKREISVMRLVRHPNVVQLHEVMASKSKIYFAMEYVRGGELFARVARGRLKEDAARRYFHQLVGAVDFCHSRGVYHRDLKPENLLVDEHGNLKVSDFGLSALRECQKQDGLLHTTCGTPAYVAPEIINKKGYDGAKADIWSCGVILFVLLAGYLPFHDANLVEMYRKISRADVKYPQWFSPELRRLMPKLLEPNPNNRITIEKLVEHPWFKKGYRPAVMLAQPHGSSSLKDVQVAFSNADHKDSSSKVEQPADSSLKPASLNAFDIISHSRGFDLSSLFEVDQEQKASNSRFMTQKPASAIVSKLEQIAETERFMVKKQDGLVKLQGSKQGRKGQLAIDAEIFEVTPAFHVVEVKKSAGDTLEYEMFCSKGLRPSLSDICWSSRSEENMAPSVVQPSQLEPSS

SEQ ID NO: 7710 - protein, 188 aa, Blechnum spicant
DEHGEVVAEIRRADLEPYMGLHYPATDYPQAARFVFMKNRVRMICDCTLPPVKISQDKNLAQPLSLTGSTLRAPHGCHAQYMSNMGSIASLVMAVIVNDSDVDSAGHTSQGIKLWGLVVCHHTSPRYVPFPVRSACEFLMQVFSLQLNMEVGMAAQVREKHILRTQTLLCDMLLRDAPIGIVSQSPSI

SEQ ID NO: 7711 - protein, 548 aa, Rhodospirillum rubrum
MAAKDVKFSTDARDRLLRGVDILANAVKVTLGPKGRNVVLDKSYGAPRITKDGVSVAKEIELKDKFENMGAQMVKEVASKSADVAGDGTTTATVLAQAIVREGVKSVAAGMNPMDLKRGIDLAVLAVVEDVKKRSKKIKTSAEVAQVGTISANGDEEVGKIIATAMEKVGNEGVITVEEAKGLDTELDVVEGMQFDRGYLSPYFVTNAEKMVADLENPYILLHEKKLSGLQALLPVLEAVVQSSRPLLIIAEDVEGEALATLVVNKLRGGLKVAAVKAPGFGDRRKAMLEDIAILTGGQVISEDLGIKLENVTIDMLGTAKKVTITKEETTLVDGAGDKKDIEARCSQIRANIEDTSSDYDREKLQERLAKLAGGVAVIKVGGATETEVKEKKDRVDDAMHATRAAVEEGVVAGGGVALLHAIRSLDSVKGANPDQNVGIEIVRRALQAPVRQIAENAGVDGAVVAGKLLENSDTDFGYNAQTGIYENLVTAGVIDPTKVVRAALQGAASIAGLLITTEAMVAEIPEKKDAMPSPDMGGMGGMGGMGF

SEQ ID NO: 7712 - protein, 462 aa, Halobacterium sp. NRC-1
MHLYWHQRDLRVPDNRGLHAATDGDTVVPVYVFDDTVLSQVGRPKRAFLAAGVRALRAAYRERGSDLLVREGDAESVLPALADEFDADTVFHAAHYDAARRNRRTRVADALAAAGVDTAGHVDHTLVDPATLDDAYPSHSQFYDDWQQAPKPDPVPAPDADALADVHDDHTLSVPAPEPPLPDAGHAAATDRLAAFLDDGIASYNDTRDDLAAAVDAPASAVSRLSPYLAAGNIGVREVWAAVADAYDDATGNAARNIGKYRYELSWREQNYHLLYHTPRLQTENYVSFDAPIAWQNSDDHFEAWTRGETGYPLVDAGMRQLRAEGYVHNRPRQVVASFLTKHLLVDWRRGERHFADRLVDYDPANNAANWQWTASTGTDTVAVRIFDPVSQMAKYDSDAAFVTEYVPELRGVDPETIVDWPTLRHSQRERLAPDYHHPIVDRDHAYERAQRVFEAALDGDA

SEQ ID NO: 7713 - protein, 190 aa, Botrychium lunaria
DEHGEVVSEIRQPDLEPYLGVHYPATDIPQASRFLFMKNKVRMICDCRAPPVRVIQDKESRRPISLAGSTIRAPHDCHAQYMENMGSIASLVMAVVVNENDEQPSNQSYRRKNRKLWGLIVCHHTTSRAVPFSLRSACEFLMQVFGLQLNIEVELAGQMREKHILRTQTLLCDMLLRDAPLGIVTQIPNI

SEQ ID NO: 7714 - protein, 279 aa, Klebsiella pneumoniae
MTTDSILLNDGYYMPRPGCGLWLIDNRDVDSLIRQALKAGFRHFDTAQAYFNEDGVGRALRYTEVPREQLFITSKIRGRDMGYARTLVSFNETLERLGVEYLELFLIHWPIPAKNLYVETWEASIELEASGLIRSIGVSNFTCQHIERLIEDTGVVPAVNQLELHPHFQQCDVRDYHHEAGIAIQSYSPFGSNGAAVLRNAVVMVLARRHDHSPAQIVLRWHLQQGLTPLPRTTNGARFSENVDVWDFELSEEEMKLLASLNTRTGNTQPLPDAMNMSF

SEQ ID NO: 7715 - protein, 233 aa, Glycine max
MALETLNSPTTTAPSFPFDDPTIPWAKRKRSKRCSRDHPSEEEYLALCLIMLARGGTTRRVSTPPPQPTPDPSTKLSYKCSVCNKSFPSYQALGGHKASHRKLAASGGEDQPTTTSSAASSANTASGGRTHECSICHKSFPTGQALGGHKRCHYEGNSNGNNNNSNSSVTAASEGVGSTHTVSHGHHRDFDLNIPAFPDFSTKVGEDEVESPHPVMKKPRPFVIPKIEIPQYQ

SEQ ID NO: 7716 - protein, 228 aa, Hyacinthus orientalis
MGRGKIEIKRIENTTSRQVTFCKRRNGLLKKAYELSVLCDAEVALIVFSTRGRLYEYSNSNSVKTTIERYKKACTDTTNTGTVSEANSQYYQQEATKLRQQITNLQNTNRTLMGESLSTMSLRELKQLEGRLERGINKIRTKKNELLSAEIEYMQKREAEMHNDNMYLRNKIAENERAQQQMNMLPSTATEYEGIPQFDSRNFLQVSLMEPNNHHYSRQQQQTALQLG

SEQ ID NO: 7717 - protein, 518 aa, Dianthus caryophyllus
MGSYKGVYDREILSKIATNDGHGENLEYFDGWKAYDRDPYHSTKNSNGVIQMGLAENQLCFDLVTEWLLKNPQASICTNEGVNKFMDIAIFQDYHGLPEFRSAVAKFMGKARDEKVIFNPDRIVMSGGATGASETLLFCLANPGDAFLIPSPYYPAFNRDLRWRTGVNLIPFTCSSSNNFKITKEALQSAYEDALKKNIKVKGIIVTNPSNPLGTVLDKDTLKMLLTFVNAKNIHLVCDEIYATTVFNSPSFISVAEVIKDMPHVNQDLVHILYSLSKDMGMPGFRVGIIYSYNDRVVSTARRMSSFGLVSSQTQFMIAALLSDDDFVRRFLVESRDRLFRRHQHFTSELAKIGIGCLQGNAALFVWMDLRHLLDEATVEGELKLWRVIINEVKINVSPGSSFLCSEPGWFRVCFANMDNATLDVALNRIRSFVTRGRVDNSTMTTTSARAAATTTTTTTTTTTTTTTTTTIKKKRGQMELRLSFNNRRFEDGLMSPHSSLLSPHSPMPQSPLVKART

SEQ ID NO: 7718 - protein, 457 aa, Staphylococcus aureus subsp. aureus COL
MAIAVLLNRMFRMEHNPLFEYIYQQKEDIDACYFIIPEEDMSSASDLKAQFYRGTLQRFYQSLHAEKLTPYVMSYDDIISFCKENNISEVVTAGDIMSYHLEEYDILHQRSLFNEARIAVTLIRGNHYFKASKTMNQQGEPYNVFTSFYKKWRPYLRHRDVYHYDLKSFEDFVIASPDDLVFDDIAFGSSQIIEQNKWQHFLDQDIQNYESGRDYLPEVLTSQLSVALAYGLLDIIEIFNDLLARYDEDEANYEAFIRELIFREFYYVLMTQYPETSYQAFKPKYRQIKWSQNEADFNAWCEGQTGFPIIDAAIMELTQTGFMHNRMRMVVSQFLTKDLFIDWTWGEKFFRKHLIDYDAASNIHGWQWSASTGTDAVPYFRMFNPIRQSERFDAKALYIKTYLPIFNQIDAKYLHDTQRNESNLFEQGIELGSHYPRQMVDHQEKRTQVLATFKALD

SEQ ID NO: 7719 - protein, 161 aa, Pseudotsuga menziesii
MSIIPSFFGRRSSSAFDPFSLDVWDPFRAFTDLSGGGPSGQFVNEASAVANTQIDWKETPEAHIFKADLPGLKKEEVKIELEEGQRILQISGERSKEEEQKNDKWHRIERSRGKFLRRFRLPDNAKVEEIKAAMENGVLTVTVPKQPEPQPPQPKSIEISG

SEQ ID NO: 7720 - protein, 704 aa, Pseudomonas syringae pv. syringae B728a
MRYQLSSRRISMKQLFPSTALALFVGLSVLPMSASTFAANSWDNLQPDRDEVIASLNVVELLKRHHYSKPPLDDKRSAIIYQSYIKQLDPSRSYFMASDIAEFDKWQFQFDDFLKSGDLNAGFIIYKRYLDRVNARLNFALGELGKGVDKLDFNTKETLLVDRKDAAWPKDTAELDELWRKRIKDEVLRLKIAGKDPAKIQETLTKRYKNQQARLNQTRAEDIFQAYINTFAMSYDPHTNYLSPDSAENFDINMSLSLEGIGAVLQSDNDNVKIVRLVPAGPAAKTKQVAPADKIVAVAQGDKEMVDVIGWRLDEVVKLIRGPKGSVVRLEIIPASNAPNDQTTKIVAITREAVKLEEQAAKKSILHLKQDGKDYKLGVIDIPAFYLDFKAYRAGDPEYKSTTRDVKKLLTELQAEKVDGVVLDLRNNGGGSLQEATELTSLFIDKGPTVLVRNADGKVDVLEDEAKGAFYKGPMALLVNRLSASASEIFAGAMQDYHRALVIGGQTFGKGTVQTIQPLNHGELKLTLAKFYRVSGQSTQHQGVVPDITYPSLIDTKEIGESALPEAMPWDSIKPAIKPAIDPFRPFLAQLQARHEARSAKDAEFVFIEDRLALAKKLMNEKTVSLNEADRRAEHASIESKQLALENTRRKAKGEEPLKELKKEDEDALPVEDEKTKPEDDAYLAETGRILIDYLGLSAAVAKK

SEQ ID NO: 7721 - protein, 192 aa, Ephedra major
DDHGEVISEIRRSDLEPYLGLHYPATDVPQASRFLFMKNRVRMICDCYSPPVRVIQDKRLKKELSFCGSTLRAPHGCHAQYMANMGSVASLVMAVIVNEKEDEEAENEGQSQQKGRKLWGLVVCHHTGPRFVPFPLRYACEFMMQVFSIQLNKEVELACQMREKQILRTQTLLCDMLLRDTPLGIISQKPSI

SEQ ID NO: 7722 - protein, 161 aa, Pseudotsuga menziesii
MSIIPSFFGRRSSSAFDPFSLDVWDPFRAFTDLAAGGPSGQFVNEASAIANTQIDWKETPEAHIFKADLPGLKKEEVKIELEEGQRILQISGERSKEEEQKNNKWHRIERSRGKFLRRFRLPDNAKVEEIKAAMENGVLTVTVPKQPEPQPPQPKSIEISG

SEQ ID NO: 7723 - protein, 630 aa, Candida glabrata CBS138
MDYEVNANQIPVLGIEQGLIPDNLDGSVKADTATSTAMNMNDKSEISNDGSHSIHTSNPNNNGENGKNGGKPASNDFVRKLFNILESNQYSNIVRWSNTGDSFVVLDTGKFTTQILPNHFKHSNFASFVRQLNKYDFHKIKRTNEERQKSIYGEQSWEFENPNFKINDEKSLDLIKRKTPAQRKVMLEDASAPSQKTPELLSVQSENKLKSALLSNTVKKDIFNNLRKRVDKMQKDMDTVMMDNYNLKSDYQKLATKYNTLLDSLITFRTVNENLINNFNALCNVLSSKGVELPSSVYENMNINIPVPSGQSPVNISPSPSLGIPIKNSTMSPSLPSMKSLQNTPSLTGKLSTNQRLDLPPNSQGILSDTNVGQTESPEIQMPISSNSSSTTKEVDQNIVLRKGFHVLLVEDDSVSIQLCSKFLRKYGCTVQVVTDGLSAISNLEKFRYDLVLMDIVMPNLDGATATSIVRSFDNQTPIIAMTGNIEDQDLITYLQHGMNDILAKPFTRNDLHSILIRHLKDRIPLCDQNRGSGITSESPNLPPTQHIISSQQNNEQNSSLPQSLPPIHPPNHQSPLFNNRASNITPLAPLNSAMSPQSPSHLERPLTNRSPLGMTPLNDGQPAFKKQHT

SEQ ID NO: 7724 - protein, 227 aa, Paulownia kawakamii
MAREKIQIKKIDNATARQVTFSKRRRGIFKKAEELSVLCDADVGLIIFSSTGKLFEYASSSMKEILGRHNLHSKNLDKLEQPSLELQLVEDSNYSRLSKEVAERSHQLRRMRGEELQGLSIEKLQHLKKSLESGLSRVIEKKGEKIMKGDQSTSRKGKQLMEENERLRQQVADISNDCKNNAASDSENIVYDEGQSSESVNACNSVGPPQDYDSSDTSLKLGLPYSG

SEQ ID NO: 7725 - protein, 534 aa, Oryza sativa
MGNSCQNGTYGNNYQNSNRFQNDRFASRYVDGNDTEDCYSGSSRASLAGALRQGLNLKSPVLGYKTPNVRELYTLGRELGQGQFGKTYLCTEISTGCQYACKTILKSNLRCVSDIEDVRREIQIMHHLSGQKNIVTIKDTYEDEQAVHIVMELCAGGELFSKIQKRGHYSERKAAELIKIIVGIIETCHSHGVMHRDLKPENFLLLDADDEFSVKAIDFGLSVFFRPGQVFREVVGSPYYIAPEVLEKRYGPEADIWTAGVILYVLLTGVPPFWADTQSGIYEKVLDGRIDFKSNRWPRISDSAKDLIKKMLCPYPSERLKAHEVLKHPWICDNGVATNRALDPSVLPRLKQFSAMNRLKKLSLQIIAERLSEEEIVGLREMFKAMDTKNRSVVTFGELKGLKRYSSVFKDTEINDLMEAADDTTSTINWEEFIAAAVSLNKIEREKHLMAAFTYFDKDGSGFITVDKLQKACMERNMEDTFLEEMILEVDQNNDGQIDYAEFVTMMQSNNFGLGWQTVESSLNVALREAPQVY

SEQ ID NO: 7726 - protein, 578 aa, Hordeum vulgare subsp. vulgare
MGGGNGIVDGFRRLFHRRTPSGSVLGSSNQSSAGEDSSELEAVEDLDLVGLRPIRVPKRKMPLPVESHKKNIMEKEFFTEYGEASQYQIQEVVGKGSYGVVAAAIDTRTGERVAIKKINDVFEHVSDATRILREVKLLRLLRHPDVVEIKHIMLPPSRREFQDIYVVFELMESDLHQVIRANDDLTAEHYQFFLYQLLRALKYIHGANVFHRDLKPKNILANADCKLKICDFGLARVSFNDAPSAIFWTDYVATRWYRAPELCGSFFSKYTPAIEIWSIGCIFAELLTGRPLFPGKNVVHQLDIITDLLGTPSSETLSRIRNEKARRYLRYMRKKHPVPLTQKFPNADPLAVRLLGRLLAFDPKDRPSAEEALADPYFASLANVEREPSRHPISKLEFEFERRKVTKDDVRELIYREILEYRPQMLEEYMKGGDQISFLYPSGVDRFKRQFAHLEEHYSKGERGSPLQRKHASLPRQRVGASNDSNNEQHISDQEMSAEPDAHGAVSPQKPQDAPGVGQNGLSPTSLSSRTYLKSASISASKCVVVNPNKQPEYDDAISEETEGAVDGLSEKVSKMHA

SEQ ID NO: 7727 - protein, 344 aa, Cicer arietinum
GFREFKDDSDFDEDEEDDDDDEGLLVGGKGFTFSSNNTKSFKTFSRGSTAAKSVSPKSNEQAEKACKRKRKNQYRGIRQRPWGKWAAEIRDPRKGVRVWLGTFNTAEEAARAYDAEARRIRGKKAKVNFPEEAPVTSSKRFKPNLENKLVNKNLNSFNPNGNKMFNFGENVENYYSPMDQVEQKPLVNNNNQYANMGPFSGNGVQHSQISPSADVTAYFSSEHSSNSFDYSDLGWGEQGPKTPEISSMLSAAAPLESESQYVQNNMQSNNNQNMLPVEDNSAKTLSEELADIESQLKFFETPYDDNWGDASLASFLGGDATQDGGNPMNLWSFDDLPSISGGVF

SEQ ID NO: 7728 - protein, 448 aa, Magnetospirillum magnetotacticum MS-1
MGAGKKRISLRPDFVWGVSTSAFQVEGATKEDGRGPSIWDTRCRLAGGVWTGANADVACDHYHRWPEDVRLIKDLGVDAYRFSIAWPRLLPKGKGAVNQKGLDFYDRLIDGVLEAGITPWVCLYHWDLPQALDDLGGWTNRDCAGWFADYAVLAAKRYGDRVKHFATFNEFSVFTMFGYAIDWAAPGVTDRAAHMKAIHHVNLAHGMGVDVLRDHVPGVSIGAIHNRQIVRPEGGLAENQAAADLLDAHWNGVFCDPQHLGHYPEIMARDVEPYVQAGDLARICRPTDWMGLNHYGPIYAKADPATTWGYGWGAPPESANHPEVGWPIFPEVFKDELLTLTRRYGLPIYVTENGCGGGAGSDTPDENGEVKDTHRLAYFREYQQAMLDAVAEGADLRGYFVWALLDNFEWGSGYGPRFGLYHVDFETQKRTLKNSGKWYRDMIKGHRT

SEQ ID NO: 7729 - protein, 290 aa, Helicobacter pylori J99
MDYKRFKGKHANIVIEIISLLEKGVKKAQEILEKPDAGSYTQLENSSGDTPIKADLALDKFLEETFLSLENVKSVFSEEKETPVTKENGSYLIAYDPLDGSSVMEANFLVGTIIGVYEKDYKAQNLVASLYVVFGHKIELVVALEEVYRYAFYQNKFHFIETIVLENKGKIIASGGNQKDFSLGLKKALEGFFAENYRLRYSGSMVADVHHVLVKKGGMFSYPQKKLRKLFEVFPLALMVEKAKGEAFYFDKGVKKRLLDQSVESYHEKSECYLASPHEAQILEKHLKGE

SEQ ID NO: 7730 - protein, 769 aa, Xanthomonas axonopodis pv. citri str. 306
MRERAAGLRAWSILAVLAALAAALGAGLQWSSLQGPWRAVSAVSAALAVVCGLCAAFAAHRAAHAQHALAQRLEEADLARERLQQELRRHGELEQELLRAKQAAEAATLAKGEFLATMSHEIRTPLNGIIPMLELISSGQLSLDQRDMLQTATGSSLQLLRIVDDILDYSKLEANKLELEITTFNLRELLDGVIQLLQRTAEGRQLRLSLDIEPSVRLLVRGDPIRLRQVLGNLIGNAIKFTERGSVDIQLRRLGETRAQHLLRFQVRDTGIGIAPDQQARLFRSFAQADASTTRLYGGTGLGLAICKRIIDLMGGRIGVESEPGRGSTFWFEIPLLKVIGDLQQATGADAARVMVISSDARLSQRLKRLLDSWGVSHVLMETTQEALERVRRHSDGEGFRCVIADHDTLRYSARAVHRALARPENASSARLIWLYGEEPVPAELQDHATLVPRLSPDETLRALVLPPEPKPAHATTLASAMIPEPLPPPMANAREVRILLVEDNPVNLLVAQKLLAVLGFEADTATDGEAALARMESTRYDMVFMDCQMPVLDGYAATRRWRAMETESGGRPVPIVAMTANAMAGDRERCLAAGMDDYLSKPVAREQLDACLQRWLPRQALLPGPSPAGQATHDPESASAAAQARALPILDNSVIDELYEVAGADTITILQLFLEDAPLIIEQLEAAAANRDSMQLRDLSHTLKSSSANVGAQAVSNAARRIELAARTGTIERPSVMVALVIAEYARARLALLGQVARLQADASTTNH

SEQ ID NO: 7731 - protein, 686 aa, Aspergillus nidulans FGSC A4
MTSTAPSDGTGIIDLDPWLEPFREAIKRRFDYVESWIKTVDEVEGGLDKFSKGYEKFGFNVSETGDITYREWAPNAIEAALVGDFNNWDTKANPMTRDNFGVWEIALPAKNGTPVIPHDSKVKITMVTRSGERIYRIPAWIKRVVQDLNVSPIYESVFWNPPKAERYNFQHARPKKPESLRIYEAHVGISSPDTRVATYKEFTANMLPRIKYLGYNAIQLMAIMEHAYYASFGYQVNNFFAASSRYGKPEDLKELVDTAHSMGLVVLLDVVHSHASKNVDDGLNMFDGSDHLYFHSGSKGQHELWDSRLFNYGNHEVLRFLLSNLRFWMEEYGFDGFRFDGVTSMLYTHHGIGTVSGFSGGYHEYFGPAVDDDGVMYLALANEMLHRLYPDCITVAEDVSGMPALCLPHGLGGVGFDYRLAMAIPDMYIKLLKEKSDNDWDIGNLAFTLTNRRHGEKTIAYAESHDQALVGDKSLMMWLCDKEMYTHMSVLTEFTPVIERGMALHKMIRLVTHALGGEGYLNFEGNEFGHPEWLDFPRAGNNNSFWYARRQLNLTEDHLLRYRFLNEFDRAMQLTESKYGWLHAPQAYISLKHEGDKVLVFERADLLWIFNFHPTESFTDYRVGVEQAGTYRVVLDTDDQAFGGLGRIDQGTRFFTTDMEWNGRRNYLQVYIPTRTALALALEETL

SEQ ID NO: 7732 - protein, 190 aa, Glycine max
  misc_feature (162)..(162): Xaa can be any naturally occurring amino acid
MSHIPTAGYGTLAGATPTGTTTSTTTTTTSLVTPRPWREFLDLSALSCPYSYDDAMIRVRRNLSHFRFNYAAVTLLIVFLSLLWHPVSMIVFLLVLVAWYYLYFSRDGLLVVFNQTLDDRTVLCVLGLLTVVALVSTHVGLNVLLSLIVAVVLVGLHAAFRXTEDLFLDEESSLLSVVGTQPLRTNYTPI

SEQ ID NO: 7733 - protein, 492 aa, Oryza sativa
MDPCKFRPSSSFDTKTTTTNAGAPVWNDNEALTVGPRGPILLEDYHLIEKVAHFARERIPERVVHARGASAKGFFECTHDVTDITCADFLRSPGAQTPVIVRFSTVIHERGSPETIRDPRGFAVKFYTREGNWDLLGNNFPVFFIRDGIKFPDVIHAFKPNPRSHVQEYWRVFDFLSHHPESLHTFFFLFDDVGIPTDYRHMDGFGVNTYTFVTRDAKARYVKFHWKPTCGVSCLMDDEATLVGGKNHSHATQDLYDSIAAGNFPEWKLFVQVIDPEEEERFDFDPLDDTKTWPEDEVPLRPVGRLVLNRNVDNFFNENEQLAFGPGLVVPGIYYSDDKMLQCRVFAYADTQRYRLGPNYLMLPVNAPKCAHHNNHYDGAMNFMHRDEEVDYYPSRHAPLRHAPPTPITPRPVVGRRQKATIHKQNDFKQPGERYRSWAPDRQERFIRRFAGELAHPKVSPELRAIWVNYLSQCDESLGVKIANRLNVKPSM

SEQ ID NO: 7734 - protein, 233 aa, Pasteurella multocida subsp. multocida str. Pm70
MLVPIPALNDNYIWLYGRANLPIIVIDIPEFTPLLDYVQQHQLNVEALLLTHHHDDHTAGVSLFKQHFPNVKVFGPAETQAKGATEIVNMGILQTEHYHIHVLQTAGHTEQHVSYLVDGHLFCGDSLFSAGCGRVFTGNYQHMFDGLQRLKSLPDDTIVCPAHEYTLANLAFAKYILPENVAIQQHEQWVQKQRVTHQPSLPTTMGREKQINPFLIAQDMETFVAWRKAKDVF

SEQ ID NO: 7735 - protein, 447 aa, Zea mays
MASEAAAASVISRNPCLFAPPLITNQQQPSHQEPQQEMPLPPPAKKKRNLPGTPGKLLASSSCIDPAAEVIALSPRTLLATNRFVCEICGKGFQRDQNLQLHRRGHNLPWKLRQRSAGKEPRKRVYVCPEKTCVHHNPCRALGDLTGIKKHFCRKHGEKKWKCDKCNKRYAVQSDWKAHAKTCGTREYRCDCGTLFSRRDSFITHRAFCDALAEETARQLNAAAAATSHLNNNAHVVVGLSLPSMVGHINGATGSILLPGAPPQLYADLFAPAPPQLSWPCELTSAAAAASSSAAASGKQKTDSVPSVFSGYPHANLAVPGAGAADMSATALLQKAAQMGAVTSGSGSVIMTTTAGGHHQPSDCGAGLLFSALTQQNATNLISGSGTSTLTTSQLTATGGNMPYDVLSAVRHAGLKDAAVAVGREETRDFLGVGVQALCSSSLNGWI

SEQ ID NO: 7736 - protein, 484 aa, Pseudomonas fluorescens PfO-1
MSQNKTLTTASGAPVADNQNSRSSGPRGPLLLDDFHLIEKLAHFNRENIPERRVHAKGSGAYGTFTVTRDITQYTSAKLFSAVGKQTPTFLRFSTVGGERGSADTERDPRGFALKFYTEEGNWDIVGNNTPVFFIRDPLKFPDFIHTQKRLPQSNLKSAQMMWDFWSHSPEALHQVTILFSDRGIPDGYRHMHGFGSHTYSLISAQGERHWVKWHYKTKQGIKNLAPADAARLAGTDPDYAQRDLFEAIERGDFPKWSVCIQIMTEAQAAAHYENPFDVTKTWSQKEFPLIEVGELELNRNPLNYFAEVEQAAFGPSNMVPGVGLSPDRMLQGRVFAYADAHRYRVGTNHQQLPVNAPRSPVNTYQRDGSMAFGSNGGAAPNYEPNSYVESPKQAPHYAEPALALSGAADRYDHREDSDYYSHAGALFRLMSDEQKALLVSNIAGAMGGVSSDVIDRQLQHFYKADPAYGEAIAKLLNVQLNEV

SEQ ID NO: 7737 - protein, 696 aa, Oryza sativa
MSAASSSSVAAPPDYTKATDGTGVIGGDPWLEPFAPALRERYALYQDWKNKISVSEGGLEAFSGSYRNMGFQVDPKTQAVTYTEWAPNAVEAALISDFNNWSRDSHKMTKDDYGKWHITIPPLANATCAIPHDSKLKISMLLPSGERIERLPAWILRVTQDLNVSPVYDARFWNPPKEERYTIKNPKPPKPDNIKVYEAHVGIATPEARVGQFKEFTKNVLPRIKELGYNTIQLMAIQEHAYYASFGYQVTNFFAASSRYGNPEDLKELIDVAHSMGITVLLDIVHSHACKNVLGVLNMFDGTDHLYFHEGAKGRHELWDSRLFNYGHHEVLRFLLSNCLFWMEEYGFDGFRFDGVTSMLYTHHGIGTGFSGGYHEYFGPSVDVEAVVYLMLANDMIHKYNPNAITIAEDVSGMPALCRPVSEGGVGFDYRLSMAVPDMWIKLLKEKSDEDWDFGNICFTLTNRRHLEKSIAYAESHDQALVGDRTLAFWLMDKEMYTNMSDLTERTAIIDRGLAYHKMIRLITHALGGEGYLNFIGNEFGHPEWLDFPREGNGNSFHYARRQFNLVDDHLLRYQYLYAFDAAMNNAEGKYKWLASSQAYISLKHESDRVVAFERAGLLFVFNWHANNSYTDYRIGVDVPGKYKVLLDTDAKELGGHARIDHNTEWFTTDMEWNGRRNFVQLYLPSRSAIVLYRAD

SEQ ID NO: 7738 - protein, 282 aa, Solanum demissum
MVGKISSDLPPGFRFHPTDEELIMYYLRYQATSRPCPVSIIPEIDVYKFDPWELPEKAEFGENEWYFFTPRDRKYPNGVRPNRAAVSGYWKATGTDKAIYSANKYVGIKKALVFYKGKPPKGVKTDWIMHEYRLSDSKSQTYSKQSGSMRLDDWVLCRIYKKKNLGKTIEMMKVEEEELEAQNVSINNAIEVGGGPQTMKLPRICSLSHLLELDYYGSIPQLLSDNLLYDDQSYTMNYVSNTSNVDQVSSQQQNTNNITSNNCNIFFNYQQPLFVNPTFQSQ

SEQ ID NO: 7739 - protein, 117 aa, Brassica napus
MSYNNNGNVVPAADPLPGKKTKLQSSRSWVSIVATGESETLDVDKYAIMHRVQIHARDLRILDPNLSYPSTILGRERAVVLNLEHIKAIITADEVLLRDPSDENVIPVLKELERRLP

SEQ ID NO: 7740 - protein, 277 aa, Rhodopseudomonas palustris CGA009
MQTADAHFVEAHGAKIPALGLGTWELSGHSCSRIVEQALRLGYRHIDTAQIYDNEREVGEGIRNSHIRRDQLFVTTKVWTTHFAPNDLVRSAKESLVKLRLSEVDLLLLHWPNAHVPLAETLGALAQARALGLTRHIGVSNFTVALLAEAVAVCPAPLVCNQVEYHPFLDQQKVLAACALYGMALVAYSPIARGNAKKSEVLTRIGNVHGKTAAQVCLRWLIQQNVAAIPRSSRLERLAQNIDVFDFELSDAEMQEIFTLGSPKGRLTTMPTAPVWD

SEQ ID NO: 7741 - protein, 532 aa, Vibrio sp. Ex25
MAAKDVLFANDARQKMLKGVNLLADAVKVTLGPKGRNVVLDKSYGAPTITKDGVSVAKEIELKDKFENMGAQMVKQVASKANDEAGDGTTTATVLAQSFINEGLKAVASGMNPMDLKRGIDKATEAAVEKLREMSKPCSDKESITQVGSISANSDRAIGEIIAEAMEKVGRNGVITVEEGQGLDNELSVVEGMQFDRGYLSPYFITNQENGSVELDNPYILLVDKKVSSIRELLPVLEEVAKSSRSLLIIAEDIEGEALATLVVNNMRGIVRATAVKAPGFGDNRKAMMEDIAVLTAGTVISEEIGLELEKATLEQLGSAKKVTITKDTTTIVGGAAEASAIADRVASIEKQIETTTSQYDKDKLQQRVAKLSGGVAVIKIGAATEVEMKEKKDRVDDALHATRAAVEEGIVAGGGVALTKIAKELADLKGDNDDQNVGIRVALRAMEEPLRQIATNAGDEASVVANAVKAGDADYGYNAATGEYGSMIEMGILDPAKVTRSALQFAASVAGLMITTEAMITNHVEDKELDI

SEQ ID NO: 7742 - protein, 321 aa, Polaromonas sp. JS666
MRLDADSFDNETYIARPITVEELSVNSSYLIRLQQRWAWPTVTLSFAGAGVAAWLAVTEGVSIAEIGILVAMYVLTYLGLTVGYHRCFAHRAFKANPLVRYVLAILGSMNVQGPIVFWVATHRRHHQFSDVPGDPHSPHLHGSGFRGSVEGFFHAHIGWLFAADMTNTALYARDLLRDSVMRRINRLYLVWVMLGLLIPTLAGALLLGGVGGALRGLLWGGLVRGFIAYHATWALNSLTHVVGKRDFNTQDHSHNIGWLAMLTLGEGWHNNHHAFPYSAVLGLKWWQLDVSAIVIRMLKALGLAWDVKVPLKKAREVMATA

SEQ ID NO: 7743 - protein, 276 aa, Bacillus halodurans C-125
MANNLQATTTLHNGVKMPWFGLGVFKVSEGDEVIQSVKDAIRAGYKSIDTAAVYGNEEGVGKAIAESGVPREELFITSKVWNADQGFDSTISAFNTSLKKLGLDYLDLYLVHWPVKGKYVETWKALEKLYQDGLVRAIGVSNFQVHHLKDVLEAGSIVPMVNQVEYHPHLTQTELHDFCKQNKIQLEAWSPLKQGQLLNDPTIVAIAEAHQKTPAQIILRWDLQNEVVTIPKSVKKDRIISNADIFDFQLTEEDMQKINELNKNERVGPDPDNFDF

SEQ ID NO: 7744 - protein, 451 aa, Zea mays
MAEHKGNVLLHKYEMGKLLGQGTFAKVYHARNTATSESVAIKVIDKEKVMKVGLIDQIQREISVMKLVRHPNIVQLYEVMATKTKIYFVLEHVKGGELFNKIQRGRLKEDAARKYFQQLICAVDFCHSRGVYHRDLKPENLLLDENSNLKVSDFGLSALAECHRQDGLLHTTCGTPAYVAPEVINRKGYDGAKADIWSCGVILFVLLAGYLPFHDKNLMDMYKKIEKADFKCPSWFSTDVRRLLQRILDPNPSRRISVEKIMENPWFRKGLGAKLLRYDLQNKNAPHVDKKADFDSLSTNVTTESKQHEEKKPTNMNAFDIISLSTGLDLSGLFEESNKKRESKFTSTNTSSTIISKIEDIAKNLRLNLTKKDGGLLKMEASKPGRKGVMGIDAEVFEVSPNFHLVEIKKTNGDTLEYQKVLNQEMRPALKEIVWAWQGEQSKQKQEQQSC

SEQ ID NO: 7745 - protein, 324 aa, Polaromonas sp. JS666
MRLTLPTTSIQTAESVFVIKLRLVLVHLGALCIFFVPFTYQLLVGAVIGYFVRVFAWEGGSHRYFAHKAYKTSRGFQLFLALLAAAAGVRGPLWWATHHRLHHRTADTAEDPNTPLFRGFWHGYVGWLFLQENADSNLDATKDLSRYPELVIVNRYQYFAPLVLMALTYAVGQYTPLFGAKGMGVSALIWVFFLSTALSLQSLFSVGALGHGIKPSVFNHRRFETGDTSTNLGLMAIFTMGGSWHNNHHRCAVAARSGFYWWQVDLTYYVLRLLKAVGLIWDLRLPSARILEEGRRGAGRQTAEIAGVAEDLTARQEHGYEGVK

SEQ ID NO: 7746 - protein, 242 aa, Castanea mollissima
MVYPNQSMSLSPQRKIGRGKMEMKRIENTTNRQVTFCKRRNGLLKKAYELSVLCDAEVALIVFSTRGRLYEYANNSVKSTIERYKKACADSSNTGSVAEANTQFYQQESAKLRAQIGNLQNSKQANDGESLSNLTVKELKSLEIKLERGISRIRSKKNELLFAEIEYMQKREVELHNNNQLLRAKIAENERNQQNLNVMPAGGGSYELMQTQQYDSRNFFQVNALQPNHQYPREDQMSLQLV

SEQ ID NO: 7747 - protein, 243 aa, Castanea mollissima
MGRGRVEVKRIENKINRQVTFAKRRNGLLKKAYELSVLCDAEVALIIFSNRGKLYEFCSTSSMLKTLERYQKCSYGAVEVNKPGKELEISYREYLKLKARFESLQRTQRNLLGEDLGPLNTNDLERLERQLDSSLKKSGPLRQYMLDQLSDLQNKEHLLVEANRALAIKLDEISPRNNLRQSWEGGEQSMSYGPQNAHSQSFFQPLDCNPTLQIGYNASGSDQQLSGTTHAQQVNGFIPGWML

SEQ ID NO: 7748 - protein, 540 aa, Streptococcus sanguinis
MAKDIKFSADARSSMVRGVDILANTVKVTLGPKGRNVVLEKSFGSPLITNDGVTIAKEIELEDHFENMGAKLVSEVASKTNDIAGDGTTTATVLTQAIVREGIKNVTAGANPIGIRRGIEAAVATAVEALKSNSVPVSNKEAIAQVAAVSSRSEKVGEYISEAMEKVGNDGVITIEESKGMETELDVVEGMQFDRGYLSQYMVTDNEKMVAELDNPYILITDKKISNIQEILPLLENILKTNRPLLIVADDVDGEALPTLVLNKIRGTFNVVAVKAPGFGDRRKAMLEDIAILTGGTVITDDLGLELKDATIEALGQASKVTVDKDSTVIVEGSGNPEAIANRVAVIKSQIESSTSEFDREKLQERLAKLSGGVAVIKVGAATETELKEMKLRIEDALNATRAAVEEGIVSGGGTAYINVLDAVAGLELAGDEGTGRNIVLRALEEPVRQIALNAGFEGSIVIDRLKNSEVGTGFNAATGEWVNMIEAGIIDPVKVTRSALQNAASVASLILTTEAVVANQPEPASPAPAMDPGMMGGMM

SEQ ID NO: 7749 - protein, 242 aa, Castanea mollissima
MGRGRVQLKRIENKYRQVTYSKRRSGLLKKAHEISVLCDAEVALIVFSTKGKLFEYSSDSSMETILERYERYSFAERQLVATDSESQGGWCMEFPKLTARVEVLQRNIRNFMGEDLDPLSFRELQNLEQQIDAGLKRIRTRKNQLMHESVMELQKKEKSLQEQNSVLAKKLKENEKNIPEQAHQEQPSLGLLSLPQQPMPSTLSLPSLTIGGAFQERAVDEDAGVQTRPTLMPPWMLRHVNG

SEQ ID NO: 7750 - protein, 546 aa, Bacillus anthracis str. 'Ames Ancestor'
MAENQDKNSLEEQDVKRETLTTRQGHPVKDNQNIRTIGNRGPATLENYHFIEKISHFDREEVPERVVHARGAGAFGYFETYGKVGDEPAEKYTRAKVFSGAGKKTPLMVRFSTVAGAKDSPETARDPRGFAVKMYTEDGNWDLVGNNLKIFFIRDAMKFPDMIHAFKVDPVSNVSNPQRMFDFVSRTPEATHMITFLFSPWGIPATYRHMQGSGVNTYKWVNEKGEAVLVKYHWEPKQGIRNLTQEDANSIQAMNVSHATQDLYEAIERKDYPEWELFVQIMEDGYHPELDFDPLDDTKLWPEEQFPWLPVGRMVLDRNPVDYHSEIEQAAFGTGVLVDGMDFSDDKMLQGRTFSYSDTQRYRVGANYLQLPVNAPKAPVRTNQHRGQMDMRNPKESGENPHINYEPSMLGGYKDAKQEKHHPHQPTYNAAAMSAPIDRPNNYGQAGHTYRSFEEWERNELVKNLSEALAVCDKRIQNAMIAHFTQADEDYGRRVKEGIEKKMKEAKTENKLPGREVSKSKYGQGSLAANEATKDAVKKSHESDPY

SEQ ID NO: 7751 - protein, 142 aa, Rhodobacter sphaeroides 2.4.1
MQVKYLHTMVRVLDLEKSIAFFRLLGLEETRRTESETGRFTLVFMAPPGQPECPVELTYNWDGDEGLPSDSRHFGHLAYAVEDIYDMCARLQAAGVTINRPPRDGHMAFVRSPDNISIELLQMGDSLPPAEPWSSMQNTGHW

SEQ ID NO: 7752 - protein, 392 aa, Brassica napus
RPTRPVRGGELFNKVAKGRLKEDVARKYFQQLISAVTFCHARGVYHRDIKPENLLLDENGNLKVSDFGLSAVSDQIRQDGLFHTFCGTPAYVAPEVLARKGYDAGKVDIWSCGVVLFVLMAGYLPFHDRNVMAMYKKIYKGEFRCPSWFSPELTRLCSRLLETNPEKRFTFPQIMENSWFKKGFKHVKFYVEDDKLCNVVDDDDELETGSVESDRSSTVSESDVEFFKPARRVGGLPRPASLNAFDIYRFSQGFDLSGLFDDDGEGSRFVSGAPVSKIISKLEEIAKVVSFTVRKKDCRVSLEGSRQGVKGPLTIAAEIFELTPSLVVVEVKKKGGDRTEYEEFCNKELKPKLQTLTADEVDDPVAVSAVVDETASGVANSPPVCFLPSDTE

SEQ ID NO: 7753 - protein, 479 aa, Streptomyces sp.
MVPAAQQTATAPDAALTFPEGFLWGSATASYQIEGAAAEDGRTPSIWDTYARTPGRVRNGDTGDVATDHYHRWREDVALMAELGLGAYRFSLAWPRIQPTGRGPALQKGLDFYRRLADELLAKGIQPVATLYHWDLPQELENAGGWPERATAERFAEYAAIAADALGDRVKTWTTLNEPWCSAFLGYGSGVHAPGRTDPVAALRAAHHLNLGHGLAVQALRDRLPADAQCSVTLNIHHVRPLTDSDADADAVRRIDALANRVFTGPMLQGAYPEDLVKDTAGLTDWSFVRDGDLRLAHQKLDFLGVNYYSPTLVSEADGSGTHNSDGHGRSAHSPWPGADRVAFHQPPGETTAMGWAVDPSGLYELLRRLSSDFPALPLVITENGAAFHDYADPEGNVNDPERIAYVRDHLAAVHRAIKDGSDVRGYFLWSLLDNFEWAHGYSKRFGAVYVDYPTGTRIPKASARWYAEVARTGVLPTA

SEQ ID NO: 7754 - protein, 444 aa, Arabidopsis thaliana
MVRRQEEEKKAEKGMRLGKYELGRTLGEGNFGKVKFAKDTVSGHSFAVKIIDKSRIADLNFSLQIKREIRTLKMLKHPHIVRLHEVLASKTKINMVMELVTGGELFDRIVSNGKLTETDGRKMFQQLIDGISYCHSKGVFHRDLKLENVLLDAKGHIKITDFGLSALPQHFRDDGLLHTTCGSPNYVAPEVLANRGYDGAASDIWSCGVILYVILTGCLPFDDRNLAVLYQKICKGNPPIPRWLSPGARTMIKRMLDPNPVTRITVVGIKASEWFKLEYIPSIPDDDDEEEVDTDDDAFSIQELGSEEGKGSDSPTIINAFQLIGMSSFLDLSGFFEQENVSERRIRFTSNSSAKDLLEKIETAVTEMGFSVQKKHAKLRVKQEERNQKGQVGLSVTAEVFEIKPSLNVVELRKSYGDSCLYRQLYERLLKDVGTSSPEQEIVT

SEQ ID NO: 7755 - protein, 585 aa, Pyrenomonas salina
MRRFSETYGQKKQITFFCSNLSITAVVIEGLLKHKEEYGALERGMDILAEAVSVTLGPKGRNVVLESGKYGPPQIVNDGVTIAKEIELEDHIENTGVALIRQAASKTNDVAGDGTTTATVLAHAMVKQGMKNVRCRSKSIAIKRGIEKATQFVISQIAEYSRPVEDTKSITQVAAISAGNDMEVGQMIADAIEKVGREGVISLEEGKSTVTELELTEGNGWFLKKGFISPYFVTDTDRMETTQENPYILLTDKKISLVQELVPIHLELISKTSRPLLIIAEDVEKEALATLVVNKLRGIVNVVAVRAPGFGDRRKTMLEDIAILTGGQVISEDAGFSLETVQLDMLGQARRITVVKEGTTIIAEGHEREVKARCEQIRRQIEASESSYEREKLQERLAKLAGGVAVIKVGAATETEKDKKLRLEDAINATKAAVEEGIVPGGATLIHFIEDLNDWAEDNLLDDELIGALIVEKALSAPMKRIIENTGISSSIIIEKIKDKDFSIGYNAAQGEIEDMYEIGVIDPAKVTRSAMQNAASIASMILTTECIVVDKKKTCSLETSIYWLVLTNKYFCLDLLRLYFFLKD

SEQ ID NO: 7756 - protein, 214 aa, Zea mays
TTSRQVTFCKRRNGLLKKAYELSVLCDAEVALVVFSSRGRLYEYANNSVKSTIERYKKANSDSSNSGTVAEVNAQYYQQESSKLRQMIHSLQNANTRNIVGDSIHTMGLRDLKQMEGKLEKAIIKIRARKNELLYAEVDYMQKREMDLQTDNMYLRSKIAESNETGQPAMHMTMGAPPTSEYDHMAPFDSRNFLQVSMPQHYSHQLQPTTLQLG

SEQ ID NO: 7757 - protein, 310 aa, Zea mays
MARHFVLNTGAKIPSVGLGTWQSDPGVVGNAVYAAVKAGYRHIDCARVYGNEKEIGLALKKLFEEGVVKREDMFITSKLWNDHHAPEDVPEALNDSLNDLQLEYLDLYLIHWPFRVKKGTNTSPENFVTPDFPATWGAMEKLYDAGKARAIGVSNFSSKKLGDLLAVARVPPAVDQVECHPGWQQTKLHSFCQSTGVHLTAYSPLGSPGTTWMNGNVLKEPIIISIAEKLGKTSAQVALRWNIQMGHSVLPKSTNEERIKQNLDVYDWSIPDDLLAKFSEIKQARLLRGNFIVNPESVYKTHEELWDGEL

SEQ ID NO: 7758 - protein, 484 aa, Debaryomyces hansenii CBS767
MSDKVEVADVTSLNALAAGTNKKNPRVVAAGLGGRLMGTKSLVDVTADEITKDSELSLAEKDRKDKEKWTKMTHISDQPWTWSNWSEHINWLNLILVVLVPTVGFVCALRHPPQLKTAVMGVILYILSGLSITAGYHRLYSHKAYDAAVPVKIFFALFGAGAVEGSIKWWGHSHRVHHRYTDTARDPYDARQGLWYSHMGWLLIKANPKNRARADISDLTGDWVVNFQHRHYLVIMIFMALVLPTLIAGLGWGDYWGGFVYGGIIRSFFIQQATFAINSLAHWIGSQPFDDRRTPRDNVITALVTFGEGYHNFHHEFPSDYRNALIWYQYDPTKITIWVLSKLGLAWGLKTFSQNAIEQGLIQQQQKKLDRMKSKLEWGTMLNELPLMDKEEFTARAKKDGLILISGIVHDVKQFIKQHPGGQALIRVSLGKDATKAFNGMVYAHSNAAHNMLANMRIAILKDHAVNGNTFDLQQEFLDKEKVN

SEQ ID NO: 7759 - protein, 280 aa, Streptococcus mutans UA159
MEAYTLINGVHIPKIGFGTWKLADGDEAYKSVSYALEVGYRHVDTAQYYGNEVSVGRAIADSPIKREELFITTKIWNDKHSYDEAKQSVEESLAKLKLNYLDLLLIHWPNPKALRENDAWKTRNADVWRAMEDLYQAGKVRAIGVSNFMIHHLEPLLEVATVKPMVNQVLLAPGCSQEELVAFCRQNEMILEAYSPLGTGSIFDNQTAQDLANKYNKTVAQIALRWSLQKGFLPLPKSATPKNILSNLAIFDFDLTEDDILKLDKIENVKSQGNPDETAF

SEQ ID NO: 7760 - protein, 297 aa, Rosa hybrid cultivar
MPSRLINWQVQFFGREWDFMDLYHLTLFLGVPFVCLLAPFQFTWGALWVAISLYLVSGMGVTISYHRNLAHQSFKVPKWLEYSLAYCAVLSLQGSPLEWVSTHRYHHQFTEKLRDPHSPNKGFWFSHLNWLFDYHSRFGSYDGQLMKNVGDLECQLYYRFLHYTYFLHSVLLGVALYVAGGLPFVIWGMGVRVVVISQVTFSINSICHTWGKQIWDTGDASKNNWLFGLLAFGEGWHNNHHAFEYSARQGLERWQIDTSWYVIKFFQVVGLATHVKLPTEIQKKRKALAKNSIMKDK

SEQ ID NO: 7761 - protein, 247 aa, Capsicum annuum
MGRGRVQLRRIENKINRQVTFSKRRSGLLKKAHEISVLCDAEVGLIVFSSKGKLFEYSTDSCMERILERYERYSYAERQLNATDVETPGSWTLEHAKLKARLEVLQRNQRHYAGEDLDSLSMKELQNLEQQLDSALKHIRSRKNQLMHESISELQKKDKALQEQNNNLSKQMKEREKQLAQQHTPWEQQNHDHLNSSSFGLPHPFNNNHLGEVYPTAGDNGEVEGSSRQQQQNAAVMPPWMLRHLNG

SEQ ID NO: 7762 - protein, 521 aa, Chlamydomonas reinhardtii
MRKEATRLVSALLRAGNNGVSTSWAVGGTRLKSAMPQPDEKKDEDLHAKEGKVLHPHLLNENVVKTQYAVRGELYLRAEQLRKEGKEIIFTNVGNPHALGAKPLTFTRQVLALCAAPFLLDHPKVEDMFPADAIARAKKILASFKGGVGAYTDSRGNPLVREEVARFIEKRDGVPSNPDHIFLTDGASVAVRLCLNAMIRHDRDSVLVPIPQYPLYSASIRLYGGTLVGYFLDERRGWGLSVEELQRALQESREEGKLVRGLVFINPGNPTGQCLSKENLQELIKLAYQEKIVLMADEVYQENVYQDERPFVSAKKVMWEMGEPYRSHVELLSFHTVSKGTAGECGLRGGYVEMTNIHPGAIEEVYKCASINLSPNTMGQIALSVLVNPPKPGDPSYDQYTKEKASELVSLRRRRHMVTDGFNALDGVTCNFTEGAMYSFPQIKLPAKALEAAKAAGKAGDVFYCLKLLEATGISTVPGSGFGQEEGTFHLRTTILPREEVMTTFVEKFDKFHKDFMKQYS

SEQ ID NO: 7763 - protein, 694 aa, Thiobacillus denitrificans ATCC 25259
MSQKKKPAKAGPDENFERGAGGEIHQTANGAHPPLTTNDGVPISDDQNSLRSHPRGPTLLEDFVLRDKITHFDHERIPERVVHARGSAAHGYFELTESLEKYTTARILTEVGEKTPVFTRLSTVAGGAGSVDTPRDVRGFAVKFYTKEGNWDLVGNNIPVFFIQDAIKFPDLVHSFKMEPDRGFPQSSTAHDTFWDYVSLTPESMHMILWIMSDRTTPRSLRMIEAFGVHSFRLVNAKGASTFVKFHWRPKLGLQSTIWDETVKIAGADPDFHRRDLFEAISEGNFPEWEFAVQLFTEADAERFPFDHLDATKLIPEELVPLKVIGRMVLDRWPDNFFAETEQVAYCPTHVVPGIDFSNDPLLQGRLFSYVDTQLLRFNSPNFHQVPVNMPKCPFANLQRDGHMQMERPKGRVNYEPNTLGTDTPRETPQGFRSAAVTESGEKGRIRAERFADHYSQARQFYVSQTEYEQAHIASTLVFELAKVDHVHIREAMVGHLRHVDEDLAHRVAKGLGIDPLPPAPEAAAPVQDLPPSPALQIIGNMKDTLEGRMVGILVGDGSDGARVEALRRAATDAGAAVKIIAAHVGQVKLANGKMLKVDKQLAGTPSVLFDAVAVVVSEDAAKMLLKESAALDFVHDAFGHLKAIASDAGGQALLDAVHVVRDAGVVDAADVGAFIAAAKTRQWDREPSVRLLA

SEQ ID NO: 7764 - protein, 635 aa, Fagus sylvatica
MESCDCIETQWHDELLVKYQYISDFLIALTYFSIPLELIYFVQKSAFFPYRWVLMQFGAFIGLCGATHFISLWTFSMHSKAVAVVMTVAKIACAIVSCATALMLVHIIPDLLSVKTRELFLKNKAEELDREMGLILTQEETGRYVRMLTHEIRSTLDRHTILKTTLVELGRTLGLEECALWMPSRTGMNLQLTHTLNSQIQGSTVPLSDSIVNEVFNNARAMRIPYTCPLARFRPLVGRYVLPEVVRVPLLPLSNFQINDWPDLSAKSYAIMVLILPTDGARKWRDYELELVDVVADQVAVALSHAAIIEESMRARDQLMEQNVALDLARREAERAIHARNDFLAVMTHEMRTPMHATIALSSLLLESELSPEQRVVIETVLKSSNLLATLINDVLDLSRLEDGSLELEIGTFNLHGVFREVLNLIKPIASVKKLSMTLLLTPDLPVCAVGDEKRLMQTVLNVAGNALKFTKEGYVSIIASVAKPESFRDWRAPEFYPIASDGHFYLRVQVDKDSGCGILPQDIPHLFTKFTQSQSGSNRRNGGAGLGLAICKRIRFVNIMGGHIWIESEGPDKGSIATFIVKLGICDNPNDSALQQVAPIGRAHNASGDLTGHKPVSRDIVNMDSSNLRYQRSF

SEQ ID NO: 7765 - protein, 312 aa, Candida glabrata CBS138
MESQQVDVDSIIDRLLEVRGSKPGQQVDLEEHEIRHLCSKARSIFIKQPILLELEAPIKICGDIHGQYYDLLRLFEYGGFPPESNYLFLGDYVDRGKQSLETICLLLAYKIKYPENFFILRGNHECASINRIYGFYDECKRRYNIKLWKTFTDCFNCLPIAAIIDEKIFCMHGGLSPDLNSMEQIRRVMRPTDIPDVGLLCDLLWSDPDKDIVGWSENDRGVSFTFGPDVVNRFLQKQDMELICRAHQVVEDGYEFFSKRQLVTLFSAPNYCGEFDNAGAMMSVDESLLCSFQILKPAQKSLPRQQAGRKKK

SEQ ID NO: 7766 - protein, 375 aa, Fagus sylvatica
MCGGAIISDFIAPTGSRRLTADYLWGDRKKPISGKRFSKPVVDLDDEFELDFQGFKDEEESDIDEEEVLVQDVKPFTFSAPPSSGSKPVKSVEFNGQAEKSAKRKRKNQYRGIRQRPWGKWAAEIRDPRKGVRVWLGTFNTAEEAARAYDAEARRIRGKKSKGNFPMRLPVPKRSVKANLQKPLAKANLNSVQPNLNQNFNFMNSDQDYTMGLMEEKPFTNQYGYMDSIPVNADVGLKSFASNNTAPYFNSDQGSNSFDCSDYGWGEQGSKTPEISSVLSATLEGDESQFVEDAVPTKKLKSDSGNAVFIENNTAKTLSEELSAFESQMNFQMPFLEGSWESNMEALFSGDTTQDGNSMDLWSFDDLPVMAGGVL

SEQ ID NO: 7767 - protein, 551 aa, Glycine max
RAEFGSRAIQATKVVFNHLYDPVSLVRDHNIKEKLVEQGISVQSYNGDLLYEPWEVNSESGRAFTTFNAFWKKCLHMQMDIVSVVPPWQLIPAEGKIEECSLEELGLENESEKPSNALLGRAWSPGWRNADKALREFVELHLLHYSKKRLKVGGESTSLLSPYLHFGELSARKVFQVTCMKQILWTNEGNSAGEESANLFLRAIGLREYSRYLCFNFPFTHERALLGHLKFFPWNPDPDIFKTWRQGRTGFPLVDAGMRELWATGWIHNRIRVIVSSFAVKMLLLPWKWGMKYFWDTLLDADLESDILGWQYISGGLPDGHELERLDNPEIQGAKFDPEGEYVRQWLPELARMPTEWIHHPWDAPLTVLRAAGVELGQNYPKPIIDIDLARERLTEAIFKMWESEAAAKAAGSEPRDEVVVDNSHTVENLDTQKVVVLGKAPCATISANDQKVPALQDSKNEPPTRKRPKHMIEEGQNQDHSQNHNKDTGLSSIDQDICSTADSSSCKKQCASTSSYSFSVPQQCSSSSNLKWPWQEKIDMEQSSSKDGAM

SEQ ID NO: 7768 - protein, 309 aa, Triticum aestivum
  misc_feature (62)..(62): Xaa can be any naturally occurring amino acid
  misc_feature (66)..(66): Xaa can be any naturally occurring amino acid
  misc_feature (125)..(125): Xaa can be any naturally occurring amino acid
  misc_feature (135)..(135): Xaa can be any naturally occurring amino acid
  misc_feature (285)..(285): Xaa can be any naturally occurring amino acid
  misc_feature (296)..(296): Xaa can be any naturally occurring amino acid
MSASPSMSGGAGERTRTRTVVWFRRDLRVEDNPALAAAARTAGEVVPAYVWAPEEDGPYYPXGCPXWWLTQSLKHLDASLRRLGATRLVTRRSTDTVAALLELVRSTGAPRLRFNHLYDPLSLVXRNHRVKQVLXAQGITRQSFNSHLLYEPWEVLDDHGCPFTMFTPFWNTCLCMVDPPAPMLPPKRINSGELSRCCSSDDLIFEDESERGSNALLARAWSPGWQNADKAFTAFINGPLIDYSVNRKKADSANTSLLSPYLHFGELSVRKVFHQVRMKQLTWSXESNGDGEEGCXLFLRSIGLREYSR

SEQ ID NO: 7769 - protein, 465 aa, Chlamydomonas reinhardtii
MGSCLAKPAESAEQKKASSVPSPPPAPAPQPVQQAAAPAPKDSGDVKPGQQATPVPPPSPPPQPKPAPPAQPAPAPAAKVVEAIPAVADEKSPQGKQPRRSQEHDNGVKAEEIELVKQKSTEPQPSASATAAVATPKAIEPAMEPKVAAPSAPAAAPAPAQAPAAAPTPARPGSKLRTDVKLRDLYKLGKTLGTGGFSVVKLATDRGTGVEYACKIMALPPVGQEVGENENTREDIFKEIDLLCGMNHENVIFLKEYFEEGNKVYLITELLTGGELLEAVLKRGSYTEAEARLCFVQVLRGIEYLHSKNVVHRDLKLENLLLAKQDDISLVKIADFGLAKHAVNGMQTICGTPQYVAPEVIVGAKGHVYGPGVDMWSAGVVLYILLGGYPPFWSDSEPQLFDMIRKGKYSFGDPVWNKVSEGAKDLIRKLLVVDPTKRLSATEALQHQFILEGNFNPPSTPKGPR

SEQ ID NO: 7770 - protein, 192 aa, Cupressus sempervirens
DDHGEVISEIRRPDLEPYLGLHYPATDVPQASRFLFMKNKVRMICDCYANPVEVVEDKRLPRELILCGSSLRAPHGCHAEYMSNMGSIASLVIAVTINAKEEDVDTDAQQQQQKGRRLWGLVVCHHTSPRFVPFPLRYACEFLMQVFAIQLNKEVDLADQLREKHILRTQTLLCDMLLRDAPMGIIREKPNI

SEQ ID NO: 7771 - protein, 106 aa, Saccharum officinarum
MAEAHNGRRVGMVGDVRDAPAGHENDLEAIELARFAVAEHNSKTNAMLEFERLVKVRHQVVAGTMHHFTVQVKEAGGGKKLYEAKVWEKVWENFKQLQSFQPVGDA

SEQ ID NO: 7772 - protein, 274 aa, Oryza sativa
  misc_feature (10)..(10): Xaa can be any naturally occurring amino acid
  misc_feature (30)..(30): Xaa can be any naturally occurring amino acid
  misc_feature (225)..(225): Xaa can be any naturally occurring amino acid
  misc_feature (240)..(240): Xaa can be any naturally occurring amino acid
DPRAAGWKPXCGVKSLLDDEAVTVGGTNHXHATQDLYDSIAAGNFPEWKLFIQTIDPDHEDRFDFDPLDVTKTWPEDIVPLQPVGRMVLNRNIDNFFSENEQLAFCPGIIVPGIYYSDDKLLQTRIFSYSDTQRHRLGPNYLLLPPNAPKCAHHNNHYDGFMNFMHRDEEVDYFPSRYDPAKHAPRYPIPSATLTGRREKVVIAKENNFKQPGERYRSWDPARQXRFIKRWIDALSDPRXLTHEIRSIWLSYWSQADRSLGQKLASRLSAKPSM

SEQ ID NO: 7773 - protein, 917 aa, Pseudomonas fluorescens
MLKKLGIKGRVLLLTLLPTSLMALVLGGYFTWMQQSDLHAQLLQRGEMIAEQLAPLVAPAMSRQDTDLLERIATQSLEQADVRAVTLLAPDRTPLAHAGPTMLNRAPEGNSAQLQQRTGNDATRYLLPVFGKHRNLAGELIPEEADRLLGWVELELSHSGMLLSGYRSMFASLLLIAVCLGLTALLALRMGRTINRPLSQIKHAVAQLKDGHLETRLPPLGSQELDELASGINRMAGTLQNAQEELQHSIDQATEDVRQNLETIEIQNIELDLARKEALEASRIKSEFLANMSHEIRTPLNGILGFTHLLQKSELTPRQLDYLGTIEKSADSLLGIINEILDFSKIEAGKLVLDNIPFNLRDLLQDTLTILAPAAHAKQLELVSLVYRDTPLSLVGDPLRLKQILTNLVSNAIKFTREGTIVARAMLEDEHEDSVQLRISIQDTGIGLSNQDVRALFQAFSQADNSLSRQPGGTGLGLVISKRLVEQMGGEIGVDSTPGEGSEFWISLRLPKTRDDAEDLPGPPLLGRRVAVLENHELARQALQHQLEDCGLQVTPFNTLESLTNGITVAHQTDQAIDLAVLGITSNDMPPERLNQHIWDLEHLGCKVLVLCPTTEQTLYHLSVPNPHSQLQAKPACTRKLRRSLSDLVNPRPTRSEPHEPVASRAPKVLCVDDNPANLLLVQTLLEDMGAKVLAVESGYAAVKAVQKETFDLVLMDVQMPGMDGRQNTEAIRQWESERHCTPLPIVALTAHAMANEKRALLQSGMDDYLTKPISERQLAQVVLKWTGLALRNQSPDRGGDAQGNGSELLVLDHEEGLRLAAGKADLAADMLAMLLASLEADREAIRQASEANDHNALIERVHRLHGATRYCGVPQLRAACQRSETLLKQQDPKAAAALEELERAINRLASEARISA

SEQ ID NO: 7774 - protein, 761 aa, Methanosarcina acetivorans C2A
MVFKMIELYTSDKPKVLIIDDEKDQVELLCLQLEDEYLPIPAYSGKEAIELVKAKLPDLILLDLMLPENDGYEICSTLKSDPEYRFIPIIIISRFFEKTNKMKATRCGADDFIHKPINRFELKTRIKSLIRIKKNYEALQESENRYKQLFNNSPAVTLLIDPVDYLIADANEPACAYYGYTYAEMTAKKITDISIYSRERNRKISQQVFSEKKGHFYSCHKLASGEIRHVEMYINTINIRGRELFFTNVYDVTASKKIERELTESEEKFKQVVELSIDGIIIGANSGKIVDCNEAACRIFGYGKEEMLELNVDNILREDFMQSIPEIITTGKAVSENKTIESINKRKDGTFFTAEIATRTFKLGDEDRLIVYVRDITERKKAERDLKSSEENFRALVNNTLDGIIILNFEGEVIAANAAVGKMFNVELEKITGTNIAKYLAPESVPVAIRDQINVLNNQGGYLSVYKAISSMGEHFWIEGLGTKIIYQNQPANIVVIRDITVRKKAEEALINAKTAAEVANRTKSEFLTNMSHELKTPLNSIIGFSDLLKEEIAGPLNEKQSRYVQFISSSGKNLLEIINDILDLSKAESGEEDLNVEKFSVDESINKVISVVLPQAQEKNIILNYQSENRTLWITADEGKFRQIMENLLSNAIKFTPAGGSIDVTLKQEGLLVTIEVKDTGIGIPEDSFEKIFKPFIQIDSSLSRNFEGTGLGLTLVKKYVEMHGGNIYVESKIGEGSSFRFELPVTRKRTVEPVLKVLE

SEQ ID NO: 7775 - protein, 123 aa, Triticum aestivum
  misc_feature (65)..(65): Xaa can be any naturally occurring amino acid
CSSLHTRHEQQPGPWALLVEQRSSHGVPSIEKITFLLVRYQTIHVLQIRDSSSLVEVRRIGAFCXEDDELCLHSHGQAAQWSSFLPGIKQRLLSFIFHRTWNEEPEQALLTYLAILHAVDAAA

SEQ ID NO: 7776 - protein, 92 aa, Daucus carota
DLPGLKKEEVKVEVEEGKVLQISGERNKEKEEKNDKWHPLEVSSGKFLRRFRLPENANVDEVKAGMENGVLTVTVPKVEMKKPEVSVIDISG

SEQ ID NO: 7777 - protein, 548 aa, Zymomonas mobilis
MAAKDVKFSRDARERILRGVDILADAVKVTLGPKGVTLFWTKPLVLPYHQRWCFCRQRNRTERQVRKYGHRCLREVPSKTNDLAGDGTTTATVLAQAIVREGMKSVAAGMNPMDLKRGIDLAATKVVESLRSRSKPVSDFNEVAQVGIISANGDEEVGRRIAEAMEKVGKEGVITVEEAKGFDFELDVVEGMQFDRGYLSPYFITNPEKMVAELADPYILIYEKKLSNLQSILPILESVVQSGRPLLIIAEDIEGEALATLVVNKLRGGLKVAAVKAPGFGDRRKAMLEDIAILTKGELISEDLGIKLENVTLNMLGSAKRVSITKENTTIVDGAGDQSTIKDRVEAIRSQIEATTSDYDREKLQERVAKLAGGVAVIKVGGATEVEVKERKDRVDDALHATRAAVQEGIVPGGGTALLYATKALEGLNGVNEDQQRGIDIVRRALQAPVRQIAQNAGFDGAVVAGKLIDGNDDKIGFNAQTEKYEDLAATGVIDPTKVVRTALQDAASVAGLLITTEAAVGDLPEDKPAPAMPGGMGGMGGMGGMDF

SEQ ID NO: 7778 - protein, 676 aa, Ralstonia solanacearum
MRSIVKSLLHPSSRAPAAHRAQDAALFSTHPQGDAPPIRPSAWLVAIGAAVAGTFARLMLESAAGIRLPFYLAFPVVTVAAWYGGFWPGVVAIAGYAALFAGLAALQISPPPAQPILPTQLVVLALGTLLICVLCEQLRRARAGAERRARAETQQRVSQQRLLAALQASPISLYDVDNTMHFTWVHNPVFGLQPHELLGRTVREVFGRRAASRLTDAGQRVIATGLPTRVEFAFRRRHTQRVVYDVVVMPLRDDTGEIIGLTNAVIDITEHRQAEARRALLLEAESRAREEAERASRLKDDFLATVSHELRTPLNAVLGWAQLLAMRPYDEAMFRRGLEAIERSARTQVHLIDDLLDMSAILSGKVPLEIGPVDLADVLERARETIEPMARQKQITVDTEYLPVPLLQGDAGRLKQVFWNLLANAVKFTPEGGHVRITVQAGADGLVATVRDTGIGIEPTFLPHVFDRFQQADLSSTRRHGGLGLGLAIAKQLVELHHGHITAASSGADLGTTMAVTLPLHAPPSNEPPGRAPGLVTGTAAPALDGLRVLVVDDNAESLGVIALMLERYGAEVVTVASGAAALDALDRAAGGPPFDALVSDLAMPGMDGMQLLRAIRARGLTALPAIAVTAFADPIRLKAAKEAGYQSVITKPIFPGELGHVLAANVRRATGPQDA

SEQ ID NO: 7779 - protein, 157 aa, Daucus carota
MSIIPSFFGGRRSNVFDPFSLDVWDPFKDFPLVTSSASEFGKETAAFVNTHIDWKETPQAHVFKADLPGLKKEEVKVELEEGKVLQISGERNKEKEEKNDKWHRVERSSGKFLRRFRLPENAKVDEVKAAMANGVVTVTVPKVEIKKPEVKAIDISG

SEQ ID NO: 7780 - protein, 483 aa, Rhodopseudomonas palustris CGA009
MLTPASSRPLIVWFRDDLRLADHPALHAAAQSGAPVLCVYVLDEVSDDVRALGGAVRWWLAQSLRALESELRALGGALILRRGPTAAVLAELAQQHDAAAVHWNEIEIAAHRAVADALADALTVAGIAYHRHRGDTLVEPSAIRSKDGRGMRVFTPFWRRVLSLGDPPQPLPRPTTLRPAPAVPTEQLSDWQLEPTAPDWAGGLRQTWTPGEAAAQTRLAAFLAMQPGYAEGRDYPDRHITSGLSPHLRFGEISPRQVWYAARFAAAERPAIAPDIDKFLSEVGWREFCRHLLFDHPDLASRNLQPAFDAFPWQSDDAVLTAWQRGRTGYPIVDAGMRELWHSGVMHNRVRMVVGSFLVKHLLIDWRLGEQWFWDTLVDADPGSNPGNWQWVAGCGADAAPYFRVFNPVLQSEKFDAGGAYIRRWVPELARLPNDLIHQPWTATPLELAAAGIKLGGNYPGPIVDHKTGRQRALSAYAELRQR

SEQ ID NO: 7781 - protein, 159 aa, Daucus carota
MSIIPSFFGSRRSNVLNPFSLDIWDPFQDYPLITSSGTSSEFGKETAAFANTHIDWKETPQAHVFKADLPGLKKEEVKVEVEEGKVLQISGERNKEKEEKNNKWHRVEFSSGKFLRRFRLPENANVDEVKAGMENGVLTVTVPKVEMKKPEVKSIHISG

SEQ ID NO: 7782 - protein, 492 aa, Zea mays
MDPYKHRPSSGSNSSFWTTNSGAPVWNNNSALTVGQRGPILLEDYHLIEKLAQFDRERIPERVVHARGASAKGFFEVTHDVSHLTCADFLRAPGVQTPVIVRFSTVVHERGSPETLRDPRGFAVKFYTREGNFDLVGNNMPVFFIRDGMKFPDMVHAFKPNPKTNLQENWRIVDFFSHHPESLHMFTFLFDDVGIPLNYRHMEGFGVNTYSLINRDGKPHLVKFHWKPTCGVKCLLDNEAVTVGGTCHSHATKDLYDSIAAGNYPEWKLYIQTIDLDHEDKFDFDPLDVTKTWPEDIIPLQPVGRMVLNKNVDNFFAENEQIAFCPAISVPGIHYSDDKLLQTRIFSYADTQRHRLGPNYLMLPVNAPKCAHHNNHHDGFMNFMHRDEEVNYFPSRFDPARHAEKVPIPPRVLTGCREKCIIQKENNFKQAGERYRSFDPARQDRFIQRWVDALTDPRVTHEHRTIWISYWSQCDAALGQKLPSRLNLKPSM

SEQ ID NO: 7783 - protein, 491 aa, Zea mays
MDPYKHRPSSAFNAPYWTTNSGAPVWNNDSSLTVGARGPILLEDYHCEKLANFDRERIPERVVHARGASAKGFFEVTHDITHLTCADFLRAPGVQTPVIVRFSTVIHERGSPETLRDPRGFAVKFYTREGNWDLVGNNFPVFFIRDGIKFPDMVHALKPNPRTHIQDNWRILDFFSHHPESLHMFSFLFDDVGIPADYRHMDGSGVHTYTLVSRAGTVTYVKFHWRPTCGVRSLMDDEAVRCGANHSHATKDLTDAIAAGNFPEWTLYIQTMDPEMEDRLDDLDPLDVTKTWPEDTFPLQPVGRLVLNRNIDNFFAENEQLAFCPGLIVPGIYYSDDKLLQTRIFSYSDTQRHRLGPNYLLLPANAPKCAHHNNHYDGSMNFMHRHEEVDYFPSRYDAVRNAPRYPIPTAHIAGRREKTVISKENNFKQPGERYRAMDPARQERFITRWVDALSDPRLTHEIRTIWLSNWSQADRSLGQKLASRLSAKPSM

SEQ ID NO: 7784 - protein, 402 aa, Streptomyces coelicolor A3(2)
MEFRQSNKLSEVCYEIRGPVIEHANALEEAGHSVLRLNTGNPALFGFEAPEEIVQDMIRMLPRAHGYTDSRGILSARRAVAQRYQALGLEVDVDDVFLGNGVSELISMAVQALLEDGDEVLIPAPDFPLWTAVTTLAGGKAVHYLCDEQAEWYPDLADMEAKITDRTKAVVIINPNNPTGAVYPKEIVEGILDLARRHGLMVLADEIYDQILYDDAVHHSAASLAPDLVVLTFCGLSKTYRVAGFRSGWLVVTGPKQHARDYLEGLTMLASMRLCANAPAQYAIQAALGGRQSIRELTAPGGRLHEQRDVAWEKLNEIPGISCVKPKGALYAFPRIDPAVHKIHDDERFVLDLLLREKIQVVQGTGFNWPSPDHFRILTLPHAEDLEAAIGRIGRFLSGYRQ

SEQ ID NO: 7785 - protein, 495 aa, Zea mays
MTMDPTKFRPSSSHDTTVTTTNAGAPVWNDNEALTVGPRGPILLEDYHLIEKVAHFDRERIPERVVHARGASAKGFFESTHDVTSLTCADFLRAPGVRTPVIVRFSQVIPEPGSGRTIRDARGFAVKFYTREGNWDLLGNNFPVFFIRDGIKFPDVIHAFKPNPRSHVQEYWRVFDFLSHLPESLHTFFFLFDDVGVPSDYRHMEGFGVNTYTFVSAAGKAQYVKFHWKPTCGERCILTDEEARVGGRNHSHTQDLYDSIAAEGSFPEWTLYVQVMDPAQEEQYDFDPLDDTKTWPEDLLPLRPVGRLVLDRNVDNFLNENEQLAFGPGLVVPGIYYSDDKMLQCRVFAYADTQRYRLGPNYLMLPVNAPRCGTHNNHYDGAMNLMHRDEEVDYYPSRHARRCGRAAPTPLPPRPVAGRREKATIRKPNDFKQPGERYRSWDADRQDRFVKAIRRLARTPKGQPELRSIWIDLLAKVDASLGMKIATRLNMKANM

SEQ ID NO: 7786 - protein, 94 aa, Zea mays
KEQFSDGVGYGWIDALKDTAEKQVTDEMMKNPKPEWGNDIPDTKEAYWYRCMFDEHFPPHCASTVMRWTPTWSKQTDPSGRAIATHNAKYDSAA

SEQ ID NO: 7787 - protein, 181 aa, Cupressus sempervirens
DDHGEVVAEMRRPDLEPYLGLHYPATDIPQSSRFLFLKNRVRTICDCRAPAVKVRHDESLGQVLSLQGSTLRAPFGCHAQYMANMGSIASLVMAVTVSDSEEGGRRLWGLVVCHHTTPRFVPYPLRYACEFLMQVFGIQLNKELELASRLRERHIFRTQTLLCDMLLRDAPVGIVTTTPNI

SEQ ID NO: 7788 - protein, 264 aa, Gerbera hybrid cv. 'Terra Regina'
MENSDVLELDFSCVDRSMSFPDDTGDMSPQRKMGKGKIEIKRIENTTNRQVTFCKRRNGLLKKAYELSVLCDAEVALIVFSSRGRLYEYANNSVKGTIDKYKKACLDPPTSGTVAEANTQYYQQEAAKLRQQIANLQNQNRQFYRNIMGESLGDMPVKDLKNLEGKLEKAISRIRAKKNELLFAEIEYMQKRELELHNSNQFLRAKIVENERAQQHHMSLMPGSSDYELVTPHQPFDGRNYLQTNDLQPNNDYSCQDQTPLQLV

SEQ ID NO: 7789 - protein, 389 aa, Euphorbia esula
MEDASATTTAPSDSLNNHQLPPTAGIENIPATLSHGGRFIQYNIFGNIFEVTAKYRPPIMPIGKGAYGIVCSALNSETGEHVAIKKIANAFDNKIDAKRTLREIKLLRHMDHENVVAIRDIMPPPQREVFNDVYIAYELMDTDLHQIIRSNQALSEEHCQYFLYQILRGLKYIHSANVLHRDLKPSNLLLNANCDLKICDFGLARVTSETDFMTEYVVTRWYRAPELLLNSSDYTAAIDVWSVGCIFMELMDRKPLFPGRDHVHQLRLLMELIGTPSEEELGFLNENAKRYIRQMSVFRRQSFTEKFPTVHPAAIDLVEKMLTFDPRQRITVEDALAHPYLTSLHDISDEPVCMTPFSFDFEQHALTEEQMKELIYREALAFNPEYQQQ

SEQ ID NO: 7790 - protein, 542 aa, Sinorhizobium meliloti 1021
MAAKEVKFQTDARERMLRGVDVLANAVKVTLGPKGRNVVIDKSFGAPRITKDGVSVAKEIELEDKFENMGAQMLREVASRTNDLAGDGTTTATVLAQAIVREGAKAVASGMNPMDLKRGIDLAVDAVVKELKNNARKISKNSEIAQVGTISANGDTEIGRYLAEAMEKVGNEGVITVEEAKTAETELEVVEGMQFDRGYLSPYFITNQDKMRVELEDPYILIHEKKLSNLQAMLPVLEAVVQSGKPLLIIAEDVEGEALATLVVNKLRGGLKVAAVKAPGFGDRRKAMLEDIAILTGGTVVSEDLGIKLESVTLDMLGRAKKVSIEKENTTIIDGAGSKADIEGRTAQIRAQIEETTSDYDREKLQERLAKLAGGVAVIRVGGSTEVEVKEKKDRVDDALHATRAAVEEGILPGGGVALLRAVKALDGLKTANNDQRVGVDLVRRAIEAPVRQIAENAGAEGSIIVGKLREKTEFSYGWNAQTNEYGDLYAMGVIDPAKVVRTALQDAASVAGLLVTTEAMIAEKPKKEAAPALPAGGGMDF

SEQ ID NO: 7791 - protein, 188 aa, Glycine max
NEEEEQIRKMASKVPKKANLLDHHSIKHILDESVSEVVTSRGYVEDVRLSNARLFIGAIIIVIALFAQFYKKKFPENRDFLIACIAFGLLQLIIYTKEKNAILFTYPPVGSFTSTGLVVSSKLPRFSDMYTLTIASADPKSISANEPVHFTKSVTQWFTKDGVLVEGLFWKDVEALIVQYTKEPKKGK

SEQ ID NO: 7792 - protein, 246 aa, Gerbera hybrid cv. 'Terra Regina'
MSFPNDSGEMSPQRKLGRGKIEIKRIENTTNRQVTFCKRRNGLLKKAYELSVLCDAEVALIVFSSRGRLYEYANNSVKGTIDRYKKACLDPPSSGSVAEANAQFYQQEAAKLRQQIANLQNQNRQFYRNIMGESLGNMPAKDLKNLESKLEKGIGKIRSKKNEILFAEIEYMQKRENELHNSNQFLRSKIAENERAQQHMSLMPGSSDYELVAPHQPFDGRNYLQVNDLQPNNNYSCQDQTPLQLV

SEQ ID NO: 7793 - protein, 188 aa, Stigmatella aurantiaca
MADLSVRRGTGSTPQRTREWDPFQQMQELMNWDPFELANHPWFANRQGPPAFVPAFEVRETKEAYIFKADLPGVDEKDIEVTLTGDRVSVSGKREREKREESERFYAYERTFGSFSRAFTLPEGVDGDNVRADLKNGVLTLTLPKRPEVQPKRIQVASSGTEQKEHIKAYPAPAEPGLAAPLGWPGFS

SEQ ID NO: 7794 - protein, 192 aa, Dacrydium cupressinum
DEHGEVISEIRKSDLEPYLGLHYPATDIPQASRFLFMKNRVRMICDCHAPPVRVVEDKRLPRELNLCGSTLRALMGCHAQYMSNMGSIASLVIAVIVNEKDEEEGDSEDNIQQKGRKLWGLVVCHHTSPRFVPFPLRYACEFLVQVFGIQLNKEVELAAQVREKHILRTQTLLCDMLLRDAPTGIVTQKPNI

SEQ ID NO: 7795 - protein, 678 aa, Sinorhizobium meliloti 1021
MPNDPLLQPYQLKHLTLRNRIIVTAHEPAYPEDGMPKERYRAYTVERARGGVAMTMTAGSAAVSKDSPPVFNNLLAYRDEIVPWIREMTDAVHEEGAVIMIQLTHLGRRTRWDKGDWLPVVAPSHHREAAHRAFPKKIEDWDIDRIIKDFADAAERMKAGGMDGVELEAYGHLIDQFASPLTNELDGPYGGSLDNRMRFCFDVLKAIRARVGDEFILGVRYTADECLPGGTDKAEGLEISKRLKESGLIDYLNIIRGHIDTDPGLTDVIPIQGMANSPHLDFAGEIRAATNFPTFHAAKIPDVATARHAIASGKVDMVGMTRAHMTDPHIVRKIIEKREEDIRPCVGANYCLDRIYQGGAAYCIHNAATGRELTMPHSIAKAHCRRKVVVVGTGPAGLEAARVAGERGHEVIVFEAASDPGGQVRLTAQSPRRREMISIIDWRMSQCEKLGVTFHFNTWAEAEAIQAESPDVVIIATGGLPHTEVLSRGNELVVSAWDIISGDAKPGTNVLIFDDAGDHAALQAAEFLATAGARVEIMTPDRSFAPEVMAMNLVPYMRCLQKLDVTFTVTYRLEAVEKSGNELVAHVGSDYGGISKQRTFDQVVVNHGTIPLDELYFELKPFSSNLGEIAHDQMIAGEPQSVVRNAEGKFQLFRIGDAVAARNTHAAIYDALRLLKDI

SEQ ID NO: 7796 - protein, 467 aa, Triticum aestivum
MGRRSGGRKLPFFSAASSSSSTKRTRSARRLPSLPKPSSPPPPSPTTPPPAPQTTTSPPAPSPGGSAAVAGVSGKVGKKKAGARLWMRLDRWGSSEILELDKASIIRRAGVPPRDLRILGPVFSHSSNILAREKAMVINLEFIRAIVTAEEVLLLDPLMQEVLPFVDQLRQHLPLRSLVGGNGEHGGDSNGVKQDGSPGDQVPCLNEATGAEHELPFEFQVLEVGLEAVCSTLDSSVADLERRAIPVLDELTKNVSTKNLERVRSLKSDLTRLLARVQKVRDEIEHLLDDNEDMAHLYLTRKQAQNQQVEAIMTSAASNSIVPAGASLPRLNSSFRRSVSIATSIYLDNDVEDLEMLLEAYFMQLDGIRNRILSVREYIDDTEDYVNIQLDNRRNELIQLQLTLTIASFGIAVNTFIAGAFAMNIPCHFYDTDGSFFWPFVGGTSSGCFVISVVLLGYAWWKKLLGP

SEQ ID NO: 7797 - protein, 469 aa, Bacillus anthracis str. 'Ames Ancestor'
MFQKDFRLYDNPALFEAAQSGEVVPVYVHDETFSMGSASKWWLHHAIIDVKKQLEALGSTLIIRKGSTQEEILSLVEQLGITAVYWNICYDPDRLQSNQKMKMMLEHKGMICKEFNSHLLLEPWVIKKKDNTEYKVFTPFYNAFQKQVIHKPISKVQSIKGGNSLPVSLSVSELHLLPTIPWTSHMESIWEPTEEGAYKTWKEFFSSKLASYSEGRDFPNQNAHSMLAPYLSFGQISVKLIYHYLINKSTESQCSLFEKQVNSFIRQLIWREFSYYLLYHYPFTAYKPLNKSFEHFPWNNEEELLRVWQKGDTGYPFIDAGMRELWQTGFMHNRTRMAVASFLVKHLLIPWQEGAKWFMDTLLDADIANNTMGWQWVAGSGADASPYFRIFNPITQGEKFDKNGEYIRKWVPELKDMPNKYIHKPWEAPEHILQKANIQLGHTYPLPVVDHKAARERALCAYKSMKEFV

SEQ ID NO: 7798 - protein, 242 aa, Lycopersicon esculentum
MGTGKVELKRIENKINRQVTFAKRRNGLLKKAYELSILCDAEIALIIFSSRGKLYEFCSNSSMSKTLERYHRYNYGTLEGTQTSSDSQNNYQEYLKLKTRVEMLQQSQRHLLGEDLGQLGTKDLEQLERQLASSLRQIRSTKTQHILDQLAELQQKEQSLTEMNKSLRIKLEELGVTFQTSWHCGEQSVQYRHEQPSHHEGFFQHVNCNNTLPISYGYDNVQPENAAPSTHDATGVVPGWML

SEQ ID NO: 7799 - protein, 493 aa, Euphorbia characias
MDPYKFRPSSAYNSGFFTTNSGAPVWNNNNSLTVGSRGPILLEDYHLVEKLANFDRERIPERVVHARGASAKGFFQVTHDISHLTCADFLRAPGVQTPVIVRFSTVIHERGSPETLRDPRGFAVKFYTREGNFDLVGNNFPVFFIRDGMKFPDMVHALKPNPKSHIQENWRILDFFSHHPESLHMFTFLFDDIGVPQDYRHMDGSGVNTYTLINKAGKAHYVKFHWKPTCGVKSLLEEEAIKIGGANHSHATQDLYDSIAAGNYPEWKLFIQTMDPADEDKFDFDPLDMTKIWPEDMFPLQEIGRLVLNRNIDNWFAENEMLAFDPGLIVPGIYYSQDKLFQLRTFAYADTQRHRLGPNYKMLPVNAPKCPYKNNHFDGAMNFMHRDEEVDYFQSRYAPTSHAEQVPIPNAIISGGRRMKTVLPKECNFKQPGERYRSWAPDRQERFLCRLANALSEPRISQEIRGIWVSWWAQCDQTLGQKLASRLNVRPNI

SEQ ID NO: 7800 - protein, 459 aa, Helicobacter pylori 26695
MVLLTMTKRLFKGLLAVSLAVSLHGGEVKEKKPVKPVKEDPQELAAKRVEAFSRFSNVVSEIEKKYVDKISISEIMTKAIEGLLSNLDAHSAYLNEKKFKEFQAQTEGEFGGLGITVGMRDGVLTVIAPLEGTPAYKAGVKSGDNILKINNESTLSMSIDDAINLMRGKPKTPIQITVVRKNEPKPLVFNIIRDIIKLPSVYVKKIKETPYLYVRVSGFDKNVTKSVLEGLKANPKAKGIVLDLRGNPGGLLNQAVGLSNLFIKEGVLVSQKGKNKEENLEYKANGRAPYTNLPIAVLVNGGSASASEIVAGALQDHKRAVIIGEKTFGKGSVQMLLPVNKDEAIKITTARYYLPSGRTIQAKGITPDIVIYPGKVPENENKFSLKEADLKHHLEQELKKIDDKTPNSKEADKDKKNEEEKEITPKMINDDIQLKTAIDSLKTWSIVDEKMDEKAPKKK

SEQ ID NO: 7801 - protein, 253 aa, Petunia x hybrida
MALEALNSPTTTTPPSFQFENNGLKYLESWTKGKRSKRQRSMERQCTEEEYLALCLIMLARSDGSVNNSRSLPPPPLPPSVPVTSQINATLLEQKNLYKCSVCGKGFGSYQALGGHKASHRKLVSMGGDEQSTTSTTTNVTGTSSANVNGNGRTHECSICHKCFPTGQALGGHKRCHYDGGNGNGNGSVSVGVTSSEGVGSTISHHRDFDLNIPALPEFWPGFGSGEDEVESPHPAKKSRLSLPPKLELFKGL

SEQ ID NO: 7802 - protein, 117 aa, Glycine max
  misc_feature (38)..(38): Xaa can be any naturally occurring amino acid
  misc_feature (78)..(78): Xaa can be any naturally occurring amino acid
  misc_feature (99)..(99): Xaa can be any naturally occurring amino acid
MATETNVPVLGGITDVQGAANSVEINNLARFAVEEQNXRENSVLEFVRVISAKQQVVAGVNYYITLEAKDGVIKNEYXEAKVWVRVWLNSLELLQFNPXLVMVSSSAIRNDWYSWGV

SEQ ID NO: 7803 - protein, 227 aa, Arabidopsis thaliana
MALEALTSPRLASPIPPLFEDSSVFHGVEHWTKGKRSKRSRSDFHHQNLTEEEYLAFWLMLLARDNRQPPPPPAVEKLSYKCSVCDKTFSSYQALGGHKASHRKNLSQTLSGGGDDHSTSSATTTSAVTTGSGKSHVCTICNKSFPSGQALGGHKRCHYEGNNNINTSSVSNSEGAGSTSHVSSSHRGFDLNIPPIPEFSMVNGDDEVMSPMPAKKPRFDFPVKLQL

SEQ ID NO: 7804 - protein, 262 aa, Fagus sylvatica
VDRGQHSLETITLLLALKIEYPENVHLIRGNHEAADINALFGFRLECIERMGENDGIWAWTRFNQLFNYLPLSALIEKKIICMHGGIGRSIHSVEQIEKLERPITMDAGSIILMDLLWSDPTENDSVEGLRPNARGPGLVTFGPDRVTDFCKKNKLQLIVRAHECVMDGFERFAQGQLITLFSATNYCGTANNAGAILVVGRGLVVVPKLIHPLPPPLQSPETSPERIQEDTWMQELNIQRPPTPTRGRPQPDLDRSSLAYI

SEQ ID NO: 7805 - protein, 163 aa, Zea mays
MDAVMFGLETPLMAALQHLLDVPDGDAGAGGDSDNKTGGGATRTYVRDARAMAATPADVKELPGAYAFVVDMPGLGTGDIRVQVEDERVLVVSGERRREEREDAKYLRMERRMGKFMRKFVLPDNADVDKVAAVCRDGVLTVTVEKLPPPEPKKPKTIEVKVA

SEQ ID NO: 7806 - protein, 306 aa, Fagus sylvatica
MPSHSDLDRQIEHLMECKPLPEAEVKTLCDQARAILVEEWNVQPVKCPVTVCGDIHGEFYDLIELFRIGGNAPDTNYLFMGDYVDRGYYPVETVTLLVALKVRYRDRITILRGNHESRQITQVYGFYDECLRKYGNANVWKFFTDLFDYLPLTALIESQIFCLHGGLSPSLDTLDNIRALDRIQEVPHEGPMCDLLWSDPDDRCGWGISPRGAGYTFGQDIAAQFNHTNGLTLISRAHQLVMEGFNWCQDKNVVTVFSAPNYCYRCGNMAAILEIGENMDQNFLQFDPAPRQIEPDTTRKTPDYFL

SEQ ID NO: 7807 - protein, 710 aa, Xanthomonas axonopodis pv. citri str. 306
MRRPASAAYANPSRIRQGRPFPRGAVFDGKGTNFALFSAHATRVELCLFDEQGNETRVDLPEYTNEIWHGYLPDAKPGQRYGYRVHGPYAPTEGHRFNHNKLLLDPYARELDGDLIWSDELYGYTVGHPDGDLSFDERDSAPFMPKCVVVEDTYDWGDDTRLLKPWNETVIYETHVRGYTMRNPQVPEAVRGTFAGLAQPQVLQYIKDLGITAVELLPVHAYLDDQHLLDKGLRNYWGYNTIGFFALKSRYLSSGHRDEFRDMVKAMHKQGLEVILDVVYNHTAEGSELGPTLSFKGIDNASYYRLADDKRYYINDTGTGNTLNLSNSRVIQFVNDSLRYWAGEMHVDGFRFDLATILGREPSGFDQRGGFLDACNQDPLLSEVKLIAEPWDCGPGGYQVGHFPPGWSEWNDKFRDNAREFWKGEDGKLAEFATRFTGSADLFDRRGRRPWASVNFITAHDGFTLRDLVSYNEKHNIDNGEDNRDGSSNDGSCNYGEEGDTDNAEVLQIRERQMKNLLATLLLSQGTPMMLSGDERAQTQGGNNNTYCQDNEITWLDWENDPTDGRLTEFVKALTRLRKRYPILSRGRFLNGQYNEEAGLRDLTWLNPGGIEMDDAHWTDPAARSVGLLLEGKAQTSGVKELANDDTLLIVINAYHEGVTFTLPSSDEPVHWKLVLSTDEALEVDMMPAGASEFLAPPRSVSVFECKSDQ

SEQ ID NO: 7808 - protein, 461 aa, Metroxylon sagu
FGFIRSADGITYREWAPGAKSATLIGDFNNWNPNADVMNRNEFGVWDIFLPNNADGSPPIPHGSRVKIRMETPSGIKDSIPAWIKFSVQAPGEIPYNGIYYDPPEEEKYVFQHPQPKAPKSLRIYESHVGMSSLEPKINTYVSFRDDVLPRIKRLGYNAVQIMAIQEHSYYASFGYHVTNFFAPSSRFGTPDELKSLIDRAHELGLLVLMDIVHSHASNNVLDGLNQFDGTDSHYFHSGLRGYHWMWDSRLFNYGSWEVLRFLLSNARWWLEEYKFDGFRFDGVTSMMYTHHGLQVAFTGNYNEYFGYATDVNAIVYLMLVNDMIHGLYPESVAIGEDVSGMPTFCIPVQDGGVGFDYRLHMAVPDKWIELLKLKDEDWKMGDIVHTLTNRRWLEKCVAYAESHDQALVGDKTIAFWLMDKDMYDFMALDTPSTPRIDRGIALHKMIRLVTMGLGGEGYLN

SEQ ID NO: 7809 - protein, 338 aa, Vibrio sp. Ex25
MSGLRTLGEFIVEKQADFPHASGDLSSLLASIRLAAKIVNREINAAGLGDITGAVGTENVQGEDQQKLDVYANDKFKAALEARDQVCGVASEEEDEAVAFNKELNQNAKYVVLMDPLDGSSNIDVNVSVGTIFSIYRRVSPIGTPATEEDFLQPGHKQVAAGYVIYGSSTMLVYTTGNGVNGFTYDPSIGSFCLSHENMMIPEEGKIYSINEGNYIRFPQGVKKYIKYCQENVPEDGRPYTSRYIGSLVADFHRNLLKGGIYLYPSTQSHPQGKLRLLYECNPMAFLIEQAGGIASDGVNRIMDIKPTELHQRVPFFVGSKNMVRKVEEFLELHRDEE

SEQ ID NO: 7810 - protein, 344 aa, Zea mays
  misc_feature (34)..(34): Xaa can be any naturally occurring amino acid
MRMLSKACSIVASSLPRCSSSAAAPTVALLSHLXRGQPSLLPSVRKQWPGKPLLYGIGTLLVMPLRTLYGVGRVFGAGRFLCNMTNVSSSLQIELVPCLRDNYAYILHDVDTGTVGVVDPSEAMPIINALEKRNQNLTYILNTHHHYDHTGGNLELKAKYGAKVIGSEKDKDRIPGIDITLKEGDTWMFAGHQVLVLETPGHTTGHVCYYFAGSGAIFTGDTLFNLSCGKLFEGTPQQMYASLQKITALPDDTKVYCGHEYTLSNAKFALSVEPGNKALQEYAANAAELRNKNIPTVPTTIGREKECNPFLRTSNPEIKRTLSVPDHFDEDRVLGVVRRAKDNF

SEQ ID NO: 7811 - protein, 443 aa, Metroxylon sagu
PRPPKPAAPRIYEAHVGMSGSEPCVSTYREFADNVLPRIKANNYNTVQLMAIMEHSYYASFGYHVTNFFAVSSRSGTPEDLKYLIDKAHSLGLRVLMDVVHSHASNNVTDGLNGFDVGQSTQDSYFHTGERGYHKLWDSRLFNYANWEVLRFLLSNLRWWLEEYQFDGFRFDGVTSMLYHHHGINMAFTGNYREYFSVATDVDAVVYMMLANHLVHKLLPDATVVAEDVSGMPALCRPVCEGGVGFDYRLAMAIPDKWIDYLKNQNDTEWSMQEIAGSLTNRRYSEKCIAYAESHDQAIVGDKTIAFLLMDKEMYSGMSDLEPASPVVERGTALHKMIHFITMALGGEGYLNFMGNEFGHPEWIDFPREGNGWSYDKCRRQWNLVDTDHLRYKHMNAFDRGMNLLDDRFSFLASTKQIVSSINEEDKVIVFERGDLVFVYNFH

SEQ ID NO: 7812 - protein, 414 aa, Nostoc sp. PCC 7120
MSYYIAPRFLDKLAVHITKNFLNIPGVRVPLILGIHGRKGEGKTFQCELAFEKMGIEVTLISGGELESPDAGDPARLIRLRYRETAELIKVRGKMCVLMINDLDAGAGRFDEGTQYTVNTQLVNATLMNIADNPTDVQLPGSYDSNPIRRVPIIVTGNDFSTLYAPLIRDGRMEKFYWEPNRDDKVGIVGGIFAEDGLSQREIEQLVDTFPKQSIDFFSALRSRIYDIQIRDFIHKVGFERISLRVVNSLEAPPEFKKPDFSLAHLIESGNLVLGEQQRVDNSQLVDEYNRLNRGRGYQTAPPPEAPVIQPVNNSSHKQKTSNTHLSLETQEQIRQILSQGHKITFEHVDARRFRTGSWQSCGTLHIDAESDAISTLEACLVDYDGEYVRMVGIDPKGKRRVVETIIQRPNGKN

SEQ ID NO: 7813 - protein, 358 aa, Vibrio sp. Ex25
MSNSVDLFSPIELGQLALDNRAIMAPLTRARASADHIPNDLMVEYYAQRASAGLIIAECTMVMEGTSAFMAEPGIYNEEQIAAWKKVTDAVHERGGKIVLQIWHAGRACHPELNDGKTPVAASALAIRDELVHTPSGKQAYTVPRALEVDEIASIVAAFKQGAKNAKRAGFDGVEIHGANGYLIDNFLRDGSNLRTDEYGGSVENRARFLLEIVKEVVEVWGPGRVGLRTSPLNGFNDMKDSDPVGLVRYLAKQLNAFDLAYWHVMRADLKGVQKADVLKPARENYQGYLMANVGYSAQEATTAIAENQVDVVAFGVPFIANPDLVERFKKNAPLNEAKPEHFYLGGAEGYTDYPVMA

SEQ ID NO: 7814 - protein, 368 aa, Candida albicans
MATLKNKNNHLKACSTYTDNENHFLVDSRYEIVRVLGKGSYGVVCSAIDTKSSVSAMEHKIAIKKVTKIFNKDILLIRAIRELKFMMFFRGHKNLDVVYVKPYEGLYCFQELADLDLARVLYSNVQFSEFHIQSFMYQVLCGLKYIHSADVIHRDLKPGNILVTTQGTLKICDFGLARGINPVYFRNRSAVITNYVATRWYRAPELIMSTKNYTKAVDIWAVGCILGELFGRRPLFPGKNSHEQIHELFKIIGNPPIETIKKYNWKVEGLLWVKYRPVKWKSLYPFAPLNALELLDSLLQWDYKARLGVEQILEPEFFKNLRNVHGEPSSKAIFDFSFEEKGKSIPQLKEILETEVRVFKEISKTGIE

SEQ ID NO: 7815 - protein, 728 aa, Magnetococcus sp. MC-1
MNQPLSEPMQRLVEARHHDPFELLGRHPDGKGGVLVRVYMPYAEQVRILERGTQQVLNMQRIDGSDFFEWQGQLEQVADDYRLMWKDKWGYEHLNRDPYAQLPMVSDFDLYLFNQGNHTQIQNFLGSHVMQDAHGAGVRFSVWAPNAERVSVVGDFNHWDGRCHPMRVLPNSGVWELFIPDLEPGGYYKFEVRDRLGVIHLKTDPMARQNQLRPETASVITPPSSFEWTDAAWLERRKDWDWQSAPISIYEMHPGSWQRGCEGEFLNYREMAHQLVPYLQELGFTHVELMPITEHPFDLSWGYQATGYFAPTRRFGRPDDFRYFVDYLHSHHIGVLLDWVPAHFPKDAHGLARFDGTPLYEHADPRLGEHLDWNTYIFNFGRNEVKSFLISSAMFWLNEFHLDGLRVDAVASMLYLDYSREEWIPNIYGGRENIEAVEFMRHLNSLVGRECPGALMIAEESTSWPSVTRPPENGGLGFHMKWNMGWMNDSLSYIAEDPIHRKYHHDKLTFSLYYAFSENFLLPFSHDEVVHGKGSMIGKMPGDEWQRFANLRALYLYQFTHPGKKLLFMGTEFGQGNEWNSTTVMEWSLLQYPLHSGMKQLVADLNHLYARLPALHKVDFSWQGFQWLDANDGEQSIAAYLRLDGETHVVVVINFTPVVRRNYRLGVPALSGYREVLNSDSSYYAGSNVGNGQALIMAEEKPWHEQSYSIELTLPPLGGVVLMPDQAE

SEQ ID NO: 7816 - protein, 478 aa, Listeria monocytogenes EGD-e
MEHQKRSPFPKDFLWGSASAAYQIEGAWDADGKGKSVWDEYVRIPGTTFKGTNGDVAVDHYHRYKEDVKLMADAGLKAYRFSIAWTRIFPNGKGEVNEAGLQFYDNLIDELLKYDIEPLVTLYHWDIPQALFDEYGGWESRQVIEDFTNYSTTLFKRYGDRVKYWVSLNEQNIFVGMGYGQALHPPKVSDPKRMYAVNHIANLANASVIKAFHEIVPDGKIGPSFAYTPHYPIDTDPKNVQAADDAEELNSYFWMDMYAFGRYPKAVWKYLEENDIAPVIEDGDMELLASAKPDFMGVNYYQSATVAYNPLDGVGQNNEMNFTGKKGSTKETGVPGVYKKVVNPFVKTTNWDWTIDPKGLQIALRRINSRYALPILITENGLGEFDKLVDGEVNDDYRIDYLSAHATAIRDAISDGVDMLGYCTWSFTDLLSWLNGYQKRYGFVYVDRDVEDDAPMTRIPKKSYYWYKQVIETNGADL

SEQ ID NO: 7817 - protein, 372 aa, Candida albicans
MKKFTGPTQTRQVVFNISQNFKVLKILGEGAYGIVALAVHLPTETKVAIKKIEPFERPLFCLRTLREIKLLTKFKNHDNIVRLYDVQKPMNYDSFNEVYLIQGYMPSDLHNLIHTHLLSDQHVQYFIYQILKGLKMIHSARVIHRDLKPSNILVNEKCDLKICDFGLARLDTKHYNFDEAPRISMLTEYVATRWYRAPEIMLSASNYSTAIDLWSVGCILAELLTYRALFPGSDYINQLKLIFEVLGTPTDEDLQIIKSERAQKFIRSLPTKVKIDLSEFINNHPYRNIKHRGRDQVNPLAIDLLEKLLVFDPAKRITVQDALEHPYLNSYHEQLDEPVTSPIPIEEFDFDIDKKNLDTNDLKKQIFEIVMS

SEQ ID NO: 7818 - protein, 365 aa, Azoarcus sp. EbN1
MNSRLLEPVRLGALELPNRVVMAPLTRCRADNPEFAPTESTARYYAQRASAGLIVSEATIVSAQGRGYPYTPGIWSDAQVTGWRRVTDAVHAAGGRIVCQLWHCGRLSLTEFHDGELPVAPSAVNAEWKMFSAQGLKTTPTPHALSRDEIAAIVADFGRAARNAVLAGFDGVEIHSSNGYLIHQFFSPLANRRDDEYGGSHANRARFFFEVLDAVAAEWSPSRIGFRLNPMMNRFHGMRVDEDTLPMFEHVVRRTNAYELAYLHLTEPYLPNQLDGAVGAIDDVARHFRDIATMAVMTNGGFDQTRAEAALAAGTCDAVAFGRPYISNPDLVERFRAGAPLNEWDADTFYQGGDRGYIDYPTLGG

SEQ ID NO: 7819 - protein, 285 aa, Arabidopsis thaliana
HFLQLLQISYFPENHFPKKNKTFPFVLLPPTAITAYQSELGGDSSPLRKSGRGKIEIKRIENTTNRQVTFCKRRNGLLKKAYELSVLCDAEVALIVFSSRGRLYEYSNNSVKGTIERYKKAISDNSNTGSVAEINAQYYQQESAKLRQQIISIQNSNRQLMGETIGSMSPKELRNLEGRLERSITRIRSKKNELLFSEIDYMQKREVDLHNDNQILRAKIAENERNNPSISLMPGGSNYEQLMPPPQTQSQPFDSRNYFQVAALQPNNHHYSSAGRQDQTALQLV

SEQ ID NO: 7820 - protein, 202 aa, Phytolacca americana
KRRNGLLKKAYELSILCEAEVALIVFSSRGRVYEYSNNNIRSTIERYKKASSDGSNSASFIEINAQYYQQESAKLRQQIQVMQNSNRNLVGECLSSLNVKELKQLENRLERGMSRIRSKKHELLLADIEFLQKREKELEHENSFIRAKINEVERLQQLNMMPSEDLSAMNAFVTRSDHILAQNMLDTSSAFSNASKKLLHLG

SEQ ID NO: 7821 - protein, 165 aa, Triticum aestivum
  misc_feature (147)..(147): Xaa can be any naturally occurring amino acid
MAGMVFGLENPMMTALQHLLDIPDGEAGGAGAAGGEKQGPTRAYVRDARAMAATPADVKELPGAYAFVVDMPGLGSGDIKVQVEDERVLVISGERSREEEEDAKYLRMERRMGKLMRKFVLPENADMEKISAACRDGVLNRPTVREXLPARPKPKKPKTIQVQVA

SEQ ID NO: 7822 - protein, 176 aa, Arabidopsis thaliana
  misc_feature (76)..(76): Xaa can be any naturally occurring amino acid
  misc_feature (93)..(93): Xaa can be any naturally occurring amino acid
  misc_feature (114)..(114): Xaa can be any naturally occurring amino acid
  misc_feature (145)..(146): Xaa can be any naturally occurring amino acid
  misc_feature (148)..(148): Xaa can be any naturally occurring amino acid
  misc_feature (170)..(170): Xaa can be any naturally occurring amino acid
MDPYKYRPSSAYNAPFYTTNGGAPVSNNISSLTIGERGPVLLEDYHLIEKVANFTRERIPERVVHARGISAKGFFXEVTHDISNLTCADFFRXAPGCSKLPVICPFSPPLVHGXCPVPETMRGIRGFCRSKFSTGGGKFFFFWDXXPXFLIRDGVKSRFFPGLNPSPKKXPGSGFG

SEQ ID NO: 7823 - protein, 699 aa, Ustilago maydis 521
MAAATTSAAAQAPAPIDYSKATDGTGVIALDPWLEPFAPALRERYGVYADWVKRINASEGGLEAFSRSYRKMGFQIDPTTQAVTYTEWAPNAVQASLVGDFNNWSRDAHPMSKDDFGKWHITIPPLAKGQCAIPHDSKIKVSFVLPSGERIERLPAWILRVTQDLNVSPVYDARFWNPAKQDRYTMRFPKPPKPDNIKVYEAHVGIATPEARVGQFKEFTKNVLPRIKELGYNTIQLMAIQEHAYYASFGYQVTNFFAASSRYGNPEDLKELIDVAHSLGITVLLDIVHSHACKNVLDGLNMFDGTDHLYFHEGGKGRHELWDSRLFNYGHHEVLRFLLSNCLFWMEEYGFDGFRFDGVTSMLYTHHGIGTGFSGGYHEYFGPSVDVEAVVYLMLANQMIHEYNPKAITIAEDVSGMPALCRPVSEGGVGFDYRLSMAVPDMWIKLLKETSDEDWDFGNICFTLTNRRHLEKSIAYAESHDQALVGDKTLAFWLMDKEMYTNMSDLTERTQVIDRGLALHKMIRLITHALGGEGYLNFIGNEFGHPEWLDFPREGNGNSFHYARRQFNLVDDQLLRYKYLYAFDAAMNKAEEKYKWLAAPQAYISLKHDSDRVVAFERAGLLFVFNWHADKSYTDYRIGVDVPGKYRVLLDTDQASLGGHARLDHATEYFSTDMAWNGRSNFVQLYLPSRSAIVLYRAG

SEQ ID NO: 7824 - protein, 222 aa, Zea mays
MAGASLLSPSCTLLRLIPSASHFKRFDRVRRFAPAAMATSSGPKEAPANNPGLQTEVDPATKGYFLQQTMLRVKDPKVSLDFYSRVMGMSLLKRLDFEEMKFSLYFLGYEDVTLAPDDHIKRTEWTFRQKATLELTHNWGTENDPEFKGYHNGNSDPRGFGHIGVTVDDVHKACERFERLGVEFVKKPDDGKIKGIAFIKDPDGYWIEIFDQTIGTVTSSAS

SEQ ID NO: 7825 - protein, 166 aa, Aspergillus oryzae
MSLFRTMPTAGDFSPLFRLLDDYDTHRQSRGQVSSVRSFAPRFDVRETDDAYHFDGELPGISQKDIDIQFSDPQTLVIKGRSEREYHSPEAGETKETEGESKEVVKKENNKPRFWVSERSVGEFHRTFTFPSRVDQENVKASLKNGILSLVVPKAAAYTGKKITIE

SEQ ID NO: 7826 - protein, 716 aa, Claviceps purpurea
MVRTSLAAFSLAVAGLASAQCPFADPGRLAARAQGLDESSRGHLAGFEVDDSEGYLTSDVGGPIEDQNSLKAGDRGPTLLEDFIFRQKITHFDHERVPERAVHARGTGAHGTFTSYGDYSNITAASFLGQKDKKTPVFVRFSTVAGSRGSADTARDVHGFAVRLYTDEGNFDIVGNNVPVFFIQDAIQFPDLIHSVKPRQDNEIPQAATAHDSAWDFFSQQTSTLHTLFWAMAGYGIPRSLRHMDGFGVHTYRLVTDDGTSKLVKWHWKSKQGKASLVWDEAQRAAGKNADYHRQDLFDAIQSGNYPEWELNLQIINEDQALAFGFDVLDPTKIIPEEYAPLMPVGVMRLDANPSNYFAETEQVMFQPGHIVRGVDFTEDPLLQGRIFSYLDTQINRHGGPNFEQLPINRPVVPIHNNNRDGAGQNFIHKNNAPYTPNTLNKGFPKQANQKEGKGFFTAPGRKVSGSLQRRLSNTFLDHWTQPRLFFNSITPIEQQFLINAIRFETSHLSQVVQKNVLAQLNKISHDVAVRVGKALGLDAPPADDKYYHNNQTKGLSIFGEELPTIATLIVGVLASTASKNSLAQAQALKDAFKTREVNVIVVAESLATGVDQTYDAADAVSFDGIVVADGVEALFDNTKKSSLFQPGRPSQIVNDGYNWGKPMGFLGSAKRAVKATSVVEGAGVYMRNSTATLVGDFQKGLAKFKFTDRFPMDTK

SEQ ID NO: 7827 - protein, 366 aa, uncultured bacterium
MTDQNLFTPYTLGALTLSNRVVLAPLTRNRAGEGFVPSEFAATYYSQRASAGLLISEATQISRQGQGYQDTPGIYTPAQIDGWRTVTDAVHAKGGKIFLQLWHVGRVSHVDLQENGAAPVAPSALRAATKVFVNNRFEDVSEPRALDIKELPGIVADFRQAAANAVCAGFDGVEIHGANGYLLDQFLRDSANLRTDAYGGSIENRARLLLEVTAAVVNEIGADRTGVRLSPVSPANGVSSSDPQAQFDYVVEQLDALDVVYLHVVEGATGGPRDVAPFDFGALRQRFKNTYIANNGYDLDLATSKLAEDQADLIAFGRPFIGNPDLVERLKRGAPLSAFNPATLYGGGATGYIDYPTLAESSASAS

SEQ ID NO: 7828 - protein, 237 aa, Frankia sp. CcI3
MTDRLYFRQLLSGRDFAVGDPVGTQMVNFVYLVGDRETGEALVVDPAYKVDDLLNLLAADGMRLTGALVTHYHADHIGGNAFGLEIEGVRQLLGRQNVPIHVNRAEAEWVRRATEVSAADLVEHDDDDVVTVGEIPVRLLHTPGHTPGSQCFLVDDRLVAGDTLFLEGCGRMDLPGGDAGLMYDSLRRLAALPDTTTVFPGHQYSPQASEDLAVVKRMNHVFRPTSAQQWKAMLGLS

SEQ ID NO: 7829 - protein, 576 aa, Schizosaccharomyces pombe
MQPQEVDLMENSTMRNGARVLPPEAISKRHIGPYIIRETLGEGSFGKVKLATHYKTQQKVALKFISRQLLKKSDMHMRVEREISYLKLLRHPHIIKLYDVITTPTDIVMVIEYAGGELFDYIVEKKRMTEDEGRRFFQQIICAIEYCHRHKIVHRDLKPENLLLDDNLNVKIADFGLSNIMTDGNFLKTSCGSPNYAAPEVINGKLYAGPEVDVWSCGIVLYVMLVGRLPFDDEFIPNLFKKVNSCVYVMPDFLSPGAQSLIRRMIVADPMQRITIQEIRRDPWFNVNLPDYLRPMEEVQGSYADSRIVSKLGEAMGFSEDYIVEALRSDENNEVKEAYNLLHENQVIQEKSHLSKSKRVDSFLSVSPPAFSEYTSELQKKSKQELIDPTLEGPRWTVSDPPTYAKQTIDSNICVLVPTAEKNKLEMRTLADAASAVDTSQSTRKKSRRNKWHFGVRCRGDAPEILLAVYRALQRAGAQFTVPKPVNGKYRSDMYTIKSRWEIPHCKREGKNTYAYIELQLYEVMPGCFMLDVKSNGYKDIYSHPERTADHGMDDLKSSSPFSDLCAMLVCKLFSA

SEQ ID NO: 7830 - protein, 509 aa, Hordeum vulgare
MRSSPVLLLVIALVAAAHLAPLECDGPNPNPEIGNTGGLSRQGFPAGFVFGTAASAYQVEGMARQGGRGPCIWDAFVAIQGMIAGNGTADVTVDEYHRYKEDVGIMKNMGFDAYRFSISWSRIFPDGTGKVNQEGVDYYNRLIDYMLQQGITPYANLYHYDLPLALHQQYLGWLSPKIVGAFADYAEFCFKVFGDRVKNWFTFNEPRVVAALGYDNGFHAPGRCSKCPAGGDSRTEPYIVTHNIILSHAAAVQRYREKYQPHQKGRIGILLDFVWYEPHSDTDADQAAAQRARDFHIGWFLDPITNGRYPSSMLKIVGNRLPGFSADESRMVKGSIDYVGINQYTSYYMKDPGAWNQTPVSYQDDWHVGFVYERNGVPIGPRANSDWLYIVPWGMNKAVTYVKERYGNPTMILSENGMDQPGNVSIADGVHDTVRIRYYRDYITELKKAIDNGARVAGYFAWSLLDNFEWRLGYTARFGIVYVDFNTLKRYPKDSALWFKNMLSEKKRS

SEQ ID NO: 7831 - protein, 682 aa, Polaromonas sp. JS666
MPHEPMAPFPRLLSPLKVGAHTLGNRTLMGSMHTRLESLDRSIDRLSLFYAERARGGVGLIVTGGYAPCQDGLLDETGPLLVTPEQADALKPIPQAVHAEGGKIILQILHTGRYAKVARPVGASDIPSPINPRAPRALSTAEVWQTIEDYVRCAELAQRAGFDGVEIMGSEGYLLNQFTVTRTNNRSDEFGGSMENRHRLPVEIVQRTRERLGPEFLLMFRVSALDLVEGGAPAAEIIQLAQAVQAAGADILNTGIGWHEARIPTIAYVVPRAAWRFAAARIKKAVTIPVIVSNRINTPDLAEEILASGDADMVSMARPFLADADFVRKAAEGRANEINTCIACNQACLDYIFADRPATCLVNPRAGRELEFSLMPPPAARRKVAVIGAGAAGLACALSAAERGHAVTLFEAGPEIGGQLNLARAVPGKQEFNELLRYFKQGVARHGVTLKLDTRADAPSLAAGHYDRIVVATGVRPRLPQIPGIPHPKVVSYADLLSDRVQAGHKVAVIGAGGIGFDVATFLLHESPADAARPQTVAQFQAEWGVDTSPTAAGGLKPAQPVSAAREVTLLQRKLEKPGRTLGMSTGWALKAELARRGLRTLSGCTYERIDDTGLHLSVNGVPQTLVVDTIVLCAGQDSENTLAAELRALGLAPEIIGGADLAAELDALRAIDQGTRLGLAL

SEQ ID NO: 7832 - protein, 108 aa, Triticum aestivum
QPQSPSVADRFEGITCNKAEGAMYLFPQICLPQKAIEAAKAANKAPDAFYALRLLESTGIVVVPGSGFGQVPGTWHFRCTILPQEEKIPAIISRFTVFHETFMAEYRD

SEQ ID NO: 7833 - protein, 996 aa, Emericella nidulans
MVQSPMISCPLKQTNEIDWIQPLKDYIRQSYGEDPERYSQECATLNRLRQDMRGAGKDSATGRDLLYRYYGQLELLDLRFPVDENHIKISFTWYDAFTHKPTSQYSLAFEKASIIFNISAVLSCHAANQNRADDIGLKTAYHNFQASAGMFTYINENFLHAPSTDLNRETVKTLINITLAQGQEVFLEKQIMDHKKAGFLAKLASQASYLYAQAIEGTQEHAKGIFDKSWVTLLQVKSAHMGSVASYYQALADGESGSHGVTVARLQLAEKHSTSALSWAKSLPSSISPNTNLTSEAGPSLVNIVKFHLANVQSQLATFVKDNDFIYHQPVPSEAGLSAVSKLPAAKAIPVSELYQGQDIQRIIGPDIFQKLVPMSVTETASLYDEEKAKLIRAETEKVETADGEMAASLDYFKLPGSLNILKGGMDQEVMVDEEFQRWCQELAGHDSFAKAFDTLQDRKSEVLATLDQCAKQLDLEESVCEKMRSKYGADWSQQPSSRLNMTLRNDIRTYRDTVHEASASDAQLSATLRQYESDFDEMRSAGETDEADVLFQRAMIKAGSKQGKTKNGVTSPYSATEGSLLDDVYDDGVPSVAEQIARVESILKKLNLVKRERTQVLKDLKEKVRNDDISNVLILNKKSITGQESQLFEAELEKFHPHQMRIVQANHKQTALMKELTKTYGDLLQDKRVRAEQSKYESITRQRNSVMARYKKIYDSFNNLGSGIKQAQTFYAEMTETVDSLKKNVDTFINNRRSEGAQLLGQIEREKAAGTSDHEEREREKLRQLMERLSTEPKPPSVPPGSSTAGPAKAKSPPPPVKAPAYPTNIAPPKASPHFAPTVPQQHGTPVSHSPAPYSQYVPPGAGVSYLPSQSFQQGAAAPLSEGYNPMAYPIPASSMSPPPSQPFYSPTPTPFYTSPTPPVPSGQYMPPRLCSPSATSPTTTAHLPTINRAVPLGTRRVCSEPTIRKQPAPQGSFTVITANWDLPFPQILPILGPG

SEQ ID NO: 7834 - protein, 378 aa, Arabidopsis thaliana
METRNETKASPENNLRNRGADGNNSKKDMIFRADKIDLKNLDIQLEKHLSRVWSRSIEKHPKPKEEWEIELAKLEMRNVIARGAYGIVYKGIYDGQDVAVKVLDWGEDGYATTAETSALRASFRQEVAVWHKLDHPNVTRFVGASMGTANLKIPSSAETENSLPQRACCVVVEYIPGGTLKQYLFRNRRKKLAFKVVVQLALDLSRGLSYLHSERIVHRDVKTENMLLDYQRNLKIADFGVARVEAQNPKDMTGETGTLGYMAPEVLDGKPYNRRCDVYSFGICLWEIYCCDMPYPDLSFADVSSAVVRQNLRPDIPRCCPTALATIMKRCWEANPEKRPEMEEVVSLLEAVDTTKGGGMIPEDQRPGCFCFVSGRGP

SEQ ID NO: 7835 - protein, 236 aa, Brassica napus
  misc_feature (59)..(59): Xaa can be any naturally occurring amino acid
  misc_feature (132)..(132): Xaa can be any naturally occurring amino acid
  misc_feature (183)..(184): Xaa can be any naturally occurring amino acid
  misc_feature (199)..(199): Xaa can be any naturally occurring amino acid
  misc_feature (204)..(204): Xaa can be any naturally occurring amino acid
  misc_feature (209)..(210): Xaa can be any naturally occurring amino acid
  misc_feature (216)..(216): Xaa can be any naturally occurring amino acid
  misc_feature (219)..(219): Xaa can be any naturally occurring amino acid
  misc_feature (227)..(227): Xaa can be any naturally occurring amino acid
MKGEGNEMFPKLPQNHSLSSHFHLPATIAVDDSSIEVVRRPRGRPPGSKNKPKPQVYVXTRDTEPPMSPYILEVPSGNDVVEAINRFCRRKSIGENPSACAFSVALDSVANITLRQPSPAAPGSTITFHGKXFDLLSVSATFLPPPPRTSLSPPVANFFTVSLAGPQGQIIGGFVAGPLISAXXTVYVIAASFNNPSYXRFTGXREEHXXSISARXREXGDGQSPRXFGRRRAKKG

SEQ ID NO: 7836 - protein, 544 aa, Aeromonas salmonicida
MAAKEVKFGNEARIKMLEGVNILADAVKVTLGPKGRNVVLDKSFGAPTITKDGVSVAREIELEDKFQNMGAQMVKEVASKANDAAGDGTTTATVLAQAIVNEGLKAVAAGMNPMDLKRGIDKAVIAAVAELQVLSQPCADNNAIAQVGTISANSDEKVGRLIAEAMDKVGRDGVITVEDGQGLDDELAVVEGMQFDRGYLSPYFVNKPETGAVELDDPFILLVDKKVSNIREMLPVLEGVAKAGKPLLIVAEDVEGEALATLVVNTMRGIVKVAAVKAPGFGDRRKAMLQDIAMLTSGGTVIEEVGMELEKATLEDLGRAKRIVITKENTTIIDGVGDAALIESRVAQIRQQIEETSSDYDREKLQERVAKLAGGVAVIKVGAATEVEMKEKKARVDDALHATRAAVEEGVVAGGGVALVRVAAKLAGLRGDNEDQNVGIKVALRAMEAPLRQIVINAGEEASVIANAVKNGEGNFGYNAYTEQYGDMLAMGILDPTKVTRSALQFASSIAGLMITTECMITELPKKDTPAMPDMGGMGGMGMM

SEQ ID NO: 7837 - protein, 501 aa, Emericella nidulans
MGQNDDQKTYRYNESPVYTTSNGCPVMDPQASQRVGPNGPLLLQDFNLIDLLAHFDRERIPERVVHAKGAGAYGEFEVTDDISDITVIDMLKGVGKKTKTFVRFSTVGGEKGSPDSARDPRGFACKFYTEEGNWDWVFNNTPVFFLRDPSKFPMFIHTQKRNPQTNLKDATMFWDYLSTHQEAVHQVMHLFSDRGTPYSYRHMNGYSGHTYKWIKPDGTFNYVQLHLKTGQGNKTFTDAEATRLAAENPDWHTQDLFNAIARGEYPSWTCYVQTLSPEQAEKFRWNIFDLTKVWPQSEVPLRRFGRFTLNKNPENYFAEVEQAAFSPSHLVPGVEPSADPVLQARLFSYPDTHRHRLGTSNYQSIPVNCPLRAFTPFHRDGAMSVNGNHGANPNYPSTFRPLQYKPVKASQEHEKWAGSVVTEQLPVTDEDFVQANGLWKVLGRQPGQQENFVGNVAGHLCNAHPRVRQATYGMFRRVNADLGKRIEKATEKKATEARARL

SEQ ID NO: 7838 - protein, 534 aa, Haloarcula marismortui ATCC 43049
MARLESAEMLDAPQQEAIPTLADDEAGTVVWHREHLRIRDQGAVARAAASEYVLPLFVFDPAFYGADGLACDSRIRFLHDCLADLSDQYHTATGCGLTYAHGDPVDVLGRFREAGWDIVTMAAPTGRYGRERDRRVREQCDVTFVDGDGLVRDRAATRDGWQDDVSAWFAADQHDWDPSTVTSRSFDSGIDISTIEDHYDIAPSKSDVPRGGTGPARERLSAFAERIDDYPGNISAPVDARDGTSGLSPYLAFGCLSVRQVIQYIDEHAPDGRGKEMFVSRLFWNKHYEQKLEDWPGWLETAVNPVLEGFNAEQYDPDLVAAWKHGQTGFPMVDASMRCLRQTGWLNFRMRSMSASVYYHLLQQPWRIGADWFYHHLIDASAAINYTQWQSQCGLVGKPALRLYNPRKQVRDQDPDGEFIRQWVPELESLPDEYLDRPEQTPVHVQASCGVDIGDDYPHPVVDYDAARQAFHRRYEAVRPDAADALHDPTIARRVSFSGGREAAARIAAEHGTDASNGTENSRTQASLDSFGDE

SEQ ID NO: 7839 - protein, 412 aa, Oryza sativa
MAFDAFTDKNAVFRRLKAKPENKMCFDCSAKNPTWASVTYGIFLCLDCSAVHRSLGVHITFVRSTNLDSWTPDQLKMMAFGGNNRAHAFFKQHGWTDGGKVDAKYTSRAAELYRQILQKEVAKSSADNVLPSSPVAASQPQNPSDDFPEFKLPEAPAENTNGKQEPDVTNSQKAPTQTPKAPTHPTFATSVKKSIGAKKIGGKTGGLGVKKLTTKPSESLYDQKPEEPKPAAPVMTTSTTKSGPSLHSRFEYVENEPAVDSRNGGTQMTGHVAPPKSSNFFQEYGMDNGFQKKTSTAATKTQIQETDEARKKFSNAKAISSSQFFGNQSREEKDAQMSLQKFAGSSSISSADLFGRRDMDDSNLDLSAADLINRISFQASQDLSSLKNMAGETGKKLTSIASNFISDLDRIL

SEQ ID NO: 7840 - protein, 267 aa, Oryza sativa
MEWDKAKASSGEAVDDRGGGEGGLGYVKVMTDEQMEVLRKQISIYATICEQLVEMHRALTAQQDSIAGMRLGNLYCDPLMVPGGHKITARQRWTPTPMQLQILENIFDQGNGTPSKQKIKDITAELSQHGQISETNVYNWFQNRRARSKRKQAALPNNNAESEAEADEESPTDKKPKSDRPLHQNIAMRDHNSERISEMHHFDTEHEQIRRMMYASNDSSSRSSGSLGQMSFYDNVMSNPRIDHFLGKVESPGSFPHMRSGESFDMY

SEQ ID NO: 7841 - protein, 152 aa, Pisum sativum
MDLDSPLFNTLHHIMDLTDDTTEKNLNAPTRTYVRDAKAMAATPADVKEHPNSYVFMVDMPGVKSGDIKVQVEDENVLLISGERKREEEKEGVKYLKMERRIGKLMRKFVLPENANIEAISAISQDGVLTVTVNKLPPPEPKKPKTIQVKVA

SEQ ID NO: 7842 - protein, 631 aa, Oncidium Gower Ramsey
MEGCDCIEPQWPADELLVKYQYISDFFIALAYFSIPLELIYFVKKSSFFPYRWVLIQFGAFIVLCGATHLINLWTFTMHSRTVAIVMTVAKVSTAGVSCATALMLGHIIPDLVSVKTRELFLRNKAEELDREMGLIRTQEETGRHVRMLTHEIRSTLDRHTILKTTLVELGRTLDLAECALWMPLRTGLHLQLSHTLNNKIPVGSVVSINLPIVNQIFNSSRAGRIPNTCPLARFQPYTGRYVPQEVVAVRVPLLHLSNFQINDWPELSPKSFAVLVLMLPSDSARKWHAYELELVEVVADQVAVALSHAAILEESMRARDLLMDQNVALDLARREAEMAIRARNDFLAVMNHEMRTPMHAIIALSSLLLETELTPEQRLMVETILKSSNLLATLINDVLDLSKLEDGSFELEATIFNLHTVFREAVNLIKPIAAVKKLSLFVSLAPDLPSCAIGDEKRLLQIMLNVVGNAVKFTKEGTIFITVNIAKPDSLRDPDFYPAPTDGHFYLRVQVKDTGCGISPQELPHLFTKFAHTQNGSDKGYSGSGLGLAICKRFVNLMKGHIWLESEGIGKGCTTIFIVKLGMSEDPTLRYQQKLLPPIRAGQAEADPFGLKPAALKDELMPKIRYQRSL

SEQ ID NO: 7843 - protein, 631 aa, Oncidium Gower Ramsey
MEGCDCIEPQWPADELLVKYQYISDFFIALAYFSIPLELIYFVKKSSFFPYRWVLIQFGAFIVLCGATHLINLWTFTMHSRTLAIVMTVAKVSTAVVSCATALMLVHIIPDLLSVKTRELFLRNKAEELDREMGLIRTQEETGRHVRMLTHEIRSTLDRHTILKTTLVELGRTLDLAECALWMPLRTGLHLQLSHTLNNKIPVGSVVSINLPIVNQIFNSSRAGRIPNTCPLARFQPYTGRYVPQEVVAVRVPLLHLSNFQINDWPELSPKSFAVLVLMLPSDSARKWHAYELELVEVVADQVAVALSHAAILEESMRARDLLMDQNVALDLARREAEMAIRARNDFLAVMNHEMRTPMHAIIALSSLLLETELTPEQRLMVETILKSSNLLATLINDVLDLSKLEDGSFELEATIFNLHTVFREAVNLIKPIAAVKKLSLFVSLAPDLPSYAIGDEKRLLQIMLNVVGNAVKFTKEGTVFITVNIAKPDSLRDPDFYPAPTDGHFYLRVQVKDTGCGISPQELPHLFTKFAHTQNGSDKGYSGSGLGLAICKRFVNLMKGHIWLESEGIGKGCTTIFIVKLGMSEDPTLRYQQKLLPPIRAGQAEADPFGLKPAAPKDELMPKIRYQRSL

SEQ ID NO: 7844 - protein, 493 aa, Methanosarcina mazei Go1
MCGIAGMFGTPDSNTKVKKMLAILGHRGPDACGIHTEGKLSIGNTLLKITGDMPQPLTGTGSLVLNGEIYNFRELAAEIGLKTDSDTELLFTLIERKVRKGIKPTNAVFSVLSKVNGDYALAYACGTELVLARDPSGVKPLYYFYEKSMVKPGLAFASEKKALAFTGREVKPFPQGGIMGFSTENGKIAEKFTEKSLKITQPEKRISAEKEAIIYLKAALEKAVELRLTPVSGIAFSGGIDSTFLAALAKRIDPYVSLYAVGLPDSHDIAQAEYAAEAIGMKRNLKTHFLSPEEIEAAVPEVIYATESTDPMKVAIGLPLHIVAKTAREEGKRVLLTGQGADELFGGYSRHEGFFEQGADVLDREIYSDLENISAINLERDDMVAMANSVELRVPFLDKEVIKTGLAISPELKVRKKEGVYIRKYILRKAAEGLLPPKILWKEKKAVQYGTGVQKTLDRLARDSGFSKKQGGHIEKYLSQIASEKGFDFINEM

SEQ ID NO: 7845 - protein, 158 aa, Pisum sativum
MSLIPSFFSGRRSNVFDPFSLDVWDPLKDFPFSNSSPSASFPRENPAFVSTRVDWKETPEAHVFKADLPGLKKEEVKVEVEDDRVLQISGERSVEKEDKNDEWHRVERSSGKFLRRFRLPENAKMDKVKASMENGVLTVTVPKEEIKKAEVKSIEISG

SEQ ID NO: 7846 - protein, 534 aa, Gibberella zeae PH-1
MGNNNSSQGGSGSKGSGSAGPDGPLQSYPSFSRSDTKDSSRSFRTLGSKIRSSSKSDSPRNSKVLSNGENPVESKSDDRRSSRHGRSSSSRLSRSELPPLNTAGTDISTSESALADSAVGEDQPPPSPVHGNAKGGNHDVSAAQASGEVDHVSDQPPSVNAGANAHMQAPGQSILVKRENTINPVNNGPSDESRADGNSNVAMSEIKDIDLDDFIKRLLDAGYAGKVTKSVCLKNAEIVAICQRAREVFLSQPALLELDAPVKVVGDVHGQYTDVIRMFEMCGFPPNSNYLFLGDYVDRGKQSLETILLLLCYKLKFPENFFLLRGNHECANVTRVYGFYDECKRRCNVKIWKTFIDCFNTLPIAAIVAGKIFCVHGGLSPALVHMDDIRNIARPTDVPDYGLLNDLLWSDPADMEQDWEANERGVSYCFGKRVITEFLAVHDFDLICRAHMVVEDGYEFFNDRVLVTVFSAPNYCGEFDNWGAVMSVSAELLCSFELLKPLDSSALKSHIKKSRNKRQHMLNSPPAMIQPQSM

SEQ ID NO: 7847 - protein, 631 aa, Oncidium Gower Ramsey
MEGCDCIEPQWPADELLVKYQYISDFFIALAYFSIPLELIYFVKKSSFFPYRWVLIQFGAFIVLCGATHLINLWTFTMHSRTLAIVMTVAKVSTAVVSCATALMLVHIIPDLLSVKTRELFLRNKAEELDREMGLIRTQEETGRHVRMLTHEIRSTLDRHTILKTTLVELGRTLDLAECALWMPLRTGLHLQLSHNLNNKIPVGSVVSINLPIVNQIFNSSRAGRIPHTCPLARFQPYTGRYVPLEVVAVRVPLLNLSNFQINDWPELSPKSFAVLVLMLPSDSARKWHAYELELVEVVADQVAVALSHAAILEESMRARDLLMDQNVALDLARREAEMAIRARNDFLAVMNHEMRTPMHAIIALSSLLLETDLTPEQRLMVETVLKSSNLLATLINGVLDLSKLEDGSFELEATIFNIHTVFREAVNLIKPIAAVKKLSLFVSLAPDLPSCAIEDEKRLLQIMLNVVGNAVKFTKEGPIFITANTAKPDSLRDPDFYPAPNDGHFYLRVQVKDTGCGISPQEFPPLFTKFAHTQNGSDKGYSGSGLGPAICKRFINLMKGHIWLESEGTGKGCTTIFIVKLGMSEDPTLRYQQKLLPPIRAGQSEADPFGLKPAAPKGELLPKIRYQRSL

SEQ ID NO: 7848 - protein, 574 aa, Oncidium Gower Ramsey
FGAFIVLCGATHLINLWTFTMHSRTLAIVMTVAKVSTAVVSCATALMLVHIIPDLLSVKTRELFLRNKAEELDREMGLIRTQEETGRHVRMLTHEIRSTLDRHTILKTTLVELGRTLDLAECALWMPLRTGLHLQLSHTLNNKIPGGSGGSINLPIVNQIFNSSRAGRIPNTCPLARFQPYTGRYVPQEVVAVRVPLLHLSNFQINDWPELSPKSFAVLVLMLPSDSARKWHAYELELVEVVADQVAVALSHAAILEESMRARDLLMDQNVALDLARREAEMAIRARNDFLAVMNHEMRTPMHAIIALSSLLLETELTPEQRLMVETILKSSNLLATLINDVLDLSKLEDGSFELEATIFNLHTVFREAVNLIKPIAAVKKLSLFVSLAPDLPSCAIGDEKRLLQIMLNVVGNAVKFTKEGTIFITANIAKPDSLRDPDFYPAPTDGHFYLRVQVKDTGCGISPQELPHLFTKFAHTQNGSDKGYSGSGLGLAICKRFVNLMKGHIWLESEGIGKGCTTIFIVKLGMSEDPTPRYQQKLLPPIRAGQAEADPFGLKPAAPKDELMPKIRYQRSL

SEQ ID NO: 7849 - protein, 823 aa, Triticum aestivum
MATFAVSGATLGVARPAGAGGGLLPRSGSERRGGVDLPSLLLRKKDSSRAVLSRAASPGKVLVPDGESDDLASPAQPEELQIPEDIEEQTAEVNMTGGTAEKLESSEPTQGIVETITDGVTKGVKELVVGEKPRVVPKPGDGQKIYEIDPTLKDFRSHLDYRYSEYRRIRAAIDQHEGGLEAFSRGYEKLGFTRSAEGITYREWAPGAHSAALVGDFNNWNPNADTMTRDDYGVWEIFLPNNADGSPAIPHGSRVKIRMDTPSGVKDSISAWIKFSVQAPGEIPFNGIYYDPPEEEKYVFQHPQPKRPESLRIYESHIGMSSPEPKINSYANFRDEVLPRIKRLGYNAVQIMAIQEHSYYASFGYHVTNFFAPSSRFGTPEDLKSLIDRAHELGLLVLMDIVHSHSSNNTLDGLNGFDGTDTHYFHGGPRGHHWMWDSRLFNYGSWEVLRFLLSNARWWLEEYKFDGFRFDGVTSMMYTHHGLQMTFTGNYGEYFGFATDVDAVVYLMLVNDLIHGLHPDAVSIGEDVSGMPTFCIPVPDGGVGFDYRLHMAVADKWIELLKQSDESWKMGDIVHTLTNRRWLEKCVTYAESHDQALVGDKTIAFWLMDKDMYDFMALDRPSTPRIDRGIALHKMIRLVTMGLGGEGYLNFMGNEFGHPEWIDFPRGPQTLPTGKVLPGNNNSYDKCRRRFDLGDADFLRYHGMQEFDQAMQHLEEKYGFMTSEHQYVSRKHEEDKVIIFERGDLVFVFNFHWSNSFFDYRVGCSRPGKYKVALDSDDALFGGFSRLDHDVDYFTTEHPHDNRPRSFSVYTPSRTAVVYALTE

SEQ ID NO: 7850 - protein, 242 aa, Malus x domestica
MEFANQAPESSTQKKLGRGKIEIKRIENTTNRQVTFCKRRNGLLKKAYELSVLCDAEVALIVFSTRGRLYEYANNSVRATIDRYKKACADSTDGGSVSEANTQFYQQEASKLRRQIREIQNSNRHILGESLSTLKVKELKNLEGRLEKGISRIRSKKNEILFSEIEFMQKRETELQHHNNFLRAKIAESEREQQQQQTHMIPGTSYDPSMPSNSYDRNFFPVILESNNNHYPRQGQTALQLV

SEQ ID NO: 7851 - protein, 245 aa, Malus x domestica
MAYESKSLSLDSPQRKLGRGKIEIKRIENTTNRQVTFCKRRNGLLKKAYELSVLCDAEVALIVFSNRGRLYEYANNSVKGTIERYKKASADSSNTGSVSEASTQYYQQEAAKLRARIVKLQNDNRNMMGDALNSMSVKDLKSLENKLEKAISRIRSKKNELLFAEIEYMQKRELDLHNNNQLLRAKIAENERASRTLNVMAGGGTSSYDILQSQPYDSRNYFQVNALQPNHQYNPRHDQISLQLV

SEQ ID NO: 7852 - protein, 159 aa, Dactylis glomerata
MEGRVFGLETPLMTALQHLLDIPDGEAGNAGGEKQGPTRAYVRDARAMAATPADVKELPGAYAFVVDMPGLGSGDIKVQVEDERVLVISGERRREEKEDAKYLRMGAPDGKLMRKFVLPENADMEKISAVSRDGVLTVSVEKLPPPEPKKPKTIQVQVA

SEQ ID NO: 7853 - protein, 145 aa, Magnetococcus sp. MC-1
MSTLMSYDPFHRVRTLQNELNRLFDPGWDDGNSQMAKLSMGVDIREDENQIVIKADLPGMSQEAIQVNVEHNTLTISGERTFGDEVNRDRYHRVERAYGRFSRSFQLPNTTDTANIKASYVNGVLEVALPKREESKPRAIQIEVQ

SEQ ID NO: 7854 - protein, 483 aa, Bacillus subtilis subsp. subtilis str. 168
MSSNKLTTSWGAPVGDNQNSMTAGSRGPTLIQDVHLLEKLAHFNRERVPERVVHAKGAGAHGYFEVTNDVTKYTKAAFLSEVGKRTPLFIRFSTVAGELGSADTVRDPRGFAVKFYTEEGNYDIVGNNTPVFFIRDAIKFPDFIHTQKRDPKTHLKNPTAVWDFWSLSPESLHQVTILMSDRGIPATLRHMHGFGSHTFKWTNAEGEGVWIKYHFKTEQGVKNLDVNTAAKIAGENPDYHTEDLFNAIENGDYPAWKLYVQIMPLEDANTYRFDPFDVTKVWSQKDYPLIEVGRMVLDRNPENYFAEVEQATFSPGTLVPGIDVSPDKMLQGRLFAYHDAHRYRVGANHQALPINRARNKVNNYQRDGQMRFGDNGGGSVYYEPNSFGGPKESPEDKQAAYPVQGIADSVSYDHYDHYTQAGDLYRLMSEDERTRLVENIVNAMKPVEKEEIKLRQIEHFYKADPEYGKRVAEGLGLPIKKDS

SEQ ID NO: 7855 - protein, 379 aa, Emericella nidulans
MAEFVRAQIFGTTFEITSRYTDLQPVGMGAFGLVCSARDQLTAQPVAVKKIMKPFSTPVLSKRTYRELKLLKHLRHENIISLSDIFISPLEDIYFVTELLGTDLHRLISSRPLEKQFIQYFLYQIMRGLKYCHSAGVVHRDLKPSNILINENCDLKICDFGLARIQDPQMTGYVSTRYYRAPEIMLTWQKYDAKVDVWSAACIFAEMLLGAPLFPGKDHVNQFSIITELLGTPPDDVIQTICSENTLRFVKSLPKREPQDLAKLPKFLALVHPDKKPEEDEDYKNTINLLKAMLVYNPKDRISAEAALAAPYLAPYHDETDEPVAEEKFDWSFNDADLPVDTWKIMMYSEILDFHNIDQGGDINPALVEGAGLNQQGFQ

SEQ ID NO: 7856 - protein, 270 aa, Zea mays
  misc_feature (203)..(203): Xaa can be any naturally occurring amino acid
  misc_feature (252)..(252): Xaa can be any naturally occurring amino acid
METSAATPTRPPHQAATSPSPSPSSSLRLWRPAAQHNMRNQWSHLSAAKEQWLAAVADGRAHASALVNVHLSCRNMPTMDLGVLKDMPGIRDKANSKLALREEQYSGMLLSAYKEMVRQLSYLVEASHSMRRFSKAAPNCPITQFSDRQDNLNDSGDGGGAPVFKWFSVLEFESLAQELVQMFVSEQKLKRLLLLEFLSIALXEGVELQTSLNWGDELYDERLGSQRPGNLPLHEVLQVYLTTWHANMNINXEIDEIFELVEEEMKIKLS

SEQ ID NO: 7857 - protein, 335 aa, Chromobacterium violaceum ATCC 12472
MSRITLSRFLIEQQRKAGTLPPELRLLIETVGRACKAISYSVNKGALADVLGEAGTGNIQGEAQKKLDVIANDFLLDANEWGGSLAAMASEEMELPYHIPGEYPKGEYLLMFDPLDGSSNIDVNISVGTIFSILRCPEGVTQPTETDFLQPGTHQVAAGYTVYGPQTMLVLTFGSGVHGFTLDREHGSFVLTHPDMKVPERTAEFAINMSNMRHWEAPVRRYVEEMLAGKTGPRGRDFNMRWVASMVAEVHRIITRGGIFMYPKDARDPSKAGKLRLMYEGNPMAFIIEQAGGAATNGHQRILDIVPTKLHERVAVFLGSKEEVELVTRYHSEQQ

SEQ ID NO: 7858 - protein, 520 aa, Pyrus communis
DVQYLTGHVDERKPPQLADFLNWFLHDKKGTSTLSKPSSTGHRPHHVRVTGRLSTSCHLVDEDRELLLPRRHHNDDDHDNHVSSIFIDQSLTDGGEGGQIIKETSLLPGDQTRFGLESSLMRLELKGNSPHCLVQSDIPPCVQGDASEALDVTATAVASLEECARLSEENDVVQQAYRKEIVVSRNQVIRNSVEQPKVTLYNQSDLEGVHSELVKQGRITAVTNPRYLNLEPTLAMDWLEISWDELNIKERVGAGSFGTVHRAEWNGSDVAVKVLTVQDFHDDQLKDFLREVAIMKRVLHPNVVLFMGAVTKRPHLSIVTEYLPRGSLYRLIHRPASGELLDQRRRLRLALDVAKGINYLHCLNPPIVHWDLKSPNLLVDKNWTAKVCDFGLSRFKANTFISSKSVAGTPEWMAPEFLRGEPSNEKSDVYSFGVILWELATMQQPWGNLNPAQVVAAVGFKNKRLEIPRDLNPNVAAIIEACWANEPWKRPSFAVIMDSLTPLIKAPVTQPSRADMPLLT

SEQ ID NO: 7859 - protein, 450 aa, Glycine max
GNPRLNLASFVTTWMEPECDKLIMAAINKNYVDMDEYPVTTELQNRCVNMIAHLFNAPLEETEAAVGVGTVGSSEAIMLAGLAFKRKWQNRRKQEGKPYDKPNIVTGANVQVCWEKFARYFEVELKEVKLRDDYYVMDPEKAVELVDENTICVAAILGSTLNGEFEDVKRLNDLLIEKNKITGWDTPIHVDAASGGFIAPFIYPELEWDFRLQLVKSINVSGHKYGLVYAGIGWVIWRSKQDLPEELIFHINYLGADQPTFTLNFSKGSSQVIAQYYQLIRLGFEGYRNVMENCRDNMLVLKEGLEKTGRFSIVSKDNGVPLVAFTLKDHTHFDEFQISDFLRRFGWIVPAYTMPPDAQHVTVLRVVIREDFSRTLAERLVSDVEKVLHELDSLPARVISSTTVTLSAEENGKVVVAKKNPMETQREITAIWKKFVLERKKNNDKMNGVC

SEQ ID NO: 7860 - protein, 741 aa, Pyrus communis
MEACNCIEPQWPADELLMKYQYISDFFIALAYFSIPLELIYFVKKSAVFPYRWVLVQFGAFIVLCGATHLINLWTFNMHSRTVAIVMTTAKVLTAVVSCATALMLVHIIPDLLSVKTRELFLKNKAAELDREMGLIRTQEETGRHVRMLTHEIRSTLDRHTILKTTLVELGRTLALEECALWMPTRTGLELQLSYTLHQQNPVGYTVPIHLPVVNQVFSSNCAVKISPNSPVARLRQLAGKHIPGEVVAVRVPLLHLSNFQINDWPELSTKRYALMVLMLPSDSARQWHVHELELVEVVADQVAVALSHAAILEESMRARDLLMEQNIALDLASREAETAIRARNDFLAVMNHEMRTPMHAIIALSSLLQETDLTPEQRLMVETILKSSNLLATLINDVLDLSRLEDGSLQLDIATFNLHSIFREVHNMIKPVASIKRLSVALNIAADLPVYAIGDEKRLMQIILNVVGNAVKFSKEGSISITAYVAKSESLRDFRAPDFFPVQSDNHFYLRVQVKDSGSGINPQDIPNLFTKFTQTQTLASQNSGGSGLGLAICKRFVNLMEGHIWIESEGLGKGCTATFIVKLGFPERSNESKQPFAPKLQANHVQTNFPGLKVLVMDDNGVSRSVTKGLLVHLGCDVTTVSSIDEFLHVISQEHKVVFMDVCMPGIDGYELAVRIHERFTKRHERPVLVALTGSIDKMTKENCMRVGMDGVILKPVSVDKMRSVLSELLEHRVLFEAM

SEQ ID NO: 7861 - protein, 399 aa, Thermococcus kodakarensis KOD1
MIKPSERAMGVEYAIRDVVLPARELEKKGIEVIRLNIGDPGKYDFQPPEHMKEAYCRAIKEGHNYYGPSEGLPEMREAVVQREKRKNGVDITPDDVRVTTAVTEALQLLFGALLDPGDNILVPSPSYPPYTGLVKFYGGIPNEYDTIEENGWQPDIDDMRKRINERTKAIAVINPNNPTGALYEKKTVKEILDLAGEYDIPVISDEIYDLMTYEGEHVSPGSLTKDVPVIVMNGLSKVYFATGWRLGYFYYVDPENKLAEVREAVDKLMRIRICPSTPAQFAAIAGLTGPMDYLEEYMKKLKERRDYIYKRLTEIPGVSTQKPQGAFYIFPRIDERSKWKSDKEFVLDVLHEAHVLFVHGSGFGRAGNWHFRIVFLPPVEILEKAMDRFEEFMRKRLAE

SEQ ID NO: 7862 - protein, 546 aa, Bacillus cereus E33L
MEENQDMNSLDEQDVKRETLTTRQGHPVKDNQNIRTIGNRGPATLENYHFIEKISHFDREEVPERVVHARGAGAFGYFETYGKVGDEPVEKYTRAKVFSGAGKKTPLMVRFSTVAGAKDSPETARDPRGFAVKMYTEDGNWDLVGNNLKIFFIRDAMKFPDMIHAFKVDPVSNVANPQRMFDFVSRTPEATHMITFLFSPWGIPATYRHMQGSGVNTYKWVNEKGEAVLVKYHWEPKQGIRNLTQEDANSIQAMNVSHATQDLYEAIERKDYPEWELFVQIMEDDYHPELDFDPLDDTKLWPEEQFPWLPVGRMVLDRNPVDYHSDIEQAAFGTGVLVDGMDFSDDKMLQGRTFSYSDTQRYRVGANYLQLPVNAPKAPVRTNQHRGQMDMRNPKESGENPHINYEPSMLGGYKDAKQEKHHPHQPTYNAAAMSAPIDRPNNYGQAGHTYRSFEEWERNELVKNLSEALAVCDKRIQNAMIEHFTQADEDYGRRVKEGIEKKMKEAKTENKLPGREVSKSKYGQGSLAANEATKDAVKKSHESDPY

SEQ ID NO: 7863 - protein, 440 aa, Zea mays
MSTTKVKRRVGKYELGRTIGEGTFAKVRFARDTVTGEAVAIKILDKEKVLRHKMVEQIKREISTMKLIKHPNVVRIYEVMGSKTKIYIVLEFATGGELFDTIVNHGRMREDEARRYFQQLINAVDYCHSRGVYHRDLKPENLLLDSYGNLKVSDFGLSALSQQIKDDGLLHTTCGTPNYVAPEVLEDQGYDGAMADLWSCGVILFVLLAGYLPFEDSNLMTLYKKISNAEFTFPPWTSFPAKRLLTRILDPNPMTRITIPEILEDEWFKKGYKRPEFDEQYDTTLDDVDAVFNDSEEHHVTEKKEEEPVALNAFELISMSAGLNLGNLFDSEQEFKRETRFTSKCPPKEIVRKIEEAAKPLGFDVQKKNYKLRLEKVKAGRKGNLNVATEILQVAPSLHMVEVRKAKGDTLEFHKFYKNLSKTLKDVVWKSDDLQTQHAS

SEQ ID NO: 7864 - protein, 544 aa, Caulobacter vibrioides
MAAKDVYFSSDARDKMLRGVNILANAVKVTLGPKGRNVVIEKSFAAPRTTKDGVSVAKEIELADKFENLGAQMIREVASKTNDKAGDGTTTATVLAQAIVQEGLKSVAAGMNPMDLKRGIDKAVAIAIEDIKTSSKKVTTNAEIAQVGTISANGDKEVGEIAKAMDKVGNEGVITVEEAKTAETELDVVEGMQFDRGYLSPYFITNADKMEVQLEEPLILLSRKKLSSLQPLPVLEAVVQSGRPLLIIAEDVEGEALATLVVNKLRGGLRVAAVKAPGFGDRRKAMLEDIAILTGAQVVSEDIGIKLENVSLEMLGRAKKVSITKDDTTIVDGVGEKADIEARIAQIKRQIEDTTSDYDKEKLQERLAKLAGGVAVIRVGGSTEVEVKEKKDRVDDALNATRAAADEGIVPGGGTALLKASKASAVVGDNDDQTAGIAIVRRALQAPIRQIAENAGVEGSIVVGKILENDNSAFGFNAQTEQYVDLVVDGVIDPAKVVRTALQNAASVAGLLITTEAAIVVSPQEGRRRPAGGGMPGGMGDMDF

SEQ ID NO: 7865 - protein, 461 aa, Saccharophagus degradans 2-40
MKTFNPDFVWGAASSAYQVEGATTTDGRGPSIWDAFSSIPGKTYHNQNADIACDHYNRWQEDVAIMKEMGLKAYRFSISWSRIFPTGRGEVNEKGVAFYNNLIDELIKNDITPWVTLFHWDFPLALQMEMDGLLNPAIADEFANYAKLCFARFGDRVTHWITLNEPWCSAMLGHGMGSKAPGRVSKDEPYIAAHNLLRAHGKMVDIYRREFQPTQKGMIGIANNCDWREPKTDSELDKKAAERALEFFVSWFADPIYLGDYPASMRERLGERLPTFSDEDIALIKNSSDFFGLNHYTTMLAEQTHEGDVVEDTIRGNGGISEDQMVTLSKDPSWEQTDMEWSIVPWGCKKLLIWLSERYNYPDIYITENGCALPDEDDVNIAINDTRRVDFYRGYIDACHQAIEAGVKLKGYFAWTLMDNYEWEEGYTKRFGLNHVDFTTGKRTPKQSAIWYSTLIKDGGF

SEQ ID NO: 7866 - protein, 290 aa, Helicobacter pylori 26695
MDYKCFKGKHANIVIEIISLLEKGVKKAQEILEKPDAGSYTKLENSSGDTPIKADLALDKFLEENFLSLENIKSVFSEEKETPVTKENGSYLIAYDPLDGSSVMEANFLVGTIIGIYEKDYKAQNLAASLYVVFGHKIELVVALEEVYRYSFYQNKFHFIETIVLENKGKIVASGGNQKDFSLGLKKALEGFFAENYRLRYSGSMVADVHHVLVKKGGMFSYPQKKLRKLFEVFPLALMVEKAKGEAFYFDKGVKKRLLEQSVENYHEKSECYLASQHEAHILEKYLKGE

SEQ ID NO: 7867 - protein, 488 aa, Methanosarcina barkeri str. fusaro
MCGIAGAAGTPDTNEEVKRMLAALGHRGPDACGTYQAKGLSIGNTLLKITGDMLQPLVGKGALVLNGEIFNFRELAAEQGIKTNSDTEVLFALIETKIKEGETPTNAIFSVLSRVNGDYALAYVLGNKLVLARDPVGVKPLFYSLEKEGKKPKLAFASEKKAFSSQKDQIKSFPPGRVMAFDIRNGRLEEKSLTIDPPQERISEEHEASSRLKAALEKAVEIRLTKTSGIAFSGGIDSTFLAALAKNIDPSISLYAVGLPDSHDLVQAQRAAEVAGMSDSLKTHTLSPEEIEAAIPNVIYSTESTDPMKIAIGLPLYFVAKTAKEDGKRVLLTGQGADELFGGYNRHKALLEHGPKVLDRAIYTDLKNISTINLERDDMVTMANSVELRVPFLDKEVIKTGLAISPELKVLKRDSLYIRKYILRKAADGLLPSELLWKEKKAIQYGTGVQKVLDRLAREAGFSKREGNHIEKYLKKVAENQGFDFIFR

SEQ ID NO: 7868 - protein, 574 aa, Oncidium Gower Ramsey
FGAFIVLCGATHLINLWTFTMHSRTLAIVMTVAKVSTAVVSCATALMLVHIIPDLLSVKTRELFLRNKAEELDREMGLIRTQEETGRHVRMLTHEIRSTLDRHTILKTTLVELGRTLDLAECALWMPLRTGLHLQLSHTLNNKIPVGSVVSINLPIVNQIFNSSRAGRIPNTCPLARFQPYTGRYVPQEVVAVRVPLLHLSNFQINDWPELSPKSFAVLVLMLPSDSARKWHAYELELVEVVADQVAVALSHAAILEESMRARDLLMDQNVALDLARREAEMAIRARNDFLAVMNHEMRTPMHAIIALSSLLLETELTPEQRLMVETILKSSNLLATLINDVLDLSKLEDGSFELEATIFNLHTVFREAVNLIKPIAAVKKLSLFVSHAPDLPSCAIGDEKRLLQIMLNVVGNAVKFTKEGTIFITANIAKPDSLRDPDFYPAPTDGHFYLRVQVKDTGCGISPQEFPHLFTKYAHTQNGSDKGYSGSGLGLAICKRFVNLMKGHIWLESEGIGKGCTTIFIVKLGMSEDPTPRYQQKLLPPIRAGQAEADPFGLKPAAPKDELMPKIRYQRSL

SEQ ID NO: 7869 - protein, 1123 aa, Solanum tuberosum
MSSSRPSQSSTTSSRSKHSARIIAQTSIDAKLHADFEESGDSFDYSSSVRVTNVAEGEQRPKSDKVTTAYLHQIQKGKFIQPFGCLLALDEKTLKVIAFSENAPEMLTMVSHAVPSVGEHPVLGIGIDIRTIFTGPSGAALQKALGFGEVSLLNPVLVHCKNSGKPFYAIVHRVTGSLIIDFEPVKPYEVPMTAAGALQSYKLAAKAITRLQSLPSGSMERLCDTMVQEVFELTGYDRVMGYKFHDDDHGEVVSEITKPGLEPYLGLHYPATDIPQAARFLFMKNKVRMICDCRAKHVKVVQDEKLPFDLTLCGSTLRAPHYCHLQYMENMNSIASLVMAVVVNDGDEEGESSDSSQSQKRKRLWGLVVSHNTTPRFAPFPLRYACEFLAQVFAILVNKELELENQFLEKNILRTQTLLCDMLMRDAPLGIVSQSPNIMDLIKCDGAALLYKNKIHRLGMNPSDFQLHDIVSWLCEYHTDSTGLSTDSLYDAGFPGALALGDAVCGMAAVRISDKDWLFWYRSHTAAEVRWGGAKHEPGEKDDGRKMHPRSSFKGFLEVVKTRSIPWKDYEMDRIHSLQLILRNAFKDADAVNSNTISIHTKLNDLKIDGMQELEAVTAEMVRLIETASVPIFAVDVDGQVNGWNTKVAELTGLPVDEAIGKHLLTLVEDSSVDTVNKMLELALQGQEERNVEFEIKTHGPSRDSSPISLIVNACASKDVRDSVVGVCFIAQDITGQKSIMDKFTRIEGDYRAIIQNPHPLIPPIFGTDQFGWCSEWNSAMTMLTGWRRDDVMDKMLLGEVFGTQAACCRLKNQEAFVNFGVILNNAITGQESEKIPFGFFARYGKYVECLLCVSKRLDKEGAVTGLFCFLQLASHELQQALHVQRLSEQTALKRLKVLAYIRRQIRNPLSGIIFSRKMLEGTSLGEEQKNILHTSAQCQRQLDKILDDTDLDSIIEGYLDLEMLEFKLHEVLVASISQVMMKSNGKNIMISNDMVEDLLNETLYGDSPRLQQVLANFLLVSVNSTPSGGKLSISGKLTKDRIGESVQLALLEFRIRHTGGGVPEELLSQMFGSEADASEEGISLLVSRKLVKLMNGEVQYLREAGRSTFIISVELAVATKSS

SEQ ID NO: 7870 - protein, 645 aa, Bacillus thuringiensis serovar konkukian str. 97-27
MSVINCEEVKRDEFHTEKYYESYNIFGAHIVTEDEMRGVRFTVWAPHAKAMSVVGDFNEWDYEQHKMLQVTEEGIWSLFIPHIEEREIYKYAIETMAGDVIFKADPYAVYAEVRPNTASVVFDIKGYEWNDKNWSRKKKKKSVYKEAMTVYELHFGSWKKKEDGTLYSYREMAEELIPYVVEHQFTHIEIMPLVEHPYDRSWGYQGTGYYAATSRFGTPYDLMHFVDECHKYGIGVILDWVPGHFCKDAHGLYLFDGTPTYEYKDKDVQENPVWGTVNFDLGKREVRNFLISNALFWMRYFHIDGFRVDAVANMLYWNKEGQEQSNEHAVSFLRELNEAVFAEDEDFLMTAEDSTAWPLVTAPTYEGGLGFNYKWNMGWMNDVLKYMECAPEYRKYIHDKMTFSLLYAYSENFILPLSHDEVVHGKKSLLNKMPGDYWDKFAQLRLLYGYFFTHPGKKLLFMGGEFGQFDEWKDLEDLDWNLHDFEMHRYMHDYFKELIALYKRSKPLWQLDHSREGFQWIDANNNEQSIFSFIRQGDKQEDALVVVCNFTKATYENYKVGVPDFEYYNEILNSDAEQYGGSGQVNKKRLKTIQEPYHNQTAHVEITIPPFGVSILRPVKTRKGSKKQDGSKTKVRSNVTSRGKR

SEQ ID NO: 7871 - protein, 152 aa, Zea mays
MSLVRRSSVFDPFSVDLFDPFDSMFRSIVPSSSSSGSETAAFASARIDWKETPEAHVFKADLPGVKKEEVKVEVEDGNVLLISGQRSREKEDKGDKWHRVERSSGQFVRRFRLPENAKTEEVRAALENGVLTVTVPKAEVKKPEVKSIQISG

SEQ ID NO: 7872 - protein, 122 aa, Arabidopsis thaliana
MASLEMNDLKKIGLGLTGFGVFFTFLGVIFVFDKGLIAMGNILFLAGVTLTIGINPAIQFFTKRQNFKGTISFGLGFLLVVFGWPIFGLLLESYGFLVLFRWVFFSSTTFNGFTNSFLVLIC

SEQ ID NO: 7873 - protein, 338 aa, Xanthomonas campestris pv. campestris str. ATCC 33913
MSRPSLTRFLIEEQHAGRIDPELRQLITIVSRACKRISIAVSKGALGGVLGDAGTGNVQGEAQKKLDVLSNDILLEANAWGGHLAACASEEMDHSQPVPDQYPSGDFLLLFDPLDGSSNIDVNVSVGTIFSVLRAPKGTEKPGDEHFLQPGTQQVAAGYCIYGPSTMLVLTLGHGTHAFTLEREEGSFLLTQADMRVPEDTAEFAINMSNQRHWEPAMQAYVGDLLAGKDGARGKDFNMRWIASMVADVHRILTRGGIFIYPWDKKDAAKPGKLRLMYEANPMGMLVEQAGGAATTGRERILDIQPTQLHQRVPVFLGSKNEVAEATRYHVEFDKAQG

SEQ ID NO: 7874 - protein, 392 aa, Bradyrhizobium japonicum USDA 110
MSINIDSGQDSDQEHDDVMYPQVLPFVLIHAGCLAAIWSGVSWQAVAICVALYWLRMFGITAGYHRYFSHRAYATSRAFQFILAFLAQSSAQKSVLWWAAKHRHHHLHSDTAQDVHSPRHKGFVYSHLGWIFYRQHDATDLVKVSDLASYPELMWLHRLELLPAVVLAGLCFLIAGWSGLVVGFMWSTVVLYHATFCINSLAHVHGRRRYVTGDDSRNNWLLALLTMGEGWHNNHHAYQASARQGFYWYEVDLTYYALVALSWLGIVWDLKLPPRQVLRNEHRLGSRVVKQAAEQLAARFDPEHIALAIRTSIHETELSVRDALSLLQHRADLRLSSMPTREQLLAEAQRMFAKTISLDDIVDRAYELLHDSVGFLLATPALSANTNAKSGI

SEQ ID NO: 7875 - protein, 332 aa, Gibberella zeae PH-1
MPFDKSSSQEYRPPRWIPTTGLATTCLVEPRHLWDSLYSQEQIAAWKAITDAVHAKGGYIFCQLWALGRVANPNVVPNIWSAGSKPFEAKGAASLPKLTTMTEADIDRFVGHYRQAALNAIEAGFDGVELHGANGYLIDQFLQTNSNDRTDSYGGSLENRFRFPLRVLNAVCDAIGPERVGIRMSPFSRFQGMREADPLSVFVPWAKAIVKAQPSLAFIHAVEPRIEGGSDSPDSHLKTDDTLSPVRDVVSSSNVKFIVAGGFTPETAVKHANQTDDLVGFGRYFILPANPDLPARIKNGWPLTKYDRSLFYTPDRKGYTDYPAYNPDASRL

SEQ ID NO: 7876 - protein, 994 aa, Candida albicans SC5314
MSTIPSQVEINFNKIHQRSNSSSSTSSYRIPSGNSCIPRTVEMPSLPPTSTHHQHQQMPSSSSHAHIAKKIHREVRFGAYILGSTLGEGEFGKVKLGWRKDGKHPSQVAIKLIKRSTITKDSDSEIKIHREINSLKLLNHPNIVNLVEVMKSGKYIGIVLEYASGGELFDYILQHKYLKENVAKKLFAQLVSGVDYMHAKGLIHRDLKLENLLLDKHRNVIISDFGFVNSYNRDKNDLMKTSCGSPCYAAPELVLSQTAYEGRKVDIWSLGVILYAMLAGYLPFDDDPENEDGSDIIKLYHYICKTPLTFPEYVSPLARDLLRKIIVSDPKKRISIDDIRNHPWLSSHANLLSIRQPEWDKVHSEKQQPIAVEPPQPNKRYSMINERTNSSSLMSPAPRVTHTQPLSSHARSYSSTSISLLYSSPSATPSMANAVTNGEGATTTTTNGSINESNDTLQLSGTPSPKKPSTVSPVRGHQKSASISNSYSSASIALKAVVHEENRLHNHQQSQQYIPRSSTISTIVESPTKANTATETETTDGHKILLPPPSKDAQKLPHAAKKPRPTSYHPSSMSSALIHNNQNPTDVLKMPSPINFPMTQFISTSPPKSNGSLNDSGNFTNCSPKATSRRNSVVTHVHVNGVLSKENLIHSSSSPDNKRNSVLSYLEDKIDTLELTESHSPSKNTFEEIVDAAIATPEINQVPVFDSQTSPNGIGLDIKHKEFDETSLVVEKKSKETVSDSKSEESTKETQQQENVVMYEPIVPVEEYIKKPEEVNSVEAKQPEEVKSEDKSLQGQKSQQQQQQPEKHSADIGKTKVDLKKSASQKKKVKEESIKKQKDVDSKPIERRHTIAARRHHNDENKENKDVKKRNRFSLLSFYSSYNSSNSNVSLATSKVPSNSENNTTVLKPTSMNTTRKVLEPSNETNIMRKETKQTNSNGSTTSKSTTSSSSSSAPAASSSSSSSTSKRASTATKETSAARKVMDFFKRRSVRVG

SEQ ID NO: 7877 - protein, 474 aa, Arabidopsis thaliana
MVQLSRKATCNSHGQVSSYFLGWEEYEKNPYDVTKNPQGIIQMGLAENQLCFDLLESWLAQNTDAACFKRDGQSVFRELALFQDYHGLSSFKNAFADFMSENRGNRVSFDSNNLVLTAGATSANETLMFCLADPGDAFLLPTPYYPGFDRDLKWRTGVEIVPIQSSSTNGFRITKLALEEAYEQAKKLDLNVKGILITNPSNPLGTTTTQTELNILFDFITKNKNIHLVSDEIYSGTVFNSSEFISVMEILKNNQLENTDVLNRVHIVCSLSKDLGLPGFRVGAIYSNDKDVISAATKMSSFGLVSSQTQYLLSSLLSDKKFTKNYLRENQKRLKNRQRKLVLGLEAIGIKCLKSNAGLFCWVDMRPLLRSKTFEAEMDLWKKIVYEVKLNISPGSSCHCEEPGWFRVCFANMIDETLKLALKRLKMLVDDENSSRRCQKSKSERLNGSRKKTMSNVSNWVFRLSFHDREAEER

SEQ ID NO: 7878 - protein, 415 aa, Arabidopsis thaliana
MANNNVYSVLKSLLLLLHLVFLSKQHVDSASIVKFLPGFEGPLPFELETGYIGVGEEEEVQLFYYFIKSERNPKEDPLLLWLTGGPGCSAISGLLYQNGPLAMKLDVYNGTLPSLVSTTYSWTKTSSMIFLDQPVGTGFSYSRTQLFNKPSDTGEAKRIHEFLQKWLGKHQEFSSNPFYVGGDSYSGLVVPATVQEISKGNCQCCNRPINLQGYVLGNPLTDCVYDCNYRVPFAHKMALISDELYERTCRGEYVNVHPHDTECLKFVEEFNKSYRFMLTTYWANDETVRKALQINKESIGEWTRCYRGIPYNHDIKSSVPYHMNNSIDGYRSLIYSGDHDIQVPFLGTQAWIRSLNYSIIDDWRPWMIKDQIAGYTTSYVNKMTFATVTGGGHTAEFTPKETFMMFQRWINGQPL

SEQ ID NO: 7879 - protein, 371 aa, Magnetospirillum magnetotacticum MS-1
MTQPHLFQPLSLRGLTLPNRVAVAPMCQYSAKDGVVQDWHLMHYGSLAASGPGMVVIEATGVTPEGRISPKCLGLYDDATEAGFIRLVAAIKGFGGNGAIGVQLGHAGRKGGAAAPWEGGKFSPDGWQTISASDIAFDEGWPSPKAATIEDLDRLKQAFVIAAQRALRIGFDFIELHSAHGYLLHQFLSPLSNRRDDQYGGSLENRMRFPLEVITAVRAVWPADKPLGLRISATDWVEGGWDADQAVNYAKAFKAAGIDFVCVSSGGLVSYAKVPVGPGYQIELAARIRREAGIPTRAVGLIATPHQAETALTEGAADLIAIGRGFLDNPRWVWHAAQALGAQMTYPPQYLAAGTRAWPGVALARPTLAAE

SEQ ID NO: 7880 - protein, 777 aa, Arabidopsis thaliana
MVSLSNQTRFSFHPNNLVVSEKRRLGISGVNFPRKIKLKITCFAAERPRQEKQKKKSQSQSTSDAEAGVDPVGFLTRLGIADRIFAQFLRERHKALKDLKDEIFKRHFDFRDFASGFELLGMHRHMEHRVDFMDWGPGSRYGAIIGDFNGWSPTENAAREGLFGHDDYGYWFIILEDKLREAVPHGSKYRLYFNTPDGPLERVPAWATYVQPEDEGKQAYAIHWEPSPEAAYKWKYSKPKVPESLRIYECHVGISGSEPKVSTFEEFTKKVLPHVKRAGYNAIQLIGVPEHKDYFTVGYRVTNFFAASSRYGTPDDFKRLVDEAHGLGLLVFLDIVHSYAAADQMVGLSLFDGSNDCYFHYGKRGHHKHWGTRMFKYGDLDVLHFLISNLNWWITEYQVDGYQFHSLASMIYTHNGFASFNNDLDDYCNQYVDRDALMYLILANEILHVQHPNIITIAEDATYYPGLCEPVSQGGLGFDYYVNLSASEMWVSLLDNVPDNEWSMSKPVLQIVSTLVANKEYADKMLSYAENHNQSISGGRSFAEILFGGVDNGSPGGKELLDRGISLHKMIRLITFTSGGRAYLNFMGNEFGHPERVEFPTQSNNFSFSLANRRWDLLESGVHHHLFSFDKELMDLDKSKGILSRGLPSIHHVNDANMVISFSRGPFLFIFNFHPSNSYEKYDVGVEEAGEYTMILNSDEVKYGGQGIVTEDHYLQRSISKRIDGQRNCLEVFLPSRTAQARYEPKVTTRGDVILTWLVQAMMAVKKIINHAFTEVQ

SEQ ID NO: 7881 - protein, 416 aa, Sinorhizobium meliloti 1021
MHAKMPGGLLAGFLLLLVPTQGFGLDLPRSGHPIFDRVVTLVADNFHDPSALDGFGAAVRQELDGGDPLNAKSTEPRVDAAIERILASLDASHTARFTQDSIAYYELADIFRYAIRHDMKRLFPPDGRASYAGVGMVTRMENGLPFVSDVYDGSPADKAGIRVGDEVLSVDGAPYREIESFRGRTGQKVEIRLRRNAGAQPFTTSVAVERLRPLPTFEKAIENSVSVNVSDGRRIGYLRLWTLSSPDGLDIAARELATGRLKDADGVVVDLRGRWGGGPPDAAELFVGDTPNFRLISRSGKDMLANVRWRRPVVAIIDEGSRSGLELFAYALKANGIPLVGTRTAGALLAGRAYLLPDDSMLELAVSDAVIDDGVRLEGRGVEPDVPVPFALPYAGGRDPQREAAMEEMRRILAKG

SEQ ID NO: 7882 - protein, 738 aa, Gibberella zeae PH-1
MTEQVTGAIKHAVMGHKNDKIDQLKANMVEPNENSRITSDYGVKQNNTDQWLRVASEDQTGPSLLEDAFGREKIHRFDHERIPERVVHARGAGAHGTFRLFESAADVTKAGLFTDTSRETPVFVRFSTVLGSRGSADTVRDVRGFAIKFYTQEGNFDIPGNNIPVFFIQDAMKFPDVIHAGKPEPNNEVPQAQTAHNNFWDFMFEHPEATHMHTWAMSDRTIPRSYRMMQGFGVNTYTLVNEKGERRFVKFHWTPELGVHSLVWDEALKLAGQDPDFHRKDLQEAIENGAFPKWKFGIQVLDESQEHDFDFDILDATKVWPEDLIPVRYIGELELNQTVDEYFTQTEQVAFCTSHLVPGIGHSDDPLLQGRNFSYQDTQLSRLGTNWEELPINKPVCPVMNFNRDGAMRHTITKGKVNYWPNRFSHQPPATESEGAYVDYAAKIVGMKQRTLSKKFKDHFTQAQLFYNSLSEIEKSHVQAAYSFELDHCDEAIVYERLTERLGEIDGDLANTIAEMVGGKKPANPKPNAGKKAKNLSQLDFVPETPTIKSRRIAIIIADGYDPVAFNAMYGAIKAQSALPFVIAPRRAPIFSAAEDSSSSKGIFPDHHLEGQRSTMFDAIFVPGGAKSIETLSKNGRALHYIREAFGHLKTIGGTGEAVEFINKAIQLSEVALSSTDGSGVVDSYGVVTLKNASPDTLKEIATVASDAKGFLEKFVYNVSCHRNWQRELDGLSTMVAY

SEQ ID NO: 7883 - protein, 490 aa, Cucumis melo
MVLVSSNDNGNAKKVLSKLAKGNGHGEDSSYFDGWKAYDSDPFHPIINPRGVIQMGLAENQLSFEFVEKWMKNNPQASICSVEGIDEFKDIAIFQDYHGLPEFRNAVANFMGKVRGNRVKFDPDRVVMSGGATGAHETMAFCLADPGEAFLVPVPYYPGFDRDLRWRTGVEIVPVKCESSNNFKLTREALETAYEEAEKSNIRIKGLLITNPSNPLGTVYDRQTLETAVSFINEKNIHLVCDEIYAATVFAEPGFISISEVIDNMNDVECDRNLIHVVYSLSKDMGFPGFRVGIIYSYNDAVVACARKMSSFGLVSSQTQYLIASMLSDDVFVDNFLAGSAEKLAVRHRNFTKGLAQVGIGYLKGSGGLFLWMDLRHLLKEKTLEAEMALWKVIINEVKLNVSPGSSFHCSEPGWFRVCFANMDDSTMDISITRIRNFVLQNKEVTTKVKKQKFCWRQSSLELRLSSRRLEDIMSPHSPLPQSPMLRATT

SEQ ID NO: 7884 - protein, 385 aa, Thermoplasma acidophilum DSM 1728
MKQIQLSRNVVDDISFGAIVKIRDQLLEMQRAGKKVYRLESGDPSFPIPEHVRLAIEDALKKNRTHYTDSTGIPELRKAIAEKLVKKNGIRSATPENVLVSNGGMNALYITFRSLIAPGEKVIIPDPMWTEIAEIIKLADGIPIRIPVERYVEEMRKYENDDRVRAVFINSPHNPTGYVFGEKQISDIIDFAESKGIFIVSDEAYEDVIFDGLKHLSPGSLYDDTISLFSMSKSYAMSGLRIGYAHTSNEILYDRMKKLLRCTINGVNSATQYGAVAALTGPQDYIGEMRKEYQKRRDIIYEAVSESRYLEPIKPHGTFYLWNRIKEYPPGVSDSWGMTSYLLEKTGVGSSPGPVFGPAGEGYIRFAFSAATDHIQEAADVLRNF

SEQ ID NO: 7885 - protein, 548 aa, Thermoplasma acidophilum DSM 1728
MVLASEPGYIGTVRIRNRLVMSPMISNMADPDGNTNENHISYLEERAKGGAGLIITEYTYVDRRSGIGSRNQMGMYDERQIPKFSRLTERIHAHGAKIFVQLVHAGAKAIGAINEYKIAPSKTNFDPSVREMDASDIEDVISAYRKAANIAERSGFDGIEIHGAHGYLVDEFLSPWWNKRTDRYGGSFENRIRFAQEVIDAVRSEVDIPVGIRISLYEDEEDGYSPDYGMKIAESIRNIDYVHVSAGNNEPPGSSASFYSPHAHIFQKLRGSTGKTLIVAGSITAREDVDLVLSAADFVAVGRAMLADPYFPMKIITGKGEIRPCIRCNQGCRNLAYGEVRCTVNPYFVVPEPRKIYKGEVVVVGAGVKGLEASLYAAKSGLKVVIYEKEDRIGGQINSIFDASKAREFRQLLDYYGRTIKKYGIDVRLGERYSGDGIYCLPDTVYPDLPDKDEIWIDSNVYMYHDLALRYAAEHKVYLSSYSLTSLDRARRKAYANIARKAGVTIVDTADHYDVSIHDRNQYDIYQAMLSGIEAMRSHIAASENEYL

SEQ ID NO: 7886 - protein, 463 aa, Listeria monocytogenes EGD-e
MNNNFLWGGATASYQCEGAWDVDGKAESMWDYYLHEAGLENGDVASDHYHRYEEDIRMMKEGGQNSYRFSLSWPRIIKNRQGDINLKGIEFYQNLLDTCKKYDIEPFVTLYHWDLPQYWEETGGWLDHDVCAAFEHYAKVCYDHFGDKITNWTTFNEPKWFVANGYKIGNYPPGYQDTQKTMIAAYNVMYASALGVKAFKEGGYPGQIGIVHSYTPVNGIDESIETKIAMRYADNYCNNWILDTAALGEFPVDLIAELAKSHDISFMKTDELQTIKQNTVDFIGLNYYSRTLVKPYTGGETQLQFNHSGKKGESKVLIKNWFEQVKDPANETTEWDTEIYPKGLQDGLIEAYERYQLPLYVTENGIGVREDVSVPQVDDAYRIAFMNDHINAIFNAIDAGCDVRGYYAWSPFDLYSWKNGVEKRYGLVAVDFENNQIRKPKASYYWFKEMIESQGKLIKRREF

SEQ ID NO: 7887 - protein, 492 aa, Suaeda salsa
MDPYKFRPSSANNSPYFTANSGAPVWNNNNSLTVGHRGPILLEDYHLVEKLANFDRERIPERVVHARGASAKGFFEVTHDVSHLTCADFLRSPGVQTPVIVRFSTVIHERGSPETIRDPRGFAVKFYTREGNFDLVGNNFPVFFIRDGMKFPDMVHSLKPNPKSHIQENWRIMDFFSHHPESLHMFTFLFDDIGIPANYRHMEGSGVNTYTLINKAGKTYYVKFHWKPTCGVKSLLEDEAIKVGGANHSHATQDLYDSIASGNYPEWKLFIQTIDPADEDKFDFDPLDVTKTWPEDILPLQPVGRLVLNKNIDNFFAENEQLAFCPSIVVPGVHYSDDKLLQTRIFSYSDTQRHRLGPNYLQLPVNAPKCSHHNNHYDGFMNFMHRDEEVDYFPSRYDPVRHAERYPIPSNVLNGCREKQCIPKENNFKQPGERYRSMDPARQERFICRVVDALSDPRVTHEIRSIWISYWSQADKSLGMKVASRLNVRPTM

SEQ ID NO: 7888 - protein, 91 aa, Brassica napus
SFKNPRNGRNMFDGTDGHYFNSGNRGYHWMWDPRLFNYGSWEVLRYLLSNARWWLEEYKFDGSRFDGVTSMMYTHHGLQVKFTGNYNEYFG

SEQ ID NO: 7889 - protein, 259 aa, Triticum aestivum
  misc_feature (116)..(116): Xaa can be any naturally occurring amino acid
  misc_feature (200)..(200): Xaa can be any naturally occurring amino acid
MSGLEAARARARRAVADYLSAGTHHRIQESDVFMTVGGTGAITAITTVLGGAPGASILLPRPGFAPYEAACKLVGAEPRFYDLLPRQGWEADLAGVRAMADGATAAIVVINPNNPXCGAVYSTQHLLQIAETAKELGIPVIADEVYAHMVFGASKFVPMASYAHIAPVITIGAISKRFMLPGWRLGWLAFCDPNGTIKHXATEMLLNVTSGPASIIQAAVPKILLDEHDEFHQNVVNLLESAADSLYGRVNQIEALQCY

SEQ ID NO: 7890 - protein, 554 aa, Vibrio vulnificus YJ016
MCSVFGILDIKSDAAALRPIALEMSKKLRHRGPDWSGIYASDRAILAHERLAIVGLNSGAQPLYSPDKKLILAVNGEIYNHKEIRARYEGKYDFQTDSDCEVILALYQEMGADLLEELNGIFAFVLYDEEKDQYLVGRDHIGIIPLYQGYDEHGNYYVASEMKALVPVCKTISEFPPGSYYSSTDAGPQRYYIRDWNEYAAVQGNTSSKEELTAALEAAVKRQLMTDVPYGVLLSGGLDSSITSAVAKRYAAMRIEDDEQTEAWWPQLHSFAIGLDGAPDLKAAREVAAKIGTVHHEMTYTIQEGLDAIRDVIYHIETYDVTTIRASTPMYLMGRKIKAMGIKMVLSGEGADEIFGGYLYFHKAPNAQEFHEETVRKLLALNMFDCARANKSLAAWGVEGRVPFLDKEFIDVAMRLNPADKMCGNGKMEKHILRECFEHYLPDSIAWRQKEQFSDGVGYGWIDTLKAVAEEKVTDQQMEAAKFRFPYNTPTTKEGYVYREIFEELFPLPSAAECVPGGPSVACSSAKAIEWDESFKNCIDPSGRAVKAVHNEAY

SEQ ID NO: 7891 - protein, 610 aa, Pseudomonas aeruginosa UCBPP-PA14
MCGLAGWVDYTRKLDDEFPAIFAMTDTLALRGPDAEGIWKHRNALLGHRRLAVIDLSGGVQPMSYRFPTGQEVTLVYTGEVYNHDALRERLRRAGHEFRTRSDTEVVLHAYLQWGERCCEYLTGMFAFAVFDGRDGHLLLVRDRLGIKPLYYARHREGLLFGSEIKSILAHPEFAARLDAVGLVDLLTLSRGTSQTPFREVQELLPGHLLSWRPNSQAKLRRYWEVRRQEHADDLQSTVQRTRELVTRALGSQLHADVPVCSLLSGGLDSTALTGIAQRIAKAEHGGDINSFSVDFVGQAEQFRSDDLRPDQDQPFALLAAQYIGSRHRTVLIDNAELVCERAREEVFRAKDVPFTFGDMDTSLHLMFGEIRRHSTVAISGEGADELFGGYGWFRDPQAVAAARFPWASRVRLPAGFIDAGFNRRCDLLQYQQASYDDGLRQVEHLAGDSPEERRMREFSHLHLKRWMVLLLERKDRLSMCNGLEVRVPYTDHELVEYVYNVPWSIKSRDGEEKWLLKRACADYVPEAVLKRRKSPYPTSANLGYERFLRGSVRRLLEDAANPVFGIVSREFLAAELEHPEGYFNTQVSRHNLETALALEGWLRLYGLSA

SEQ ID NO: 7892 - protein, 337 aa, Glycine max
MEERYETLKELGSWNFGVARLAKDKETGELVAIKYIERGKKIDANNVQREIINHRSLRHPNIIRFKEVLLTPTHLAIVLEYASGGELFERICTAGRFSEDDARYFFQQLISGVSYCHSMEICHRDLKLENTLLDGNPSPRLKICDFGYSKSALLHSQPKSTVGTPAYIAPEVLSRKEYDGKISDVWSCGVTLYVMLVGAYPFQDPEDPRNFRKTIGRIIGVQYSIPHYVRVSPDCRNLLSRIFVADPAKRITIPEIKQYPWFLKNMPKEIIEAERKGFEETTKDQPNQKVEEIMRIIQAARIPGQGSKAGEGGQAGTGSLDIEDDEEIDVSGDYEQV

SEQ ID NO: 7893 - protein, 411 aa, Glycine max
MAASVSTVGAVNRALLNLNGSGAGASAPSSAFFGTSLKKVIASRVPNSKVSGGSFKIVAVEEKKEIEETQQTDKDRWKGLAYDISDDQQDITRGKGLVDSLFQAPQDAGTHYAVMSSYEYLSTGLRQYLDNKMDGFYIAPAFMDKLVVHISKNFMTLPNIKVPLILGIWGGKGQGKSFQCELVFAKMGINPIMMSAGELESGNAGEPAKLIRQRYREAADMIKKGKMCALFINDLDAGAGRLGGTTQYTVNNQMVNATLMNIADNPTNVQLPGMYNKEENPRVPIIVTGNDFSTLYAPLIRDGRMEKFYWAPTREDRIGVCTGIFRTDGIPEQDIVKLVDSVGKKLVNSKDGPPTFEQPKMTLEKLLLYGNMLVQEQENVKRVQLADKYLNEAALGNANEDAIQRGTFFQS

SEQ ID NO: 7894 - protein, 221 aa, Actephila lindleyi
QASRFLFMKNKVRMICDCLAPPVKVIEDKKLGRPLSLCGSTLRSPHGCHAQYMANMGSIASLVMSVTINDANDEMDNDQQGVTKLWGLVVCHHTSPRFVPFPLRYACEFLIQVFGVLVNREVELAAQTREKHILKTQSVLCDMLLRDAPVGIITQSPNVMDLVKCDGAALYYKKKFWLTGVTPTEAQIRDIADWLLEYHGGSTGLSTDSLMEAGFPDAAVL

SEQ ID NO: 7895 - protein, 221 aa, Zea mays
  misc_feature (178)..(178): Xaa can be any naturally occurring amino acid
MGSEGPSVVTVHVTGFKKFHGVAENPTEKIVTNLKSFLEKRGLPKNLVLGSCTVLETAGEGALATLYKVLESAVADRGTGSSAQGQVIWIHFGVNSGAIRFALENQAVNEATFRCPDELGWKPQRVPIVPSDGSISRTRETTLPVNELTKSLRKIGYDVVPSGDAGRFVCNYVYYHSXLRFAEQHGIKSLFVHVPLFLTIDEEVQMHFVASLLEVIAFSSN

SEQ ID NO: 7896 - protein, 225 aa, Androstachys johnsonii
TDIPQASRFLFMKNKVRMICDCLAPPVEVVQDGKLSQPLGLCGSTLRSPHGCHSQYMRNMGTIASLVMSVTINENDDEMEGDQQKGRKLWGLVVCHHTSPRFVPFPLRYACEFLIQVFGVQINKEVELAAQMREKHILRTQTLLCDMLLRNAPVAIITQSPNVMDLVKCDGAALYYRKKFWLLGITPTEAQIRDIAEWLLEYHSGTTGLSTDSLMEAGYPGASIL

SEQ ID NO: 7897 - protein, 437 aa, Neurospora crassa
MATSTTSDLKLSQPLTLPNGLTLPNRLVKAAMAEQMGFGNHLPNPELAAVYATWARGDWGLILTGNVQVDHAHKGDAHDISPNHPGTTPEQTVTAFKAWADAARLNGQSKTPVVVQINHPGRQSPMGAGTRGLWEKAVAPSPVPLVLGEAFVPRLLSKVLFGTPRELTVAEIKDIVQKFAVTARITAEAGFNGVEIHAAHGYLLAQFLSKKTNRRGDEYGGSAENRARIVGEIIKECRRQVTEAVGEEEAKKFVVGIKLNSADWQAGRDGKEEEETDTAEEVLKQIELFEQWGIDFVEVSGGSYEDPQMANGPKPEKSERTMAREAFFLEFAKIIRTKFPKLPLMVTGGFRTRQGMEAALESDDCDMIGIGRPAIINPSLPANLILNPEVPDADARLFDKKRAEPHWIVEKLGMKSIVGAGVEVTWYVSELKKLAKF

SEQ ID NO: 7898 - protein, 641 aa, Cryptococcus neoformans var. neoformans
MASPATQTANAIAAINNRSNLVIPEIDFTQHQLENGEIVSTTERVIKDVQAPAMYVPTDDQFWSTTDKTKPDIAFLKNHFYREGRLTEEQALYILEKGGELLRSEPNLLEVDAPITVCGDIHGQYYDLMKLFEVGGNPADTRYLFLGDYVDRGYFSIECVLYLWSLKMWYPDTLFLLRGNHECRHLTDYFTFKLECKHKYSETVYNACMESFCNLPLAAVMNKQFLCIHGGLSPELHTLDDLRSINRFREPPTQGLMCDILWADPLEDFGSEKTNENFLHNHVRGCSYFFTYNAACQFLERNNLLSVIRAHEAQDAGYRMYRKTKTTGFPSVMTIFSAPNYLDVYSNKAAVLKYESNVMNIRQFNCTPHPYWLPNFMDVFTWSLPFVGEKITDMLIAILNCCTKEELEEEEEEFPLHAPEPTDAESAAERRQIIKNKILAVGRMSRVFSLLREESERVSELKSISGSNALPAGMLASGAEGIKEAIQGFEDARKSDIENERLPPDIIDPDEDKPASPSASPIMPATPEEIPSEIPYDSPITGTPRTPISGAIAFGSPGSPGTPTSPSIGGPPLTAWRPGHGRRTSLGTTKTSPSTRRRSLENTMHLIRDVVGGKDAQGDGQLERLAEVISSPTKGGQGERE

SEQ ID NO: 7899 - protein, 207 aa, Antidesma alexiteria
LLPLEIPLMKNKVRMICDCRAAPVKVIQDNRLVQPLSFCGSTLRSPHGCHAQYMENMGSIASLVMSVTINEDVDEIENDQPKGSKLWGLVVCHHTDSRFVPFPLRYACEFLIQVFGVQISKEVELAAQTREKHILQTQTVLCDMLLREAPVAIITQSPNVMDLVTCDGAALYYRKKFWLLGLTPTEELIKDIAEWLLEYHREVQAYM

SEQ ID NO: 7900 - protein, 195 aa, Vigna unguiculata
MATATVTLGGITDVPGAANSVEIANLARFAVDDHNKKQNGVLEFVRVISAKQQVVSGILYYITLEAKDGETKKVYKTKVWVREWLNPKEVQEFNLVTDSAIGTKDGGVGDVPSDTLHIENLARFAVDQYNKNENANLEFVRVIDAKEQVVEGFIYYITLEAKDGESKNVYEAKVWERSWLNSIELLEFKPVDVAV

SEQ ID NO: 7901 - protein, 462 aa, Ustilago maydis 521
MPSHQSTNAACADMDTSRFVSGLTPPLVDSIDALKISNFVPTRSGHPPPGSVPESILPEGVKKPALFQTLTLPFAAPEQAGKMTFKNRIIVSPMCQYSANNGLPTPYHIAHLGSFALHGVGNVMVEASGVEPEGRITPQDLGIWSEQHRDAHKALVSVLKSFTDGLGVGLQLAHAGRKASDWSPFYRGEKKQKFVTQEEGGWPDRVVAPSAIAYAQGHVTPRALTTEDINKLQDKFVQSARWAFEAGYDYVELHSAHGYLMHSFLSPLTNQRTDEYGGSLENRARFLLNVARRIRQEFPNKGLWVRVSSTDWADQAHQADSWTVDQTVELAKMLQEARVDLLDVSSGGLVPFQKITVGAGYQLFGAKAVRDALAKIEPDASKRMLVGAVGMMEGSYDSPNGQDRSQIGKLAEQSIQSGECDAVLLARGLMSYPSWTEDASVALMGTRAAGNPQYHRVHVAKK

SEQ ID NO: 7902 - protein, 558 aa, Metallosphaera hakonensis
  misc_feature (416)..(416): Xaa can be any naturally occurring amino acid
MFGANSGKNGTIFSLWAPYCSWVNLKIGDERIPMKKDERGYFLVEVDVTPGTKYKFETDKGEIPDPASRFQPEGVHGPSQVIPTDFSWEDHDWKGLNKNQLIIYELHVGTFSSSWTFDGVVEKLDYLSDLGVTALEIMPVAQFPGIRGWGYDGVYLYAVQNSYGGPTGLKRLVNEAHKRQLGIILDVVYNHVGPEGNYMGLLGPYFSSKYKTPWGLTFNYDDRGSDEVRRFVLENLEYWIKEFHIDGFRLDAVHAIVDTSPTHILEEIADLAHAHGKLVIAESDLNDPRIVNPKEKCGYGVDAQWVDDFHHAIHAFITGERQGYYSDFGELQDIVKSLRDTFVYDGKFSRFRGKTHGKPVYLDGCSFVVYIQNHDQVGNRGGGERLSVLVDEERLKMAASLYILSPYIPMIWMGEXYGERNPFYYFSNFSDPELVRGVREGRKRENGQQTDPQSEETFKSSRLSWNVNQEILSVYKTLIKLRKEYVDCKRDAEVNSGDMWMTVNKGKLLTVFSFKPSVIAIKGRGKLVMGSKSFPREITGETRFEEGFGIYMREVEET

SEQ ID NO: 7903 - protein, 224 aa, Apodiscus chevalieri
DIPQASRFFFMKNRVRMICDCRASPFKVIQDGRLAQPLSLGGSTLGSPHGCHAQYMENMGSIASLVMSVTIHEDNDEVENDQPKGSKLWGLVVCHHTSPRFGPFPLRYACEFLIQVFGVQIGKEVEMASQKREKHILQTQTILCDMLLRDAPVAIIAESPNVMDLVHCDGAALYYRKKFWLLGVTPTEEQIKDIAEWLLEYHSGSTGLSTDSLMDAGYPGLRSL

SEQ ID NO: 7904 - protein, 283 aa, Triticum aestivum
  misc_feature (227)..(227): Xaa can be any naturally occurring amino acid
  misc_feature (251)..(251): Xaa can be any naturally occurring amino acid
  misc_feature (266)..(266): Xaa can be any naturally occurring amino acid
EAVDLYNKHYKRDDTRIGLAFDVMGRVPYGTSFLDKQAEERSWDINLGWFLEPVVRGDYPFSMRSLARERLPFFKDEQKEKLAGSYNMLGLNYYTSRFSKNIDISPNYSPVLNTDDAYASQEVNGPDGKPIGPPMGNPWIYMYPEGLKDLLMIMKNKYGNPPIYITENGIGDVDTKETPLPMEAALNDYKRLDYIQRHIATLKESIDLGSNVQGYFAWSLLDNFEWXAGFTERYGIVYVDRNNNCTRYMKXSAKWVKESTPRKSPXMKILPSLKIGAHMWVHP

SEQ ID NO: 7905 - protein, 280 aa, Glycine max
MKGEYVEQQQQHPKSETPPSMFSKLQPQHHPFPHHPFQLSAEDATTITPSTAQKANSSGGDGATIEVVRRPRGRPPGSKNKPKPPVIITRDPEPAMSPYILEVSGGNDVVEAIAQFSHRKNMGICVLTGSGTVANVTLRQPSTTPGTTVTFHGRFDILSVSATFLPQQSGASPAVPNGFAISLAGPQGQIVGGLVAGGLMAAGTVFVIAASFNNPAYHRLPPEEEGASAGDGHSPPVSGGGDSGHGQAESCGMSMYSCHLPSDVIWAPTARPPPPPPPPY

SEQ ID NO: 7906 - protein, 513 aa, Ralstonia metallidurans CH34
MSGSPSPESEADAARLPYRIDRNFTRGLVWLRRDLRTDDNAALHYALKHCRQVWCVFVFDREILAPLLARGLHADRRVEFILRSLEPLRRALEDSGGGLIVLDGTARQAIPRLAAELEVEAVFANHDYEPAANDRDEAVRRTLAADSRVLLTFKDQVIFERDEILTGQGRPFSVFTPYKNAWLRTVRPFDLRPYPIEKHQETLAPVPQRYRGQLPTLADLGFTATNLAGIAMPTGSDGAHALFDEFLSRIGDYGRRRDFPAVRGPSYLSVHLRFGTISIRTLARAAHDTMLRGGAASEGATVWLSELIWRDFYFMILHHHPRVAEGKSFHAEYDGLRWIAPATGDRYFAAWCDARTGYPLIDAAMLQIRQSGYMHNRLRMVTASFLVKDLGVDWRRGEQYFADQLNDFDLAANNGGWQWAASTGCDAQPYFRIFNPVTQSEKFDPQGQFIRRYLPMLAALPDRYIHAPWTAPNEVLRAAGVTLGKDYPRPIVQHDVARKETLERYGVVKSAKA

SEQ ID NO: 7907 - protein, 639 aa, Pyrus communis
MESCDCIEAQWPPDELLVKYQYISNVFIALAYFSIPLELVYFVQKSAFFPYRWVLVQFGAFIVLCGATHFINVWTFSMHTKTVAIVMTVAKVSCAVVSCRTALMLVHIIPDLLSVKKRELSLKSRAEELDKEMGLMLTQEETGRHVRMLTHEIRGTLDRDTILKTTLVELGRTLGLEECALWMPSRTGMNLQLHHTLNYQIQVGSTVSINLPVVNEVFNSSRAIRVPYTCPLARIRPLVGRYVPPEVVALRVPLLNLSNFEINDWPDLSAKSYAIMVLILPTDSTRKWRDHELELVDVVADQVAVALSHAAILEESMRARAQLMEQNKALDLARREAEMAIHARNDFLAVMNHEMRTPMQAIIALSSLLLETELTPEQRLMIETVLKSSNLLETLINDVLDLSRLDDSSLELDNEIFNLHGVFREVMNLVQPIASVKKLSMTLILAPDLPVCAVGDENRLMQTILNVAGNAVKFTKQGYISIYYASVAKPEVFKRLATTGVYPESIEGHFYLRVQVKDSGCGILPEDIPHVFTKFSQPRNGSNRINEGAGLGLAICKRFVNTMGGHIWIESEGIDKGSIVAFIVKLGICDNHSDTTTHQVQMPPKGQANYGSGDLVGRKPSFRVRFGASSSIARYQRSL

SEQ ID NO: 7908 - protein, 266 aa, Brassica napus
  misc_feature (139)..(139): Xaa can be any naturally occurring amino acid
  misc_feature (154)..(154): Xaa can be any naturally occurring amino acid
  misc_feature (200)..(200): Xaa can be any naturally occurring amino acid
MAPSAASAASFFPVQLAALSLLLPPSSFAAAPPLPTRHLPPPSQLPPVAPPRFSRRSRPRTPNSDAEVIALSPKTLMATNRFICEVCNKGFQREQNLQLHRRGHNLPWKLKQKSTKEVKRKVYLCPEPTCVHHDPSRAXLGDSTGTPKLLSGTXAEKKWKCTECSKRYAWQSDWKAHSKTGHSDWNRRSKTCGTTRVDSXLTHRAFCDAIVTLRARALPSLTSLKSHHFTYGQNTNNPNNTSSMILGLSHMGPSQNLDHESGDRLR

SEQ ID NO: 7909 - protein, 388 aa, Scenedesmus obliquus
  misc_feature (1)..(1): Xaa can be any naturally occurring amino acid
  misc_feature (43)..(43): Xaa can be any naturally occurring amino acid
  misc_feature (56)..(56): Xaa can be any naturally occurring amino acid
  misc_feature (134)..(134): Xaa can be any naturally occurring amino acid
  misc_feature (253)..(253): Xaa can be any naturally occurring amino acid
XVTSEQLLFLEAWRAVDRAYVDKSFNGQSWFKLRETYLKKEPXDRRAQTYDAIRKXLAVLDDPFTRFLEPSRLAALRRGTAGSVTGVGLEITYDGGSGKDVVVLTPAPGGPAEKAGARAGDVIVTVDGTAVKGXSLYDVSDLLQGEADSQVEVVLHAPGAPSNTRTLQLTRQKVTINPVTFTTCSNVAAAALPPGAAKQQLGYVRLATFNSNTTAAAQQAFTELSKQGVAGLVLDIRNNGGGLFPAGVNVARXLVDRGDLVLIADSQGIRDIYSADGNSIDSATPLVVLVNRGTASASEVLAGALKDSKRGLIAGERTFGKGLIQTVVDLSDGSGVAVTVARYQTPAGVDINKIGVSPDVQLDPEVLPTDLEGVCRVLGSDAAPRLFG

SEQ ID NO: 7910 - protein, 638 aa, Pyrus communis
MESCDCVDAQWPPDELLVKYQYISDVFIALAYFSIPLELVYFVQKSAFFPYRWVLMQFGAFIVLCGATHFINVWTFSMHTKTVAIVMTVAKVSCAVVSCATALMLVHIIPDLLSVKSRELRLKNRAEELDREMGLMPTQEETGRHVRMLTHEIRSTLDRDTILKTTLVELGRTLGLEECALWMPSRTGMNLQLHHTLNYQIQVGSTVSINLPVVNEVFNSSRAIRVPYTCPLARIRPLVGRYVPPEVVALRVPLLNLSNSEINDWPDLSAKSYAIMVLILPTDSTRKWRDHELELVDVVADQVAVALSHAAILEESMRARAQLMEQNKALDLARREAEMAIHARNDFLAVMNHEMRTPMQAIIALSSLLLETELTPEQRLMIETVLKSSNLLETLINDVLDLSRLDDGSLELDNEIFNLHGVFREVMNLVQPIASVKKLSMTLILAPDLPVCAVGDENRLMQTILNVAGNAVKFTKQGYISIIASVAKPESSRDLATTGVYPESIEGHFYLRVQVKDSGCGILPEDIPHVFTKFSQPRNGSNRINEGAGLGLAICKRFVNTMGGHIWIESEGIDKGSIVAFIVKLGVCDNHSDTTTHQVQMPPKGQANYGSGDLVGRKPSFRVRFGASSSIARYQRSL

SEQ ID NO: 7911 - protein, 263 aa, Aspergillus nidulans FGSC A4
MSPQCTLPCSRHFHLHTETTSAKNYSSSCIAHRTTILAEHSVPGSSSTAASSLASIILPKISHEQSQKLTYTHERLFVHYISDSPSGPADTTTSEPSSYAPLSYIVVATAEQGRRIPFAYLLEMKRRFLSTYPPSNTDFASLPAYGCAAFNNELRGLLQTFNTAPPADSLASAKKEIDSVRDIMTENIERVLERGERIDLLVDKTDRLGGSAHDFRMRSRGLRRRMWWKNAKLMVLLGVVVVFLIYLFVGMGCGLPAWGRCVG

SEQ ID NO: 7912 - protein, 621 aa, Rhodothermus marinus
MSWLTEEDIRRWESGTFYDSYRKLGAHPDDEGTWFCVWAPHADGVSVLGAFNDWNPEANPLERYGGGLWAGYVPGARPGHTYKYRIRHGFYQADKTDPYAFAMEPPTGSPIEGLASIITRLDYTWHDDEWMRRRKGPASLYEPVSIYEVHLGSWRHKRPGESFSYREIAEPLADYVQEMGFTHVELLPVMEHPYYGSWGYQVVGYYAPTFRYGSPQDLMYLIDYLHQRGIGVILDWVPSHFAADPQGLVFFDGTTLFEYDDPKMRYHPDWGTYVFDYNKPGVRNFLISNALFWLEKYHVDGLRVDAVASMLYRDYSRKEWTPNIFGGRENLEAIDFIKKFNETVYLHFPEAMTIAEESTAWPGVSAPTYNNGLGFLYKWNMGWMHDTLDYIQRDPIYRKYHHDELTFSLWYAFSEHYVLPLSHDEVVHGKGSLWGKMPGDDWQKAANLRLLFGHMWGHPGKKLLFMGGEFGQHHEWNHDTQLEWHLLDQPYHRGIQLWVCDLNHLYRTNPALWHDGPEGFEWIDFSDRDQSVICYLRKNAGRMLLFVLNFTPVPREHYRVGVPIGGPWHEVLNSDAVAYGGSGMGNFGRVEAVPESWHGRPFHLELTLPPLAALILEPEHG

SEQ ID NO: 7913 - protein, 413 aa, Arabidopsis thaliana
MASSSADNLTDKNIVFRKLKSKSENKVCFDCSAKNPTWASVTYGIFLCIDCSATHRNLGVHISFVRSTNLDSWSPEQLRTMMFGGNNRAQVFFKQHGWTDGGKIEAKYTSRAADLYRQILAKEVAKAIAEETNSGLLSSPVATSQLPEVSNGVSSYSVKEELPLSKHEATSATSSPKASNTVVPSTFKKPIGAKRTGKTGGLGARKLTTKPKDNLYEQKPEEVAPVIPAVSSTNNGESKSSAGSSFASRFEYNDDLQSGGQSVGGTQVLNHVAPPKSSSFFSDFGMDSSFPKKSSSNSSKSQVEESDEARKKFTNAKSISSAQYFGDQNKNADLESKATLQKFAGSASISSADFHGHDQDDSNIDITASDLINRLSFQAQQDLSSLVNIAGETKKKLGTLASGIFSDIQDRML

SEQ ID NO: 7914 - protein, 388 aa, Scenedesmus obliquus
MVTSEQLLFLEAWRAVDRAYVDKSFNGQSWFKLRETYLKKEPMDRRAQTYDAIRKLLAVLDDPFTRFLEPSRLAALRRGTAGSVTGVGLEITYDGGSGKDVVVLTPAPGGPAEKAGARAGDVIVTVDGTAVKGLSLYDVSDLLQGEADSQVEVVLHAPGAPSNTRTLQLTRQKVTINPVTFTTCSNVAAAALPPGAAKQQLGYVRLATFNSNTTAAAQQAFTELSKQGVAGLVLDIRNNGGGLFPAGVNVARMLVDRGDLVLIADSQGIRDIYSADGNSIDSATPLVVLVNRGTASASEVLAGALKDSKRGLIAGERTFGKGLIQTVVDLSDGSGVAVTVARYQTPAGVDINKIGVSPDVQLDPEVLPTDLEGVCRVLGSDAAPRLFG

SEQ ID NO: 7915 - protein, 495 aa, Pyrus communis
MASSASENRLLLSRIATNEKHGENSPYFDGWKAYDQNPFHLTENPEGVIQMGLAENQLSFDLVEEWIRKNPKASICTAEGIEKFRSVANFQDYHGLPEFRQAIASFMWKARGGRVTFGPHRVVMSGGATGANELVMFCLANRGDAFLIPSPYYPAFYRDLGWRTGVQIVPVDCDSSNNFKITKEALEAAYGKAQNNNINVKGLIITNPSNPLGTTLDKDTLESLVTFINQKNIHLVCDEIYAATVFSSPKFTCITEVIQNMNCNPNLIHIVYSLSKDMGFPGLRVGIVYSYNDDVVNIGRKMSSFGLVSSQTQHMLASMLSDEDFVEKFLTTSAKRLAKRHGVFTDGLEEVGINCLKSNAGLFCWMDLRRLLRDQTFDGEMVLWRVIVNEVKLNVSPGSSFKCVEPGWFRVCFANMDDDTVEVALKRIRAFVGQAKKAQEQAQVKSPKKRWQSNLRLSFSSSSRRFEQEGVSVMSPRMMSPHSPMPHSPLLRATT

SEQ ID NO: 7916 - protein, 793 aa, Nocardia farcinica IFM 10152
MRIAVIGGGPAGLYFSALMKQLDPSHEITIWERNAPDDTFGFGVVFSDETLGGIEHADEQIYRGMSEQFARWSDIDIHYRGQVRTSGGQGFAAMSRKELLRLLQRRCTDLGVTIHFRTPAPDVEDLAATHDLVLASDGINSAVRSTFADVFEPSLDPRRNKYMWLGTDLVFEAFEFFVKHTPHGIMQVHAYPFSAQQSTFIVEMHESVWREAGFAAFADREFAPGENDEQSIALIAELFAAELDGHRLQANNSRWISFTTVRNRTWRHGNIVLIGDAAHTAHFSIGSGTKLAMEDALALAACLHENDSVAAGLAAYETERKPVVESVQRAAQASLEWFESIAQYTDQHPDQFAFNLLTRSRRITYDNLRLRDDGFVEAIDGWYLSTQDAAAAAPRPPMFYPLRLKDVELPNRILVSPMDMYSAVDGVPTDFHLVHLGSKALGGAGLVMTEMVCVSPEGRITPGCAGLYTPEQERAWARVVDFVHGHTRAKIGVQLGHSGRKGATKVMWEGIDDPLESGGWETVGPSAIPYGPASRTPREITRAEMDRVTREFADAAAAAARAGFDLLELHCAHGYLLSAFLSPLANRRTDEFGGSLDNRLRFPLRVFDEIKQVWPADRPLSVRISATDWAEGGNTVDDAVEIARAFAAHGVDVLHVSSGQVVKHEKPAYGRSYQTPFADRIRQEVGVPHGVAVVAVGAISSHDDVNSVLLAGRADLVAIGRAHLWDPQWTLHAAVEQGYRGEAAEWPAPFRAGNRKPPTGRTDGPPPRLELIRATGTPAPRRRWTPARVTAAV

SEQ ID NO: 7917 - protein, 446 aa, Pyrus communis
MAIDIEQRQQPSPRLSKIAVSDTHGEDSPYFAGWKTYDENPYHESSNPSGVIQMGLAENQVSFDLLENHLEENSEASTWGSKGSKGVSGFRENALYQDYHGLLSCRKAMASFMEQIRGGRAKFDPARVVLTAGATRAIELLTFCIADPGDALLVPTPYYPGFDRDLRWRTGVNIVPIHCESSNNFQITPQALEAAYKVTEAKNMRVRGVLFTNPSNPLGATSQRTVLEETLDFVTQKSIHLVSDEIYSGSAFSSSEFISVAEILEDRQYKDAERVHIVYSLSKDLGLPGFRVGTVYSYNDKVVTTARRMSSFTLISSQTQHLLASMLSDKEFTENYIKTNRERLRKRYDMICEGLKKSGIECLKGNAGLFCWMNLMPFLDEPTRESELTLWDSMLHEVKLNISPGSSCHCSEPGWFRVCFANMSEQTLGIALTRIHNFMEKRERAC

SEQ ID NO: 7918 - protein, 468 aa, Streptococcus pneumoniae TIGR4
MTKTLPKDFIFGGATAAYQAEGATHTDGKGPVAWDKYLEDNYWYTAEPASDFYNRYPVDLKLAEEYGVNGIRISIAWSRIFPTGYGQVNAKGVEFYHNLFAECHKRHVEPFVTLHHFDTPEALHSNGDFLNRENIEHFVDYAAFCFEEFPEVNYWTTFNEIGPIGDGQYLVGKFPPGIQYDLAKVFQSHHNMMVSHARAVKLYKEKGYKGEIGVVHALPTKYPLDPENPADVRAAELEDIIHNKFILDATYLGRYSAETMEGVNHILLVNGGSLDLREEDFTALEAAKDLNDFLGINYYMSDWMEAFDGETEIIHNGKGEKGSSKYQIKGVGRRVAPDYVPRTDWDWIIYPQGLYDQIMRVKKDYPNYKKIYITENGLGYKDEFVDNTVYDDGRIDYVKQHLEVLSDAIADGANVKGYFIWSLMDVFSWSNGYEKRYGLFYVDFETQERYPKKSAHWYKKVAETQIID

SEQ ID NO: 7919 - protein, 310 aa, Prochlorococcus marinus subsp. marinus str. CCMP1375
MVSSVIEATAPLRRPVSADKALAASEKLQVKTKKELRYPRKFKRRWGTVGFMGAIHALTIFALLPRFWSLQNIAALLILYWVTACLGVTLGYHRLLSHRAFKVPHWLERFFATCGALSCQHGPIDWVGLHRHHHTFSDTDADHHNSKKGFWWSHMGWMFEPIPALQTVPNFSGDLIQDPYYRFLNKNFLLLQIPLGALLYWIGHGSESGGWSMVLWGIPFRLVVVYHVTWLVNSATHCWGNVAFDSGDGSKNNWWVAALTFGEGWHNNHHAYPSSARQGLFKGQIDLTWQHIRLLHALGLAKKIRLPMKP

SEQ ID NO: 7920 - protein, 220 aa, Triticum aestivum
MWSTDSDLDESASTTTAAASSLSSSSCSLQPQTPPPPRCRRSRNRRRAQRRVKNCPEAEVEESEAEAEEVWCGAQWEAAWPRRARPVVLAGEDAAPDRAGAGAGDSGVGRARSLTDDDLEELKGCVDLGFGFSYNEIPELCGTLPALELCYSMSQRFLDEHQAPSKVEDLAPEPPAVVPPSPVQPIPNWKISCPGDSPDEVKARLKYWAQAVACTVKLCS

SEQ ID NO: 7921 - protein, 429 aa, Zea mays
MRGSVRDMYGSATDDDRISHPQRRRSRAPRPLAASVHHPCTHPNETTQLNVSTQPVSSRHSTGFPPTAAAPPPVTVPRACPRRDHLTTPTYDATSHAPSHTRHRFKTLTPLTHHTRTVSPQRARARRPSNHRENKSQPNSPVSQRSLSLHYSTMSSMELLHAVVPEKQSEEEVAPAATTTSSSATATGGDEGAHVLQGWAKRKRSRRQRSEEENLALCLLMLSRGGHHRVQAPPTPVPSAAPAAAEFRCSVCGKSFSSYQALGGHKTSHRVKLPTPPPPPPAVTVPAAVPVPEAPAPTTVVVPPLPPVEVGREPATSSTAASSDGAASSRVHRCSICHKEFPTGQALGGHKRKHYDGGVGSAAASTDVPAAPAETSAEVGSSAARAFDLNLPAVPEFVFRCGKPGKMWEEDEEVQSPLAFKKPRLLMTA

SEQ ID NO: 7922 - protein, 670 aa, Penicillium janthinellum
AAAQRRQNDSSVFLAIMVAAAVESESSLTDGDAGALLLQDISEWDEVFRFDRLEAVERAAHAAAAAAFGAFVARGDWTASAAAAFQAAGKQIAFMAAFSTVAGAKGSATVRDADAFAAKFASAAALQELVGNNSPISFFIFDLLFAAILFASKAKAANQAAFAAAAELAAESLFVRLPSLHQVSFFALAGFAAVAAHRHMNGYGSHTFKLVAKDGSVYCSKFWYKADQGQAAEVWKDAEEVAAEDVDYFRDLNFQAEAAGRYPLWELASQVMTFSDFEIDPFNENIPTKVVPRESVPLIVDAELLLNRNPLNMFAEVEQVFMDVAAASKGADEVEDPLIQRQFAYIDTHLSELTASYGIPVCRPYATVLNDQEDGARYDDVQDVLVIAPNAFSASAVEVQIPAAAAFNLAAARVAAAGDVRVNAVVEADQRKQSRQFWASDVNAQKKRLVDAFRMEVASAVSASIQVDVTVEFSFVAAAAAARIAAAVGSAAAGALANRRQIKVIASLAVLAKADAKVRQKNALESSSQAVAVDAKAAAQDIVDSSDAANVVTVAREFAVLPQTAAADAAEFVAAASAKAFSSFPAMEVISVAAAAGAVAEPARASLDLNMAMFFSRIVASRGAAANAIAALVKASRDGVFVAAVLAKAAANNRAAEAIFKFEVRQAVDA

SEQ ID NO: 7923 - protein, 223 aa, Baccaurea javanica
DIPQASRFLFMKNKVRMICDCMAPPVKVIQDMNLAQPLSLSGSTLRSPHGCHAQYMSNMGSIASLVMSVTINEDDDEMKSDQPKGRRLWGLVVCHHTSPRFVPFPLRYACEFLIQVFGVQINKEVELAAQMREKHILQIQTVLCDMLLRDAPVAIITQSPNVMDLVKCDGAALYYRKKFWLLGVTPTESQIKDIAEWLLEYHSGCTGLSTDSLMEAGYPGASI

SEQ ID NO: 7924 - protein, 225 aa, Glycine max
MGQDQNQRSLIYAFVSRGTVILAEYTEFSGNFNTIAFQCLQKLPASNNKFTYNCDGHTFNYLVDNGFTYCVVADESIGRQVPVAFLERVKDDFVAKYGGGKAATVAANSLNKEFGSKLKEHMQYCVEHPEEISKLAKVKAQVSEVKDVMMENIEKVLDRGEKIELLVDKTENLHHQAQDFRNSGTKIRRKMWLQNMKIKLIVLAILIALILIIVLSVCRGFNCGK

SEQ ID NO: 7925 - protein, 195 aa, Geobacter metallireducens GS-15
MRRHTELRTMSHKDTGESVEPRRTTGSGTSHETKGITKSETEGSSREVSVLSPIREMERWFEESLSRPFFGMHWMPFRQMFSEVGERTELMPAVDMFEEGGHLVVKAELPGITKENLNLRIVDNNLILSGERSSEEKIERGNYLRLERSHGSFSRTLSLPDGLDTEHIKAGFKDGVLEVRIPRTESSTVREITVE

SEQ ID NO: 7926 - protein, 226 aa, Escherichia coli
SENYALTTNQGVRIADDQNSLRAGSRGPTLLEDFILREKITHFDHERIPERIVHARGSAAHGYFQPYKSLSDITKADFLSDPNKITPVFVRFSTVQGGAGSADTVRDIRGFATKFYTEEGIFDLVGNNTPIFFIQDAHKFPDFVHAVKPEPHWAIPQGQSAHDTFWDYVSLQPETLHNVMWAMSDRGIPRSYRTMEGFGIHTFRLINAEGKATFVRFHWKPLAGKA

SEQ ID NO: 7927 - protein, 576 aa, Listeria monocytogenes str. 4b H7858
MQFGFRRLSIIDVENGHQPLTYENERYWIIFNGEVYNYVELREQLVAEGMTFETESDTEVIIATYAKYKEKTAERLRGMFGFVIWDKQEELVYGARDPFGIKPFFYAEEDGKLFMGSEKKSILHALKEKELDEVSLQNYMTYQFVPEPDSLTKNVKRLEPGHQFTKKIGQPMEITTYWKASFAPVTKSEDAWIKEVRDVMYDSVKMHMRSDVPVGSFLSGGIDSSIIAAIAKEYHPAIKTFSVGFERDGFSEIDVAKETADKLGVENISYVISPEEYMKELPKIVWHMDDPLADPAAIPLYFLSREARKQVTVALSGEGADELFGGYNIYNEPNSLAMFNKMPSVFKSMLNSVARIMPEGMRGKSFLERGTTPMEERYIGNAKMFTEKEKQILLPKYQAGHDYTNITDPFYAETTNYHPVERMQYIDIHTWLRGDILLKADRMTMANSLEVRVPFLDKEVYNVARNIPDTMKTTNGTTKYILRKAAATFVPEHVLNRRKLGFPVPIRHWLKDEMNAWVKNIIKESPTDHLINKQYVLGLLDDHCAGKFDYSRKIWTVVIFMIWYDVYVADKYDFGK

SEQ ID NO: 7928 - protein, 223 aa, Baccaurea lanceolata
  misc_feature (47)..(47): Xaa can be any naturally occurring amino acid
DIPQASRFIFMKNKIRMICDCMAPPVKVIQDKNLAQPLSLSGSTMRXPHGCHAQYMSNMGSIASLVMSVTINEDDDEMKSDNPRGRRLWGLVVCHHTSPRFVPFPLRYACEFLIQVFGVQINKEVESAAQMREKHILQIQTVLCDMLLRDAPVAIITQSPSVMDLVKCDGAALYYRKKFWLLGVTPTESQIKDIAEWLLEYHSGSTGLSTDSLMEAGYPGLQS

SEQ ID NO: 7929 - protein, 283 aa, Lactobacillus sakei subsp. sakei 23K
MTTLTTTYTLANGVQIPVLGFGTWQTPDGDTAIKSVKAALEAGYRHIDTAQAYQNEASVGTAIQESGVARQDLFLTTKIWNANHSYDLTMQSFEESLQKLQTDYVDLLLIHWPNPIDFRDNWETANAETWRAMEELYNAGKAKAIGVSNFRAHHLEALKKTAKVQPMVNQIFLAPGELEAETVQYSRDNGLLLEAYSPLGTGKIFDVPEMKTLAAKYQRSIPQIASRWSLQHGFLPLPKSVHANYIQENTQLFDFELTPEDMQTIDQLDGVVGKAKDPDTATF

SEQ ID NO: 7930 - protein, 259 aa, Escherichia coli
KLTGRDPDFHRRELWEAIEAGDFPEYELGFQLIPEEDEFKFDFDLLDPTKLIPEELVPVQRVGKMVLNRNPDNFFAENEQAAFHPGHIVPGLDFTNDPLLQGRLFSYTDTQISRLGGPNFHEIPINRPTCPYHNFQRDGMHRMGIDTNPANYEPNSINDNWPRETPPGPKRGGFESYQERVEGNKVRERSPSFGEYYSHPRLFWLSQTPFEQRHIVDGFSFELSKVVRPYIRERVVDQLAHIDLTLAQAVAKNLGIELT

SEQ ID NO: 7931 - protein, 447 aa, Arabidopsis thaliana
MAASSSSAASFFGVRQDDQSHLLPPNSSAAAPPPPPPHHQAPLPPLEAPPQKKKRNQPRTPNSDAEVIALSPKTLMATNRFICEVCNKGFQREQNLQLHRRGHNLPWKLKQKSTKEVKRKVYLCPEPSCVHHDPSRALGDLTGIKKHYYRKHGEKKWKCDKCSKRYAVQSDWKAHSKTCGTKEYRCDCGTLFSRRDSFITHRAFCDALAQESARHPTSLTSLPSHHFPYGQNTNNSNNNASSMILGLSHMGAPQNLDHQPGSVPSLFSSSMQSPNSAPHMSATALLQKAAQMGSTSSNNNNGSNTNNNNNASSILRSFGSGIYGENESNLQDLMNSFSNPGATGNVNGVDSPFGSYGGVNKGLSADKQSMTRDFLGVGQIVKSMSGSGGFQQQQQQQQQQQQQQQHGNSRERVGSSSDSADRSSMNVNTGGGPASTSPPYGIHHASF

SEQ ID NO: 7932 - protein, 194 aa, Bischofia javanica
FHFMKNKVRMICDCLAAPVKVIQDKKLTEPLSLCGSTLRSPHGCHAQYMANMGSIASLVMSVTINEDDDEMESDQPKGRKLWGLVVCHHTSPRFVPFPLRYACEFLIQVFGVQISKEVELAAQMKEKHIFQTQTVLCDMLLRDAPVAIVTRSPNVMDLVRCDGAALYYRKKFWLLGVTPTEAQIRDIAEWLLEY

SEQ ID NO: 7933 - protein, 224 aa, Magnetospirillum magnetotacticum MS-1
MDETIGMTLQQFGDFGDFSLTVLVTSPPWYENCYLVVHKPTNSLAIVDPGGDAERILEAVAATGAKPQVIWLTHGHPDHLGAAHQLETALGISTRAHADEAQVISSSSDLNRTFTGQPQKGPASLETFAGEPTETLGGAPVRVIHTPGHTPGGICLDFGGFVLTGDTLFRNGVGRTDLPGGSEQQLWASINRLLGLLDDEAMLFSGHGPEWATREARRWWRMVG

SEQ ID NO: 7934 - protein, 928 aa, Pseudomonas fluorescens Pf-5
MRWLRIALGFTVTLLTLLCLNPALAAQGSGWAVLLDEQADLQLSDIRSPRYTNQFSPIELDKLTAAEPDGALWLRFKLQPGTHEQILRIFAPDLSHLNLYVLEGDKLIEQVNTGSGPSQAQKPLPSSDFMLPLPQSAKPLDVYVRLVSEHELRPFITLQSAVMGAADQSQTLIYGLLFGCLAMLILHNLTRFAYTRSRSSLWLAACEGLLTLSLLMLLNLFGPWLPAWEALQTPGAYIALLLTAPCGMMFAYRFFAPLGAHPLNRLLLGNILLISLFGLLLLFVDTLPLNIITYGLVALAGLSMLFVGGYHWHKGYRPARLFVAAMVIFNLGTLVILPALLGLTLVAPQGLIVTLLSVVCIAGLLMSIALGERQRNITENRFSVSRDLAASTAEVNAKAEFLAKISHEIRTPMNGVLGMTELLLGTPLSVKQRDYVQTIHSAGNELLTLINEILDISKLESGQIELDDVQFDLNALIEDCLSIFRAKAEQQNVELISFIQPQVPRVISGDPTRLRQALLSLLENALKKTDEGEVLIVVALDERSSKPRLRIAVQDSGQPMEAEEREALLHTELHSKNFLATTRLGGNLGLVIARQLILLMHGEFGIKSGTNQGSTLWLTLPLDAERLEHPTADLDGPLQGARVLVVDDNDTCRKVLVQQCSAWGLNVSAVPSGKEALALLRTKAHLRDYFDVVLLDQNMPGMTGMQLAAKIKEDPSLNHDILLIMLTGISNAPSKVIARNAGIKRILAKPVAGYTLKTTLADELNQRDKAPAAPYNQPAHAAQTPAPVTVPSDFRILVAEDNSISTKVIRGMLGKLNLQPDTASNGEEALQAMKANRYDLVLMDCEMPVLDGFSATQQLRAWEVGNQRVRTPVVALTAHILAEHKERARQAGMDGHMAKPVELSQLRELVEHWVTQRDLRERSTAHTS

SEQ ID NO: 7935 - protein, 195 aa, Breynia cernua
LRSLFMKNKVRMICDCQAPPVKVVQDKRLAQPLSLGGSTMRSPHGCHAQYMANMGTTASLVMSVTIEEDEETVNDQQIGRKLWGLVVCHHANPRFVPFPLRYACEFLMQVFGVQVNREVELAAQTTEKHILQTQTVLCDMLLRDAPVAIVTQSPNVMDLVKCDGAALYYRKKFWMLGVAPTETQIKDITEWLLEY

SEQ ID NO: 7936 - protein, 327 aa, Vigna unguiculata
PRVRAAATETAGGIIDVSGSANCLEIAILARFAVDDHNKKQNGVLEFVRVISAKQQVVSGILYYITLEAKDGETKKVYKTKVWVREWLNPKEVQEFNLVTDSAIETKDGGVGDVPSDTLQSGRRESDEEQRNMATATVTLGGITDVPGAANSVEIANLARFAVDDHNKKQNGVLEFVRVISAKQQVVSGILYYITLEAKDGETKKVYKTKVWVREWLNPKEVQEFNLVTDSAIGTKDGGVGDVPSDTLHIENLARFAVDQYNKNENANLEFVRVIDAKEQVVEGFIYYITLEAKDGESKNVYEAKVWERSWLNSIELLEFKPVDVAV

SEQ ID NO: 7937 - protein, 457 aa, Rubrobacter xylanophilus DSM 9941
MRFPEGFLWGAATAAYQVEGAVGEGGRGPSIWDTFSHTPGRVYRGDTGDVACDHYHRLEEDLDLMARFGLGAYRFSVAWPRIQPEGRGPANRSGLDFYRRLVEGLGERGIEPVLTLYHWDLPQALEDQGGWTSRQTSERFAEYAALVYEALGGSVRFWITLNEPWVSAWMGYGLGVHAPGRRSTADALAATHHLLLGHGLALEALRALGGGGRLGITLNLSPVRAASAEPADAEAARRVDGNANRLYLDPLFRGSYPQDMLEHYRGASDFSFVRDGDLQRISAPVDFLGVNYYMRHTVRAAPGGGVRGPSTGMRFGELGAETVLPEGVGTTAMGWPVEPDGLAEILVRVKEEYRDLPVFVTENGCAVHDYIDPEGEVNDVERVAYLDAHLRAAHAALERGVDLRGYMVWSLLDNFEWAEGYSKRFGLVYVEYGSQRRVPKRSARWYAAVIRRGGPEG

SEQ ID NO: 7938 - protein, 741 aa, Pyrus communis
MEACNCIEPQWPADELLMKYQYISDFFIALAYFSIPLELIYFVKKSAVFPYRWVLVQFGAFIVLCGATHLINLWTFSMHSRTVAIVMTMAKVLTAVVSCATALMLVHIIPDLLSVKTRELFLKNKAAELDREMGLIRTQEETGRHVRMLTHEIRSTLDRHTILKTTLVELGGTLALEECALWMPTRTGLELQLSYTLRQQNPVGYTVPIHLPVINQVFSSNRAVKISPNSPVARLRQLAGRHIPGEVVAVRVPLLHLSNFQINDWPELSTKRYALMVLMLPSDSARQWHVHELELVEVVADQVAVALSHAAILEESMRARDLLMEQNIALDLARREAETAIRARNDFLAVMNHEMRTPMHAIIALSSLLQETELTPEQRLMVETILRSSNLLATLVNDVLDLSRLEDGSLQLEIATFNLHSVFREVHNLIKPVASVKKLSVTLNIAADLPMYAIGDEKRLMQTILNVVGNAVKFSKEGSISITAFVAKSESLRDFRAPDFFPVQSDNHFYLRVQVKDSGSGINPQDIPKLFTKFAQTQTLATRNSGGSGLGLAICKRYVNLMEGHIWIESEGLGKGCTATFIVKLGFPERSNESKLPFGPKLQANHVQTNFPGLKVLVMDDNGVSRSVTKGLLAHLGCDVTAVSLIDESLHVISQEHKVVFMDVSMPGIDGYELAVRIHEKFTKRHERPALVALTGSIDKITKENCMRVGVDGVILKPVSVDKMRSVLSEILEHRVLFEAM

SEQ ID NO: 7939 - protein, 278 aa, Nostoc sp. PCC 7120
MLREFASRDELIAYLREQFPQAAERSDYVSDTKGGRQAAQKALQKVNPATYAKTRNFLTGDVTRLSPYIRYGVLSLGEIRNYVLDNVKHPDDAKKLINELGWRDYWQRLYIKLGNGIWEDQEEYKTGYTPAEYASDLAADIKEGKTGLVCIDSFSRELQETGYLHNHMRMWLAAYIVHWRRIRWQEGAKWFLEHLLDGDPASNNMSWQWVASTFSQKPYFFNRENLERYTQSIYCQKCPLYGHCNFEGSYEELEQQLFPKGKFTKQPNSQSWQRGKKK

SEQ ID NO: 7940 - protein, 638 aa, Pyrus communis
MESCDCIEAQWPPDELLVKYQYISNVFIALAYFSIPLELVYFVQKSAFFPYRWVLVQFGAFIVLCGATHFINVWTFSMHTKTVAIVMTVAKVSCAVVSCATALMLVHIIPDLLSVKKRELSLKSRAEELDKEMGLMLTQEETGRHVRMLTHEIRSTLDRHTILKTTLVELGRTLGLQECALWMPSRTGMNLELSHTLNYHIQAGSSVSIDLPEVNEAFNSSQAIRIPYTCPLARIRPLVGRYVPPEVVALRVPLLNLSNFQINDWPDVSAKSYAIMVLILPTDGTRTWREHELELVDVVADQVAVALSHAAILEESMRARKQLTEQNDALDLAWREAEMAIHARNDFLAVMNHEMRTPMHAFIALSSLLLETELTPEERLMIETALKDSNLLETLVNDVLDLSRLEDDSLELDIEKFNLHGVFREVMNLVQPVASVKKLSMTLILSPDLPVYAVGDENRLLQTILNVAGNAVKFTKQGYISITASVAKSESSRDWQPPEFYPASTDGYFYLRVQVKDSGCGVLPEDIRHLFTKFSQPRNGSNRINNGAGLGLAICKRFVNTMGGHIWIESEGIDRGSIVAFIVQLGICDNHSDTTTHQVQMPPKGQANYGSGDVIGHKPAFRDCFGVTSSIARYQRSL

SEQ ID NO: 7941 - protein, 471 aa, Listeria monocytogenes EGD-e
MHTNTGFPADFLWGGAAAANQFEGAYNVDGKGLSVQDVTPKGGFGHITDGPTPDNLKLEGIDFYHRYKDDVKLFAEMGFKVFRTSIAWSRIFPNGDETEPNEAGLQFYDDLFDELLAHNIEPLITLSHYETPLHLSKTYDGWVNRKMIDFYENYVRTVFNRYKGKVKYWLTFNEINSILHAPFMSGGISTSPDKLSQKDLYQAVHHELVASALATKIGHEIMPEAQIGCMVLAMPTYPLTSNPDDIIAVMEAERKNYFFSDVHVRGTYPGYMKRYFRENNIELDVTEEDLEILKNTVDFISFSYYMSTTETADESKRKAGAGNILGGVQNPYLEASEWGWQIDPQGLRVVLNEFWDRYQKPLFIVENGLGAIDQLEKDENGNYTVNDDYRINYLSAHLSQVKEAIKDGVDLMGYTSWGCIDLVSASTAEMKKRYGFIYVDRNNDGTGTLNRYKKKSFDWYKNVIATNGEDL

SEQ ID NO: 7942 - protein, 458 aa, Triticum sp.
MSGGGRPPAAQKILQSLRPPPVFSTPSRPPFASPDDYHRFHAPTTPSATGSGGIGSGGVGGDIDEGLVIRTQLKRKATREENNAAESSDCMIVTTGVTGNPLLTPVSGKAVKNSKSKTKNNKAGPQTPTPNVGSPLNPSTPAGTCRYDSSLGLLTKKFINLLKQAEDGILDLNNAAETLEVQKRRIYDITNVLEGIGLIEKTLKNRIRWKGLDDSGVELDNGLSGLQTEVENLNLQEQALDERISDMREKLRGLTEDENSQRWLYVTEDDIKGLPCFQNETLIAIKAPHGTTLEVPDPDEAGDYLQRRYRIVLRSTLGPIDVYLVSQFDDGFENLGGAATPPRHTNVPKPGPCEDLHATNATQSSKSINVEYNIQHRQNTPQDPSSSNDYGGMTRIIPSDVNTDADYWLLTEGDVSITDMWETAPEVQWDTAVFLPEDVSIPHAHHSPRMQVPSMDQP

SEQ ID NO: 7943 - protein, 508 aa, Oryza sativa (japonica cultivar-group)
MDGNAKGGGHSEALKNYNLGRTLGIGSFGKVKIAEHKLTGHRVAIKILNRRQMRNMEMEEKAKREIKILRLFIHPHIIRLYEVIYTPTDIYVVMEYCKFGELFDYIVEKGRLQEDEARRIFQQIISGVEYCHRNMVVHRDLKPENLLLDSKYNVKLADFGLSNVMHDGHFLKTSCGSPNYAAPEVISGKLYAGPEVDVWSCGVILYALLCGTLPFDDENIPNLFKKIKGGIYTLPSHLSALARDLIPRMLVVDPMKRITIREIREHQWFQIRLPRYLAVPPPDTAQQAKMIDEDTLQDVVNLGYGKDHVCESLRNRLQNEATVAYYLLLDNRFRATSGYLGADYQESLERNFNRFASSESASSNTRHYLPGSSDPHASGLRPHYPVERKWALGLQSRAQPREIMIEVLKALQDLNVSWKKNGQYNMKCRWSVGTQATDMLDVNNSFVDDSIIMDNGDVNGRLPAVIKFEIQLYKTRDEKYLLDMQRVTGPQLLFLDFCADFLTKLRVL

SEQ ID NO: 7944 - protein, 744 aa, Vibrio fischeri ES114
MNKGKASLADLIFRSIFIIFSILTVGITIHTYQLSVNTINEEVKRNLQQTSGIINNFFEHRLSILQIRQDTDAESLAIYDQYIESDYKNKLNTYFSNIEAKSPYNSPDFRFIEVNNKLYWDDGNSSFLSLNENCLKIIIKKNLNINTWYYIKMKEPLSEADFLIRKTPIVNNDSGRIVAFIYNAVMLNNNISFLNKLKKLTNSQDVFIINDNKILASSVSSNTEIYQEVTSILNGTRKRIPSKILNFTPINIKSMSGEISILSLKNKDNIELLEQRFIYSVVLSFFVLIAIAVLIRGLFEHKILLSLNSLLKYTNTVSKNETRSEYQGCGILEFDQIGEKLEQTFSELIEAKEDSYKAQRAAEKLAQVKSDFLARMSHEIRTPLNGILGISSLLKSSNLTREQQKQVNILHQGGEHLLAVLNDILDFSQIEQEKLKINSAPFKLSDVLENINAIYFPLCKNKNVLFSIENHVNPDVFINSDQVRLTQILFNLLSNAAKFTEKGKVKLTLSLNKHNSDYYLQFSVDDTGVGICAEEQTRMFEPFEQSGFSESRKFGGSGLGLAIVKQLLDLLKGKITINSTLGVGSTFSVLIPVLICEDKADISDAKAENQITSLPTGLKILLIEDNKSNAYIAKAYCQKYGLNVTWRNDAAQGIAELSKSEFDLILMDNQMPGMSGIKATKYIRNHLKIMTPIYAYTADALEESNQEFFSAGANYIITKPIKEKSILDALAFYKSENGLPPFDS

SEQ ID NO: 7945 - protein, 185 aa, Oryza sativa
MADGPGSPGGGGGSHESGSPRGGGGGGGGGGGGGGVREQDRFLPIANISRIMKKAIPANGKIAKDAKETVQECVSEFISFITSEASDKCQREKRKTINGDDLLWAMATLGFEDYIEPLKVYLQKYREMEGDSKLTAKAGDGSVKKDVLGSHGGSSSSAQGMGQQAAYNQGMGYMQPQYHNGDVSN

SEQ ID NO: 7946 - protein, 205 aa, Fucus distichus
MSRNDSPFDMQIKLLMIGDTGVGKTCLLLRYANDSFSQTFITTIGIDFKIKNIDLDSKRIKLQIWDTAGQERFRTITTSYFRGAQGILLVYDVTDKKSFNSIRNWVAQIQQHADVAVNKILIGNKCDMDEDREVSKEEGANLAAEYGIQFFETSAKNDINVEKGFITIAREVKDRLMADGPGGGGGHGRTVDINGQASKKKTGCC

SEQ ID NO: 7947 - protein, 164 aa, Zea mays
MMPRRALLFAAVLLAASAAAVSGFHLGGDESGLVRGVLAALRERAEAEDAARFAVAHYNKNQGAALEFTRVLKSKRQVVTGTLHDLILEAADAGKKSVYRAKVWVKPWEDFKSVVEFRLVGDSESEPEPSVASDVSSGQDIVQEEARLHTIENDGLSGDFTSSS

SEQ ID NO: 7948 - protein, 140 aa, Zea mays
PIANISRIMKKAVPANGKIAKDAKETLQECVSEFISFVTSEASDKCQKEKRKTINGDDLLWAMATLGFEEYVEPLKIYLQKYKEMEGDSKLSTKAGEGSVKKDAISPHGGTSSSSNQLVQHGVYNQGMGYMQPQYHNGET

SEQ ID NO: 7949 - protein, 305 aa, Methanosarcina barkeri str. fusaro
MDFISNLFGKDKTQNLFEACKLGQIENVEKFLKSDKVDINSQDAYGKTALNYAVNKGYRDVVELLIKGGADPNIQDENGDTALISAAKVERGDIVELLIKSGADLNIQDRNYETALKFAVKVGYRKIVKLLLEGGADPNIQDRNGETALISAANRGQKDIVELLIKGGAEVNLQDENLNTALIAAAKIGHKSIVELLLKAGDDLDLQDKNGNTALTYAADRGYRDILELLLNSGASLDIQEENGLTALMLSAQAGDKDIVELLIKSGADLNLQDENGNTALDIAAEIEFTEIVELLRQSDASFRS

SEQ ID NO: 7950 - protein, 511 aa, Nicotiana tabacum
MDGSTVQGGSSVESFLRNYKLGKTLGIGSFGKVKIAEHTLTGHKVAVKILNRRKIKNMEMEEKVRREIKILRLFMHPHIIRLYEVVETPSDIYVVMEYVKSGELFDYIVEKGRLQEDEARKFFQQIISGVEYCHRNMVVHRDLKPENLLLDSKWNVKIADFGLSNIMRDGHFLKTSCGSPNYAAPEVISGKLYAGPEVDVWSCGVILYALLCGTLPFDDENIPNLFKKIKGGMISLPSHLSAGARDLIPRMLIVDPMKRMTIPEIRMHPWFQAHLPRYLAVPPPDTMQQAKKIDEDILQEVVKRGFDRNSLVASLCNRVQNEGTVAYYLLLENQFRASSGYMGAEFQETMEYGYHQINSSEVLLPCWQHLPGIMDFQQVGARQFPVERKWALGLQSRAHPREIMTEVLKALQGLNVRWKKIGPYNMKCQWVPGVPGHHEGMSNNSIHIQFFGDDSTVIENGGVTIPNAVKFEVQLYKTREEKYLLDLQRVQGPQFLFLDLCAAFLAQLRVL

SEQ ID NO: 7951 - protein, 203 aa, Breynia stipitata
LRSLFMKNKVRMICDCQAPPVKVVQDKQLAQPLSLCGSTMRSPHGCHAQYMANMGTTASLVMSVTINEEDEETVNDQQIGRKLWGLVVCHHTNPRFVPFPLRYACEFLMQVFGVQVNREVELAAQTTEKHILQTQTVLCDMLLRDAPVAIVTQSPNVMDLVKCDGAALYYRKKFWMLGVAPTETQIKDITEWLLEYHGESTGL

SEQ ID NO: 7952 - protein, 361 aa, Yarrowia lipolytica CLIB122
MPSNLFTPIQVGNCHLLNRIVFAPLTRCRNVKTVPSDLQVTHYAQRGQDPGTLLISEATMISEKSGGYLGHENLPGIWSSEQTEGWRKVVQAVHDAKSFMFIQLWDLGRASDPETIKALGYDRVSASDHYTEDGKNFVRGLEVKEIKERVDFYVQAAQNAIQAGADGVEIHAANGYLPDQFLRWNTNTRNDEYGGSVEKRARFVFEIVAAVVAQVGQKKTSIRLSPWTRFGDMAVDEHKSREQFEYVVTQLQTQYPDLAYIHVIEGRTDGHQDLEVPQWMNNDWIQNIWKGPIIRAGGYTPESAVAEAQTNDRTLVAFGRMFTSNPDLVDRVRHGKALTKYDRSTFYTQTGEGYVDWKNAD

SEQ ID NO: 7953 - protein, 544 aa, Bacillus licheniformis ATCC 14580
MAKDIKFSEEARRSMLRGVDALADAVKVTLGPKGRNVVLEKKFGSPLITNDGVTIAKEIELEDAFENMGAKLVAEVASKTNDVAGDGTTTATVLAQAMIREGLKNVTAGANPVGVRKGIEQAVAVAVESLKEISKPIEGKESIAQVASISAADEEVGSLIAEAMERVGNDGVITIEESKGFTTELEVVEGMQFDRGYASPYMVTDSDKMEAVLENPYILVTDKKITNIQEILPVLEQVVQQGKPLLLIAEDVEGEALATLVVNKLRGTFNAVAVKAPGFGDRRKAMLEDISILTGAEVITEDLGLDLKSTQINQLGRASKVVVTKENTTIVEGAGDTEQIAARVNQIRAQVEETTSEFDKEKLQERLAKLAGGVAVIKVGAATETELKERKLRIEDALNSTRAAVEEGIVSGGGTALVNVYNKVAALEAEGDELTGINIVLRALEEPIRQIAHNAGLEGSVIVERLKNEEIGVGYNAATGEWVNMIDKGIVDPTKVTRSALQNAASVAAMFLTTEAVVADKPEENKGGAGMPDMGGMGGMGGMM

SEQ ID NO: 7954 - protein, 207 aa, Bridelia retusa
PSRFLFMKNKVRMICDCLAPPVKVIQDKRLAQPLSLCGSTLRSPHGCHSQYMTNMGTIASLVMSVTINEDDDEMDSDQERGIKLWGLVVCHHTSPRFVPFPLRYACEFLIQVFGVQVSKEVQLAAQAREKHILQTQTVLCDMLLRDAPVAIITKSPNVMDLVKCDGAALYYRKKFWLLGVTPTEAQIKDIADWLLEYHGESTGLKVH

SEQ ID NO: 7955 - protein, 171 aa, Glycine max
  misc_feature (149)..(149): Xaa can be any naturally occurring amino acid
  misc_feature (157)..(157): Xaa can be any naturally occurring amino acid
  misc_feature (162)..(162): Xaa can be any naturally occurring amino acid
LEKRNQNLTYILNTHHHYDHTGGNLELKAKYGAKVIGSEKDKDRIPGIDITLSEGDTWMFAGHQVLVMETPGHTSGHVSFYFPGSGAIFTGDTLFSLSCGKLFEGTPEQMHSSLQKIVALPDVTKVYCGHEYTLSNSRFALSIEPGNEXLQEYAASXADLRXKNTPTVPTT

SEQ ID NO: 7956 - protein, 240 aa, Medicago truncatula
MGRGRVQLKRIENKINRQVTFSKRRAGLLKKAHEISVLCDAEVALIVFSHKGKLFEYATDSCMEKILERYERYSYAERQLVANDSESQGNWTIEYTRLKAKIDLLQRNYRHYMGEDLGSMSLKELQSLEQQLDTALKLIATRRNQVMYESISELQKKEKVIQEQNNMLAKKIKEKEKIAAQQQAQWEHPNHHGVNPNYLLQQQLPTLNMGGNYREEAPEMGRNELDLTLEPLYTCHLGCF

SEQ ID NO: 7957 - protein, 224 aa, Cleistanthus perrieri
DIPQASRFLFMKNKIRMICDCLAPPVKVIQDKSLAQPLSLCGSTLRSPHGCHSQYMANMGSIASLVMSVTINEDDDEMDSDQERGIKLWGLVVCHHTSPRFVPFPLRYACEFLIQVFGVQVSKEVKLAAETREKHILQTQTVLCDMLLRDAPVAIITRSPNVMDLVKCDGAALYYRKKFWLLGVTPTEAQIKDIADWLLEYHGESTGLSTDSLLEAGYPGATVL

SEQ ID NO: 7958 - protein, 224 aa, Cleistanthus oblongifolius
DIPQASRFLFMKNKVRMICDCLAPPVKVIQDERLAEPLSLCGSTLRSPYGCHSQYMENMGVIASLVMSVTINENDDEMDSDQERGIKLWGLVVCHHTSPRFVPFPLRYACEFLIQVFGVQVSKEVQLAAQAREKHILQTQTVLCDMLLRDAPVAIITRSPSVMDLVKCDGAALYYRKKFWLLGVTPTEAQIKDIADWLLEYHGESTGLSTDSLMEAGYPGAAVL

SEQ ID NO: 7959 - protein, 204 aa, Drypetes madagascariensis
ADIPQASRFLFKQNRIRMICDCNADPVRLIQSEEIKQPLLLVNSTLRSPHGCHTQYMTNMGSIASLVMAVVINGNNSSKLWGLVVCHHTSPRYVPFPLRYACEFLMQAFGLQLYMELQLAEQLVEKKILRTQTLLCDMLLRDAPFSIVTQSPSIMDLVKCDGAALYYGGKCWLLGVTPTETQVKNIAEWLLTSHGHSTGLSTDS

SEQ ID NO: 7960 - protein, 165 aa, Solanum tuberosum
MAEPASPGGGGGSHESGGDPSPQSNLREQDRYLPIANIGRIMKKALPANGKIAKDSKDTVQECVSEFISFITSEASDKCQKEKRKTINGDDLLSALATLGFEDYIEPLKVYLTRYREMEGDAKGSARVGDASVRKDVVGSQLGSNTQFMYEGSFAQGLDYGNSQL

SEQ ID NO: 7961 - protein, 468 aa, Streptococcus pyogenes SSI-1
MTKTLPKDFIFGGATAAYQAEGATHTDGKGPVAWDKYLEDNYWYTAEPASDFYNRYPVDLKLSEEFGVNGIRISIAWSRIFPTGKGEVNPKGVEYYHNLFAECHKRHVEPFVTLHHFDTPEALHSDGDFLNRENIEHFVNYAEFCFKEFSEVNYWTTFNEIGPIGDGQYLVGKFPPGIQYDLAKVFQSHHNMMVSHARAVKLFKDSGYSGEIGVVHALPTKYPFDANNPDDVRAAELEDIIHNKFILDATYLGKYSDKTMEGVNHILEVNGGELDLREEDFAALDAAKDLNDFLGINYYMSDWMQAFDGETEIIHNGKGEKGSSKYQIKGVGRRKAPVDVPKTDWDWIIFPQGLYDQIMRVKADYPNYKKIYITENGLGYKDEFVDNTVYDDGRIDYVKKHLEVISDAISDGVNVKGYFMWSLMDVFSWSNGYEKRYGLFYVDFETQERYPKKSAYWYKKVAETQVIE

SEQ ID NO: 7962 - protein, 487 aa, Brevibacterium linens
MSTSGEDLTLVWFRDDLRVADHEALTAARADGRVIAVWIRETRDEEGLGPRPLGGACRWWAHESLTVLHEELSDLGIPLLFAAGRAEKIIVQLASSLGVTAVRWTRRYASASRALDGQIKTVLNDQGFTVHSHTGALLVEPWTAAPQSSDHYKVFTPFWKAVAGRDVGDVLPKPQAQSPLSQTLLSRAHECPAVMELDGLGLLDGTETGAGEAAAASGPRWWQDTIAGHWSPGLRAAEDQLDDLSAIIDGYTTSKDVPSDAASTSRLSPRLRHGELSPRQLLQAARTTSSLTQDDRAAWIRQLYWREFSWHLTYHYPHIDSAPIRPEFHNFPYEDDDDALTHWRAGTTGYPLIDAGMAQLWQTGWMHNRVRMVTASFLTKNLLQHWWFGEQWFWDTLVDADEANNPVSWQWVAGSGADAAPYFRVFNPERQRERFDPDDAYIEDWLPYTPATAPPPLVDLRQSRQAALSAYDHMKNRSTTRDNPGES

SEQ ID NO: 7963 - protein, 741 aa, Pyrus communis
MEACNCIEPQWPADELLMKYQYISDFFIALAYFSIPLELIYFVKKSAVFPYRWVLVQFGAFIVLCGATHLINLWTFNMHSRTVAIVMTTAKVLTAVVSCATALMLVHIIPDLLSVKTRELFLKNKAAELDREMGLIRTQEETGRHVRMLTHEIRSTLDRHTILKTTLVELGRTLALEECALWMPTRTGLELQLSYTLHQQNPVGYTVPIHLPVVNQVFSSNCAVKISPNSPVARLRQLAGRHIPGEVVAVRVPLLHLSNFQINDWPELSTKRYALMVLMLPSDSARQWHVHELELVEVVADQVAVALSHAAILEESMRARDLLMEQNIALDLASREAETAIRARNDFLAVMNHEMRTPMHAIIALSSLLQETDLTPEQRLMVETILKSSNLLATLINDVLDLSRLEDGSLQLDIATFNLHSIFREVHNMIKPVASIKRLSVALNIAADLPVYAIGDEKRLMQIILNVVGNAVKFSKEGSISITAYVAKSESLRDFRAPDFFPVQSDNHFYLRVQVKDSGSGINPQDIPNLFTKFTQTQTLASQNSGGSGLGLAICKRFVNLMEGHIWIESEGLGKGCTATFIVKLGFPERSNESKQPFAPKLQANHVQTNFPGLKVLVMDDNGVSRSVTKGLLVHLGCDVTTVSSIDEFLHVISQEHKVVFMDVCMPGIDGYELAVRIHERFTKRHERPVLVALTGSIDKMTKENCMRVGMDGVILKPVSVDKMRSVLSELLEHRVLFEAM

SEQ ID NO: 7964 - protein, 541 aa, Thermobifida fusca YX
MAAKLIAFDEEARRGLERGMNQLADAVKVTLGPKGRNVVLEKKWGAPTITNDGVSIAKEIELEDPYEKIGAELVKEVAKKTDDVAGDGTTTATVLAQALVREGLRNVAAGANPIGLKRGIDAAVARISEELANLSKEVETKEQIASTASISAGDPQIGEYIAEAMDKVGKEGVITVEEGQTFGLELELAEGMRFDKGYISPYFATDLERMETVLEDPYILIANQKISNNNEFLPVIEKVLQAGRPLVVIAEDVEGTALQTLVVNKIRGTFKSVAIKAPGFGDRRKAMLQDIAILTGGQVITEEVGLKLENTELDMLGRARKVVVTKDETTIVDGAGDASAIAGRVNEIRAEIERTDSDYDREKLQERLARLAGGVAVIKAGAATEVELKERKHRIEDAVRNAKAAVEEGILPGGGVALLQASIAAFEKLELEGDEAIGASIVRRAVEEPLKQIAINAGYEGGVVVEKVKSLEPGIGLNAATGEYTDLFKDGVIDPTKVTRSALQNAASIAGLFLTTEAVIAEKPEKPAANNAGGDMGGMDF

SEQ ID NO: 7965 - protein, 344 aa, Schizosaccharomyces pombe
DLDEIDTDIVTLSSFILQEQRRYNQKHKNEEGKPCIIQEASGELSLLLNSLQFSFKFIANTIRKAELVNLIGLSGIVNSTGDEQKKLDKICNDIFITAMKSNGCCKLIVSEEEEDLIVVDSNGSYAVTCDPIDGSSNIDAGVSVGTIFGIYKLRPGSQGDISDVLRPGKEMVAAGYTMYGASAHLLLTTGHRVNGFTLDTDIGEFILTHRNMKMPLQHSIYSINEGYTAFWDEKIARFIAHLKESTPDKKPYSARYIGSMVADMHRTILYGGLFAYPCSKGNNGKLRLLYECFPMAFLVEQAGGIAVNDKGDRILDLVPKTLHGKSSIWLGSKHEVEEYINFIK

SEQ ID NO: 7966 - protein, 246 aa, Prochlorococcus marinus str. MIT 9312
MEFNKAQNIIGLRVLNDNVIWLWEKDKSVVVIDPAIHEPVIRYIDENNLYIKAILQTHHHSDHIGGTKYLIERWPNVQVIASSKDKKRIPFQNISVEDGETLNILGEEIKIIEVLGHTNSHIAFFVNGESPVLFIGDTLFSGGCGRIFEGTYQQMYSSLERIKSLPKNTLIYCAHEYTKANLLWALNLKPKDQDIKNKLLQVEKKLSINELTIPFLLDEEMKINLFLRAKNLKEFTFLRENKDLWV

SEQ ID NO: 7967 - protein, 486 aa, Solanum tuberosum
MGLVSENYNKKLLSKIATNDGHGENSAYFDGWKAYENDPFHPTQNPHGVIQMGLAENQLCFDLIQEWIVNNPKASICTYEGVQDFQDIAIFQDYHGLPEFRKAVARFMEKVRGDRVTFDPERIVMSGGATGAHESLAFCLADPGDAFLVPTPYYPGFDRDLRWRTGVQLFPVVCESSNNFKVTKEALEEAYKKAQESNIKVKGLLINNPSNPLGTILDKETLKDILRFINDKNIHLVCDEIYAATAFSQPSFISISEVMSEVVGCNDDLVHIVYSLSKDLGFPGFRVGIIYSYNDVVVNIARKMSSFGLVSTQTQRLIASMLSDTIFVENFIAKSAMKLSQRHDLFTKGLGQVGITTLKSNAGLFIWMDLRRFLEKSTFDDELKLWHIIINKVKLNVSPGCSFHCSEPGWFRVCFANMDDATMQVALKRIRHFVYLQPSKGVEVATKKQYCRTRSKLEISLSFRRLDDFMNSPHSPMSSPMVQARN

SEQ ID NO: 7968 - protein, 226 aa, Crocus sativus
MGRGKIEIKRIENTTNRQVTFCKRRNGLLKKAYELSVLCDAEVALIVFSTRGRLYEYANNSVKGTIDRYKKACTDTSNSGTVSEANSQYYQQEASKLLQQIAQLQNSNRNLMGESLSTMSPRELRQLEGKLEKGINKIRAKKNELLYAEIEYMQKREMELQNDNMYLRNKISENERAQQHMNMLPSATATEYEAMPPFDSRSFLQANLVDPNHHYSHQQQTALQLG

SEQ ID NO: 7969 - protein, 371 aa, Glycine max
MASPLLTPYKMGKFNLSHRVVLAPLTRQRSYDNVPQPHAILYYSQRTSNGGLLITEATGVSDTAQGYPQTPGIWTKDHVQAWKPIVDAVHAKGGVFFCQIWHVGRVSDSVYQPNGQAPISSTDKPLTPQIRSNGIDQVQFTPPRRLRTDEIPHIVNDFRLAARNAIEAGFDGVEIHGAHGYLLEQFMKDKVNDRTDEYGGSLENRCRFALEVVEAVVNEIGADRVGIRLSPFAEYSESGDSNPKELGLYMMNALNKYGILYCHMVEPRMKTVGEKTECPHSLVPMRKAFNGTFIAAGGYDRQDGINAVAENRADLVAYGRWFLANPDLPKRFALNAPLNKYHRETFYTSDPVLGYTDYPFLDDEESNAVAS

SEQ ID NO: 7970 - protein, 622 aa, Debaryomyces hansenii CBS767
MSEQQGSDNRHHHHHHHHNNHHGDHSGQHDGHNNKVHQPQPIDPKANPANRIGKYQVLKTLGEGSFGKVKLAQHTTTGQKVALKIINRKTLAKSDMQGRVEREISYLRLLRHPHIIKLYDVIKSKDEIIMVIEYAGKELFDYIVQRGKMPEDEARRFFQQIIAAVEYCHRHKIVHRDLKPENLLLDEQLNVKIADFGLSNIMTDGNFLKTSCGSPNYAAPEVISGKLYAGPEVDVWSSGVILYVMLCGRLPFDDEFIPALFKKISNGVYTLPNYLSQGAKDILTRMLVVNPLNRITIHEIIEDEWFKQNIEEYLLPPDLSKTKHKKIEVDEDVITALQSTMGYDRDEIVNVINKCNQHNAPQQQSNEIIDAYLLMRENRTLVKDLKNSKLNNMDTFLSQSPPPSWTNNANNNSNMNINVNHSTKAPGVQQSLTYQTLAAVPDLSTLPNSTIAILPSSLPSIHRAYMMESNMDTQLKIAPVSHKKLKTRWHFGIRSRSYPLDVMGEIYRALKNLGAEWSKPTEEELWTIRVRWKYGPCILPNEKSQEEQQKDIPDMMKMQIQLFQLEPNNYLVDFKFDGWENSSNKDVSIKQDVDEMSSFSAYPFLHLATRLIMELAVNSQTN

SEQ ID NO: 7971 - protein, 228 aa, Crocus sativus
MGRGKIEIKRIENTTNRQVTFCKRRNGLLKKAYELSVLCDAEVALIVFSTRGRLYEYANNSVKGTIDRYKKACTDTSNSGTVSEANSQYYQQEASKLLQQIAQLQNSNRNLMGESLSTMSPRELRQLEGKLEKGINKIRAKKNELLYAEIEYMQKREMELQNDNMYLRNKISENERAQQHMNMLPSATATEYEAMPPFDSRSFLQANLVDPNHHYSHQQQTALQLGFV

SEQ ID NO: 7972 - protein, 547 aa, Nitrosomonas europaea ATCC 19718
MAAKEVRFGDSARQAVISGVNVLADAVKVTLGPKGRNVVLERSYGAPTITKDGVSVAKEIELKDKFENMGAQMVKEVASKTSDTAGDGTTTATVLAQSIVKEGMRYVAAGMNPMDLKRGIEKAVTGAVEELKKLSKPCSTSKEIAQVGSISANSDTEIGRIIAEAMDKVGKEGVITVEDGSGLENELDVVEGMQFDRGYLSPYFVSSADKQIAALESPFVLLHDKKISNIRDLLPVLEQVAKAGKPLLIIAEDVDGEALATLVVNNIRGILKTCAVKAPGFGDRRKAMLEDIAILTGGTVIAEEVGLSLEKTRLEDLGQAKRIEVGKENTTIIDGAGDVKTIEARVAQIRKQIEEASSDYDREKLQERVAKLAGGVALIKVGAATEVEMKEKKARVEDALHATRAAVEEGIVPGGGVALLRTINAVSKIKGDNHDQDSGIKIVLRAMEEPLRQIVTNCGDEASVVVNKVKEGQGTFGYNAATGEYGDLVAMGVLDPTKVTRSALQNAASVAGLILTTDAMVAELPKEDSPGAGAGMGGMGGMGGMDM

SEQ ID NO: 7973 - protein, 700 aa, Oryza sativa (japonica cultivar-group)
MSVSSSSMGGGGGGDAGGRTVVWFRRDLRVEDNPALAAAARAGGEVVPAYVWAPEEDGPYYPGRVSRWWLSQSLKHLDASLRRLGAGKLVTRRSADAVVALLQLVRDTGATRLFFNHLYDPISLVRDHRLKEMMAAEGIIVQSFNADLLYEPWEVVDDEGQSFTMFAPFWNRCLSMPYDPAAPLLPPKRINSGDLSMCPSDDLIFEDDSERGSNALLARAWSPGWQNADKALTAFLNGPLIHYSVNRKKADSASTSLLSPYLHFGELSVRKVFHLVRMKQLVWSNEGNRAAEESCTLFLRSIGLREYSRYLSFNHPCSHEKPLLAHLRFFPWVINECYFKIWRQGRTGYPLVDAGMRELWATGWLHDRIRVVVSSFFVKVLQLPWRWGMKYFWDTLLDADLESDALGWQYISGSLPDGRELDRIDNPQLEGYKFDPHGEYVRRWLPELARLPTEWIHHPWDAPASVLQAAGVELGSNYPLPIVGLDAANARLQEALSEMWQLEAASRAAMDNGMEEGLGDSSEVPPIEFPRELQMEVDREPARVTANVLTTARRREDQMVPTMTSSLNRAETEISADFMNSVDSRAEVPTRVNFEPATEREENFRTTAGNVARTNGIHEHNNFQQPQHRMRNVLAPSVSEASSGWTGREGGVVPVWSPPAASDHSETFASDEADISSRSYLDRHPQSHRLMNWSQLSQSL

SEQ ID NO: 7974 - protein, 142 aa, Triticum aestivum
  misc_feature (94)..(94): Xaa can be any naturally occurring amino acid
  misc_feature (98)..(98): Xaa can be any naturally occurring amino acid
VACFLTRGDLYHRIYSPISFGKKYDPNGDYIRHFIPVLKDMPKEYIYEPWTAPLSVQEKARCIVGKDYPKPVVDHEAASKECRRRMGEAYASNXLGGXPVKGNSSNSSRRKFSDGWARNPCPLIHVKQTVKADPRARTVLRN

SEQ ID NO: 7975 - protein, 470 aa, Escherichia coli
  misc_feature (333)..(334): Xaa can be any naturally occurring amino acid
MKAFPETFLWGGATAANQVEGAWQEDGKGISTSDLQPHGVMGKMEPRILGKENIKDVAIDFYHRYPEDIALFAEMGFTCLRISIAWARIFPQGDEVEPNEAGLAFYDRLFDEMAQAGIKPLVTLSHYEMPYGLVKNYGGWANRAVIDHFEHYARTVFTRYQHKVALWLTFNEINMSLHAPFTGVGLAEESGEAEVYQAIHHQLVASARAVKACHSLLPEAKIGNMLLGGLVYPLTCQPQDMLQAMEENRRWMFFGDVQARGQYPGYMQRFFRDHNITIEMTESDAEDLKHTVDFISFSYYMTGCVSHDESINKNAQGNILNMIPNPHLKSSEXXWQIDPVGLRVLLNTLWDRYQKPLFIVENGLGAKDSVEADGSIQDDYRIAYLNDHLVQVNEAIADGVDIMGYTSWGPIDLVSASHSQMSKRYGFIYVDRDDNGEGSLTRTRKKSFGWYAEVIKTRGLSLKKITIKAP

SEQ ID NO: 7976 - protein, 203 aa, Drypetes madagascariensis
QISPQARFLFKQNRVRMICDCHAIPVRVIQSEELRQPLCLVNSTLRSPHDCHTQYMANMGSIASLAMAVVINGNDSTKLWGLVVCHHTSPRYVPFPLRYACEFLMQAFGLQLYMELQLAAQLVEKNILRTQTLLCDMLLRDAPFGIVTQSPSAMDLVKCDGAALYYGGKCWLLGVTPTESQVKDIAEWLLNDHEDSTGLSTDS

SEQ ID NO: 7977 - protein, 734 aa, Bdellovibrio bacteriovorus HD100
MAFKMNRTLTLLLFSTGVAATLTVFILKFLALKEYRETIALYEKTEALISMIQNVEKSTLDLETGQRGYVLTQNEQFLKPYLDANDAIEKEFELLEKSAPATLKASPEYQSMSALVRQKMEISENVINQVRVGKLSSAIALVKSGQGKGVMDQLREAVNTVITNERARVLALKKESEITAQRNQLWQVLGTAMAFLLIIVAYVMTEFEGRQRRQLEKQLVEARNEALQASHMKSSFLANMSHEIRTPMNGILGMTEVLLDQNPESGIKKKIQIIRESALNLLSLINGILDLSKIESGKLELEESYFEPRKLVQEVINTVEYSAKSKGLDLHASVSEQTPAAFSGDVLRLRQILINLLGNAIKFSSEGTVSLIVNSFRSDQSRTMLQIQVKDQGLGMDEATLKKIFSPFEQADKSTTRKFGGTGLGLSITKQLVELMNGKIEVESKPNEGSIFWVTLPLEAINVMPENQRPRESQSYSSSQAPLKILVAEDNMTNQEVVRVMLNRLGHKFDIVNNGKEALEKTLSGTYDIILMDCHMPVMDGYVAAQKITERFPQWCQGPAVIAVTANAIRGDKEACLAAGMCDYLSKPLTLAELDEKLALWSRHLKYAATQVVDPKAMENLRQISPDMADDLMKQILQAWGKEAPAYVVEMIEAEKRGDLKDLADRAHYLKSSCVNAGLRVMGQLCSDIEKQARAGTKEELRYLLLQLRSEYKMACTHLWRSEMLEVPQQGIST

SEQ ID NO: 7978 - protein, 639 aa, Cryptococcus neoformans var. grubii
MASPATQTANAIAAINNRSNLVIPEIDFTQHQLENGEIVSTTERVIKDVQAPAMYVPTDDQFWSKVDKTKPDIAFLKNHFYREGRLTEEQALYILEKGGELLRSEPNLLEVDAPITVCGDIHGQYYDLMKLFEVGGNPADTRYLFLGDYVDRGYFSIECVLYLWSLKMWYPDTLFLLRGNHECRHLTDYFTFKLECKHKYSETVYNACMESFCNLPLAAVMNKQFLCIHGGLSPELHTLDDLRSINRFREPPTQGLMCDILWADPLEDFGSEKTNENFLHNHVRGCSYFFTYNAACQFLERNNLLSIIRAHEAQDAGYRMYRKTKTTGFPSVMTIFSAPNYLDVYSNKAAVLKYESNVMNIRQFNCTPHPYWLPNFMDVFTWSLPFVGEKITDMLIAILNCCTKEELEEEDEEFPLNAPEPTDAESAAERRQIIKNKILAVGRMSRVFSLLREESERVSELKSISGSNALPAGMLASGAEGIKEAIQGFEDARKSDIENERLPPDIIDPDEDKPASPSASPIMPATPEEIPSEIPYDSPITGTPRTPISSAIASGSPGSPGTPTSPSIGGPPLTAWRPGHGRRTSLGTTKTSPSTRRRSLENTMHLIRDVVGGKDAQGDGQLERLAEVISSPTKGGQGE

SEQ ID NO: 7979 - protein, 473 aa, Salmonella enterica subsp. enterica serovar Typhi Ty2
MPTHLVWFRRDLRLQDNLALAAACRDASARVLALYISTPAQWQAHDMAPRQAAFISAQLNALQTALAEKGIPLLFHEVADFNASIETVKNVCRQHDVSHLFYNYQYEFNERQRDAAVEKTLPSVICEGFDDSVILAPGAVMTGNHEMYKVFTPFKNAWLKRLKEDIPPCVPAPKIRVSGALSIPLTPVSLNYPQQAFDAALFPVEENAVIAQLRHFCSQGADEYASRRDFPAVDGTSRLSASLATGGLSPRQCLHRLLAEQPQALDGGPGSVWLNELIWREFYRHLMTWYPALCKHQPFIRWTKRVAWQENPHYFQAWQKGETGYPIVDAAMRQLNATGWMHNRLRMITASFLVKDLLIDWRLGERYFMSQLIDGDLAANNGGWQWAASTGTDAAPYFRIFNPTTQRERFDRDGEFIRQWLPALRDIPGKAIHEPWRWAEKAGVVLDYPRPIVEHKQARIATLSAYEAARKGA

SEQ ID NO: 7980 - protein, 158 aa, Zea mays
  misc_feature (67)..(67): Xaa can be any naturally occurring amino acid
MADDGGSHEGSGGGGGVREQDRFLPIANISRIMKKAVPANGKIAKDAKETLQECVSEFISFVTSERXKRKTINGDDLLWAMATLGFEEYVEPLKIYLQKYKEMEGDSKLSTKAGEGSVKKDAISPHGGTSSSSNQLVQHGVYNQGMGYMQPQYHNGET

SEQ ID NO: 7981 - protein, 225 aa, Flueggea suffruticosa
DIPQASRFLFMKNKVRMIFDCQAPPVKVVQDKRLAQPLSLCGSTLRSPHGCHAQYMANMGTIASLVMSVTINEDDDDETDIDQQVGRKLWGLLVCHHTSPRFVPFPLRYACEFLMQVFGVQVNREVELAAQTREKHILQIQTVLCDMLLRDAPVAIVIQSPNVMDLVECDGAALYYRKKLWLLGVTPTEAQIKDITEWLMEYHGESTGLSTDSLMEAGYPGAAVL

SEQ ID NO: 7982 - protein, 312 aa, Prochlorococcus marinus str. MIT 9312
MNSVIFQETAKLKKPVPAEKVIELSEKLVEPSRHSKKYPPRLHKTWGTIVFMVAIHILSLIALQPKFWSLPAVTSLLFFYWVTACLGVTLGYHRLLSHRSFIVPRWLERFFATCGAISCQHGPIDWVGLHRHHHSFSDTEVDHHNSKKGFWWSHMGWMFKDVEALKAVPKLSADLIKDPYYRFLNKYFLFLQIPIGLSLFAIGQKLGVGGWALVLWGIPLRLVVVYHITWLVNSATHCWGKAPFESGDSSKNNAWVAALTFGEGWHNNHHAFPNSAKQGLFRGQIDITWEHIKILAKFGLAKKVKLPSRSYY

SEQ ID NO: 7983 - protein, 211 aa, Glochidion eucleoides
  misc_feature (1)..(2): Xaa can be any naturally occurring amino acid
  misc_feature (5)..(5): Xaa can be any naturally occurring amino acid
XXLEXLRSLFMKNKVRMICDCQAPPVKVVQDKQLAQPLSLGGSTMRSPHGCHAQYMANMGTIASLVMSVTINEEDEETVNDQQMGRKLWGLVVCHHTTPRFVPFPLRYACEFLMQVFGVQVNREVELAAQTPEKHILQTQTVLCDMLLRDAPVAIVTQSPNVMDLVKCDGAALYYRKKFWMLGVTPTETQIKDITEWLLENHGESTGLEVK

SEQ ID NO: 7984 - protein, 220 aa, Glochidion puberum
TIRSLFMKNKVRMICDCQAPPVKVVQDKRLAQPLSLGGSTMRSPHGCHAQYMANMGTIASLVMSVTINEEDEETVNDQQMGRKLWGLVVCHHTTPRFVPFPLRYACEFLMQVFGVQVNREVELAAQTTEKHILQTQTVLCDMLLRDAPVAIVTQSPNVMDLVKCDGAALYYRKKFWMLGVTPTETQIKDITEWLLENHGESTGLSTDSLMEAGYPGAAIL

SEQ ID NO: 7985 - protein, 679 aa, Pseudomonas syringae pv. phaseolicola 1448A
MTAAHYPHLLAPLDLGFTTLRNRTLMGSMHTGLEERPGGFERMAAYFAERARGGVGLMVTGGIAPNEEGGVYDGAAKLTNAEEAEQHRIVTRAVHEAGGKICLQILHAGRYAYSRKQVAPSAIQAPINPFTPRELDEEGIEKQIADFVTCSTLARSAGYDGVEIMGSEGYFINQFLAAHTNHRTDRWGGSYENRMRLAVEIVTRVREAVGADFIIIFRLSMLDLVEGGSTWEEIVQLAKAVEQAGATLINTGIGWHEARIPTIATKVPRAAFSKVTAKLRGSVKVPLITTNRINTPEVAERILSEGDADMVSMARPFLADPDFVNKAAAGHAERINICIGCNQACLDHTFGGKLTSCLVNPRACHETELNYLPTRQVKKIAVVGAGPAGLAAATVAAQRGHEVTLFDSASEIGGQFNIAKRVPGKEEFSETLRYFRNKVEETGVQLRLGTRIKAEDLLGAGFDEVILATGIAPRTPAIPGIDNQKVLSYLDVILQRKPVGRSVAVIGAGGIGFDVSEFLVHQGVATSLDREAFWKEWGIDTTLEARGGVAGIKPDVHAPARQVYLLQRKSSKVGDGLGKTTGWIHRTGLKNKQVQMLNSVQYLKIDDAGLHIRIGEDGEEKLLAVDNIVICAGQDPLRELYDDLVSAGQSVHLIGGADVAAELDAKRAIDQGSRLAAAL

SEQ ID NO: 7986 - protein, 206 aa, Gonatogyne brasiliensis
DIPQASRFLFMKNKVRMICDCLAPPVKVIQDKGLAQPLSLSGSTLRSPHGCHAQYMANMGSIASLVMSVTINEDDDEMDSDQERGIKLWGLVVCHHTSPRFVPFPLRYACEFLIQVFGVQVSKEVQLAAQTREKHILQTQTVLCDMLLRDAPVAIITRSPNVMDLVKCDGAALYYRKKFWLLGVTPTEAQIKDIAEWLIEYHGGST

SEQ ID NO: 7987 - protein, 75 aa, Populus tomentosa
MAYQNEPQESSPLRKLGRGKVEIKRIENTTNRQVTFCKRRNGLLKKAYELSVLCDAEVALIVFSSRGRLYEYSNN

SEQ ID NO: 7988 - protein, 756 aa, Geobacter metallireducens GS-15
MTIRMNGPLLLATLLLAAPAFALTMLPPPDMDHTPLHAAAKECDLATARTWAANPAYRDRKDRNDSTPLSLAAENGCLEVVRLLVESGAKVDAKGAFEQTPLLHAAEQGHAKVVAYLLGKGADVNAWTKKGDTPLILAMRGAFFHRGPEGDPRETLEALLKHGAEVNAAGEYGRTALIWAVRHADARLVWPLLRKGADPSAKDKDGDTAITLAQELKLDYLSQLLKDPKRPDLAILGPNTPLSDAVKRGNAADVVAVLDKGADVNGRFGNGSTALMQAASMGRADMVELLLKRGAQIDAKNGTDFTPLMFAASTGHDEVVKTLLAKGADVNASSLGRPALVFAAMNKHLESVRLLLERGADPDIIIGGTPLLTMAIKDGPAEIAGLLIARGAPVNVVDEGGKTPLMHACEKGDMATVKALLARGGDVNILGKDSEGALTIAIAGGHDGIVRLLLERGATVRTDDLQAAIKARNVSLASRLIDKGADVKDALLTALPKADLEMVKLLVKKGADPNARDYYQKTPLILEAGNWSDANPEVVRHLLEHGADINAQDDKGMSALLMAAGQGNAAVAQVLLAKGADITLTNRDGKTAWLLAAERGDRKMLELLEKAGAGRDYAGMSWTGYDAAMKEPFITVVDDRTQWEDLWKRAFDKPAPIVDFDNFAVACVFLGAEAEWLYSIHFDEPSVKDGVMQITYRLFMNRIAMEAERGFGRPSFGGQYRMEVYAKQKGVTMRIVKGKGEGDYEPLPLTPPPWRE

SEQ ID NO: 7989 - protein, 541 aa, Bradyrhizobium japonicum USDA 110
MAHKQVLFHSAAREKILRGASLLADAVRVTLGPKSKSVLIQKGWGAPIVCNDGVTIAKEFDLKDAEENLGAQVLRQLAEKTGDVVGDGTSTSTILAHAILSDGVRNVVAGASAIDLKRGLDRGTQAAIAALRAMATPVKSRAEKVQVATISAHNDASIGELVADAIEKVGGDGVISVEESKTTETLLDVVEGMKFDRGFLSPYFITDADRMESVLQDPYVLLCDHKIGALRDLVPLLEQVAKSGQPLLIIAEDIEGEALATLIVNQLRGVLKACAVKAPGFGDRRKAMLEDIAILTGAQVISEEIGLNLENATLQQLGRAARVVADKENTTLIGSGGDRTRIDARLGQIRVEIEKTTSDYDREKLEERLAKLSGGVAVIRVGAPTEAEMKAKKEALDDAISSTKAAVAEGIVPGGGLALLRAVAAVAKEEAACEGDERTGVQILRRALEAPARQIAENSAADGGVVVARMLEGEGSIGFDASRKVYVDLVAAGIVDPVKVVRTALENAVSVASVLLLTEATMTEIPEPKRERLPEPDLAVQ

SEQ ID NO: 7990 - protein, 1410 aa, Thiomicrospira crunogena XCL-2
MLKHSLSALLLLSALLPFSAQALTLNSSEQQWIKDHPQITLGSDYNWPPYDFKDSAGKHNGISADILDRIRQITGLKIKVRSGVWSTILEQAEQGTLDGLACAVKTPDRAEHLYFTAPYTSMPLGIFMQDKSTSTSIKTMDDLTTQTVTINRDSYMHEWLKQNYPHLKLYLVNSNAEALEAVSFGKANVYIGNMAVATYLIKKNYLTNIQAVAKINHFKTDTAIAIHKDKPILFGIIKKALKEISQKERNTILEKWFIKSKTTYIDLSNQEIAWIKAHPVIKVAGEPDWAPFDFVADNTYQGIANDYLNLIAQKTGLNFHIDIHSWEQNLTLLKKQQVDVLPAAYFSAERTSYAKFTTPYYKPLTYFFVRHDLKASSLNDLENTTIAMPKGYLHIDFLKQRFPNITILETDTLNEAINAVIQNKAQVLYENYAVLSYILSQSGINTIKPLAPAKQANQSLHFMIRDSAPELASIMNKALASITPQERKDIEERWLTIAPNKINITLTPAEQNWLNQHAQVSFTGYPDHLPYEGFKSNANQPIQHQGIVSDFIHSLESHLPLQFIPRAYKSWPDTLKAIHQTPVDIISAEIDTPELLAQYRPIIPYLTTPMVIVMKNQDTFVNTLRQLTTETIALVSNDATSEKLLKQYPNQHFKTWPNAKSVLEAVAFNKADAAILSLAKASYLIKQNHYTSLKIVGKTDVQKQFTLFVNKRYPELFSILQKSMPAITEEHGSGILSQWTKIKFASKFDYALFFQMFSFLLVVIGIIFFWNRRLTKEVKQRLQAEKRLKENETQLQGLIDSIPLMIMVTNHQGKILSANRQTLKNYQLNFQELSELNSTTFYSDPDDRQQILNALQAGEQIHQKIISMKDADGIPRKMMLSVLPIHFNQQPANLSIAIDLTERIQFEKELQQAKEQAESASQTKSQFLANMSHEIRTPMNAIIGFTELLNEQVTEPRLKRYIRTIQAAGKTLLTLINDILDLSKIEAGKMDLDKKAVNPHSLFDEIGQIFMINIQRKGLDFLVDIDKTLPEGLLLDGVRLRQILFNLLGNAVKFTEQGYVKLKVSACDVDEHHSKLDILIQVSDTGIGIPEDQQARIFNAFEQRENQDVQKFGGTGLGLAITQRLVNMMGGDIWVESTPGQGTTFNLLIHHVDISATNQSDQPNSDERPVPQLIEFHPTTILVVDDIDDNRALIKQNFVDTDVTVYEAQNGEEAINCFHSEKGISLILMDLRMPIMNGYQAAEIIKQKSPSTPIVALTASVMTETADAPKRQHFDDYLRKPVFKADLFNILKKYLPHEILTPTPEFSETQEVLSDKAKLNAPQFLEAIQEQLSPTQKTILKTNNIEEIQRFAQTCEALADQYDSKTLKTYATQLLEATESFDIKAMQQLLKYYETLEARLDKLLNDAISP

SEQ ID NO: 7991 - protein, 300 aa, Rubrobacter xylanophilus DSM 9941
MQNFSRLLSPIEVGPAILRNRVLVSAHQPGLAENGVPGDRYIAYQRTLASGGPGLQITGATAVHPTGVYHGAHFLLNFDDRIIPGYQRMADAVHSEGGKILAQLGHAGALAMSSLTERPLWAPSPVAGELVRETPHAMSHEEIAEVVAAFGEAARRVREGGLDGIEITASHGALIAAFLSPYSNQRGDEYGGNLDGRIRFLLEVLDAVSEQAGPDLIVGVRIAGDEGVKGGIDLSQAQEIARRLEATGKVHYISVIAGTNLDRFQRVAHWPATPAPHGLFVHLARGSRKWWRSPCSPLDA

SEQ ID NO: 7992 - protein, 577 aa, Gloeobacter violaceus PCC 7421
MSSVCNGEIMTTTKDPSESKVQPQSEAKADAKTGMIRFQLLAPYNEKAALVGSFSNWEEIPMEKDDKGCFFVEIDLPDGEHQYKFKLVSKSFFCEGETVAIADPYARQVDEKNRENTVIRIKDGKQITDEYVWEHDDVPLSPDDHLIIYELHVSAFGGDTFIDAIQQLDYLVDLGVNCVQLMPVTEYPGEHYWGYNPRHPFAPESSYGKPEDLKAFVDACHERGFRVILDIVLNHSESESPLTRIDFTYWFYAPGTEPDEPGNVWGPKFNLEFYDEHYKRNPAREYLYDLVDYWVREYHIDGYRIDAAAQIKYFDFLGEVARRSKANSGGKPFYLVGEHIPENPAITGADGPMDGAYHETYYWMIDDLMVRNMFDTDQIVDSINPLHHGYPGPSNAVNFYENHDKPRLLQRLRDAGINEEGSFKRLECAAALLMTSVGLPMLYQGQAMGQAYPQDEEVHAVEWTLLDHDRHVALLERYKGLIDLRRETQALWTNEIDFFHIDQEARVIAYVRFNAEGSRVAVVAHLGDGNLGDYQVPCFPEDGHWFEKTRLYEVDVEGGILNVHLSDWDVHVFRNGG

SEQ ID NO: 7993 - protein, 664 aa, Rubrobacter xylanophilus DSM 9941
MAHVNTDARNSLRLLFSPLKIGRREVKNRIVSTAHATGFDNEGILNERHLRYHERKAAGGAGLIMTFGSASVYRESSASYGSVSLWNPENEPFLRDLAERVHAHGALIMSQATHMGRRGDSALSGYPLQAPSAVPEGVHREIPHVLRTEEIPPIVEAFAEAAARLERCGWDGIEITSLGGHLIEQFWSPVINKRTDRYGGDLAGRMRFSVEVIEAVAEAVSDDFIVGFRMTGDPKTDVIGLTPEDMLEIATRLDDLGRIDLFNISGGTGATYEAQAATVPGDTYARGCYCPLARRMKEHLSVPVLAAGRILDPEQAEEAIAAGDCDLVAMTRAIIADPDLPNKARGGESFRIRPCIACNEGCIGRLYSGMPIVCTVNAAIADDSLDDFARSERRRRVVVIGGGAAGMEAARVSAERGHEVILLERAERLGGQVATAVVAPERPHYGRHLKWLERELARLGVDVRLKTEATAEGVLELDPGVVVVAAGSKAVVPPEVAGIDARCATDIDVLDGNIEVEPGARVLVYDREGKFRGGSIANFVAEAGVSRVELATPLFAACGDLDETQQPAMYRRLAKNSVVLSPNQELMGKRNRRLLLRDAWSGRERTVEDVDLVVFVGYQEAESGLFEALRDSAPELELRLVGDAVAPRRLHDAVLEGVRAGNAV

SEQ ID NO: 7994 - protein, 75 aa, Populus tomentosa
MEYQNESLESSPLRKLGRGKVEIKRIENTTNRQVTFCKRRSGLLKKAYELSVLCDAEVALIVFSTRGRLYEYSNN

SEQ ID NO: 7995 - protein, 442 aa, Bradyrhizobium sp. BTAi1
MFCSSCGLHGERTRRSGRVSKVIFSAGVSQIKILLHFQKPSERERMVCLLLEGLVKLLEPVRIGRHLLKNRIVMAPLARARGDERRAPKDIVGTYYSQRATAGLIVTEACHVSPTSATRARATANHDAHQTLAWKQVVDAVHAAGGVIFQQIYHVGRKSLLSGMPNGQVPVAPSAIAAYGGIMKEDGLEEFPVPRALALHEIAPIVEDHRQAVRRAGEAGFDGVEILAGNGFLIDQFLRDSTNKRTDSYGGSKENRARFLFEVVDAAIAELGADRVGVRLSPHFRADHIDDSDPVGTFSYVVSELDRRGIAFIHLLEGTSYDNSGDIPLYQRLVKKPSAGGGGAGPRSGEPFLAPILRPLFRGALILNSGYTRDSAEQAVRSSAADAISFGRLYISNPDLPERFRLNAPLTEPDTATYYTNGPEGYIDYPSLGDRVARVPAA

SEQ ID NO: 7996 - protein, 594 aa, Salmonella enterica subsp. enterica serovar Typhi Ty2
MSSKIFCKSWGAEYIAADVVRFRLWATGQQKVMLRLAGKDQEMQASGDGWFTLDVSGVTPGTEYNFVLSDGMVLPDPASRAQKTDVNGPSYVIDPGSYAWRNTGWKGSRWEQAVVYEMHTGTFTPEGTFHTAIAKLPYLAELGVTVIEVMPVAQFGGERGWGYDGVLLYAPHSAYGTPDDFKAFIDTAHGYGLSVILDIVLNHFGPEGNYLPLLAPAFFHKERMTPWGNGIAYDVDAVRRYIIEAPLYWLTEYHLDGLRFDAIDQIEDSSARHVLVEIAQRIREDITDRPIHLTTEDSRNIISLHPRDQDGNAPLFTAEWNDDFHNAVHVFATGETQAYYNDFADAPEKHLARALAEGFAYQGEISPQTGEPRGVKSTGQPPVAFVDFIQNHDQVGNRAQGDRLITLAGAERTKVLLATLLLSPHIPLLFMGEEYGESRPFLFFTDFHGDLARAVREGRAKEFADHAGENVPDPNAPETFQRSKLNWKQQHSEEGKAWLAFTRELLLLRQKHIVPLLSAARESSGTVLQTAPGFIAVSWRFPGGTLSLALNISATTVLLPDLPGKTLFAWPNESTGSLSQHSLIVRLAQGESAS

SEQ ID NO: 7997 - protein, 317 aa, Triticum aestivum
  misc_feature (257)..(257): Xaa can be any naturally occurring amino acid
  misc_feature (269)..(269): Xaa can be any naturally occurring amino acid
  misc_feature (281)..(281): Xaa can be any naturally occurring amino acid
  misc_feature (283)..(283): Xaa can be any naturally occurring amino acid
  misc_feature (287)..(287): Xaa can be any naturally occurring amino acid
  misc_feature (291)..(291): Xaa can be any naturally occurring amino acid
  misc_feature (297)..(297): Xaa can be any naturally occurring amino acid
  misc_feature (307)..(307): Xaa can be any naturally occurring amino acid
MALSRAQTNSGESLISSTFASRYVRTALPRFRIPEQSIPKDAAYQIINDELMLDGNPRLNLASFVTTWMEPECDKLIQNSVNKNYVDMDEYPVTTEFQNRCVNMIAHLFNAPIGEDETAVGVGTVGSSEAIMLAGLAFKRKWQNKMKAEGKPHDKPNIVTGANVQVCWEKFARYFEVELKEVKLREGYYVMDPAKAVELVDENTICVAAILGSTLNGEFEDVKMLNDLLVAKNAKTGWDTPIHVDAANGGFIAPFIXPELEWDFRLPLXKNIKRQAGQQYXLXYAGXSGWXYWREQXRTCPNKLIFXNKLTSGAEQT

SEQ ID NO: 7998 - protein, 896 aa, Desulfitobacterium hafniense DCB-2
MDSRLHLVDNLPALLWSSDRAGNYDYVNQAWLEFTGLTFVEVRGEGWLSCVHPEDSPGVMNVLEHSRRHKAPFEAEYRLRRYDGEYRHCLSRGQPYDDPKGELAGYTGVIIDITERKAAEIMTRENAEKFREIFNRITDCVFIHEVKDDGQIGKIQEVNDMACELIGLTRAEIIDLSREVIKVKSPLTLANEFTQKLLSKNYLVFEGMLLTHQGKEIPVEVKAHYHVLNGRRMLLSIARDISNQKRIHKILLASHNKYRQLFDNITDAVFVYELQKDGYPGLLIEINEKARRLMGYHEETFMFSAGPCIRPSSPQLTLDDVWQSLERTHSASFEGICTNLEGEDIPVEVNCHTFPLNGSKVMLTLLRDITERKQIEQERKRTEAEFQQAKEKAEAANRAKSEFLANMSHEIRTPINGIIGMIDLTLLTSLEKTQRENLKIAKNCAYSLFKIINDILDFSKIEAGKLTVEEIEFNLKEVIEQIIKTHSPEAERKGLDLAYTLSANLPDYYKGDPERIKQVLNNLLSNALKFTERGEVSLAVKRLQGDEDVSDLKFTVMDTGIGIAEEDQLHLFEEFNQVDGSITRKYGGTGLGLAISRKLVEMMGGRIWVESEKGKGSSFGVVLRLKHGDKDTLRFKSTQNNDQSREGSTARSYRILLAEDHIVNSIVITEMLKIQGHRVDIAMDGEEALALYHQNPYDVILMDIQLPRLDGIEVTKRIRASEGAQSRTPIIALTAYALQGDREGFLQAGMDEYIPKPVMMEELIMVLDRVVTKFASGEGQAQQEEVVITDEGVYLKDISSFPESVNKDLELSEMAYDFKKLRIALNNGDSVALEHIAHRIKERCSVIGAHKLKALAFKIELAARRGNPGEAKDYLHDLDSEYNQLSGGMLNENTRS

SEQ ID NO: 7999 - protein, 922 aa, Pisum sativum
MVYTISGIRFPVLPSLHKSTLRCDRRASSHSFFLKNNSSSFSRTSLYAKFSRDSETKSSTIAESDKVLIPEDQDNSVSLADQLENPDITSEDAQNLEDLTMKDGNKYNIDESTSSYREVGDEKGSVTSSSLVDVNTDTQAKKTSVHSDKKVKVDKPKIIPPPGTGQKIYEIDPLLQAHRQHLDFRYGQYKRIREEIDKYEGGLDAFSRGYEKFGFTRSATGITYREWAPGAKSAALVGDFNNWNPNADVMTKDAFGVWEIFLPNNADGSPPIPHGSRVKIHMDTPSGIKDSIPAWIKFSVQAPGEIPYNGIYYDPPEEEKYVFKHPQPKRPQSIRIYESHIGMSSPEPKINTYANFRDDVLPRIKKLGYNAVQIMAIQEHSYYASFGYHVTNFFAPSSRFGTPEDLKSLIDRAHELGLLVLMDIVHSHSSNNTLDGLNMFDGTDGHYFHPGSRGYHWMWDSRLFNYGSWEVLRYLLSNARWWLDEYKFDGFRFDGVTSMMYTHHGLQVSFTGNYSEYFGLATDVEAVVYMMLVNDLIHGLFPEAVSIGEDVSGMPTFCLPTQDGGIGFNYRLHMAVADKWIELLKKQDEDWRMGDIVHTLTNRRWLEKCVVYAESHDQALVGDKTLAFWLMDKDMYDFMALDRPSTPLIDRGIALHKMIRLITMGLGGEGYLNFMGNEFGHPEWIDFPRGEQHLPNGKIVPGNNNSYDKCRRRFDLGDADYLRYHGMQEFDRAMQHLEERYGFMTSEHQYISRKNEGDRVIIFERDNLVFVFNFHWTNSYSDYKVGCLKPGKYKIVLDSDDTLFGGFNRLNHTAEYFTSEGWYDDRPRSFLVYAPSRTAVVYALADGVESEPIELSDGVESEPIELSVGVESEPIELSVEEAESEPIERSVEEVESETTQQSVEVESETTQQSVEVESETTQ

SEQ ID NO: 8000 - protein, 826 aa, Pisum sativum
ATTTTTTHNSKNKQYLAKQKPVELTLGYQNPNGCKVCSFGSKGSIYQKVSSGFKGVSVMTDDKSTMPSVEEDFENIGILNVDSSLEPFKDHFKYRLKRYLHQKKLIEEYEGGLQEFAKGYLKFGFNREEDGISYREWAPAAQEAQIIGDFNGWNGSNLHMEKDQFGVWSIQIPDADGNPAIPHNSRVKFRFKHSDGVWVDRIPAWIKYATVDPTRFAAPYDGVYWDPPLSERYQFKHPRPPKPKAPRIYEAHVGMSSSEPRINSYREFADDVLPRIRENNYNTVQLMAVMEHSYYASFWYHVTKPFFAVSSRSGSPEDLKYLIDKAHSLGLNVLMDVIHSHASNNVTDGLNGFDVGQSSQQSYFHAGDRGYHKLWDSRLFNYANWKSSFLLSNLRWWLEEYKFDGFRFDGVTSMLYHHHGINMAFTGDYNEYFSEETDVDAVVYLMLANSLVHDILPDATDIAEDVSGMPGLGRPVSEVGIGFDYRLAMAIPDKWIDYLKNKKDSEWSMKEISLNLTNRRYTEKCVSYAESHDQSIVGDKTIAFLLMDEEMYSSMSCLTMLSPTIERGISLHKMIHFITLALGGEGYLNFMGNEFGHPEWIDFPREGNGWSYEKCRLTQWNLVDTNHLRYKFMNAFDRAMNLLDDKFSILASTKQIVSSTNNEDKVIVFERGDLVFVFNFHPENTYEGYKVGCDLPGKYRVALDSDATEFGGHGRVGHDADQFTSPEGIPGIPETNFNNRPNSFKVLSPPHTCVVYYRVDERQEESNNPNLGSVEETFAAADTDVARIPDVSMESEDSNLDRIEDNSEDAVDAGILKVEREVVGDN

SEQ ID NO: 8001 - protein, 223 aa, Heywoodia lucens
DIPQASRFLFMKNKVRMICDCLAPPVKVIQDKKLAQPLSLCESTLRSPHGCHAQYMENMGSIASLVMSVTINEDDDEMDNDQQRGRNLWGLVVCHHTSSRFVPFPLRYACEFLIQVLGVQVNKEVELAAQMREKHILQTQTVLCDMLLRDAPWAIITQSPNVMDLVKCDGAALYYRKKFWLLGVTPTEAQIRDIADWLLEYHGGSTGLSTDSLMEAGYPDAAV

SEQ ID NO: 8002 - protein, 145 aa, Methanothermobacter thermautotrophicus str. Delta H
MFEKRRLMAEKMMEDMIKNMREMQKEFEKKIAEYAENIPEKLSMDVMETDDAIIIKTDLPGVKKEDINIELTENTISISAVFEEEVEIKEADFIKKERKYGEAKREMRLPEKIRVEDASAKFENGVLTVELPKVEVKKKQTLKVE

SEQ ID NO: 8003 - protein, 209 aa, Keayodendron bridelioides
  misc_feature (1)..(1): Xaa can be any naturally occurring amino acid
XTSSSRFLFMKNKVRMICDCLAPPVKVIQDKRLAEPLSLCGSTLRSPHGCHAQYMANMGSVASLVMSVTINEDDDEMDSDQARGIKLWGLVVCHHTSPRFVPFPLRYACEFLMQVFGVQVSKEVQLAAQAREKHILQTQTVLCDMLLRDAPVAIITRSPNVMDLVKCDGAALYYRKKFWLLGVTPTEAQIKDMAEWLLEYHGGSTGLKV

SEQ ID NO: 8004 - protein, 395 aa, Legionella pneumophila str. Lens
MIFGILNLTFWGYVLATFVLTQITIASVTLYLHRYQTHRALTMHPIVSHFFRFWIWLTTGMVTRVWVAIHRKHHAMTDVEGDPHSPQIFSLKKVFWQVPELYREAAKDKDMIEKYSHGTPNDWIERNLYSRYSSKGILLMFLIDLLLFGFPGITIWAIQMIWIPLSAGVVNGVGHYWGYRNFECFDRSTNVFPLGFLIGGEELHNNHHTYASSAKFSVKWWEFDLGWFYIRCLSFLRLAKVKKLPPKLIRDNSKQYVDLNTIKAITSNRFQVMSDYYKRVTIPILKNEKQNYNYIKNKKEWYLFKGAKRLLRQETKKANYHLLALLNRFEQLQLVYNYRQSLQQIWLKKVSSQNELIESLNQWCKKAEESGLDVLRQFSLRIKSYVLIGTDSSSV

SEQ ID NO: 8005 - protein, 225 aa, Lachnostylis bilocularis
  misc_feature (3)..(3): Xaa can be any naturally occurring amino acid
LIXPQASRFLFMKNKVRMICDCLAPPVKVIQDKRLSQQLSLGGSTLRSPHGCHAQYMANMGSIASLVMSVTINEDDDEMDSDRERGIRLWGLVVCHHTSPRFVPYPLRYACEFLIQVFGVQVSKEVQLAAQMREKHILQTQTVLCDMLLRDAPVAIITQSPNVMDLVKCDGAALYYRKKFWLLGVTPTEAQIKDIAEWLLEYHGGSTGLSTDSLMEAGYPGAAVL

SEQ ID NO: 8006 - protein, 203 aa, Leptopus cordifolius
LRFLFLRNKVRMICDCLAPAVEVIQDKRLGQPLSLCGSILRSPHGCHAQYMENMGSIASLVMSVTINEDEDEIDNDQQSGRKLWGLVVCHHTSPRFVPFPLRYACEFLIQVFGVQVNKEVELAAQMKEKHILKIQTVLCDMLLRDAPVGIITQSPNVMDLVKCDGAALYYRKKIWLIGVTPTKAQIRDIADWLLEYHGGSTGL

SEQ ID NO: 8007 - protein, 85 aa, Oryza sativa
  misc_feature (66)..(66): Xaa can be any naturally occurring amino acid
HSNPVGNENYLHLYELGRLVVTEHNKKGNSLLEFEKLVSLKQQVVSCTFFYFTIYVNEGDAKKLYXLRFWEKPLMDFKCLQEFKP

SEQ ID NO: 8008 - protein, 75 aa, Populus tomentosa
MAYQNEPLESSPLRKLGRGKVEIKRIENTTNRQVTFCKRRNGLLKKAYELSVLCDAEVALIVFSSRGRLYEYSND

SEQ ID NO: 8009 - protein, 227 aa, Triticum aestivum
MDHAAEAQRTDLMTIDCGVSIGTIFGIYMIKDKDNATLEDVLQPGTDMIAAGYCMYGSSCTLVLSTGNGVNGFTLDPSLGEFILTHPNIKIPNKGKIYSVNEGNARNWDAPTAKYVERCKFPQDGSSPKSLRYIGSMVADVHRTLLYGGIFLYPADKKSPNGKLRVLYEVFPMSFLMEQAGGQSFTGKQRALEIVPAEIHQRSPIFLGSYDDVEEIKSLYASESSTA

SEQ ID NO: 8010 - protein, 263 aa, Brassica napus
NNSPLFNSFHHKKKASLNCPSCFLPERSSVSNILMALEAISSPRLASPVPPLFEDSSRFHGVEHWTKGKRSKRSRSDFPHKNLTEEEYLANCPGRPTRPGDRSNRNPLPPPPVTVAEKSSTYTCSVCDKSFSSYQALGGHKASHRKNLSQTLSGGGDDQSTSTTSAVTTGSGKSHVCSICHKSFPSGQALGGHKRCHYEGNNNSSSSVANSEGAGSTSHVSSGHRGFDLNIPPVPEFSLVNGDDEVMSPMPAKKPRFDFSEKA

SEQ ID NO: 8011 - protein, 411 aa, Arabidopsis thaliana
MSLTLEFLLLLIVLFLSHHAHSGSIVKFLPGFEGPLSFELETGYIGIGEEEEVQLFYYFIKSEKNPEEDPLLLWLSGGPGCSSLTGLLFENGPVALKFEVYNGSVPSLVSTAYSWTKMANIIFLDQPVGAGFSYSRTPLVDKTSDTGEVKRIYEFLQKWLSKHQQFFSNPFYVGGDSYSGMIVPPLVQEIAKGNYQINLQGYILGNPITDTESEQNYQIPYAHGMALISDELYKSMERICKGNYVNVDSLNTKCYKLIKDYQKCLHKLNKYHILLPDCDITSPDCFLYRYTLMTFWANNKSVREALQVNKGSIGEWVQCNYKNISYNYDIKSSVAYHMKNSIDGYRSLIYNGDHDMMVPFLATQAWIRSLNYSITDDWRPWMINDQIAGYTRSYSNKMTFATIKASLLVST

SEQ ID NO: 8012 - protein, 201 aa, Glycine max
MTSTSSSAPHYSSLPSPSSSNSTASYFVTRPATTTRSSFATRRPWEEVFALFSFTRPYSIGEATMRVRRNLDHFRVNYFMMVLFVLFLSLLWHPVSIIVYLVALVAWFFLYFFRDEPVVVFGNVVDDRVVAAVLAAATVLGLVLSGVWVNVVGSGIVGVGVVVLHAAFRSTEDLYVDEHDGGLLSFVGGTPTKRTGGYTLI

SEQ ID NO: 8013 - protein, 682 aa, Desulfitobacterium hafniense DCB-2
MSNQDPLFSPIRIGKMELKNRIVLPAMHLNYCPDGEVTERLIEFYRVRARGGVGLVIVGGCGIDRVGNTLGMIQLDEDRYIPGLQKLVEAVHQEGAKVMTQLYQAGNYASSLLTGNQPVAPSPLPSKLTKEIPHELTVEEIKELVQTFAQAAVRTQKAGFDGVEILAGTGYLISEFLSPATNKRTDEYGGDLPNRMRFALEIMAAIRQGVGPDFPVVVRIAGHDFIPGGHTNKEARTFAKALAAAGVDAINVTGGWHETLVPQITMNVPPAAFRYLVRGIKQAVDLPVFASNRITTPELARDILTSGDADLVGFARPILADPNLPLKAQGLDPSPLRPCVACNQGCLDHVFRGIPVACLVNAEAGREAELKVRGVSSSSRKVLVVGAGPAGLEFARAASSQGHNITVWEKSGLLGGQLNLAAAPPDRQDFHRFTEYLARACKAQGVRIYTNQEADVENILAGIAEEGFTDIILATGALPMAPPFPVEEGVEIAQAWDVLAGKETGEHVVIVGGGSVGVETALYLAGQGTLDAEILRFLIVNQAESTETLARLLFQGRKRVTLVEMTKGVGRDLGSSTRWAMLADLQRHQVKVLTNTMVKAVRADGVWVEGPEGESLIPGDTVVAAVGSVANQELLKALQDKLPAHVTLQQIGDATKPAKVLDAVHAGYKAALSLGQTGYAQE

SEQ ID NO: 8014 - protein, 754 aa, Prochlorococcus marinus str. MIT 9312
MIETIQADWIQSEAINLENCCNDNPLKILGPHFYEEQWVIRVWMPEADEVKINFKNNTYKAESINHKWLFEAILPENPESNYEINISRGGITHTQHDPWSYIEEWMGEVDRHLFAEGNHHHIWEKMGAHLIEEKNQKGVMFCIWAPNAKSISIIGDINSWDGRHHPMQKRLGGIWELFMPTMEEGDTYKYEIRTQQGHIYEKADPYGFLHEIRPQNGSIVSKLKNFNWNDNAWITNRDSSSQINKPISVYEMHLGSWLHESTDNKYIEDNGNPRNPVPAADLKPGTRLLTYPELTEKLIPYVKDRGFTHIELMPISEHPFDGSWGYQVTGWYAPTSRFGTPNEFREFVNKCHEEGIGVILDWVPGHFPKDKHGLAFFDGCHLYEHGDSRIGEHKEWGTLIFNYSRNEVRNFLVANLVYWFEEFHIDGIRVDAVASMLYRDYLRPDGEWIPNENGGNENIEAVKFLQQANHVLFQHFPGALSIAEESTTWPMVTKPTDMGGLGFNLKWNMGWMHDMLDYFEIDPWFRQFHQNSVTFSITYNYTENFMLALSHDEVVHGKSHLLHKMPGDDWKKYANTRALLTYMWTHPGKKTIFMGMEFGQRQEWNVWDDLQWDLLEFEPHKGIRNLVDDLNALYKNEPALWKNDFDPYGFQWIDCNDKSNSVISFMRRENDTNEWLVIVANFTPNTHDSYKVGVPVEGFYKEIFNSDGSRYGGSNKGNMGGKEAINYNIHDYQNALELALPPLSVSIFKHQSKK

SEQ ID NO: 8015 - protein, 376 aa, Catharanthus roseus
MALLDQASNLSPMPFDFTRKRKSRRRDGTKNVAETLAKWKEYNEKLDALDGGKPARKVPAKGSKKGCMKGKGGPENSHCKYRGVRQRTWGKWVAEIREPNRGSRLWLGTFRNAIEAALAYDEAARAMYGPCARLNLPNYRASEESSSLPTTSGSDTTTASGISEVSVYEDKKFTPVVSGLKQDDKGESLESADSKPQLLVDAGTPMSAVKEEPKEYQVMDSQSEGQFGDEEPPSKLVCKEVDFGQDQAVVPAVKNAEEMGGEMGGDILKGCSLSEMFDVDELLSVLDSTPLHASDFQHGMGNGNVKAEAAYNYAPSWDSAFQLQNQDPKLGSQQHMAQTPPEINSGLDFLQPGRQEDSYFTLGDLDFLDLGAELGL

SEQ ID NO: 8016 - protein, 467 aa, Psychrobacter arcticus 273-4
MIAKKALGLPLKGLRFAIKSGDTLIKTASTQVTRFKTRFDENKAKNSLDEMPVAKRNYASVSEQTELSTNADSIDMREFEFTKAPINWIPATILVATPIAAAIITPWYLFTHQVSAPVWGVFGAFMVWTGISITAGYHRLLSHRAYKAHPIVKNFLLLGSTFAVQGSAFDWVSGHRTHHRHVDDRLEDPYSAKRGFFFSHMGWMLRNYPSGKFDYKNIPDLTKDRTLQIQHKYYGLWVAALNVGAVAAIGWLLGDVWGTLVIVGLLRLVLTHHFTFFINSLCHMFGSRPYTDTNTARDNFFLAIFTWGEGYHNYHHFFQYDYRNGVKWWQYDPTKWLIAGLSKLGLTSELRTVDDTTIKHAEVQMQFKAAQQQIDTATSSGIDIPHAMKSFQDRIKFEYDAFTQTVEEWQALKAKTIELKKTEFADRLHEVEDELKNDYAKIEEKILAHNSNLKTAFRSIDKSAKAA

SEQ ID NO: 8017 - protein, 191 aa, Xylella fastidiosa Ann-1
MASPCLSVALKALCFRGASTHLSINRVRRLSMNVVRYTPWPGQAVLQNEIKQVFDRFFEHNGDTDESAVVTAQWVPRVDIKEEPNQFVLYADLPGIDPADIEVQMDKGILSIKGERKTESSSQTEHFSRIERRYGSFHRRFALPDSADADGITASGSHGVLRILIPKQAATTPRRIQVGNAVSSDVALQSM

SEQ ID NO: 8018 - protein, 547 aa, Brassica napus
MKFRGLDLIVFLLAVVSCKANKEITCEENEPFTCNNTDRLNSKGFPKDFIFGVSSAAYQIEGGRGRGLNIWDGFTHRFPEKGGSDLGNGDTTCESYTMWQKDIDIMDEMNATGYRFSFAWSRIIPKGKVSRGVNKGGLEYYHRLIDGLIAKNITPFVTLYHWDLPQTLQDEYEGFLNRQVIEDFRDLADLCFKEFGGKVKNWLTINQLYSVPTRGYSTGADAPVRCSPKVDARCYGGNSSTEPYIVAHNQLLAHTAVVNLYRTKYRFQRGRIGPVMITRWFLPFDETNKASIDAAERMKEFFLGWYMEPLTRGRYPDIMRRMVGNRLPNFTEAEARLVAGSYDFLGLNYYATQFVQPTPNPLPVTSERYTAMMDPGTRLTFVNSRGEKTGPLFEELKGGNSYYYPPGIYYVMDYFTTKYRNPLIYITESGFSTSGDQTRQEAVADSKRIDYLCSHLCFLRKVIMEKRVNIKGYFAWALGDNYEFGKGFTVRFGLSYVNWTDVSDRNLKDSGKWYQRFINVTTKITAHQDFLRSGLSFEDKMKTLTDA

SEQ ID NO: 8019 - protein, 223 aa, Leptopus colchicus
LYLKSRFLFMKNKVRMICDCLAPAVEVIQDKRLGQPLSLCGSTLRSPHGCHAQYMENMGSIASLVMSVTINEDEDEIDNDQQSGRKLWGLVVCHHTSPRFVPFPLRYACEFLIQVFGVQVNKEVELAAQMKEKHILNIQTVLCDMLLRDAPVGIITQSPNVMDLVKCDGAALYYRKKIWLIGVTPTKAQIRDIADWLLEYHGGSTGLSTDSLMEAGYPDAAVL

SEQ ID NO: 8020 - protein, 193 aa, Meineckia phyllanthoides
FMKNKVRMICDCLAPPVQVIQDKKLAQPLSLSGSTLRSAHGCHSQYMANMGSIASLVMSVMINEDDDELDNDQRRGKRLWGLVVCHHTSPRFVSFPLRYACEFLIQVFGVQVSKEVELSAQTREKHILQTKTVLCDMLLRDAPVGIITQSPNVMDLVRCEGAALYYRKKFWLIGVTPTEAQIRDIADWLLEYH

SEQ ID NO: 8021 - protein, 549 aa, Anaplasma marginale
MANVVVTGEALDKSIREVVRILEDAVGCTAGPKGLTVAISKPYGSPEITKDGYKVMKSIKPEEPLAVAIANIITQSASQCNDKVGDGTTTCSILTAKVIEEVSRAKAAGADTISIKNGILKAKEAVLTALLSMKREVASEDEIAQVATISANGDKNIGGKIAQCVREVGKDGVITVEESKGFKDLEVERTDGMQFDRGYLSPYFVTNAEKMLVEFENPYIFLTEKKINLVQSILPVLENVARSGRPLLIIAEDVEGEALSTLVLNKLRGGLQVAAVKAPGFGDRRKDMLGDIAVIAGAKYVVNDELTVKVEDITLDDLGTAKTVRITKDTTTIIGSVDSNADSITSRISQIKSQIEVSSSDYDKEKLKERLAKLSGGVAVLKVGGSSEVEVKERKDRVEDALHATRAAVEEGVVPGGGAALLYTLASLDGIKGKNDDEQLGINIIKRAVCAPIKRIIKNSGSEEAPCVIQHLMKQNDKELIFNVDTMNYANAFASGVMGPLKVVRIAFDLAVSLAAVFMTLNAVVVDVPSKEDTAGGGAAGGMGGMGGF

SEQ ID NO: 8022 - protein, 324 aa, Candida parapsilosis
MSTATASPAVKLNSGYEIPLVGFGCWKLTNDVASDQIYRAIKSGYRLFDGAEDYANEQEVGEGIKRAIKEGIVKREELFITSKLWNSFHDKKNVEVALMKTLSDLNLDYVDLFYIHFPIAQKPVPIEKKYPPGFYCGDGDKWSIEEVPLLDTWRALEKLVDQGLAKSIGISNFSAQLIYDLIRGCTIKPVALQIEHHPYLTQPKLVEYVQLHDIQITGYSSFGPQSFLEMDLKRALDTPVLLEEPTVKSIADKHGKSPAQVLLRYQTQRGIAVIPRSNSPDRMAQNLSVIDFELTQDDLQAIAELDCNLRFNEPWDFSNIPVFV

SEQ ID NO: 8023 - protein, 149 aa, Cocos nucifera
RTLRELKLLRHMDHENVVAIRDIIPPPVREIFNDVYIAYELMDTDLHQIIRSNQALSEEHCQYFLYQILRGLKYIHSANVLHRDLKPSNLLLNANCDLKICDFGLARTTSETDFMTEYVVTRWYRAPELLLNSSEYTAAIDVWSVGCIF

SEQ ID NO: 8024 - protein, 227 aa, Nicotiana tabacum
ERVPERVVHARGASAKGFFEVTHDITHLTCADFLRAPGVQTPVIVRFSTVIHERGSPETLRDPRGFAVKFYTREGNFDLVGNNFPVFFIRDGMKFPDMVHALKPNPKSHIQENWRVLDFFSHVPESLHMFTFLFDDIGIPQDYRHMDGSGVHTFTLINKAGKSTYVKFHWKPTCGVKSLLEEEAARIGGANHSHATQDLYDSIAAGNYPEWKLFIQTMDPDHEDRFD

SEQ ID NO: 8025 - protein, 208 aa, Margaritaria cyanosperma
DIPQASRFLFMKNKVRMICDCQAPPVKVIQDKRLAQPLSLCGSTLRSPHGCHAQYMANMGTIASLVMSVTINEDDDEMDNDQQIGRKLWGLVVCHHTRPRFVPFPLRYACEFLMQVFGVQVNREVELAAQLREKHILQTQTVLCDMLLRDAPVAIVTQSPNVLDLVKCDGAALYYRKKFWLLGVTPTEAQIKDITEWLLEYHGQSTGL

SEQ ID NO: 8026 - protein, 224 aa, Petalodiscus fadenii
DIPQASRFLFMKNKVRMICDCQAPPVKVIQEKRLAQPLSLSGSTLRSPHGCHAQYMANMGSIASLVMSVTINEDDDEMDNDQQRGRKLWGLVVCHHTSPRFVPFPLRYACEFLIQVFGVQVNKEVELAVQRREKHILQTQTVLCDMLLRDAPVAIITQSPNVMDLVKCDGAALYYRSKFWLLGVTPTEAQIRDIAEWLLEYHGESTGLSTDSLMEAGYPGAANL

SEQ ID NO: 8027 - protein, 516 aa, Burkholderia mallei ATCC 23344
MRMPHMISRHSMRWLSRALVAVSASGALAAHASTLTRDNGAPVGDNQNSQTAGANGPVLLQDGHLIQKLQRFDRERIPERVVHARGTGAHGVFVATRDISDLTRAKVFEPGTQTPVFVRFSSVIHGGTSPETLRDPRGFATKFYTAEGNWDLVGNNLPVFFIRDAMKFPDMVHSLKPAPDTNIQDPDRFFDFFSHQPEATHMITRVYSDAGTPASYREMDGNSVHAYKFVNAHGGVTYVKFHWKSLQGQKNLTAAQAEAIQGKDFNHMTRDLIAAIDAGRYPKWDLYVQTLKPDQLDQFAFDPLDATKVWPGVPEVKIGTMTLNRNPGNVFQETEQAAFAPSNLVPGIEPSEDRLLQGRLFAYADTQLHRVGVNGAQLPVNRPRAPVANYNRDGAMNGGAARGTVNYEPGAQAALAADPAFAASRAPLAGSTQQARIAKTRNFDQAGAFYRSLSASERANLVANLAGDLKQVRNDGVKYTMLSYFQKADAEYGRKVTAALGADQGRVDALTAKLAD

SEQ ID NO: 8028 - protein, 75 aa, Populus tomentosa
MEYQNESLESSPLRKLGRGKVEIKRIENTTNRQVTFCKRRSGLLKKAYELSVLCDAEVALIVFSSRGRLYEYSNN

SEQ ID NO: 8029 - protein, 68 aa, Triticum aestivum
  misc_feature (45)..(45): Xaa can be any naturally occurring amino acid
MGGLFRSGYLASRVSDRLLLYTRMGATVHTARHSYENVETSYTIXDIDGADYSLRMFTDDRQYLVAFR

SEQ ID NO: 8030 - protein, 771 aa, Rubrobacter xylanophilus DSM 9941
MKIVCIGGGPAGLYFGISLKLRQPEHEVTVIERNPCGVTFGWGVVFSDQTLGNLHANDPKSARRIQESFAHWDDIAVHVGGKEITRSGGHGFVGIARRRLLEILTERAVELGVEVQFEREVEDLSEFADADLIVASDGANSKVRERYAEKFGPSIDVRRNKYIWLGTRKLFDAFTFAFEKTEAGWVWIHAYRFDRDTSTCIVECSPETWKGLGFDRMEPEESIALCEEIFAPYLDGHGLINNMRHLGKAPWLNFRRISNERWFYDNIVLIGDAAHTAHFSIGSGTKLALEDAIALAEKLQEHGAGRQPYGWALKDALESYEAERRLEVLKLQSAARNSTEWFENVPRYINSLEPMQFAYSLLTRSQRVSHENLRLRDRNWLEKMERWFAGRYLGKPPKDPVPPMFTPFSLRNMELMNRVVVSPMAMYSAEDGTPNDFHLVHWGTRAQGGAGLVFTEMTCVTPQGRISPGCCGMYKPEHEAAFKRIVDFVHTHTHAKFALQLGHSGIKGSTRRGWEGADQPLEEGNWEVIGPSPVPWSEDNQIPREMTYEDMEEVKEAFVRATKMGERAGFDMLELHCAHGYLLSSFITPLLNRRTDEYGGSLENRLRYPLEVFRAMREVWPEEKPMSVRISATDWVDGGITADDAVEIARAFWEAGADLIDVSAGQTSPDARPVYGRMFQTPFSDRIRNELGIATMAVGNIWEADHVNSIIAAGRADLCALARPHLYDPYWTLRRAIELGYDGVPWPDQYLSGKAQLKRNVERASQMAQVI

SEQ ID NO: 8031 - protein, 164 aa, Thermococcus kodakarensis KOD1
MRKMVWRRDRYWDPFDIMREIQEEIDAIFRDFMRGPRLWSYREPGERIEVSETWREPFADIFDRGDRFVITVELPGVRKEDIKLRVTEDTVYIEAQMRREKELEQEGAIRIERYYSGYRRVIRLPEEVIPEKAKARYNNGVLEIEIPKKKPTKPEKEGVEVKIE

SEQ ID NO: 8032 - protein, 1229 aa, Nitrosomonas europaea ATCC 19718
MILTSLTQRFAIWFTLVALLPIALVGYGLLHIFEGEIRKSAIQQVSSIADKKVEQIDSYLRERILDATFIQTSDTTRQAIDEFSQIFSQFGVDSETYRALDARHQAHYERYLEGTGYYDLFLISPDGWIVFSVSHESDFATSLLTGPYQDSGLGQVFRQTKETHQSSLSSFEYYPPSHGAIAAFVAVPIMIEGNFHGVLALQIYSEHIFDVLTNNVGLGESGETVVTYMENKHLARVMAPLREDPDAALKRTISLDEPQFSLAIRNSLSGEHGGGVVTDFHGNPVIAAWRYLPRVDWGMVVQIDTEEAFASVMQMRVMGLVVLGLTFLMAILGALLFNRRVVTPLKNLNECAQAINAGNLQHHIPDEGWDEIGQLASAFNMMTERLDISYRHLEARVAERTARLEQLNAELAIKEEETRSVVEHMVDCVVTTDERGVMLSVNPVMEKLFGYTVEEAIGQNVAVLVPKPDRDMHEYYMQRYCHTGYGQQYVGRPQQPGGHHVGLGREVEGVHKDGTLLPVYLAVSEYFVGDKRHFTGIMRDMREHVKIRQDLEQARRDAELANQAKSAFLAAMSHEIRTPMNGVIGMIDVLSQTSLSSYQKEMTDLIRESAFVLLEIIEDILDFSKIEAGRLEIEQRPISLEKVVERACGTLTHMAASKEVELILFVDPALPKNVAGDALRLRQILINLINNAIKFSSGMSRPGCVIVKAVPADRANGDVVTVLFQVIDNGIGMDDATRERLFTPFSQGDTSTTRRFGGTGLGLTICRRLVELMKGDITVESQPGKGSTFKARIPFRMIQEGAVQQDEPDEVDLSGLSCIVMGSEDGLSPQLATYLKYAGAAVERISGLSATLERIGQLPAGEWLLVADASDGEFPVDELRAAFGDRPDASAGDQLRFVIVRRGRRHRGRMEEEGVVTLDGNVLYRRVFLHAVAVAAGRAKLEEDQTAAVEVVSKVVPLSREEALQQGRLILVAEDNEINQKVIHQQLTLLGFAADIVINGREALQSWKNGEYALILTDLHMPEMDGYQLTQSIRSEKTGHYQIPIIALTANALKGEAEKCRALGMDDYLSKPVQLEQLKSVLEKWLPRSKQTEQQEERILPPSAATGKVVVDINVLKSLVGSDQAVINEFLQDFLHDTRKIAEQLHSAITGGQADKAKFAAHKLKSSARSVGALALGEWCAQMEMAAKEGDVEKLVELLPGFEQELAQVESYIKKVLAQPDVEAQKDEI

SEQ ID NO: 8033 - protein, 193 aa, Oryza sativa (japonica cultivar-group)
MEGIGQSFRSTLGIFSTFKQCVICNYASYTTPIELGIEQILEARMLGIEHCLSWMGSHFPSPQEIGIGLTGFGVFFSFLGIIFFFDKGLLAMGNILFLSGLGLTIGLKSTLQFFTKPKNYKGTISFGAGLLLVLIGWPFFGMLLEAYGFIVLFSGFWPTLVVFLQKIPFIGWIFQQPFVASYLGSYRGKRVPV

SEQ ID NO: 8034 - protein, 671 aa, Streptomyces coelicolor A3(2)
MSRYPHLLSPLDLGFTTLPNRVLMGSMHVGLEEAERGFERMAAFYAARARGGVGLIVTGGIAPNDEGRPYEGGARLTTGAEAEQHRVVTDAVHREGGRIALQILHFGRYAYHADLVAPSALQAPISPHVPRELTDAEVERTIDDYVRTARLAREAGYDGVEIMGSEGYLINEFIAARTNHRSDRWGGSYENRMRFPVEIVRRVREAVGADFIVVYRLSMLDLVPGGSTLDEVITLAKAVEAAGATIINTGIGWHEARIPTIATSVPRGAYTWVTKRLMGEVSVPLVTTNRINTPEVAEALLAEGTADMVSMARPMLADPDFVAKAAAGRAEAINTCIGCNQACLDHTFSGQITSCLVNPRACHETELVLAPTRRRKRVAVVGAGPAGLACAVSAAERGHEVTLFDAASEIGGQLNVARKIPGKQEFDETLRYFRTQLAAHGVDVRLNTRVGVADLTGHDEVVVATGVTPRTPDIPGVDHPSVVGYLDVLRDAAPVGERVAILGAGGIGFDVAEYLTDGGDKAHEDPETYFRLWGVDTDYRAPGGLAAPERPAPPRTVHLLQRKTSKVGAGLGKTTGWIHRTELRHRGVTMVPGVRYDRIDDAGLHITVGDESTVLEVDTVVLCTGQEPSRGLYDDLVAAGHRAHLIGGADVAAELDAKRAVKQGTELAAAL

SEQ ID NO: 8035 - protein, 380 aa, Zygosaccharomyces rouxii
MATHEEFIRTQVFGTVFEITNRYTDLNPVGMGAFGLVCSATDTLAGQPVAIKKIMKPFSTAVLAKRTYRELKLLKHLRHENLICLQDIFLSPLEDIYFVTELQGTDLHRLLQTRPLEKQFVQYFLYQILRGLKYVHSAGVIHRDLKPSNILINENCDLKICDFGLARIQDPQMTGYVSTRYYRAPEIMLTWQKYDVEVDIWSAGCIFSEMIEGKPLFPGKDHVHQFSIITDLLGSPPRDVINTICSENTLKFVTSLPHRDPVPFQERFKTVEPDAVDLLERMLVFDPKKRITAADALVHPYLAPYHDPTDEPTAEAQFDWDFNDADLPVDTWRVMMYSEILDFHKIGGGDGQIDTNAAFDDQVAAATAAPMAQHTNQTNQ

SEQ ID NO: 8036 - protein, 236 aa, Mannheimia succiniciproducens MBEL55E
MLVPIPALNDNYIWLYGRENLPVIAIDVAECKNLSAYLTQHHLQLEAVLLTHYHDDHTGGVEELKRYYPDIPVYGPAETADKGATHIVNEGNIQTAHYRIEVVPSGGHTANHVSYLIDNHLFCGDTLFSAGCGRVFTGDYGQMFESITRLKQLPDKTVICPAHEYTLSNLVFAEAFAPNEKVKSAVKNQRISVESLRAQNKPSLPTTLALEKNINPFLQAENLADFIYLRKAKDNF

SEQ ID NO: 8037 - protein, 149 aa, Cocos nucifera
RTLRELKLLRHMDHENVIAIRDIIPPPVREIFNDVYIAYELMDTDLHQIIRSNQALSEEHCQYFLYQILRGLKYIHSANVLHRDLKPSNLLLNANCDLKICDFGLARTTSETDFMTEYVVTRWYRAPELLLNSSEYTAAIDGGLVGCIF

SEQ ID NO: 8038 - protein, 774 aa, Arabidopsis thaliana
  misc_feature (349)..(349): Xaa can be any naturally occurring amino acid
  misc_feature (376)..(376): Xaa can be any naturally occurring amino acid
MAASSLSLSSPLSNPLRRFTLHHLHLSKKPLSSSSLFLCSAAKMNDHIHRVPALTEEEIDSVAIKTFERYALPSSSSVKRKGKGVTILWFRNDLRVLDNDALYKAWSSSDTILPVYCLDPRLFHTTHFFNFPKTGALRGGFLMECLVDLRKNLMKRGLNLLIRSGKPEEILPSLAKDFGARTVFAHKETCSEEVDVERLVNQGLKRVGNSTKLELIWGSTMYHKDDLPFDVFDLPDVYTQFRKSVEAKCSIRSSTRIPLSLGPTPSVDDWGDVPTLEKLGVEPQEVTRGMRFVGGESAGVGRVFEYFWKKDLLKVYKETRNGMLGPDYSTKFSPWLAFGCISPRFIYEXGGPRNVQGKWSQDQKLFESWRDAKTGXNMKELSTTGFMSNRGRQIVCSFLVRDMGLDWRMGAEWFETCLLDYDPCSNYGNWTYGAGVGNDPREDRYFSIPKQAQNYDPEGEYVAFWLQQLRRLPKEKRHWPGRLMYMDTVVPLKHGNGPMAGGSKSGGGFRGSHSGRRSRHNVIMDNETKATTFSKSTGLPRKRFYRARAHSNPLSDSHFPIPISPAHVDYSLHFPKFVEADNKFIKKVEFADIGCGFGGLLISLATLFPDTLMIGMELRDKVTEYVKERILALRRTSSEGQYENISVVRTNSMKYIPNYFEKGQLSKMFFLFPDPHFKEKNHRRRVISTHLLDEYAYVLRAGGIIYTITDVEELGEWMKSCLEKHPMFESLTQEELVSDPVVELLCSATEEGQKVARNGGQTFRAVFRRIAYVS

SEQ ID NO: 8039 - protein, 148 aa, Cocos nucifera
TLRELKLLRHMDHENVVAIRDIIPPPVREIFNDVYIAYELMDTDLHQIIRSNQALSEEHCQYFLYQILRGLKYIHPANVLHRDLKPSNLLLNANCDLKICDFGLARTTSETDFMTEYVVTRWYRAPELLLNSSEYTAAIDVWSVGCNV

SEQ ID NO: 8040 - protein, 501 aa, Aspergillus nidulans FGSC A4
MGQNDDQKTYRYNESPVYTTSNGCPVMDPQASQRVGPNGPLLLQDFNLIDLLAHFDRERIPERVVHAKGAGAYGEFEVTDDISDITVIDMLKGVGKKTKTFVRFSTVGGEKGSPDSARDPRGFACKFYTEEGNWDWVFNNTPVFFLRDPSKFPMFIHTQKRNPQTNLKDATMFWDYLSTHQEAVHQVMHLFSDRGTPYSYRHMNGYSGHTYKWIKPDGTFNYVQLHLKTDQGNKTFTDAEATRLAAENPDWHTQDLFNAIARGEYPSWTCYVQTLSPEQAEKFRWNIFDLTKVWPQSEVPLRRFGRFTLNKNPENYFAEVEQAAFSPSHLVPGVEPSADPVLQARLFSYPDTHRHRLGTSNYQSIPVNCPLRAFTPFHRDGAMSVNGNHGANPNYPSTFRPLQYKPVKASQEHEKWAGSVVTEQLPVTDEDFVQANGLWKVLGRQPGQQENFVGNVAGHLCNAHPRVRQATYGMFRRVNADLGKRIEKATEKKATEARARL

SEQ ID NO: 8041 - protein, 234 aa, Glycine soja
MFTLNHSSDLYHVSPELSSSLDTSSPASEGSRGVAFSDEEVRLAVRHPKKRAGRKKFRETRHPVYRGVRRRNSDKWVCEVREPNKKTRIWLGTFPTPEMAARAHDVAAMALRGRYACLNFADSAWRLPVPATAEAKDIQKAAAEAAQAFRPDQTLKNANTRQECVEAVAVAVADTTTATAQGVFYMEEEEQVLDMPELLRNMVLMSPTHCLGYEYEDADLDAQDAEVSLWNFSI

SEQ ID NO: 8042 - protein, 280 aa, Campylobacter coli RM2228
MQELISYIQKAVIEISNALKFPDTSYSQNQNSTGDTQLKFDVLSDEIITNTLSQCPSIKAIISEEKDEILNINENAKFIVAYDPLDGSSLMDVNFAIGSIFAIYEEKASAKNLKAALYSMYGARLELVICEDKPKLYRLDKNNEFVFVKDLQMQEKGKINATGGTQKFWEEKHAKFIKKLFDEGYRLRYSGAMVSDINQILLKGGGIFSYPATSDAPKGKLRAFFEVFPLAFIIEKAGGKTTNGKNHSLLELDFDEIHATTPCFFGSKYEISELLKAYNE

SEQ ID NO: 8043 - protein, 1298 aa, Neurospora crassa
MTDGPTLAAIAALVKSLAVDPATTQTSGLRPSTHVRLPGPYTREKGDLERELSALVVRIEQLETAAIAASPPAMPDTPNAPTDALFSNGTLSPSSETPDARYPAPLPRNGFIDEALEGLREHVDDQSKLLDSQRQELAGVNAQLIEQKQLQEKALAIIEQERVATLERELWKHQKANEAFQKALREIGEIVTAVARGDLSKKVRMNSVEMDPEITTFKRTINTMMDQLQVFSSEVSRVAREVGTEGILGGQAQIEGVDGTWKELTDNVNVMAQNLTDQVREIASVTTAVAHGDLTKKIERPAKGEILQLQQTINTMVDQLRTFASEVTRVARDVGTEGILGGQADVEGVQGMWNELTVNVNAMANNLTTQVRDIIKVTTAVAKGDLTQKVQAECRGEIFELKKTINSMVDQLQQFAREVTKIAREVGTEGRLGGQATVHDVQGTWRDLTENVNGMAMNLTTQVREIAKVTTAVAKGDLTKKIGVEVQGEILDLKNTINTMVDRLGTFAFEVSKVAREVGTDGTLGGQAQVDNVEGKWKDLTENVNTMASNLTSQVRGISTVTQAIANGDMSRKIEVEAKGEILILKETINNMVDRLSIFCNEVQRVAKDVGVDGIMGGQADVAGLKGRWKEITTDVNTMANNLTAQVRAFGDITNAATDGDFTKLVEVEASGEMDELKKKINQMVYNLRDSIQRNTQAREAAELANKTKSEFLANMSHEIRTPMNGIIGMTQLTLDTDLTQYQREMLNIVNSLANSLLTIIDDILDLSKIEARRMVIEEIPYTLRGTVFNALKTLAVKETEKFLDLTYRVDHSVPDHVVGDSFRLRQIILNLVGNAIKFTEHGEVSLTIQKASSVQCSTEEYAIEFVVSDTGIGIPADKLDLIFDTFQQADGSMTRKFGGTGLGLSISKRLVNLMGGDVWVKSEYGKGSKFFFTCVVRLANDDISLIAKQLNPYKSHQVLFIDKGRTGHGPEIAKMLHGLGLVPIVVDSERNPALEKARAAGQAPYDVIIVDSIEDARRLRSVDDFKYLPIVLLAPVVHVSLKSCLDLGITSYMTTPCQLIDLGNGMVPALENRATPSLADNTKSFEILLAEDNTVNQRLAVKILEKYHHVVTVVGNGEEAVEAVKRKKFDVILMDVQMPIMGGFEATAKIREYERSLGSQRTPIIALTAHAMMGDREKCIQAQMDEYLSKPLQQNHLIQTILKCATLGGQLLEKNRERELTRAADAVTGGRRDNGMYSASQAAQHAALRPPLATRGLTAADSLVSGLESPSIVTADKEDPLSRARASLSEPNIHKAS

SEQ ID NO: 8044 - protein, 404 aa, Shewanella sp. MR-4
MRPIIKSNKLDTVCYDIRGPVHKEARRLEDEGHRILKLNIGNPAPFGFEAPEEIVRDVILNLPSAQGYCESKGLFSARKAIVQHYQAQGIKGVDIEDVYIGNGVSELIMMAMQGLLNTDDEVLIPSPDYPLWTAAANLAGGKAVHYRCDEEADWFPDLDDIKSKISSRTRGIVLINPNNPTGAVYSKELLLQVIELCREHNLILFADEIYDKILYDEAKHIPAASLSDDILTVTFNGLSKAYRAAGFRVGWMMLSGNLKAAKSYIEGLEMLSSMRLCANVPNQHAIQTALGGYQSINELILPSGRLTVQRDTCYELLNQIPGVSVKKPKGALYAFPKLDMKKFNLRDDERLVLDLLRDKKILLVHGSAFNWPEPDHLRVVFLPYKEDLTKALTEFGNFLETYKQ

SEQ ID NO: 8045 - protein, 488 aa, Listeria seeligeri
MTDRRNLTTNQGVPIGDNQNSMTAGLKGPTLLEDYVLIEKLAHFDRERVPERVVHARGAGAHGKFVTKKSMKKYTKAQFLQEEGTETEVFARFSTVIHGQHSPETLRDPRGFSVKFYTEEGNYDFVGNNLPVFFIRDAIKFPDVIHSLKPDPRTNIQDGNRYWDFFSLTPEATTMITYLFSDEGTPASYREIRGSSVHAFKWINEEGKTVYVKLRWVPKAGIVNLSTDQAAQIQAKEFNHASRDLYEAIENGDYPEWDLYVQVLDPKDLDNYDFNPLDATKDWFEDVFPYEHVGTMTLNRNPDNIFAETESVGFNPGVLVPGMLPSEDRVLQGRLFSYSDTQRHRVGPNYLQLPINSPKTPVDNNQRDGQMPFKQQTSSINYEPNSYDTEPKENPAYIEPEQEIRGDISGRLVAEKPNNFGHAKEVWKRYSDAERAALVKNIVDDWEGVREDIKIRNLRNFYQVEPEFAERVAAGTGINLAEHVIDLK

SEQ ID NO: 8046 - protein, 854 aa, Methanosarcina mazei Go1
MGIFSLRRWTELENTLVLYREAECDLEEKDRMYRALFEQSSDAVIISDGKKVLDINKKGCEIFGFGQKRPFNVSLMSFIQAEYLPELQQAFKETFRQGSSNFEMRYQKPEGEIVDIKVNLSLIDRKDNIVQLVAQDITVSKNIERSEQENRERLKAILDNTLCGILLIESSSRKIINANPIALKTAGYSDKELIGMTCYRLIDQHGEENCAALSLDQAGDLSESILLTATGKTLPILRSVVPVSIGGTGYFVESFIDLSDRKQAEEELLQAKIAAESANRSMSEFLATMSHELRTPLTAIIGFSELMLGGSTGEFDELNKKFLGNISTSGKHLLSLINSILDLSKIEAGKMELQSDYFSLQDIFSNTKNILSPLALKKNISMDFNVEPGFFVYADRTRFKQIMYNLVSNAVKFTQKGGSVEVLGIVSEKGVRVSVSDTGIGISKDEIKQLFKPFKQIDSTLSRKYEGTGLGLVLSKKFVEMHGGRIWVESEPGKGSTFTFEVPVKTLKSGEIFRAHETAETAHETAETCETNAIEAPVITGKAVESGKPVEPIVLNELTESGAEIPVKMPKMEDISVDFKSCGSDVSAPLVMVVEDDRLSRELLVFTLKEAGYRVVQAATGEEALSLAQKLKPFVITLDLMLPEMNGWDVLENLKKDSVTSGIPVLVLSITEKNDCKMLWGAFDHLVKPVDKSVLLSSLDRLKTNLKKDSPKILIADDQESMLELMSSMIEFEGYVISLAQGGKEAIDKASTEIPDAIILDLNMPDVSGFEVIKALKKNPQTVDIPVIVCTSKDLSMQEMKMLNSSVSFVMQKEDLNKRKLLELIRRLEPENCGIFTSPAYQEVFQSDSFRTEG

SEQ ID NO: 8047 - protein, 145 aa, Glycine max
MGSEGPPAAVTVHVTGFKKFHGVSENPTETIVNNLTEYLKKKGLSKGLVIGSCSILETAGQGALIPLYKTLQSAITSKESESSSSNKIIWLHFGVNSGATRFAIERQAVNEATFRCPDEMGWKPQKVPIVPSDVAITRIRKTTLP

SEQ ID NO: 8048 - protein, 275 aa, Brucella suis 1330
MTVPTVKLNDGNHIPQLGYGVWQISNDEAVSAVSEALKAGYRHIDTATIYGNEKGVGKAINGSGIARADIFLTTKLWNSDQGYESTLKAFDTSLKKLGTDYVDLYLIHWPMPSKDLFMETWRAFIKLKEEGRVKSIGVSNFRTADLERLIKESGVTPVLNQIELHPQFQQDELRLFHGKHDIATEAWSPLGQGKLLEDPTLKSIAEKHAKSVAQIILRWHIETGNIVIPKSITPARIKENFDIFDFTLNGTDHDAITKLDMADGRIGPNPSVFSA

SEQ ID NO: 8049 - protein, 590 aa, Triticum aestivum
MCGILAVLGCADWSQAKRARVLSCSRRLKHRGPDWSGLFQCEGNFLAQQRLSVVSPLSGDQPLYNEDRTVVVVANGEIYNHKKIRKQFAAKHTFTTGSDCEVIIPLYEEYGENFVNMLDGVFSFVLYDTRNKTYMAARDAVGVNPLYFGRGSDGSVWIASEMKALHEDCPKFELFPPGNLYSSAAGGFRRWYNPQWFAEHVPATAYQPLVLREAFEKAVIKRLMTDVPFGVLLSGGLDSSLVASVTKRHLIETEAAKKFGTELHSFVVGLEGSPDLKAAREVADYLGTIHHEFHFTVQDGIDAIEEVIYHNETYDVTTIRASTPMFLMARKIKALGVKMVLSGEGSDELLGGYLYFHFAPNKEEFHKETCRKVKALHQYDCLRANKATSAWGLEVRVPFLDKEFIDVAMSMDPEWKLYDANLGRIEKWVLRKAFDDEKEPYLPRHILYRQKEQFSDGVGYNWIDGLKAFTEQQVTDEMMKNAAEEYPYNTPINKEAYYYRMIFERLYPQDSARETVPWGPSIACSTPAAIEWVAQWKASNDPSGRHIASHNDAAPAHAHANWNGAVANGKANGNGTANGNANANGTLVPC

SEQ ID NO: 8050 - protein, 549 aa, Anaplasma centrale
MANVVVTGEALDKSIREVVRILEDAVGCTAGPKGLTVAISKPYGSPEITKDGYKVMKSIKPEEPLAVAIANIITQSASQCNDKVGDGTTTCSILTAKVIEEVSRAKAAGADTISIKNGILKAKEAVLTALLSMKREVASEDEIAQVATISANGDKNIGGKIAQCVREVGKDGVITVEESKGFKDLEVEKTDGMQFDRGYLSPYFVTNAEKMLVEFENPYIFLTEKKINLVQSILPVLENVARSGRPLLIIAEDVEGEALSTLVLNKLRGGLQVAAVKAPGFGDRRKDMLGDIAVIAGAKYVVNDELAVKVEDITLDDLGTAKTVRITKDTTTIIGSVDSNADSITSRISQIKSQIEVSSSDYDKEKLKERLAKLSGGVAVLKVGGSSEVEVKERKDRVEDALHATRAAVEEGVVPGGGAALLYTLASLDEVKGKNDDEQLGINIIKRAVRAPIKRIIKNSGSEEAPCVIQHLLKQNDKELIFNVDTMNYANAFASGVMDPLKVVRIAFDLAVSLAAVFMTLNAVVVDIPSKEDTAGGGAAGGMGGMGGF

SEQ ID NO: 8051 - protein, 157 aa, Triticum aestivum
  misc_feature (2)..(2): Xaa can be any naturally occurring amino acid
  misc_feature (93)..(93): Xaa can be any naturally occurring amino acid
  misc_feature (107)..(107): Xaa can be any naturally occurring amino acid
  misc_feature (113)..(113): Xaa can be any naturally occurring amino acid
  misc_feature (123)..(123): Xaa can be any naturally occurring amino acid
  misc_feature (125)..(125): Xaa can be any naturally occurring amino acid
  misc_feature (129)..(129): Xaa can be any naturally occurring amino acid
  misc_feature (134)..(134): Xaa can be any naturally occurring amino acid
  misc_feature (138)..(138): Xaa can be any naturally occurring amino acid
  misc_feature (140)..(140): Xaa can be any naturally occurring amino acid
KXTLVCAYESSSLPATVRTQAVEAGLHCFDMEGISSDKDAKGRQRVNHVTVFERPGLHEFLQKTSEFADLILFTAGLEGYAKPLVDRIDAHNXFCRRLYRPSTVTTXYRDHVXDLSCLSKDSXEXCLSXSHPYXFLLXPXNGIPCLLFSWTAMDDQL

SEQ ID NO: 8052 - protein, 608 aa, Magnetospirillum magnetotacticum MS-1
MCGICGYVGAERPGLIQAMIAEIRHRGPDGEGCDSALGIHLGHARLAILDPSHGAQPLTGADGRYTVSYNGEIYNYPDLRRELEALGHRFETTCDTELLPLGFAAWGEGLFARLDGMFAFALRDNADGRLWLVRDQLGIKPLYYSLAGGELAFASSARALTRHPQVSRRLRPDAIQEFLQFRWVRSGRHLFSDVEILPPGGVLRWTEGEARLDRFWTPARRGPARNALPRDWAAEVELVLEDSVRRQLRADVALGIFLSGGVDSAMIGHYAARNAANRLTAFTFSTGDRVDETAQAAAMARDFGFDHRVVSLTASDFADFPQAVACLDNPVGDAVVLPTWKLCREAAREVKVVLTGEGADEMFAGYAHLPILRKLDQLGSVAGVLRLLAPLIRLMPVGLLNHLFDYQASLGRLGRDAAAELLAVAGDSGKMLARASAIMGDAEMAQATTLGPPPPRPKADLSLGGLLLDLTRGWLPEEILHKMDQLSMAHGLEARVPYVTTALYDLLLRCPDQMAMGKTLLRHVASQSGLAAARRRKVAFHLPVETLWRPQLEEMCREYLSPAMIRRHAILNEAFVGRSLSLLKAGEFLASKRLVAMVSLHAWLDAHT

SEQ ID NO: 8053 - protein, 549 aa, Anaplasma centrale
MANVVVTGEALDKSIREVVRILEDAVGCTAGPKGLTVAISKPYGSPEITKDGYKVMKSIKPEEPLAVAIANIITQSASQCNDKVGDGTTTCSILTAKVIEEVSRAKAAGADTISIKNGILKAKEAVLTALLSMKREVASEDEIAQVATISANGDKNIGGKIAQCVREVGKDGVITVEESKGFKDLEVERTDGMQFDRGYLSPYFVTNAEKMLVEFENPYIFLTEKKINLVQSILPVLENVARSGRPLLIIAEDVEGEALSTLVLNKLRGGLQVAAVKAPGFGDRRKDMLGDIAVIAGAKYVVNDELAVKVEDITLDDLGTAKTVRITKDTTTIIGSVDSNADSITSRISQIKSQIEVSSSDYDKEKLKERLAKLSGGVAVLKVGGSSEVEVKERKDRVEDALHATRAAVEEGVVPGGGAALLYTLASLDEVKGKNDDEQLGINIIKRAVRAPIKRIIKNSGSEEAPCVIQHLLKQNDKELIFNVDTMNYANAFASGVMDPLKVVRIAFDLAVSLAAVFMTLNAVVVDIPSKEDTAGGGAAGGMGGMGGF

SEQ ID NO: 8054 - protein, 241 aa, Glycine max
IRLETLRIQRLRKKFYFHFQDYVDLIIWKVQFLDRHHLLIKFGSVDGGVSRNADHHPAFVAVYNMDTTEIVSFYQNSPDELYLLFEQFCDHFHATSRNSMYMNFISSHSNNIHALEQLRSIKDKASSSAQFVKKMLASLPFSCQSQSPSPYFDQSLFRFDDKLISATDRHRQSTDHPIKFILRRHPYSLKFKIKPGPEAGSMDGRAKKISSFLFHPILPLALSVQQTLFLQPSVVNIHFRR

SEQ ID NO: 8055 - protein, 484 aa, Rhizobium sp.
MKKLTNATGAPVADNFNIQTAGPRGPALLQDIWLLEKLAHFDRELIPERRMHAKGAGAYGTFTVTHDITRYTKASIFSSVGKETPLFVRFSSVAGERGSADAERDIRGFAVKFYTDEGNWDIVGNNTPVFFFRDPLRFSDLNHVVKRDPSPALRNATSNWDFWTLLPEALHQVTSVMSDRGLPTSFRHMHGFGSHTFSLIDRDNKRVWVKFHFVCQQGIENLSDAEAEAVVGKDRESNLRDLYEVIEQGNFPRWKLCIQVMEEEQALNYRHNPFDLTKVWPHAARVIEVGIMELNRNSRKANFAEIEQAAFSPANVVPGVSFSPDRISRARLFSYGDAQRYRLWLNFNHIPVNAPRCPASSYHRSYHRDGAMHADGNLGGTASYFPNSVGEWQDSPERAEPPLPLEGFDQHYDHRLEEDHYEQPGNLFRLLDPARNELLFDNTARAMNGVPQRIRQRHMTIAPKPSPAYGFGVAEALERLVPLG

SEQ ID NO: 8056 - protein, 419 aa, Yarrowia lipolytica CLIB122
MDEEEHKDHQEEEDPHHFAFSDNYSEAVLGGEISATVFDVTGKVVHVAHKMTKYEFLLEHGLYPRDLRNIDPSPVSIIPSILARGRKGAGRCILVNLLHIKALILHDKVLIFDTHSKNKSDTHRLGMFLYELENKLKPTINPEKMHTDMTVLPFELRVLEAILVNVMTTLDGELQVHLKTLNEILVGLEDHVDREQLKELLIGNKNVSRFYQKAVLIRDVLEELLESDDDLQQLYLGTHPKEGLAEVELLIESYCKQADEIVQQASNVRSHIRSTEEIVNIIVDANRNALMLLELKVTIVTVGFAVGAFVAALYGMNLENFIEETNEGMVLVVGVACLGGLLVTWFNLTKLHKTQKIAMFSNAATHTASKPYMLQWIIGLLRRKRTKSRFDNIDMSRPKMKGKKSNILHQLTKMTGKRR

SEQ ID NO: 8057 - protein, 357 aa, Gluconobacter oxydans 621H
MTSLFEPIELGSIYAKNRILMAPLTRGRGTRDHVPTPIMAEYYAQRAGAGLIISEATGISREGLGWPYAPGLWSQEQVEAWKPITAAVHAKGGKIVAQLWHMGRMVHSSVTGQQPVSCSATKAPEALHTYDGKQAPEVARPLTKEDIARILNDYENAARNALQAGFDGVQIHAANGYLIDEFLRDGTNHRSDEYGGSPENRIRFLREVTERVIATIGAHKTSVRLSPNGDTVGCIDSHPEQVFVPAAKLLNDLDIAFLELREPGPNGTFGKTDQPKLHGPIREVFRKPLVLNQDYTREEAIETVATGVADAISFGRPFLANPDLVRRLEDNLPQNKDDIRTWYSQGAEGYTDYPLAR

SEQ ID NO: 8058 - protein, 401 aa, Shewanella sp. MR-7
MKQLIRNIVCLGLGLSLGLSISLSSQENAKSYQSDFDYPLLQDVLETVETYYVKTVSKDELVQAAIKGIFEHLDPYSSFLNHQELLDLKDSNRGEYFGFGFEVASDKDHISIIAPFANSPAEQAGIQAGDIIIKLNDTPTTETNLADILNQIKQHSLSNQSIRLTLKHRNDAVEFEVSLKPSTITIQSVASKLLDGNIGYVRLSSFQENSTEDMVRSLSQWQNAHLTGLILDLRNNPGGLLDQAIKIADLFLAKGRIVSTSGRFFDANSDYYASPQTMLTNVPMLVLINKGSASASEVLAAALQENGRAKLLGETSFGKGTVQSLIPILNDGNAIKLTIAQYNTPRGENIHDIGIVPDIKVAAETGSNQKNMAIIDTISARTDVSQDSLVTSAIAWMQHHD

SEQ ID NO: 8059 - protein, 271 aa, Silicibacter sp. TM1040
MTMPDQTSFPSTVANGLEIVTVPCLADNYAYLVKGPDGVALIDAPEAEPILTALEARDWSLGVIMITHHHHDHVGGVAALREKFGCPVMGPKAEADKIAAQGVTLDMELEPGFEGGTGAGRCQVLAVPGHTLGHIAFYYPEAPALFSADSLMVMGCGRLFEGTPAMMWQTMTTLSALPDETLIYSGHEYTESNAGFALSLEPENAALQKRMDEITKTRQNGQPTVPALLSLEKQTNPFLRAGDPNLKKTLGLEGVEDAEVFAHIRVAKDKF

SEQ ID NO: 8060 - protein, 453 aa, Synechocystis sp. PCC 6803
MYCYDPRQFAQTHQGFAKTGPWRSNFLQQSVQNLAESLQKVGNKLLVTTGLPEQVIPQIAKQINAKTIYYHREVTQEELDVERNLVKQLTILGIEAKGYWGSTLCHPEDLPFSIQDLPDLFTKFRKDIEKKKISIRPCFFAPSQLLPSPNIKLELTAPPPEFFPQINFDHRSVLAFQGGETAGLARLQDYFWHGDRLKDYKETRNGMVGADYSSKFSPWLALGCLSPRFIYQEVKRYEQERVSNDSTHWLIFELLWRDFFRFVAQKYGNKLFNRGGLLNKNFPWQEDQVRFELWRSGQTGYPLVDANMRELNLTGFMSNRGRQNVASFLCKNLGIDWRWGAEWFESCLIDYDVCSNWGNWNYTAGIGNDARDFRYFNIPKQSQQYDPQGTYLRHWLPELKNLPGDKIHQPWLLSATEQKQWGVQLGVDYPRPCVNFHQSVEARRKIEQMGVIA

SEQ ID NO: 8061 - protein, 324 aa, Hypocrea jecorina
MASPTLKLNSGYDMPQVGFGLWKVDNAVCADTVYNAIKAGYRLFDGACDYGNEKECGEGVARAIKDGLVKREDLFIVSKLWQTFHDEDKVEPITRRQLADWQIDYFDLFLVHFPAALEYVDPSVRYPPGWFYDGKSEVRWSKTTTLQQTWGAMERLVDKGLARSIGVSNYQAQSVYDALIYARIKPATLQIEHHPYLQQPDLVSLAQTEGIVVTAYSSFGPTGFMELDMPRAKSVAPLMDSPVIKALADKHRRTPAQVLLRWATQRGIAVIPKTSRPEVMAQNLDNTSFDLDSEDLAKIADMDLNIRFNKPTNYFSANKLYLFG

SEQ ID NO: 8062 - protein, 469 aa, Clostridium acetobutylicum ATCC 824
MKFPKDFFLGAASASYQVEGAWNEDGKGVSNWDVFTKIPGKTFEGTNGDVAVDHYHRYKEDVKLMAEMGLDSYRFSVSWPRIIPDGDGEINQKGIEFYNNLIDECLKYGIVPFVTLYHWDMPEVLEKAGGWTNKKTVDAFVKYAKACFEAFGDRVKRWITFNETIVFCSNGYLSGAHPPGITGDVKKYFQATHNVFTAHARSVIEYKKLKQYGEIGITHVFSPAFSVDDKEENKAAAYHANQYEITWYYDPILKGKYPEYVIKNIEKQGFLPDWTDEELNTLREAAPLNDFIGLNYYQPQRVIKNHDTGEKIERTRENSTGAPGNASFDGFYRTVKMDDKTYTKWGWEISPESLILGLEKLKEQYGDIKIYITENGLGDQDPIIEDEILDMPRIKFIEAHLRAIKEAISRGINLKGYYAWSVIDLLSWLNGYKKQYGFIYVDHKHNLDRKKKLSFYWYKKVIEERGKNI

SEQ ID NO: 8063 - protein, 1281 aa, Neurospora crassa
MTDGPTLAAIAALVKSLAVDPATTQTSGLRPSTHVRLPGPYTREKGDLERELSALVVRIEQLETAAIAASPPAMPDTPNAPTDALFSNGTLSPSSETPDARYPAPLPRNGFIDEALEGLREHVDDQSKLLDSQRQELAGVNAQLIEQKQLQEKALAIIEQERVATLERELWKHQKANEAFQKALREIGEIVTAVARGDLSKKVRMNSVEMDPEITTFKRTINTMMDQLQVFSSEVSRVAREVGTEGILGGQAQIEGVDGTWKELTDNVNVMAQNLTDQVREIASVTTAVAHGDLTKKIERPAKGEILQLQQTINTMVDQLRTFASEVTRVARDVGTEGILGGQADVEGVQGMWNELTVNVNAMANNLTTQVRDIIKVTTAVAKGDLTQKVQAECRGEIFELKKTINSMVDQLQQFAREVTKIAREVGTEGRLGGQATVHDVQGTWRDLTENVNGMAMNLTTQVREIAKVTTAVAKGDLTKKIGVEVQGEILDLKNTINTMVDRLGTFAFEVSKVAREVGTDGTLGGQAQVDNVEGKWKDLTENVNTMASNLTSQVRGISTVTQAIANGDMSRKIEVEAKGEILILKETINNMVDRLSIFCNEVQRVAKDVGVDGIMGGQADVAGLKGRWKEITTDVNTMANNLTAQVRAFGDITNAATDGDFTKLVEVEASGEMDELKKKINQMVYNLRDSIQRNTQAREAAELANKTKSEFLANMSHEIRTPMNGIIGMTQLTLDTDLTQYQREMLNIVNSLANSLLTIIDDILDLSKIEARRMVIEEIPYTLRGTVFNALKTLAVKETEKFLDLTYRVDHSVPDHVVGDSFRLRQIILNLVGNAIKFTEHGEVSLTIQKASSVQCSTEEYAIEFVVSDTGIGIPADKLDLIFDTFQQADGSMTRKFGGTGLGLSISKRLVNLMGGDVWVKSEYGKGSKFFFTCVVRLANDDISLIAKQLNPYKSHQVLFIDKGRTGHGPEIAKMLHGLGLVPIVVDSERNPALEKARAAGQAPYDVIIVDSIEDARRLRSVDDFKYLPIVLLAPVVHVSLKSCLDLGITSYMTTPCQLIDLGNGMVPALENRATPSLADNTKSFEILLAEDNTVNQRLAVKILEKYHHVVTVVGNGEEAVEAVKRKKFDVILMDVQMPIMGGFEATAKIREYERSLGSQRTPIIALTAHAMMGDREKCIQAQMDEYLSKPLQQNHLIQTILKCATLGGQLLEKNRERELTRAADAVTGGRRDNGMYSASQAAQHAALRPPLATRGLTAADSLVSGLESPSIVTADKEDP

SEQ ID NO: 8064 - protein, 246 aa, Glycine max
MGRGKVELKRIENKINRQVTFAKRRNGLLKKAYELSVLCDAEVALIIFSNRGKLYEFCSGHSTAKTLERYHRCSYGALEVQHQPEIETQRRYQEYLKLKSRVEALQQTQRNLLGEELEHLDVNDLEQLERQLDSSLKQIRSNKTQQMLDQLSDLHRKEEMLLETNNILRNKLEEINVALQPTWEAREQNAPYNCHPPQTEGYYETATAHCSSTLRIGYDSSGLNEAGGAAGASAQNASEFMHGWMN

SEQ ID NO: 8065 - protein, 446 aa, Pyrus pyrifolia
MAIDIEQQQQPSPGLSKIAVSDTHGEDSPYFAGWKAYDENPYHESSNPSGVIQMGLAENQVSFDLLEKHLEENSEASNWGSKGSKGVSGFRENALFQDYHGLLSFRKAMASFMEQIRGGRAKFDPARVVLTAGATAANELLTFIIADPGDALLVPTPYYPGFDRDLRWRTGVNIVPIHCESSNNFQITPQALEAAYKEAEAKNMRVRGVLITNPSNPLGATIQRAVLEEILDFVTQKNIHLVSDEIYSGSAFSSSEFISVAEILEDRQYKDAERVHIVYSLSKDLGLPGFRVGTVYSFNDKVVTTARRMSSFTLISSETQHLLASMLSDKEFTGNYIKTNRERLRRRYDMIVEGLKKSGIECLKGNAGLFCWMNLSPFLDEPTRECELTLWDSMLHEVKLNISPGSSCHCSEPGWFRVCFANMSEQTLGIALTRIHNFMEKRERAC

SEQ ID NO: 8066 - protein, 154 aa, Quercus suber
MALSLFGGRRSNVFDPFSLDIWDPFEGFSAVASVPPSARETTAFATARIDWKETPEAHIFKADLPGLKKEEVKVEVEDGNVLQISGERSKEHEEKNDKWHRVERSCGKFMRRFRLPENAKVDQVKANMENGVLTVMVPKEEQKKPAVKAIEISG

SEQ ID NO: 8067 - protein, 547 aa, Escherichia coli
AAKDVKFGNDAGVKMLRGVNVLADAVKVTLGPKGRNVVLDKSFGAPTITKDGVSVAREIELEDKFENMGAQMVKEVASKANDAAGDGTTTATVLAQAIITEGLKAVAAGMNPMDLKRGIDKAVTVAVEELKALSVPCSDSKAIAQVGTISANSDETVGKLIAEAMDKVGKEGVITVEDGTGLQDELDVVEGMQFDRGYLSPYFINKPETGAVELESPFILLADKKISNIREMLPVLEAVAKAGKPLLIIAEDVEGEALATAVVNTIRGIVKVAAVKAPGFGDRRKAMLQDIATLTGGTVISEEIGMELEKATLEDLGQAKRVVINKDTTTIIDGVGEEAAIQGRVAQIRQQIEEATSDYDREKLQERVAKLAGGVAVIKVGAATEVEMKEKKARVEDALHATRAAVEEGVVAGGGVALIRVASKLADLRGQNEDQNVGIKVALRAMEAPLRQIVLNCGEEPSVVANTVKGGDGNYGYNAATEEYGNMIDMGILDPTKVTRSALQYAASVAGLMITTECMVTDLPKNDAADLGAAGGMGGMGGMGGMM

SEQ ID NO: 8068 - protein, 353 aa, Oryza sativa (indica cultivar-group)
ESLVRAGELSWEVGMERYEVIKDIGSGNFGVAKLVRDVRTKELFAVKFIERGQKIDENVQREIMNHRSLRHPNIVRFKEVVLTPTHLAIVMEYAAGGELFERICSAGRFSEDEARFFFQQLISGVSYCHSMQICHRDLKLENTLLDGSIAPRLKICDFGYSKSSLLHSQPKSTVGTPAYIAPEVLARKEYDGKVADVWSCGVTLYVMLVGAYPFEDPDEPRNFRKTITRILSVQYMVPDYVRVSMECRHLLSRIFVANPEQRITIPEIKNHPWFLKNLPIEMTDEYQMSVQMNDINTPSQGLEEIMAIIQEARKPGDGSKFSGQIPGLGSMELDDVDTDDIDVEDSGDFVCAL

SEQ ID NO: 8069 - protein, 546 aa, Brucella suis 1330
MAAKDVKFGRTAREKMLRGVDILADAVKVTLGPKGRNVVIDKSFGAPRITKDGVSVAKEVELEDKFENMGAQMLREVASKTNDTAGDGTTTATVLGQAIVQEGAKAVAAGMNPMDLKRGIDLAVNEVVAELLKKAKKINTSEEVAQVGTISANGEAEIGKMIAEAMQKVGNEGVITVEEAKTAETELEVVEGMQFDRGYLSPYFVTNPEKMVADLEDAYILLHEKKLSNLQALLPVLEAVVQTSKPLLIIAEDVEGEALATLVVNKLRGGLKIAAVKAPGFGDRRKAMLEDIAILTGGQVISEDLGIKLESVTLDMLGRAKKVSISKENTTIVDGAGQKAEIDARVGQIKQQIEETTSDYDREKLQERLAKLAGGVAVIRVGGATEVEVKEKKDRVDDALNATRAAVEEGIVAGGGTALLRASTKITAKGVNADQEAGINIVRRAIQAPARQITTNAGEEASVIVGKILENTSETFGYNTANGEYGDLISLGIVDPVKVVRTALQNAASVAGLLITTEAMIAELPKKDAAPAGMPGGMGGMGGMDF

SEQ ID NO: 8070 - protein, 337 aa, Yersinia pestis CO92
MKTLGEFIVEKQLDFSHATGELTALLSAIKLGAKIIHRDINKAGLVDILGASGVSNIQGEDQMKLDLFANEKLKAALKARGEVAGIASEEEDDIVIFDGGRAENAKYVVLMDPLDGSSNIDVNVSVGTIFSIYRRITPFGTPITEEDFLQPGTKQVTAGYVVYGSSTMLVYTTGYGVHAFTYDPSLGVFCLSHEKVRYPATGCMYSINEGNYIKFPLGVKKYIKYCQEQDEATKRPYTSRYIGSLVADFHRNLLKGGIYIYPSTASHPQGKLRLLYECNPMAFLAEQAGGKATDGVNRILDIVPEKLHQRAPFFVGTKSMVEDAEGFIAKFPDEEAK

SEQ ID NO: 8071 - protein, 242 aa, Syringa vulgaris
  misc_feature (188)..(188): Xaa can be any naturally occurring amino acid
LVQLRRMENKINRQVTFSKRRNGLLKKAYELSVLCDAEVGLIIFSSRGKLYEFGSAGMTATLERYQRCCFNPQNAGAGAERETQSWYQEVSKLKAKYESLQRTQRHLLGEDLGPLNVKELENLEKQLEGSLSQARQRKTKIMMEQMEDLRRKERQLGEMNKQLKIRVSLELSSHETEGQGLRGFPCQXNAAASAGTSNFMAQPGTNPMEFEPEPVLQMGYHHYNLGEGPLFQDHGYRSFDLF

SEQ ID NO: 8072 - protein, 169 aa, Brassica napus
  misc_feature (12)..(12): Xaa can be any naturally occurring amino acid
  misc_feature (139)..(139): Xaa can be any naturally occurring amino acid
RPRVRDRIGVCXGVFRTDKIKDEDIVKLVDQFPGQSIDFFGALRARVYDDEVRKFVEGLGVEKIGKRLVNSREGPPKFEQPEMTLDKLMEYGNMLVMEQENVKRVQLADQYLNEAALGDANADAIGRGTFYGKAAQQVXLPVPEGCTDPAAKNFDPTARSDDGTCVYTF

SEQ ID NO: 8073 - protein, 203 aa, Tradescantia virginiana
  misc_feature (199)..(199): Xaa can be any naturally occurring amino acid
LCDAEVGVIIFSNRGKLYEFCSGPSMMKTLERYEKSCFAGPDQNTQVKENQLVHSSRQEYLKLKARLDTLQRSQRNLLGEDLGSLSVKELDYLEKQLEMSLTEVRSTRTQQMLDQLTDLQRRESQLCDANKFLRKRLEELYQANGEQVWQIVPICHLTRHKTLRHVFFHPLECPPPTLQIGYDQSEQMPGPSVSNFMPXWMLC

SEQ ID NO: 8074 - protein, 727 aa, Xanthomonas campestris pv. campestris str. ATCC 33913
MTYNVSASLKAGLLALVLTTPMALLARADTALPAAATPEQATATKLVYGLLSDSRYAYRPRTLDEAMSKDVFKRYLETLDGGKQFFTQADVDAFAPLQAGVGDALRGGNLEPAFQVFSVYKKRVDQRVKYARELLKQDFDFTGSEKFEYDRKDVPWAADDKQLDVLWRQSVMNDWLRLKLAGKKSDDIRKTLDKRYATLADSVNELKGEDAFQFFLNAYTNAVDPHTDYFTPRTAETFNQQMSLSLEGIGAQLQKQDDMVVIREVIPGGPAAVDGTLKPGDRIVGVGQAKSGAIEDVIGWRIDDVVAKIRGSKDTQVRLEYIPAELGIDGTHRTVTLTRQKVRLAEQAAKGETITLPASGDVPQRRIGIIKLPGFYQDFEGRRRNAADYASATRDVAKLLAGFKSDKVDGVVLDLRNNGGGSLDEAIELTGLFIEQGPVVQVRESGGRVTVNGDSNPKVAWDGPLGVLINRGSASASEIFAGAIQDYGRGLVIGETTFGKGTVQNIVDLDRWPAAEGQRYGQVKLTIAQFFRVSGSSTQHKGVVPDIAFPASVDATEFGESTYDNALPWTRIAAVPHTQYGNFAPLLPKLQTLHATRIASDKEFQWWEEDVKQFRDEKAKKYISLNEAERVAERQKQDQQRKDRQQVRKQLGLPLDPLADDSDDGLTGNERDIVKDTAREKAAEKRPDPLLHESAAILADALGLLSKDQPLSAQVLPQSTAPGRWAD

SEQ ID NO: 8075 - protein, 241 aa, Tradescantia virginiana
  misc_feature (228)..(228): Xaa can be any naturally occurring amino acid
VQLKRMENKINRQVTFSKRRGGLLKKAHEISILCDAEIALIIFSTKGKLYEYATNSKMDNILERYERYSYAEKALTSSDPDIQGNWCQEYAKLKSKVEALCKSQRHLMGEQLETLNLKELQQLEQQLEGSLKHVRSRKTQVMLDSISELQRKEKSLEEQNKNLEKEILEKQKIKALAQQAHWEHQNQPAPRGSPPRPFVIAESHPTLNIGHFQGRTNAVEAEENQQPXMRICSSLLPPWML

SEQ ID NO: 8076 - protein, 222 aa, Tradescantia virginiana
  misc_feature (11)..(11): Xaa can be any naturally occurring amino acid
  misc_feature (218)..(218): Xaa can be any naturally occurring amino acid
  misc_feature (221)..(221): Xaa can be any naturally occurring amino acid
GLVKKAHEISXLCDAEVALIIFSTKGKLYEYATDSKMENILERYERYSYAEKALTSSDPELQGNWCQEYVKLKAKVEALHKSQRHLMGEQLEALDLKELQQLEHQLEGSLRLVRSRKTQMMLDSISELQRKEKSLEEQNKNLEKEILEKQKEKALAHQAHWEQQNQPLQSTNSPPRPFVIAETHPTLNIGNFQGRTNTVHAEESLQRQMRISSSLLPXWMXH

SEQ ID NO: 8077 - protein, 525 aa, Sandersonia aurantiaca
MCGILAVLGCSDDSQAKRVRVLELSRRLKHRGPDWSGLDHHGDCYLAHQRLAIIDPASGDQPLYNEDKTIIVTVNGEIYNHEELRKGLPGHTFRTGSDCEVIAHLYEEHGESFIHMLDGIFSFVLLDSRNNSFVAARDAIGVTPLYIGWGLDGSVWISSEMKGLNDDCEHFKFFPPGHLYSSKEGSFKRWYNPPWFSEVIPSVPFDPLALRKAFEDAVIKRLMTDVPFGVLLSGGLDSSLVASVTARYLEGTKAAELWGTQLHSFCVGLEGSPDLKAAKEVANFLGTIHHEFHFTVQDGIDAIEDVIYHVETYDVTTIRASTPMFLMSRKIKSLGVKMVISGEGSDEIFGGYLYFHKAPNKEELHLETCHKIKALHQYDCLRANKATSAWGLEARVPFLDKEFVNVAMSIDPEWKMIKPDIGRIEKWILRRAFDDEENPYLPKHILYRQKEQFSDGVGYSWIDGLKAHSALHVTDKMMLNAAHIYPHNTPTTKEAYYYRMIFERFFPQIDSPWRSKCGLQHSKSY

SEQ ID NO: 8078 - protein, 370 aa, Triticum aestivum
MSNAASATPLLAPYKMGKFDLSHRVVLAPLTRERSFGNVPQPHAVLYYQQRATKGGLLIAEATGVSDTAQGYKDTPGIWTKKQVEAWKPIVDGVHAKGGIFFCQIWHVGRVSNHAFQPNGQAPISSTDKPIKPATRADGIGLAKVSTPRRLETDEIPLVIDDFRVAARNAIEAGFDGVEIHGAHGYLIDQFLKDQVNDRTDKYGGSLENRCRFALEVVQAVADEIGADKVGIRLSPFASYSEASDSNPEALGLYMAQALNKLGILYCHMVEPRMVNIGEKLETPHSLRPMRDAFKGTFIVAGGYGRDDGDKAIADGYADLVAYGRLFLSNPDLPRRFEMDGPLNKYNRDTFYLSDPVIGYTDYPFLPSDV

SEQ ID NO: 8079 - protein, 71 aa, Triticum aestivum
QFFFWVCGQVAFQIFSGMRLGNLYCDPLMVHGGHKITARQRWTPTQMQLQILESIFDQGNGTPSKQKIKDI

SEQ ID NO: 8080 - protein, 265 aa, Neurospora crassa
MHIKSIPMSGTGSSDNYAYLVVDDKSKDAVIIDPAHPEEVAPVLKKAIDDGSIKLTAIVNTHHHWDHAGGNTKLRTALGLPNLEIIGGKDCEKVNKVPAHGQGFNIGNIAVKALHTPCHTQDSICWFMQDGDDKVVFTGDTLFHGGCGRFFEGNGAEMHKALNETLASLPDETRVFYLTYPMKPGHEYTKSNAKFCMSVLQSEAVKALQAFAEKHRETQGKFTIGDEKKHNVFMRPHDPEIQKATGETDPVAIMTKLREMKNNFK

SEQ ID NO: 8081 - protein, 183 aa, Triticum aestivum
  misc_feature (105)..(105): Xaa can be any naturally occurring amino acid
  misc_feature (141)..(141): Xaa can be any naturally occurring amino acid
MATSSGPKEAPANNPGLQTEVDPATKGYFLQQTMLRVKDPKVSLDFYSRVMGMSLLKRLDFEEMKFSLYFLGYEDVTLAPDDHIKRTEWTFRQKATLELTHNWGXTENDPEFKGYHNGNSDPRGFGHIGVTVDDVHKACEXFERLGLICEEPDDGKSKALHRPDGTDSYLPDIGTSQHMMTGS

SEQ ID NO: 8082 - protein, 294 aa, Arabidopsis thaliana
MAAPIRFFELNTGAKLPCVGLGTYAMVATAIEQAIKIGYRHIDCASIYGNEKEIGGVLKKLIGDGFVKREELFITSKLWSNDHLPEDVPKALEKTLQDLQIDYVDLYLIHWPASLKKESLMPTPEMLTKPDITSTWKAMEALYDSGKARAIGVSNFSSKKLTDLLNVARVTPAVNQVECHPVWQQQGLHELCKSKGVHLSGYSPLGSQSKGEVRLKVLQNPIVTEVAEKLGKTTAQVALRWGLQTGHSVLPKSSSGARLKENLDVFDWSIPEDLFTKFSNIPQASSFIFLFFSR

SEQ ID NO: 8083 - protein, 290 aa, Arabidopsis thaliana
MAAPIRFFELNTGAKLPCVGLGTYAMVATAIEQAIKIGYRHIDCASIYGNEKEIGGVLKKLIGDGFVKREELFITSKLWSNDHLPEDVPKALEKTLQDLQIDYVDLYLIHWPASLKKESLMPTPEMLTKPDITSTWKAMEALYDSGKARAIGVSNFSSKKLTDLLNVARVTPAVNQVECHPVWQQQGLHELCKSKGVHLSGYSPLGSQSKGEVRLKVLQNPIVTEVAEKLGKTTAQVALRWGLQTGHSVLPKSSSGARLKENLDVFDWSIPEDLFTKFSNIPQAKVLPSY

SEQ ID NO: 8084 - protein, 122 aa, Brassica napus
MSLIPSFFGGRRTNVFDPFLLDLYDPFEGFLTPSGMTNAPSKDVAAFTNAKVDWRETPEAHVFKADLPGLKKEEVKVEVEDGHILQISGERSSENEEKSDKWHRVERSSGKFMRGVKLPENA

SEQ ID NO: 8085 - protein, 724 aa, Solibacter usitatus Ellin6076
MTGEEIEAIVNGYHGDAFGILGPHSVRKKNGNPRWEVRAFLPQADSAVVLAGTTRYDMEKRHTQGFFVAAMDGDSVPYVIRARLWDGREIEIVDPYRFGPQISDSDLYLHTEGTLNEAWRSLGAHLVTTEGASGVRFAVWAPNAENVTVAGEFNDWDVRRHPMRRRNGGVWELFIPGLTQGTAYKYNIRSRFAGYQQLKADPYAFYCEHPPKSASVVWGLDNYQWQDQEWMETRAAHDLLKSPMAVYEVHLGSWMRGPMGQVLTYRDLAVKLVEYVKQMGYTHVELLPPMEHPFSGSWGYQIIGYFAPTSRFGTPDDFKFFIDAFHRAGIGVIVDWVPAHFPKDAHGLVFFDGTALYEHADPRKGEQQDWGTLVFNYGRNEVRTFLISNALFWLKEMHIDGLRVDAVASMLYLDYSRKAGEWIPNQYGGNENLEAIDFLRQFNVVAHSVPGAFTVAEESTAFAGVSKPVYLNGLGFTMKWNMGWMHDMLDYFSNDPIYRKYHHNSITFSLLYAFTENFVLPVSHDEVVHGKGSLLNKMPGDEWRQFANARAFLAYMWVHPGKKLLFMGQEIGQREEWNHDQGIRWELLQFDLHRQLQSLMRELNRVYKANPALYEIDFHYTGFEWVDFHDGANSIIAFLRRAEDPDDFILVCCNFTPVPRQGYEFGVPEEGFYQEILNTDSEYFGGTNMGNGGCLSSRPIAKHNRSHSIAVTLPPLAVVAFKKC

SEQ ID NO: 8086 - protein, 223 aa, Glycine max
MSQESFIYSFVARGTMVLAEYTEFTGNFPAIAAQCLQKLPSSNNKFTYNCDHHTFNFLVEDGYAYCVVAKESVSKQISIAFLERVKADFKKRYGGGKADTAIAKSLNKEFGPVMKEHMKYIIDHAEEIVKLIKVKAQVSEVKSIMLENIDKALDRGENLTILADKTEALRSHAQDFRKQGTQVRRKMWYQNMKIKLVVLGILLVLVLVIWLSICGGFDCTNWQ

SEQ ID NO: 8087 - protein, 547 aa, Pseudomonas syringae pv. phaseolicola 1448A
MAAKEVKFGDSGRKKMLAGVNVLADAVKATLGPKGRNVIIEKSFGAPLITKDGVSVAKEIELKDRFENMGAQLVKDVASRANDDAGDGTTTATVLAQAIVNEGLKAVAAGMNPMDLKRGIDKATIAIVAELKKLSKPCTDTKAIAQVGTISANSDHSIGDIIAEAMEKVTKDGVITVEEGSGLENELSVVEGMQFDRGYLSPYFINKPDTMVAELDSPLLLLVDKKISNIREMLPVLEAVAKAGRPLLIVAEDVEGEALATLVVNNMRGIVKVAAVKAPGFGDRRKAMLQDIAVLTGGTVISEEVGLSLETTTLEHLGNAKRVILNKENTTIIDGAGVKTDIDSRISQIRQQIGDTSSDYDKEKLQERLAKLSGGVAVIKVGAGSEVEMKEKKARVEDALHATRAAVEEGVVPGGGVALVRSLQAIEGLKGDNADQDVGIALLRRAVEAPLRQIVANSGDEPSVVVDKVKQGSGNFGYNAASGEYGDMIEMGILDPAKVTRSALQAASSIASLMITTEAMIADVPEDKPAGGGMPDMGGMGGMGGMM

SEQ ID NO: 8088 - protein, 546 aa, Burkholderia pseudomallei K96243
MAAKDVVFGDSARAKMVEGVNILANAVKVTLGPKGRNVVLERSFGGPTVTKDGVSVAKEIELKDKLQNMGAQMVKEVASKTSDNAGDGTTTATVLAQSIVREGMKYVASGMNPMDLKRGIDKAVAAAVEELKKISKPCTTNKEIAQVGAISANSDSSIGDRIAEAMDKVGKEGVITVEDGKSLADELDVVEGMQFDRGYLSPYFINNPDKQVAVLENPFVLLHDKKVSNIRDLLPVLEQVAKAGRPLLIIAEDVEGEALATLVVNNIRGILKTVAVKAPGFGDRRKAMLEDIAILTGGQVIAEETGLTLEKATLAELGQAKRIEVGKENTTIIDGAGEAVNIEARVKQIRTQIEEATSDYDREKLQERVAKLAGGVAVIKVGAATEVEMKEKKARVEDALHATRAAVEEGIVPGGGVALIRARTAIAGLTGVNADQNAGIKIVLRAMEEPLRQIVTNGGEEASVVVAAVAAGKGNYGYNAATGEYVDMVEAGVVDPTKVTRTALQNAASVAGLLLTTDAAVAELPKEDAPMPGGMPGGMGGMGMDM

SEQ ID NO: 8089 - protein, 473 aa, Pyrus pyrifolia
MRMLSRNATFNSHGQDSSYFLGWQEYEKNPYHEVHNTNGIIQMGLAENQLCFDLLESWLAKNPEAAAFKKNGESIFAELALFQDYHGLPAFKKAMVDFMAEIRGNKVTFDPNHLVLTAGATSANETFIFCLADPGEAFLIPTPYYPGFDRDLKWRTGVEIVPIHCTNSNGFQITETALEEAYQEAEKCNLRVKGVLVTNPSNPLGTTMTRNELYLLLSFVEDKGIHLISDEIYSGTAFSSPSFISVMEVLKDRNCDENFEVWQRVHVVYSLSKDLGLPGFRVGAIYSNDDMVVAAATKMSSFGLVSSQTQHLLSAMLSDKKLTKNYIAENHKRLKQRQKNLVSGLQKAGISCLNGNAGLFCWVDMRHLLRSNTFEAEMELWKKIVYEVHLNISPGSSCHCTEPGWFRVCFANLPERTLDLAMQRLKAFVGEYYNVPEVNGRSQSSHLSHSRGQSLTKWVSRLSFDDRCPIHGR

SEQ ID NO: 8090 - protein, 691 aa, Yarrowia lipolytica CLIB122
MTLQVCKDDPWLKPFEEELLRRQALVGQWKDHFAKEGGLAEFAASYKRYGLHVNKDNSVTYREWAPGASEAVLTGDFNGWDRQQYHMTRDEYGLWSVTVPPTSDGQVAIPHNSKVKLALKTSNGQWVDRLPAWSTYVVQDLSKSPIYEAVFWNPPESEKYQWKNKSPPTPANAQIYEAHVGISSSEPRVGTYKEFTKNILPRIHKLGYNVIQLMAIMEHAYYASFGYQVTSFYAISSRYGTPEDLKELIDTAHGMGITVLLDVVHSHACKNVDDGLNNFDGTDHQYFHGGAKGDHPQWDSKLFDYGKYEVLRFLLSNLRFYIEEYHFDGFRFDGVTSMLYKHHGLGTGFSGGYHEYFGDEHVDQQAVVYLMLAHELMRELQPLLRPGEDAGNFLSIAEDVSGMPALCRPVSEGGVGFDYRLAMAIPDMWIKLVKETRDEDWDMGNIVFTLTNRRHREKTIAYAESHDQALVGDKTLAFWLMDKEMYTSMSVLSDPNPIIDRGIALHKMIRLITHSLGGEGYLNFEGNEFGHPEWLDFPREGNGSSFHYCRRQWPVVDDKLLRYQHLNEFDAAMQHRGDHYGWLSADQAYVSLKNEDDKVVVYERAGLVFVFNFHPNKSFTDYRIGVDQPGTYTLVLDSDSPEFGGFGRIDHEKTRCHTEPLEWNGRANCMHIYIPSRVALVFAREDDPRRK

SEQ ID NO: 8091 - protein, 372 aa, Ralstonia metallidurans CH34
MTSTSNPLFQPYSLGPLSLPNRIVMPPMTRSRASQPGDVPNALMAEYYAQRASAGLIVSEGTWISPLGRGYAWTPGIHTPEQVAGWRKVTTAVHQAGGRIFAQLWHVGRLSHISLLDGHAPVSSSAIQAQGVNVFVAQSDGKPGFAQASQPRALSVEEIHAIVDDFRQAARNAMAAGFDGVELHAANGYLVNQFIDSGANDRTDEYGGSLENRLRFLGEVAQALIEGTGGKDRVGIRLAPLTTLNGCVDADPETTYTAAARLLGEIGVGYIHIAEADWEDAPHMPTAFKQQLRKVYPGTLIYAGKYTAARAQAALHEGWADLIAFGRPFVANPDLPERLRTGATLNAHDRDTLFGGDARGLTDYPPLVAKAA

SEQ ID NO: 8092 - protein, 447 aa, Arabidopsis thaliana
MDSSNVEENLNPETKSAEEQNPLAIFHSSLPIASLSLTLFPSSTQFLKLFAHHPNKVKIPTQASSLTHLSLSSVSPFPSSRISFKSTIAANPLQSPLSIVPRRPVDPSSAAALRRAAVVWFRNDLRVHDNECLNSANDECVSVLPVYCFDPRDYGKSSSGFDKTGPFRAQFLIESVSELRKNLQARGSNLVVRVGKPEAVLVELAKEIGADAVYAHREVSHDEVKAEGKIETAMKEEGVEVKYFWGSTLYHLDDLPFKIEDLPSNYGAFKDKVQKLEIRKTIAALDQLKSLPSRGDVELGDIPSLLDLGISPTPRTSQEGKPTMVGGETEALTRLKSFAADCQARLSKGNQKGGNNSVFGANFSCKISPWLAMGSISPRSMFDELKKTISASTTSTTPRNGPGDTGLNWLMYELLWRDFFRFITKKYSSAKTQVEAGPATACTGAFA

SEQ ID NO: 8093 - protein, 235 aa, Tradescantia virginiana
VQLKRMENKINRQVTFSKRRTGLLKKAHEISVLCDAEVGLIIFSTKGKLYEYSTDNSMAKILERYDRYATAERAVLEANLNLEVGSHYEYRKIKAKVDALQKSQRHLMGEQLDTMTNKELQQLEQQLETALKHIRSRKNQMMLESVAALQKKEKALREQKSILEKKLIEKQKDMEISQIHQYQAHEDNTSPTSLVLTNSLPTTLNTNGCITHAIEEEHAPTLPHTNNNNLPPWMV

SEQ ID NO: 8094 - protein, 201 aa, Aspergillus niger
MNPEYDYLFKLLLIGDSGVGKSCLLLRFADDTYTESYISTIGVDFKIRTIELDGKTVKLQIWDTAGQERFRTITSSYYRGAHGICVVYDVTDMDSFNNVKQWLQEIDRYATEGVNKLLVGNKSDMEDKKVVEYTVAKEFADSLGIPFLETSAKNASNVEQAFLTMARQIKERMGTATVNNKPTVQVGQGQGVQSGSAGGCC

SEQ ID NO: 8095 - protein, 345 aa, Sulfolobus solfataricus P2
MIFKIIHLMIEIDGSFGEGGGQILRTSLTLSVITGKPFRIFNIRANRPNPGLQRQHLWAVRAMKMISNAETKGDEVGSKELTFIPHEIKGNSIIDIDIGTAGSVTLIMQTMIPAIINKNMRIKIKGGTDVPKSPTIDYIRLVYLEILRKIGIESKVNLIKRGHYPEGGGEVIIENVNGNPSDFSLLELGKLIMIKGISHVSSLPSHIAERQKDSAKAILSKLGVQIEIETDVRQGEVSKGSGIALAAIGEKSIIGADSLGERGKRAEIVGEEAARKLIDNLNTKAAVDVHMSDMLMIFTSLFGGEYIGAELTSHAYTNMEIIRKFLDVKIEISGKRPFRFKAKIF

SEQ ID NO: 8096 - protein, 205 aa, Gibberella zeae PH-1
MSSRKKVLLKVIILGDSGVGKTSLMNQYVNKKFSASYKATIGADFLTREVLVDDRQVTMQLWDTAGQERFQSLGVAFYRGADCCVLVYDVNNAKSFEALDSWRDEFLIQASPRDPPNFPFVVLGNKIDVEESKRVISNKRAMTFCQSKGDIPYFETSAKEAINIDQAFEVIARNALAQEESEEFSGDFDDPINIHIENDRDGCAC

SEQ ID NO: 8097 - protein, 500 aa, Triticum aestivum
MDAAGRDANPLAGYRIGKTLGIGSFGKVKIAEHIITGHKVAIKILNRRKIKSMEMEEKVKREIKILRLFMHPHIIRLYEVIDTPADIYVVMEYVKSGELFDYIVEKGRLQEEEARRFFQQIISGVEYCHRNMVVHRDLKPENLLLDSKCNVKIADFGLSNVMRDGHFLKTSCGSPNYAAPEVISGKLYAGPEVDVWSCGVILYALLCGTLPFDDENIPNLFKKIKGGIYTLPSHLSPLARDLIPRMLVVDPMKRITIREIREHSWFKARLPRYLAVPPPDTAQQVKKLDDETLNDVIKMGFDKNQLTESLQKRLQNEATVAYYLLLDNKLRTTSGYLGAEYQESMDSSFSQVSPETPSSASEARQYGSPGFGLRHHFAAERKWALGLQSRAHPREIITEVLKALQELNVCWKKIGHYNMKCRWSPGFVETMMHNNNGFGVESAIIEADGLSDKSTHIVKFEIQLYKTRDEKYLLDLQRVSGPQLLFLDLCSAFLTQLRVL

SEQ ID NO: 8098 - protein, 226 aa, Paeonia suffruticosa
SQVTFSKRRGGLLKKAHEISVLCDAEVALIVFSTKGKLFEYSTDSSMEKILDRYEQYSIAERQLVEEPGSQGNWSLEYSKLRAKIELLQRNQRRFMGEDLDSLSPKDLQNMEQQLDVSLKNIRSRKNQLMYESISELQKKERAIQEQNNLLAKQIKEKEKTMAQQAQWEQQIHHGPNASAYLLSPHELTTLNMGGNYQGEPTEMRRNELDLTLEPIYTCHLGCFGA

SEQ ID NO: 8099 - protein, 429 aa, Malus x domestica
MLSRNATFNSHGQDSSYFLGWQEYEKNPYHEVHNTNGIIQMGLAENQLCFDLLESWLAKNPEAAAFKKNGESIFAELALFQDYHGLPAFKKAMVDFMAEIRGNKVTFDPNHLVLTAGATSANETFIFCLADPGEAVLIPTPYYPGFDRDLKWRTGVEIVPIHCTSSNGFQITETALEEAYQEAEKRNLRVKGVLVTNPSNPLGTTMTRNELYLLLSFVEDKGIHLISDEIYSGTAFSSPSFISVMEVLKDRNCDENSEVWQRVHVVYSLSKDLGLPGFRVGAIYSNDDMVVAAATKMSSFGLVSSQTQHLLSAMLSDKKLTKNYIAENHKRLKQRQKKLVSGLQKSGISCLNGNAGLFCWVDMRHLLRSNTFEAEMELWKKIVYEVHLNISPGSSCHCTEPGWFRVCFANLPERTLDLAMQRLKAFVGE

SEQ ID NO: 8100 - protein, 253 aa, Cytophaga hutchinsonii
MTGTAWPIIIFFVAHWYLSLFSQTFFLHRYSAHAMFKMNKFWEKFFFIFLYLTQGSSYLVPRAYGALHRMHHAYSDTEKDPHSPLYSRNAFVMMWKTKDIYNAVLRREAQVEDKFNKNLPEWAFIDNIGDMWISRIIWGTLYVLFYIYFVPADMWYLYLLLPIHFLMGPVHGAIVNWFGHKLGYQNFDNKDASRNTLALDVLLGGELFQNNHHMYGSRPNFAMKWFEFDPTYPVIKVLHYVRIIRLVNPDAKA

SEQ ID NO: 8101 - protein, 355 aa, Craterostigma plantagineum
MEKYELVKDIGSGNFGVARLMRNKETKELVAMKYIERGHKIDENVAREIINHRSLRHPNIIRFKEVVLTPTHLAIVMEYAAGGELFERICNAGRFSEDEARYFFQQLICGVHYCHALQICHRDLKLENTLLDGSPAPRLKSCDFGYSKSSLLHSRPKSTVGTPAYIAPEVLSRREYDGKLADVWSCGVTLYVMLVGAYPFEDQEDPFFFRKTILWIMAVQYKIPDYVRISQSCRHLLSRIFVANPLRRITIKEIKSHLWFLKNLPRELTEVAQAAYFRRDNPTYSLQSEEEIMKIVEEAKVPPQASRSIGGFGWGTEEDEENVEEEEEGESEGEEDEYEKQVKAAHASGEVPPLT

SEQ ID NO: 8102 - protein, 582 aa, Schizosaccharomyces pombe
MVSFLSSSVSRLPLRIAGRRIPGRFAVPQVRTYAKDLKFGVDARASLLTGVDTLARAVSVTLGPKGRNVLIDQPFGSPKITKDGVTVARSVSLKDKFENLGARLVQDVASKTNEVAGDGTTTATVLTRAIFSETVRNVAAGCNPMDLRRGIQLAVDNVVEFLQANKRDITTSEEISQVATISANGDTHIGELLAKAMERVGKEGVITVKEGRTISDELEVTEGMKFDRGYISPYFITDVKSQKVEFENPLILLSEKKVSAVQDILPSLELAAQQRRPLVIIAEDVDGEALAACILNKLRGQLQVVAIKAPGFGDNRRNMLGDLAVLTDSAVFNDEIDVSIEKAQPHHLGSCGSVTVTKEDTIIMKGAGDHVKVNDRCEQIRGVMADPNLTEYEKEKLQERLAKLSGGIAVIKVGGSSEVEVNEKKDRIVDALNAVKAAVSEGVLPGAGTSFVKASLRLGDIPTNNFDQKLGVEIVRKAITRPAQTILENAGLEGNLIVGKLKELYGKEFNIGYDIAKDRFVDLNEIGVLDPLKVVRTGLVDASGVASLMGTTECAIVDAPEESKAPAGPPGMGGMGGMPGMM

SEQ ID NO: 8103 - protein, 359 aa, Hydrogenophilus thermoluteolus
MSWAHTPTLTQYLIEERRRYPQASGDFNALILDMARACKAIARQVAYGALAKSNHAVTTTINVQGEEQKPLDVISNECFMRLTEWGGYLAAMASEEMDEPYLIPEQYPRGRYLLLFDPLDGSSNIDVNVSVGSIFSVLRAPEGKTEITVDDFLQPGTQQVAAGYAIYGPTTMLVLTVGRGVVGFTLDPDFGEFMLTHPNIRIPESTKEFAINTSNARFWEPPVKRYVDECLKGKTGPRGKDFNMRWVASLVAETHRILSRGGVFLYPRDNKEPKKPGRLRLLYECNPIGMIVEQAGGRASTGYGPVLEVQPTELHQRIGFVFGSREEVERIEQYHNDPDASPVDLPLFAERTLFRDETL

SEQ ID NO: 8104 - protein, 363 aa, Schizosaccharomyces pombe
MSTGQLKRFKGCEYLTHRLVLATLSGTPIRVEGIYPDEADPGVKDYQVSFLRLLEKLTNGSVIEISYTGTSFIYRPGNIIGGRVVHDCPTTKGIGYFLEPILILCLFAKTPTSLTLTGVTSSNEDIGVDVLRTSVLPSLQKRFQVGDELELRILKRGSAPGGGGEVNFLCPVIKESLPPIRLSEFGRVFRIRGIASSTRVSPAFANRLVESARGVLNPFIPDVFIYTDVRRGDECGNSPGYSITLVAETNKGCSYAAEHCGEAGETPEDVGSFCAKKLLEVIESGGCVDPYTQPSTLTGMLLSSEDVNTIVVGQLGITSQLVVFLRDVKALFNCEYRFKELESGQVEMSCLGKGYLNVNRRIQ

SEQ ID NO: 8105 - protein, 255 aa, Daucus carota subsp. sativus
MSFVDDQSGDLSLHERKSGRGKIEIKRIENTTNRQVTFCKRRNGLLKKAYELSVLCDAEVALIVFSNRGRLYEYANNSVRGTIERYKKANSDTPNTATVSEANTQYYQKEAARLRQQISNLQNSNRHLMGEALGAVPAKELKGLETKLQNGLSRVRSKKNELLFAEIEFMRKREIDLHNNNQYLRAKISENERAQQQMSLMPGASGSSEQYRDVGQPHESFDARNYLQVNGLQPNNANYSSHQDHQTQHVPLQLV

SEQ ID NO: 8106 - protein, 540 aa, Bradyrhizobium japonicum USDA 110
MAAKEVKFSTDARDRVLRGVDTLANAVKVTLGPKGRNVVIEKSFGAPRITKDGVTVAKEIELEDKFENMGAQMVREVASKTSDLAGDGTTTATVLAQAIVKEGAKSVAAGMNPMDLKRGIDLAVEAIVNDLKAHAKKVTTNEEIAQIATISANGDIEIGRFLADAMQKVGNDGVITVEEAKSLDTELEVVEGMQFDRGYASPYFVTNAEKMRVEFEDPYILIHEKKLSTLQSMLPLLEAVVQSGKPLLVVAEDVEGEALATLVVNRLRGGLKVAAVKAPGFGDRRKAMLEDIAILTGGQAISEDLGIKLENVTLKMLGRAKKVVIDKENTTIVNGAGSKKDIEARVTQIKMQIEETTSDYDREKLQERLAKLAGGVAVIRVGGATEVEVKERKDRVDDAMHATRAAVEEGILPGGGVALLRGLKALDAIKTVNADQKAGVDIVRRAIQVPARQIVQNAGEDGSLVVGKLLENSSYNWGFNAASGEYQDLAKAGVIDPAKVVRTALQDAASVAALLITTEALIAEKPKKSEPAPAAPPMDF

SEQ ID NO: 8107 - protein, 484 aa, Proteus mirabilis
  misc_feature (53)..(53): Xaa can be any naturally occurring amino acid
MEKKKLTTAAGAPVVDNNNVITAGPRGPMLLQDVWFLEKLAHFDREVIPERRXHAKGSGAFGTFTVTHDITKYTRAKIFSEVGKKTEMFARFSTVAGERGAADAERDIRGFALKFYTEEGNWDMVGNNTPVFYLRDPLKFPDLNHIVKRDPRTNMRNMAYKWDFFSHLPESLHQLTIDMSDRGLPLSYRFVHGYGSHTYSFINKDNERFWVKFHFRCQQGIKNLMDDEAEALVGKDRESSQRDLFEAIERGDYPRWKLQIQIMPEKEASTVPYNPFDLTKVWPHADYPLMDVGYFELNRNPDNYFSDVEQAAFSPANIVPGISFSPDKMLQGRLFSYGDAHRYRLGVNHHQIPVNAPKCPFHNYHRDGAMRVDGNSGNGITYEPNSGGVFQEQPDFKEPPLSIEGAADHWNHREDEDYFSQPRALYELLSDDEHQRMFARIAGELSQASKETQQRQIDLFTKVHPEYGAGVEKAIKVLEGKDAK

SEQ ID NO: 8108 - protein, 283 aa, Nocardia farcinica IFM 10152
MTFRSETSAVPSIVLNDGNVIPQLGFGVFQVPPDDVFDVVTTALRAGYRSIDTAAVYGNEEGTGRAIRAFGLPRDEVYVTTKLWNSEQGYDSTLRAFDDSMSKLGLDYLDLYLIHWPVAAAGKFVDTFRAFQELKRQGRVRSIGVSNFTVDNLRTLIAETGEIPAVNQIELHPALAQRELREFHAENAIATEAWSPLGQGTLLEDATITRIAQEVGRTPAQVIIRWHLQLGNVVIPKSVTPARIEANFDVFGFELSREQMAAIDGLDRGGRIGPDPDTFSAGL

SEQ ID NO: 8109 - protein, 847 aa, Aspergillus nidulans FGSC A4
MASNILQIPFRRSHTVSLSTALTQYISTKYDQRPDMFADDLLIIDRLRNEAINVQEPHVSGISRLVTYAAQLKWLGGKFPVDVGVEFPWYPAFGFNTSRPVSQDNIRFELANVIFNLAALYSQLAFAVNRTTTDGLKQACNYFCQAAGILAHLRTDIVPDMRSAPPEDMDEMTLRSLEELLLAQAQECFWQKAVMDGLKDASIARLAGQVSDFYGDACDHAVKSNAISPEWIHHMTAKQHHFAAAAQYRQSLDCLEKRKYGEEVARLRDAVACVNEALKESRWINRTVLGDLQGLKNRVTEDLKRAEKDNDMIYLNPVPPKSELKLIDRACMVAAKAPSQVTDAISMLGEKGPLGQPLFSKLVPYAVHIAASIYSDRRDRLVNERIIGELENMTDKLRDLLSSLNLPGSLQALEKPLGLPPSLVAHAEEMRQQDGLNRLRKSLLDIAKVKSNDRAVYTEGVELLAAEKAEDDASRRKFGTDRWTREASEAAAPKLYTTAREIDGYFTSAQSSDNLVEQKLHDSEAVFRVLTGTNRDLEAFVPSSRRATIPPEVEREVSRLRSCISEVNRLESRRKRKAQAVKDKARADDISSALVREAARLEREFPMQAIQASQFEDLFESRLRDYDVDLDMVAQEMHDQDQIVAQVRDANRAFTRAHTGDASTKEREKALQELENGYLKYKEIISNIEVGRKFYNDLAKIVGRFRDDVKAFVHKRRMEASQLEQDISSVAAMASLNISPIRQPPQQTVVSAPVSVSAAASVPAPTHFNPVKPQPQPPSQAIPPQSQPQPQPQPLRTPLTAPQPTRSVPQVTPGMWSPEMGIRFGPGGTTAQQSQQTWDPSKGMKFS

SEQ ID NO: 8110 - protein, 585 aa, Raphanus sativus
MCGILAVLGCSDDSQAKRVRVLELSRRLRHRGPDWSGIYQNGGNYLAHQRLAIIDPASGDQPLFNEDKSIVVTVNGEIYNHEELRKGLKNHKFHTGSDCDVIAHLYEEHGENFVDMLDGIFSFVLLDTRDNSFMVARDAVGVTSLYIGWGLDGSLWVSSEMKGLHEDCEHFEAFPPGHLYSSKSGGGFKQWYNPPWFNESVPSTPYEPLAIRRAFEDAVIKRLMTDVPFGVLLSGGLDSSLVASITARHLAGTKAAKRWGPQLHSFCVGLEGSPDLKAGKEVAEYLGTVHHEFHFTVQDGIDAIEDVIYHVETYDVTTIRASTPMFLMSRKIKSLGVKMVLSGEGSDEIFGGYLYFHKAPNKQEFHQETCRKIKALHKYDCLRANKATSAFGLEARVPFLDKEFINTAMSLDPESKMIKPEEGRIEKWVLRRAFDDEERPYLPKHILYRQKEQFSDGVGYSWIDGLKAHAAENVNDKMMSNAAYIFPHNTPLTKEAYYYRMIFERFFPQNSARLTVPGGATVACSTAKAVEWDASWSNNMDPSGRAAIGVHLSAYDGSKVALPLPPHKAIDDMPMMMGQEVVIQT

SEQ ID NO: 8111 - protein, 355 aa, Aspergillus nidulans FGSC A4
MTTNSTGNGGAVGQENINTDIVTLSRFFTEEQTKVPEATGDFTLLCHALQFSFKSIAYYIRRASLINLTGLAGSSNTTGDDQKKLDVIGNDLFVSAMRTSGKCRILVSEEEEEAIIFDEHPNARYAVVCDPIDGSSNLDAGVSVGTIFGIFRLPDDILGPGKKVTAKDVLLPGTEMVAAGFTMYGASAQLVITMKNGGVNGFTLENSLGEFILTHPNMKLPPSRAIYSVNEGNSMYWDDWCNAYFDSLKRPGEGKKPYSARYIGSMVADAYRTLLYGGVFAYPADSKSPKGKLRILYECAPMAMVFENAGGKAVNSRMERLLSVQPESIHDKSGVFLGSRDEVQKVIDTYNKYKK

SEQ ID NO: 8112 - protein, 473 aa, Claviceps purpurea
MASEVSVASSGSEHSGAQKCPFQDPGLSSMDQDSRLRDILSRFNREKIPERAVHARGAGAYGEFEVTHDVSDICDIDMLLGVGKKTPCVVRFSTTTLERGSAESVRDVKGMAIKHFTQDGNWDWVCLNIPMFFIRDPSKFPDMVHAQRPDPTTNVANPSRWWEFVCNNHETLHMVMFQFSDFGTMFDYRSMSGYAAHAYKWVMPDGSWKYVHWFLASDQGPNFETGHQAKQIGADDAESATRDLYQSLERGEYPSWTVKVQVVDPEDAPKLPFNILDVTKHWNLGNYPPDIDVIPGRTLGKLTLKKEPQDYFEEIEQLAFSPSRLVHGVEASEDPMLQARLFAYPDAQKHRLGPNNLDLPANRTKKFADGARPEKAEMAPQKVPSQEHADWVSQVKSSSWSEPNETDYKFPREFWKALPRLRGEAFQNSLVVNMAKSVSQVPVDMREKVYSTLALIADDLADRVRTMTEEIVE

SEQ ID NO: 8113 - protein, 1130 aa, Triticum aestivum
MSSSRAASSSSSRNRQSTQERVLAQTTLDAELNAEFEESSDSFDYSKLVEAQRDTPTVLQEGRSEKVIAYLQHIQRGKMIQSFGCLLALDEKSFNVIAFSENAPEMLTTVSHAVPSVDDPPRLDIGTNVRSLFTDQGAAALHKALGFADVSLLNPILVQCKTSGKPFYAIVHRATGCLVVDFEPVNPTEFPATAAGALQSYKLAAKAISKIQALPGGSMELLCNTVVKEVFDLTGYDRVMAYKFHEDNHGEVFAEITKPGLEPYLGLHYPATDIPQAARFLFMKNKVRLICDVRARPIKVIEDEALPFDISLCGSALRAAHSCHLQYMENMNSIASLVMAVVVNENEEDDEVGSEQPAQQQKKKILWGLIVCHHESPRYVPFPLRYACEFLAQVFAVHVNKEFEVQKQLREKSILRMQTILSDMLFKEASPLTIVSGAPNIMDLIKCDGAALLYGGKVWRLGTAPTESQIRDLALWLSEVHMDSTGLSTESLHDAGYPGASALGDTVCGMAVAKINSSDILFWFRSPTAKEIRWGGAKNDPSDMDDSRRMHPRLSFKAFLEVVKMKSLAWTDSEMDAIHSLQLILRGAVDGVVKPTGKASLDEQIGDLKLDGLAELQAVTSEMVRLMETATVPILAVDGNGLVNGWNQKAAELTGLRVDDAIGRHILTLVEESSVSVVQRMLYLALQGKEEKEVRFEVKTHGPKRDDGPVILVVNACASRDLHDDVVGVCFVAQDMTVHKLVMDKFTRVEGDYMAIIHNPNPLIPPIFGADESGWCCEWNAAMTKLTGWHREEVLDKMLLGEVFDSRNASCLLKNKDAFVSLCVVINSALAGEETEKAPFGFFDRSGKYTECLLSVNRRQNEGGLITGVFCFIHIPSHELQQALQVQQASEQKSLKRLKAFSYMRHAINNPLSGMLYSRKALKNTDLNEEQMRQIHVADNCHHQLNKILADLDQHNIMEKSSCLDLEMAEFVLQDVVVAAVSQVLIACQGKGIRVSCNLPERFMKQLVYGDGVRLQQILSDFLSISVKFSPVGSSVEISAKATKNSIGENLHLIDLELRIKHQGLGVPAELMAQMFEEDEPQQSEEGLGLLVSRNLLRLMNGDVRHLREAGVSIFILTAELACAPTAMEH

SEQ ID NO: 8114 - protein, 369 aa, Claviceps purpurea
MSTSNLFSTVPFGKNVLNHKIVLSPMTRFRADDNGVPLSYMKTFYAQRASVRGTLLVTDAVAICPRTKGFPNVPGIWHKDQIAAWKEVVDEVHSKGSFIWLQLWATGRAADLEALTSQGLKLESSSEVPVAPGEPTPRALDEDEIQQYILDYVQGAKNAVHGAGFDGVEIHGANGFLIDQFLQSSCNRRTDQWGGSIENRSRFGLEITRGVVDAVGHDRVGMKLSPWSTFQGMGTMDDLVPQFEHFITCLREMDIAYLHLANSRWVEEEDPSIRTHPDFHNQTFVQMWGKKRPILLAGGYDPDSARRLVDQTYSDRNNVLVVFGRHYISNPDLPFRLRMGIACRSTIETHSIFPARERAMWTIPSVKNI

SEQ ID NO: 8115 - protein, 86 aa, Arabidopsis thaliana
MYLFPCLHLPQKAIAAAEAEKTAPDNFYCKRLLKATGIVVVPGSGFRQVPGTWHFRCTILPQEDKIPAIVDRLTAFHQSFMDEFRD

SEQ ID NO: 8116 - protein, 494 aa, Zea mays
  misc_feature (205)..(205): Xaa can be any naturally occurring amino acid
MDPYKHRPSSAFNAPYWTTNSGAPVWNNDSSLTVGARGPILLEDYHLVEKLANFDRERIPERVVHARGASAKGFFEVTHDITHLTCADFLRAPGVQTPVIVRFSTVIHERGSPETLRDPRGFAVKFYTREGNWDLVGNNFPVFFIRDGIKFPDMVHALKPNPRTHIQDNWRILDFFSHHPESLHMFSFLFDDVGIPADYRHMDGXSGVHTYTLVSRAGTVTYVKFHWRPTCGVRSLMDDEAVAVGGANHSHATKDLTDAIAAGNFPEWTLYIQTMDPEMEDRLDDLDPLDVTKTWPEDAFPLQPVGRLVLNRNIDNFFAENEQLAFCPGLIVPGIYYSDDKLLQTRIFSYSDTQRHRLGPNYLLLPANAPKCAHHNNHYDGFMNFMHRHEEVDYFPSRYDAARNAPRYPIPTAHIAGRREKTVISKENNFKQPGERYRAMDPARQERFITRWVDALSDPRLTHEIRTIWLSNWSQADRSLGQKLASRLSAKPSM

SEQ ID NO: 8117 - protein, 807 aa, Triticum aestivum
FGCLLALDEKSFNVIAFSENAPEMLTTVSHAVPSVNDPPRLDIGTNVRSLFTDQGATALHKALGFADVSLLNPILVQCKTSGKPFYAIVHRATGCLVVDFEPVNPTEFPASAAGALQSYKLAAKAISKIQALPGGSIELLCNTVVKEVFELTGYDRVMAYKFHEDNHGEVFAEITKPGLEPYLGLHYPATDIPQAARFLFMKNKVRMICDVRSRSIKVIEDEALPFDISLCGSALRAAHSCHLQYMENMNSIASLVMAVVVNENEEDDEVGSEQPAQQQQKKILWGLVVCHHESPRYVPFPLRYACEFLAQVFAVHVNKEFEVQKQLREKSILRTQTILSDMLFKEASPLTIVSGAPNIMDLIKCDGAALLYGDKVWRLGNAPTESQIRDLALWLSEVHMDSTGLSTESLHDAGYPGASALGDSVCGMAVAKINSSDILFWFRSHTAQEIRWGGAKNDPSDQDDSRRMHPRLSFKAFLEVVKMKSLAWTDSEMDAIHSLQLILRGTVDGVVKPTGKASLDEQIGDLKLDGLAELQAVTSEMVRLMETATVPILAVDGNGLVNGWNQKAAELTGLRVDDAIGRHILTLVEESSVSVVQRMLYLALQGKEEKEVRFEVKTHGPKRDDGPVILVVNACASRDLHDDVVGVCFVAQDVTVHKLVMDKFTRVEGDYMAIIHNPNPLIPPIFGADEFGWCCEWNAAMTKLTGWHREEVLNKMLLGEVFDSSNASCLLKNKDAFVSLCVVINSALAGEETEKAPFGFFDRSGKYTDCLLSVNRRENEGGLITGVFCFIHIPSHELQQALQVQQA

SEQ ID NO: 8118 - protein, 585 aa, Hordeum vulgare subsp. vulgare
MCGILAVLGCADDTQGKRVRVLELSRRLKHRGPDWSGMHQVGDCYLSHQRLAIIDPASGDQPLYNEDKSIVVTVNGEIYNHEQLRAQLSSHTFRTGSDCEVIAHLYEEHGENFIDMLDGVFSFVLLDTRDNSFIAARDAIGVTPLYVGWGIDGSVWISSEMKGLNDDCEHFEIFPPGHLYSSKEGGFKRWYNPPWFSEVIPSVPYDPLALRKAFEKAVTKRLMTDVPFGVLLSGGLDSSLVAAVTVRHLAGTKAAKRWGTKLHSFCVGLEGSPDLKAAKEVANYLGTMHHEFTFTVQDGIDAIEDVIYHTETYDVTTIRASTPMFLMSRKIKSLGVKMVISGEGSDEIFGGYLYFHKAPNKEELHRETCQKIKALHQYDCLRANKATSAWGLEARVPFLDKEFINEAMSIDPEWKMIRPDLGRIEKWVLRKAFDDEEQPFLPKHILYRQKEQFSDGVGYSWIDGLKAHTESNVTDKMMSNAKFIYPHNTPTTKEAYCYRMIFERFFPQNSAILTVPGGPSVACSTAKAVEWDARWSGNLDPSGRAALGVHLSAYEQEHLPATIMAGTSKKPRMIKVAAPGVAIES

SEQ ID NO: 8119 - protein, 743 aa, Pseudomonas fluorescens Pf-5
MSFSNKEQGKQQPALLPSAKAIDALVRAEHRDPFAILGPHGDGAGGQFIRAFLPGALSVQVLDRDQQQVLGSLQAGEVPGLFVGHFPEARPYLLRIQWAGGEQVSEDPYSFGPLLGEMDLYLFAEGNHRDLSSCLGAQLTTVDGIDGVRFAVWAPNARRVSVVGDFNIWDGRRHPMRLRHPSGVWELFIPRLQAGEAYKYEILGPQGILPLKADPMALATQLPPDTASRVAPPLTIDWQDQEWMLARGERQRVDAPLSIYELHAGSWQCEVDDLGEVARQYSWAELAERLIPYVKDLGFTHIELMPIMEHPFGGSWGYQPLSQFAPSARYGSPQDFAAFIDACHQAGIGVILDWVPAHFPTDTHGLAQFDGTALYEYGNPLEGFHQDWDTLIYNLGRTEVHGFMLASALHWLKHFHVDGLRVDAVASMLYRDYSRKAGEWVPNRHGGRENLEAIDFLRHLNDVVALEAPGALVIAEESTAWPGVSQRTDQGGLGFAYKWNMGWMHDSLHYIQQDPVYRAHHHNELSFGLVYAWSERFILPISHDEVVHGKHSLIDKMPGDRWQKFANLRAYLSFMWAHPGKKLLFMGCEFGQWREWNHDQQLDWYLLQYPEHRGVQQLVGDLNRLYRQYPPLHDQDDVPQGFQWLIGDDAINSVYAWLRWSKSGEPLLVVANFTPVPRQGYRVGVPVAGRWSELLNSDSQLYAGSNYGNGGEAFSEEQSSHGQALSLVLNLPPLAVLILRPDS

SEQ ID NO: 8120 - protein, 712 aa, Pseudomonas fluorescens Pf-5
MSTKKPDTPKSQMAGTDTLDRGNSNSKLKSLETFRSDATGQALRTNQGVKIADNQNTLKAGARGPSLLEDFIMREKITHFDHERIPERIVHARGVGAHGYFQSYDNHSALTKAGFLRDPGKKTPVFVRFSTVQGPRGSGDTVRDVRGFAVKFFTDEGNFDLVGNNMPVFFIQDAIKFPDFVHAVKPEPHNEIPTGGSAHDTFWDFVSLQPESAHMVIWAMSDRAIPKSLRAMQGFGVHTFRLINAQGRSSFVKFHWRPTVGTCSLVWDEAQKLAGKDTDFHRRDLWESIEAGDYPEWEFGVQIIAEEDEHNFDFDILDPTKLIPEELVPITPLGKMVLNRNPDNYFAETEQVAFCPGHIVPGIDFSNDPLLQGRLFSYTDTQISRLGGPNFHELPINRPLAPFHNSQRDAMHRITLDKGRASYEPNSIDGGWPRETPPAAEDGGFESYNERIDAHKIRQRSESFSDHFSQARLFYKSMSKHEQEHIIAAYSFELGKVEREWIRERQVNEILANIDLQLAARVAENLGLAAPKKATVAERKTSLSRSPALSQANLLPGNIKTRKVAILAANGVDGAAIDALKKALKAEGAHAKLLGPTSAPVTTADGKSLPVDASMEGLPSVAFDAVFVPGGAQSIKALSGNGVALHYLLEAYKHLKAIALHGDARELLHSLRLEADEGLIVGADAKALKAFIAAIAQHRVWSREEKAKAIPA

SEQ ID NO: 8121 - protein, 146 aa, Oryza sativa
AISTTTAAYFSSQPQLPATAAAKSGGRQQQRRRSSFVMLEAAAASGSGGGGGGAVGRTRSLTEEDLEELKGCLDLGVGFAYHQIPELCGTLPALELCYSMTRRFLDDQRAPGQEPESPATPPLPNWRISGPGAPIAVLYRVGRGFG

SEQ ID NO: 8122 - protein, 246 aa, Daucus carota subsp. sativus
MGRGKVELKRIENKINRQVTFAKRRNGLLKKAYELSVLCDAEVALIIFSNRGKLYEFCSTSSMNKTLGRYHRCSYGALETGQTDRDTQSSYQEYIKLKAKVEALQQSQRHLLGEELGQLGTKELEELERQLDSTLRQVRSTKTQYMLDQLSDLQQKEQELVEINKALRNKLEENDVRIQSQWEAAERNNVAYRSHPAEHPPDHGVFESLECNNTMHMGYNSAMNDHQMASATPTQNASGVIPGWML

SEQ ID NO: 8123 - protein, 488 aa, Synechocystis sp. PCC 6803
MGRQLILFPMSDQSDHPLILLWHRRDLRLNDHLALAKARQKTAKIVGVFCLDNKILQAEDMAPARVAYLLGCLQSLQDHYQRLGSELLVFQADPVQLLPKLANTLGAHGVTWTLDTEPYAQKRDLAVAQALRERGLAIATEWDQLMHHPGEVLTQAGSPYTVYTPFWKNWSQLPKTSPVPTPKDLQGLTPAEKEKLAPLEPLAIPQLADLGFIWDQPLPLTPGEEAAEQRLDWFVAHGLEEYQQNRNFPALDGTSQLSAALKFGVISPRTLWQTTLEAWEQSRSEEARASIETWQQELAWREFYQHCLYSFPALAQGPYRSPFQEFPWEENQDHFQAWCEGRTGYPIIDAAMAQLNQTGWMHNRCRMIVASFLIKDLILNWQWGELYFMQTLYDGDLAANNGGWQWSASSGMDPKPLRIFNPHTQAQKFDPEGEYIRTWLPQLARFDTGDLLTGKLTPGSRRSVNYPEPIVDHNQQQREFKRRYQLVK

SEQ ID NO: 8124 - protein, 409 aa, Frankia sp. EAN1pec
MWWLRRDLRLDDNPALLAAAESGRVLALFVLDDALRRPSGPVRLAFLHRCLRDLDAQLGGRLCVRTGSPYAVAPGRLRKADGTSYRVFTPFYRAWKEHGWRGPAIPADPVWLQPADLDGGSEPIPADPELGGTELPPAGEHAAHERLRAFLTESLAGYAAHRDEPAAASESGDAVPGWSGASRAGGAGGAGGAGGADAAGGGGGLAGSAEKFRSELAWREFYADVLAGTPSSARTDLTDTLAALAYEPPGDTFEAWKWGRTGYPIVDAGMRQLLAEGWVHNRVRMIEASFVCKDLNVHRTHGARWYLERLVDGDLASNNHGWQWTAGTGTDAAPYFRVFNPVSQGRKFDPAGEYIRRWVPELRGLPPDAVHEPWKLPAGPPNGYPRPVVDHAVERREALDRHARARHHD

SEQ ID NO: 8125 - protein, 369 aa, Festuca arundinacea
MVMMVDPPNGMGNHGKHYYTMWQTMFEIDTKYVPIKPIGRGAYGIVCSSINQETNEKVAIKKMNNVFDNRVDALRTLRELKLLRHLRHENVICLKDIMMPVHRRSFKDVYLVSELMDTDLHQIVKSLQPLSNDHCQYFLFQLLRGLKYLHSAGILHRDLKPGNLLVNANCDLKICDFGLARTNNTKGQFMTEYVVTRWYRAPELLLCCDNYGTSIDVWSVGCIFAELLGRKPIFPGTECLNQLKLIVNVLGTMSDSDLEFIDNRKARNYIKSLPYTPGIPLSNMYPQVHPLAIDLLQKMLVFDPSKRISVIEALAHPYMSELYDPAANPPAQVPIDLDIDENIGVETIREMLWQEMLQYHPEAATMVNM

SEQ ID NO: 8126 - protein, 231 aa, Nicotiana benthamiana
MAPKEKGTAAGKVNGVSKEVHYRGVRKRPWGRYAAEIRDPGKKSRVWLGTFDTAEDAARAYDAAAREFRGTKAKTNFLVLEQENVKLANGNRSPSYSSTVENSPPVMPENSPPAVILDTSPLDLSLGGSGSLFSNGVGRFHMYYLEAVQREQVISSYKKSCRTTAEFIAGCGGGASGESDCRTTAEFIAGCGGGASGESDSSSVIDFMGHDLKPTTRPINLDLNLPPPENM

SEQ ID NO: 8127 - protein, 474 aa, Brassica oleracea
MDLLSRKATCNSHGQDSSYFLGWEEYEKNPHDVVKNPHGIIQMGLAENQLCFDLLESWLIQNPDAASFKRDGQSIFRELALFQDYNGLSSFKKALADFMSENRQNRVSFDSKNLVLTAGATSANETLMFCLANPGDAFLLPTPYYPGFDRDLKWRTGVEIVPIQCSSRNGFCITKLALEEAYEQAKKLNLNVKGVLITNPSNPLGTTATQTELNILFEFISKNKNIHLVSDEIYSGTAFSSSEFISVMEILKTNQLENTDVFKRVHIVYSLSKDLGLPGFRVGAIYSNDKDVISAATKMSSFGLVSSQTQYLLSSLLSDKKFTKNYLRENQRRLNNRQRMLVTGLEAIGIGCLKSNAGLFCWVDMRHLLSSKTFEAEMDLWKKIVYEVKLNISPGSSCHCEEPGWFRVCFANMSEETLKLAMKRLKKFVDNGTLSRSCQVGESQSLKSSRKKTTTTVSNWVFRLSFHDRDTEER

SEQ ID NO: 8128 - protein, 183 aa, Arabidopsis thaliana
LWSCDDLFLGVRKARRAVAEYLNGELPTKLKAEDVYITGGCNQAIEIVIDSLAGNPSANILLPRPGYPHYDARAVYSGLEIRKYDLLPESDWEINLDGLEAAADENTVAMVIINPNNPCGNVYTYDHLNKVAEMARKLGIMIISDEVYDHVVYGDKPFIPMGKFASIAPGITLGSISKGWVNP

SEQ ID NO: 8129 - protein, 400 aa, Zea mays
MGSGGANTAPLITPYKMGKFDVSHSIECGSSMLVIVLTPNKTNGDFKSDAESERVVLAPLTRQRSYGNVPQPHAILYYQQRATKGGLLIAEATGVSDTAQGYKDTPGIWTHEQVEAWKPIVDGVHQKGGIFFCQIWHVGRVSNSTFQPNGQAPISSTDKPLKPQVRANGIDVATFAVPRRLETDEIPLVVNDFRVAARNAIEAGFDGVEIHGAHGYLIDQFLKDGVNDRTDKYGGSLENRCRFALEVTQAVVDEIGADKVGIRLSPFASYSEAPDSDPEALGMYMANALNEFGILYCHMVEPRMVKLGEKFETPYSLRPIRDAFRGTFIVAGGYGREDGNRAISTGYADLVAFGRVFLANPDLPRRFEVDAPLNKYNRDTFYIPDPVIGYTDYPFLSSDV

SEQ ID NO: 8130 - protein, 648 aa, Chlamydophila pneumoniae AR39
MFVMKKLVRLCVVLLSLLPNVLFSSDLLREEGIKKMMDKLIEYHVDAQEVSTDILSRSLSSYIQSFDPHKSYLSNQEVAVFLQSPETKKRLLKNYKAGNFAIYRNINQLIHESILRARQWRNEWVKNPKELVLEASSYQISKQPMQWSKSLDEVKQRQRALLLSYLSLHLAGASSSRYEGKEEQLAALCLRQIENHENVYLGINDHGVAMDRDEEAYQFHIRVVKALAHSLDAHTAYFSKDEALAMRIQLEKGMCGIGVVLKEDIDGVVVREIIPGGPAAKSGDLQLGDIIYRVDGKDIEHLSFRGVLDCLRGGHGSTVVLDIHRGESDHTIALRREKILLEDRRVDVSYEPYGDGVIGKVTLHSFYEGENQVSSEQDLRRAIQGLKEKNLLGLVLDIRENTGGFLSQAIKVSGLFMTNGVVVVSRYADGTMKCYRTVSPKKFYDGPLAILVSKSSASAAEIVAQTLQDYGVALVVGDEQTYGKGTIQHQTITGDASQDDCFKVTVGKYYSPSGKSTQLQGVKSDILIPSLYAEDRLGERFLEHPLPADCCDNVLHDPLTDLDTQTRPWFQKYYLPNLQKQETLWREMLPQLTKNSEQRLSENSNFQAFLSQIKSSEKTDLSYGSNDLQLEESINILKDMILLQQCRK

SEQ ID NO: 8131 - protein, 713 aa, Alkaliphilus metalliredigenes QYMF
MNTGPQQPQNTMEQNSKNEKLDLHRVDHNNELLTTNQGGRVSNTDDSLKAGARGPTLMEDFHFREKMTHFDHERIPERVVHARGFGVHGYFQVYEPMAELTKAKFLQDPTKKTPVFVRFSTVVGSKGSADTVRDVRGFATKFYTEDGNYDLVSNNIPVFFIQDAIKFPDVVHAIKPEPHNEIPQASAAHDTFWDFVVNTPETAHMIMWLLSDRAIPRSFRMMEGFGVNTFRFVNEQGKARFVKFHWKPLLGVHSLVWDEAQKLAGKDPDYHRRDLWDAIDMGEYPEYELGVQIVEEEEEFNFDFDILDATKIWPEEMIPVKRIGKMTLDNNVANFFAETEQVAFHPGHVVPGIDFSNDPLLQGRLFSYLDTQLIRLGGPNFHEIPINRPMAPIHNNQRDGYHRMTIDRGRVSYSPNSLQNDAPHPAPEADHGYVHHAEKVEGQKVRERSESFRDHYRQATLFWNSMSSAEKQHIIEAFHFEVGSVMDKQIKQRVVNMFNNVDGQLATQIAVGVGADSPAALGGNGVTATSPAVSQENTVKDARTRKVAILLENGFNYPEVTQVMSAFNGAGVHTEIVSKNLGMLTSVDGQQLEVGKNYATTASIKYDAVYVPGGPQSINSLMMQGDALHFVNEAFKHAKAIGATNEGVDLLMASAIQGVNMAGGNTQDQLITEMGVVTVRNVTDTNQFSQEFTNAIAQHRHWSRQNKKQMIPA

SEQ ID NO: 8132 - protein, 120 aa, Brassica napus
  misc_feature (106)..(106): Xaa can be any naturally occurring amino acid
  misc_feature (117)..(117): Xaa can be any naturally occurring amino acid
MDAVMFGLETPLMAALQHLLDVPDGDAGAGGDNKTGSGGSATRTYVRDARAMAATPADVKELPGAYAFVVDMPGLGTGDIRVQVEDERVLVVSGERRREEREDDAXYLRMERRMGKXMRK

SEQ ID NO: 8133 - protein, 598 aa, Pseudomonas fluorescens Pf-5
MPSSTLHTWTHGARLLDAEHTRFALWAPDARCVSVELADGQSLPMQPQPEGWFMTQARCPAGSAYRFNIDERIQVPDPASRAQLGDVHGPSLVVDPERYQWQHPQWRGRPWHEAVIYELHVGVMGGYQAVQQALPALVELGVTAIELMPLAEFPGERNWGYDGVLPYAPEASYGSPDELRALIDTAHGLGLAVILDVVYNHFGPDGNYLQEYAQGFFRQDLHTPWGAAIDFRRPQVSEFFIDNALMWLLEYRFDGLRLDAVHAIDDPDFLRQLAQRVRQAVPPDRHVWLNLENEFNQASLLQQGFDAQWNDDGHNALHVLLTGETDAYYADFAEQPTEQLARCLSQGFAFQGHANRHGEARGEPSGHLPPSAFVLFLQNHDQIGNRAFGERLNQLAPTQALHAATVLLLLSPMIPLLFMGDEVAAQEPFLFFTSHQGQLAEAVREGRRNEFAAFSAFADAGQRQRIPDPNAASTFQASRPRAQSRQAEATRELYRSLLQIRRRELVPRLPGARALGCQVLAEGALSARWRLGDGSLLRIDLNLGPHQVELAAEAAPQLCFEYPPHTLKHWCQGQLPAYSVLVLLAPTSSPTDPDGECL

SEQ ID NO: 8134 - protein, 252 aa, Glycine max
  misc_feature (39)..(39): Xaa can be any naturally occurring amino acid
MFPHKVASMAFPNPSMSVSPQKKMGRGKIEIKRIENTTXNRQVTFCKRRNGLLKKAYELSVLCDAEVALIVFSSRGRLYEYANNSVKATIERYKKACSDSSGAGSASEANAQFYQQEADKLRAQISSLQNNNRQMMGESLGPLTAKELKNLETKLEKGISRIRSKKNELLFAEIEYMQKREIDLHNNNQLLRAKIAEGERNHHNLAVLPGGSNYDSLQTSQQQFDSRGSFQVTGLQPNNQYARQDQMSLQLV

SEQ ID NO: 8135 - protein, 542 aa, Oryza sativa (japonica cultivar-group)
MGNQCQNGTLGSDYHNRFPREHAVGYVQGDSYLDLKKFDDTWPEVNNFKPTAASILRRGLDPTSINVLGRKTADLREHYIIGRKLGQAQFGTTYLCTEINTGCEYACKTIPKRKLITKEDVEDVRREIQIMHHLSGHKNVVAIKDVYEDGQAVHIVMELCAGGELFDRIQEKGHYSERKAAELIRIIVSIVAMCHSLGVMHRDLKPENFLLLDKDDDLSIKAIDFGLSVFFKPGQVFTELVGSPYYVAPEVLHKRYGPESDVWSAGVILYVLLSGVPPFWAETQQGIFDAVLKGHIDFQSDPWPKISDSAKDLIRKMLSHCPSERLKAHEVLRHPWICENGVATDQALDPSVISRLKQFSAMNKLKKLALRVIAERLSEEEIAGLREMFKAVDTKNRGVITFGELREGLRRFGAEFKDTEIGDIMEAAHNDNNVTIHYEEFIAATLPLNKIEREEHLLAAFTYFDKDGSGYITVDKLQRACGEHNMEDSLLEEIISEVDQNNDGQIDYAEFVAMMQGSNVGLGWQTMESSLNVALRDAPQVH

SEQ ID NO: 8136 - protein, 318 aa, Pichia stipitis
MPSIKLNSGYDMPAVGFGCWKVDVDTCSEQIYRAIKTGYRLFDGAEDYANEKLVGAGVKKAIDEGIVKREDLFLTSKLWNNYHHPDNVEKALNRTLSDLQVDYVDLFLIHFPVTFKFVPLEEKYPPGFYCGKGDNFDYEDVPILETWKALEKLVKAGKIRSIGVSNFPGALLLDLLRGATIKPSVLQVEHHPYLQQPRLIEFAQSRGIAVTAYSSFGPQSFVELNQGRALNTSPLFENETIKAIAAKHGKSPAQVLLRWSSQRGIAIIPKSNTVPRLLENKDVNSFDLDEQDFADIAKLDINLRFNDPWDWDKIPIFV

SEQ ID NO: 8137 - protein, 477 aa, Mesorhizobium loti MAFF303099
MSRQAQAPTIVLFRRDLRMGDNAALAAAAERGVPVVALYILDETTKGLRAMGAASRWWLHHSLAALGDLLRKAGANLFLAHGRTEDAVAKAIDASGANCVFWNRRYDPSEVAVDARLKAALREKGLTALSFDGALLHEPSLLKTGSGGFYKVFTPFWKAMADKVDVRDPIDTPGQIDGWRGELGGLRLDELDLLPSKPDWAYGLRETWTPGEKGAQARLGQFIEHGLANYERQRDYPGQPSTSRLSPHLTFGEITPFQIFAALRRSKSSGTSKFRAEIGWREFSYHLLFHNPDLSGRNFRPEFDAMSWRDDIRALRTWQRGLTGYPIVDAGMRELWRTGWMHNRVRMIVASFLIKDLMIDWRHGEKWFWDTLVDADAANNPASWQWVAGSGADPAPYFRIFNPVLQGEKFDPHGDYVRQHVPEISALPDRYIHRPWEAPAAVLKDKGIVLGKTYPNPIVDHGAARERALIVYQSLKD

SEQ ID NO: 8138 - protein, 376 aa, Lycopersicon esculentum
MENKVVEEKQVDKIPLMSPCKMGKFELCHRVVLAPLTRQRSYGYIPQPHAILHYSQRSTNGGLLIGEATVISETGIGYKDVPGIWTKEQVEAWKPIVDAVHAKGGIFFCQIWHVGRVSNKDFQPNGEDPISCTDRGLTPQIMSNGIDIAHFTRPRRLTTDEIPQIVNEFRVAARNAIEAGFDGVEIHGAHGYLIDQFMKDQVNDRSDKYGGSLENRCRFALEIVEAVANEIGSDRVGIRISPFAHYNEAGDTNPTALGLYMVESLNKYDLAYCHVVEPRMKTAWEKIECTESLVPMRKAYKGTFIVAGGYDREDGNRALIEDRADLVAYGRLFISNPDLPKRFELNAPLNKYNRDTFYTSDPIVGYTDYPFLETMT

SEQ ID NO: 8139 - protein, 1297 aa, Emericella nidulans
MACADETLTAAAAIIQNLVREAPSSGSPSFEFNFSPQSTNGVDSLPKLPGEPSLAKVRFENELEALVRRIHRMEVQSQQNHAQHAEHTQHLHKRRKSSKDTEPEILDESDGAASDEDEEEGATTLVREEDISYLRNYVQKQAEEISFQKNIITQVREELQLQEVQTRRALTKVENEDVVLLERELRKHQQANEAFQKALREIGGIITQVANGDLSMKVQIHPLEMDPEIATFKRTINTMMDQLQVFGSEVSRVAREVGTEGILGGQAQITGVHGIWKELTENVNIMAKNLTDQVREIAVVTTAVAHGDLSQKIESRAQGEILELQQTINTMVDQLRTFATEVTRVTRDVGTEGVLGGQAQIEGVQGMWNELTVNVNAMANNLTTQVRDIATVTKAVAKGDLTQKVQANCKGEIAELKNIINSMVDQLRQFAQEVTKIAKEVGTDGVLGGQATVNDVEGTWKDLTENVNRMANNLTTQVREIADVTTAVAKGDLSKKVTANVQGEILDLKSTINGMVDRLNTFAFEVSKVAREVGTDGTLGGQAKVDNVEGKWKDLTDNVNTMAQNLTSQVRSISDVTQAIAKGDLSKKIEVHAQGEILTLKVTINHMVDRLAKFATELKKVARDVGVDGKMGGQANVEGIAGTWKEITEDVNTMAENLTSQVRAFGEITDAATDGDFTKLITVNASGEMDELKRKINKMVSNLRDSIQRNTAAREAAELANRTKSEFLANMSHEIRTPMNGIIGMTQLTLDTDDLKPYTREMLNVVHNLANSLLTIIDDILDISKIEANRMVIESIPFTVRGTVFNALKTLAVKANEKFLSLTYQVDNTVPDYVIGDPFRLRQIILNLVGNAIKFTEHGEVKLTICKSDREQCAANEYAFEFSVSDTGIGIEEDKLDLIFDTFQQADGSTTRRFGGTGLGLSISKRLVNLMGGDVWVTSEYGHGSTFHFTCVVKLADQSLNVIASQILPYKNHRVLFIDKGENGPEAENVLKMLKKLDLEPLVVRNEDHVPPPEIQDPSGKESGHAYDVIIVDSVNTARMLRTYDDFKYVPIVLVCPLVCVSLKSALDLGISSYMTTPCEPIDLGNGMLPALEGRSTPITTDHSRSFDILLAEDNDVNQKLAVKILEKHNHNVSVVGNGLEAVEAVKQRRYDVILMDVQMPVMGGFEATGKIREYERDSGLSRTPIIALTAHAMLGDREKCIQAQMDEYLSKPLKQNQMMQTILKCARLGGSLLEKSKESRISSSGEMHHVHTGPDGKSQRPGMEGRSITSSSATSRTLASTSAERTEQLSIDRVRP

SEQ ID NO: 8140 - protein, 540 aa, Bradyrhizobium sp. BTAi1
MAAKDVKFSTDARDRMLRGVDILANAVKVTLGPKGRNVVIEKSFGAPRITKDGVTVAKEIELEDKFENMGAQMVREVASKTADLAGDGTTTATVLAQAIVKEGAKSVAAGMNPMDLKRGIDLAVDAIVADLKAHAKKITSNDEIAQVGTISANGDNEIGRFLAEAMQKVGNEGVITVEEAKSLDTELEVVEGMQFDRGYVSPYFVTNSEKMRVELEDPYILIHEKKLSGLQTMLPLLEAVVQSGKPLLIVAEDVEGEALATLVVNKLRGGLKIAAVKAPGFGDRRKAMLEDIAILTGGTTISEDLGIKLENVTLSMLGRAKKVVIDKENTTIVDGAGAKKDIEARTQQIKLQIEETTSDYDREKLQERLAKLAGGVAVIRVGGATEVEVKERKDRVDDALHATRAAVEEGILPGGGVALLRATKVLDGVKTANADQKAGVDIIRRAIQVPVRQIVQNAGEDGSLVVGKLLEKDTYSWGFNAATGEYQDLVQAGVIDPAKVVRTALQDAASVASLLITTEALVADKPKKAEATQAAPAMDF

SEQ ID NO: 8141 - protein, 487 aa, Bradyrhizobium japonicum USDA 110
MSADFSRRHFAKLAGLAALGAATGVGAAESETPASAGRGAPFPKDFLWGTATSSYQIEGAVNEDGRGKSIWDVFSHTPGKIEDGSTGDRANEHYHRYREDVALIKALGVRAYRFSIAWPRVFPDGTGQPNPKGLDFYNRLVDELLASGIEPYATLYHWDLPQALQDRVGGWQSSDTSKAFADYAAYVAARLTDRVKNVFTVNEVGRFVNFGYGWGIDAPGLKLPAVQLNQARHHVALAHGLAVQAIRASGRAGTRVGAAENIAACVPAIATAENIRAAEIATRELNAGFLGVVLEGRYTDGFLAYAGADAPKFTAEELKIIGAPTDFVGLNIYAPQFYVTASDRAPGFHVLPFPTSFPHMNSEWLRVGPEVIYWAPRLAAKIWNIETIYISENGTSSEDRIAADGQVYDLDRIMFLRNYLTQMQRAVAEGVPIRGYFLWSLMDNFEWIFGYGKRFGLYRVDFETQARVAKLSAAFYRDVVARNAIGV

SEQ ID NO: 8142 - protein, 547 aa, Thiobacillus denitrificans ATCC 25259
MAAKDVRFGDSARHRMVAGVNVLADAVKVTLGPKGRNVVLDRSFGAPTVTKDGVSVAKEIELKDKLENMGAQMVKEVASKTSDVAGDGTTTATVLAQSIVNEGMKFVAAGMNPMDLKRGIDKAVNAITEELKKISKPCTTSKEIAQVGSISANSDAPIGQIIADAMDKVGKEGVITVEDGSGLENELDVVEGMQFDRGYLSPYFINNADKQMAIMDDPFILLFDKKISNIRDLLPVLEQVAKAGKPLMIVAEDVDGEALATLVVNNIRGILKTCAVKAPGFGDRRKAMLEDMAILTGGTVIAEEVGLSLEKATLQDLGRAKRIEVGKENTTIIDGAGDGNAIKGRIAQINKQIEEVTSDYDKEKLQERKAKLAGGVAVIKVGAATEVEMKEKKARVEDALHATRAAVEEGIVPGGGVALLRAKAAAAAIKGDNHDQDAGVKIVLRAIEEPLRQIVKNCGDEPSVVVNKVLEGEGNFGYNAGTSEYGDMVAMGVLDPTKVTRTALQNAASIAGLMLTTDCMVADLPEDKAPAMPMGGGMGDMGGMGMM

SEQ ID NO: 8143 - protein, 1147 aa, Yarrowia lipolytica CLIB122
MYQLLKALNAKVYSQQREIALHSGAVVALERDLSQTRNILNSFTETIAPGEKRVVDTDLLDRELRKSQTANRAFQKALMEIGEVVFAVAQGDLSKKVTIHDQEMDPEIVKFKETINKMMSQLQRFASEVTRVATEVAGGTLGGQAEGEGTVGVWRELTDNVNVMASNLTNQVREIADVTRAVAQGDLSRKINVHAQGEILELQKTINTMVEQLRTFAFEVTRVARETGVEGRLGGQAQIEGVEGIWRELTDNVNAMASNLTDQVRNIANVTTAVARGDLSQKVSADCKGEILDLKSTINKMVDRLQNFALEVTTLARSVGTEGILGGQAKVEDVEGAWKEITENVNVMASNLTTQVRSIAHVTTAVAQGDLSQKIDVHAQGEMLALKSTINKMVDRLQVFASEVTRVAKDVGIDGKLGVQAQVSDVDGLWKEITTNVNTMAANLTTQVRALVQITAAATDGDFTRFITVEASGEMDALKTKINQMVLNLRESIQRNTAAREAAELANRAKSEFLANMSHEIRTPMNGIIGMTQLTLDTELTQYQREMLSIVHNLANSLLTIIDDILDISKIEANRMTIEKIAFSLRGTVFGALKTLSVKANEKPLDLVYKVDNTFPDNLVGDSFRLRQVILNLVGNAIKFTESGEVALSVRKADDQRPGSPDEMMIEFCVSDTGIGIQSDKLDVIFDTFCQADGSTTRKFGGTGLGLSISKRLINLMGGDIWVKSEYGKGSQFFFTLAVQPADSGLSQLLDNIAPFRNHYVLFINTEHEQEVVDQLVDNMQRLNLNAWVVDSLEEAPLPEDRSGPKFDTIIVDSLEVATKLRTLNHLKYIPLILLHPCIPQVNLKICLDLGITSYGNTPCSTNDIGNVLLPALESRAAPLNSDGQMKFQILLAEDNVVNQKLAVRILEKHQHRVEVVENGYEAFEAIKKKRYDVVLMDVQMPVMGGFEATAKIREWEKQNITIRTRTPIVALTAHAMLGDRERCMQAQMDEYLSKPLKPALLVQTINKCVHSVNQLRSLALGPTSTSSVNQILSRSGQHKSAVAASSSAASASMLPYVAPQPTSPVLSPSLEDAIIKTTDGVVSKSPLPPSQSKPRPTIEQRSRTVTSVPHVDYPENGGARIVAIDEGTEPEKESEQPPSNRRVNSN

SEQ ID NO: 8144 - protein, 364 aa, Kluyveromyces lactis NRRL Y-1140
MSSSSRYVTFEGSRNFRLRVVMATLSGKAIKIEKIRSDDLNPGLKDYEVSFLRLMEAVTNGSSIEISYTGTTVIFRPGIITGGSYTHQCPNSKPVGYFAEPMLYLAPFSKKKFSILFRGITSSHNDAGIDAIKWGLMPIMEKFGVRECALHTLKRGSPPLGGGEVHLVVDSLIAQPITMHALDKTMISSIRGVSYSTRVSPSLVNRMIDGAKKVLKSASCEVNITADVWRGENSGKSPGWGLTLVAENKQGWRIFSEAIGDAGDVPEDIGASVAYHLLEEISKSGVVGRNQLPLTILYMIIGKEDIGRLRITKDQIDERFVWLLRDIKKVFGTEILLKPVDDNTTDLIATIKGIGFTNTNKKIA

SEQ ID NO: 8145 - protein, 213 aa, Brassica rapa subsp. pekinensis
MVRGKTQMKRIENATSRQVTFSKRRNGLLKKASELSVLCDAEVSLIIFSPKAKLYEFASSNMQDTIDRYLRHTKDRVSTKPVSEENLQHLKHEAANMMKKIEQLEASKRKLLGEGIGSCSIEELQQIEQQLEKSVKCIRARKTQVFKEQIEQLKQKEKALAAENKKLTEKWGSHEIEVWSNKNQESGKGDEESSPSSEVETELFIGLPCSSRK

SEQ ID NO: 8146 - protein, 455 aa, Emericella nidulans
MSAPTADIRARAPEAKKVHIADTAINRHNWYKHVNWLNVFLIIGIPLYGCIQAFWVPLQLKTAIWAVIYYFFTGLGITAGYHRLWAHCSYSATLPLRIWLAAVGGGAVEGSIRWWARDHRAHHRYTDTDKDPYSVRKGLLYSHLGWMVMKQNPKRIGRTDISDLNEDPVVVWQHRNYLKVVFTMGLAVPMLVAGLGWGDWLGGFVYAGILRIFFVQQATFCVNSLALWLGDQPFDDRNSPRDHVITALVTLGEGYHNFHHEFPSDYRNAIEWHQYDPTKWSIWAWKQLGLAYDLKKFRANEIEKGRVQQLQKKLDRKRATLDWGTPLDQLPVMEWDDYVEQAKNGRGLVAIAGVVHDVTDFIKDHPGGKAMISSGIGKDATAMFNGGVYYHSNAAHNLLSTMRVGVIRGGCEVEIWKRAQKENVEYVRDGSGQRVIRAGEQPTKIPEPIPTADAA

SEQ ID NO: 8147 - protein, 213 aa, Cardamine flexuosa
MVRGKTQMKRIENATSRQVTFSKRRNGLLKKAFELSVLCDAEVSLIIFSPKGKLYEFASSNMQDTIDRYLRHTKDRVSSKPVSEENMQYLKFEAANMMKKIEQLEASKRKLLGEGIGTCSIEELQQIEQQLEKSVKCIRARKTQVFKEQIEQLKQKEKALAAENGKLSEKWGSHETEVWSNKNQESGRGDEESSPSSEVETQLFIGLPCSSRK

SEQ ID NO: 8148 - protein, 429 aa, Arabidopsis thaliana
MESLPQPQNQSSPATTPAKILLGKHELGRRLGSGSFAKVHLARSIESDELVAVKIIEKKKTIESGMEPRIIREIDAMRRLRHHPNILKIHEVMATKSKIYLVMELASGGELFSKVLRRGRLPESTARRYFQQLASALRFSHQDGVAHRDVKPQNLLLDEQGNLKVSDFGLSALPEHLQNGLLHTACGTPAYTAPEVISRRGYDGAKADAWSCGVILFVLLVGDVPFDDSNIAAMYRKIHRRDYRFPSWISKQAKSIIYQMLDPNPVTRMSIETVMKTNWFKKSLETSEFHRNVFDSEVEMKSSVNSITAFDLISLSSGLDLSGLFEAKKKKERRFTAKVSGVEVEEKAKMIGEKLGYVVKKKMMKKEGEVKVVGLGRGRTVIVVEAVELTVDVVVVEVKVVEGEEDDSRWSDLITELEDIVLSWHNDIM

SEQ ID NO: 8149 - protein, 550 aa, Polaromonas sp. JS666
MAAKDVIFGGEARARMVEGVNILANAVKVTLGPKGRNVVLERSFGAPTVTKDGVSVAKEIELKDKLQNMGAQMVKEVASKTSDIAGDGTTTATVLAQAIVREGMKYVAAGMNPMDLKRGIDKAVTALVEELKKASKATTTSKEIAQVGSISANSDEAIGKIIADAMDKVGKEGVITVEDGKSLESELDVVEGMQFDRGYLSPYFINNPEKQSAILDNPFVLLYDKKISNIRDLLPTLEQVAKAGRPLLIIAEEVEGEALATLVVNTLRGILKVVAVKAPGFGDRRKAMLEDIACLTGGKVIAEEVGMSLEKVTLADLGTAKRIEVGKENTIIIDGAGEAKDIEARVKQVRVQIEEATSDYDREKLQERVAKLAGGVAVIKVGAATEVEMKEKKARVEDALHATRAAVEEGIVAGGGVALLRAKQAAGAIKGDNADQEAGIKLVLRAIEAPLREIVYNAGGEASVVVNAVLAGKGNYGFNAANDTYGDMIEMGILDPTKVTRTALQNAASVASLMLTTEAMVAEAPKDESGAGGGMPGGMGGMGGMGDMGM

SEQ ID NO: 8150 - protein, 563 aa, Xylella fastidiosa 9a5c
MCSIFGIFNLQPSDNLQRLRHQALECSQRQRHRGPDWSGVYVDVGAILVHERLAIVDPAGGAQPLLSEDGTLALAVNGEIYNHAVLKGTLQQPYVFQTHSDCEVINALYREETPTSFLNRLNGIFAFALWDKTTGRGLIARDPMGVVPLYWGHDQDGRLRVASEMKALIEHCPDVAQFPPGHWYDTTTGTLVKYYERSWKNYSAVEGVQVSLQELREAFERAVHRQLMTDVPYGVLLSGGLDSSLVAAVAARYARHRIETNDQSEAWWPRLHSFAIGLKDSPDLSAANVAAEALNTVHHGFEYTLQEGLDVLPEVIRHIETYDVTTIRASTPMFLLARRIKAMGVKMVLSGEGSDEIFGGYLYFHKAPNAREFHEELVRKLNALYYYDCLRANKAMMAWGVEPRVPFLDREFLDVAMRMDAQHKMVDKTSDGPQQMEKGILRAAFDGYLPPSILWRQKEQFSDGVGYGWIDGLKAHAETQVSDHALATAETRFQVNPPQTKEAYYYRSIFERFFPSPAAAETVPGGKSIACSSPAAIAWDASFATMADPSGRAVSGVHQQALL

SEQ ID NO: 8151 - protein, 300 aa, Streptococcus thermophilus LMG 18311
MHFYLISFKIILLQLEKENRMETYTLSNGVTIPKIGFGTWQIPEGEEAYNSVSFALKAGYTHIDTAQIYGNEVSVGKAISDSDVAREDLFLTTKLWNDKHDYDLAKASIDESLERLGVDYLDLFLIHWPNPKALRENDAWKAGNAGAWKAMEEAYKEGKVRAIGVSNFMQHHLEALFETAEIVPHVNQILLAPGCTQEDLVAYCRERDILLEAYSPLGTGSIFGNEDVEAVAERNGKSVAQVALRWSLQKGFLPLPKSVTPKNIEANLDIFDFDLSEEDMAVLDKIQGIKTQVDPDTVNF

SEQ ID NO: 8152 - protein, 540 aa, Bacteroides fragilis YCH46
MKRIIYLLIGLCSVLGLQAQNFGSPAMRKLQLAEFAISNLYVDTVNENKLVESAIIEMLAQLDPHSTYSDAEEVKKMNEPLQGNFEGIGVQFQMIEDTLLIVQPVSNGPSEKVGILAGDRIIAVNDTAIAGVKMGTEEIMGRLRGPKDSKVNLTIIRRGVKEPLLFNVKRDKIPILSLDAAYMIQPKIGYIRINRFGATTAEEFLKALKELQKKGMKDLILDLQGNGGGYLNAAIDLANEFLGQKELIVYTEGRSAQRSEFFAKGNGNFRNGRLVVLVDEYSASASEIVTGAIQDWDRGVVVGRRSFGKGLVQRPIDLPDGSMIRLTIARYYTPAGRCIQKPYDSSINEKPGKGKSSESSIEKYNQDLIDRYNHGEMVSADSIHFPDSLKCQTKKLGRTVYGGGGIMPDYFVPVDTTLYTDYHRNLVAKGVVIKTTMNFIEKNRKALLDKYKTFEKFNEKFEIDDQLLNYLREAADKEKIEFNEEQYNKALPLIKAQLKALIARDLWDMNEYFQVMNATNKSVERALEILNDKEYEKILK

SEQ ID NO: 8153 - protein, 218 aa, Aspergillus niger
MSSTSPSKEPEVEPEVQSGEDQEQMDKEQQDTQAQGQGEFEVKEQDRWLPIANVARIMKLALPENAKIAKEAKECMQECVSEFISFITSEASEKCQQEKRKTVNGEDILFAMTSLGFENYAEALKIYLSKYRETQSARGEHQNRPTSSGYGAGAPVGAPGPAGPGGRPMAPGAGFPDTADSANNIMNQSLDPSEQDTSTYGYPPMVGQPHNGTAGESY

SEQ ID NO: 8154 - protein, 487 aa, Desulfotalea psychrophila LSv54
MKDEKDKLTGNNGAPVVDNQNVMTAGPRGPLLLQDVWFMEKLAHFDREVIPERRMHAKGSGAYGTFTVTDDIRAYTKAKIFAEIGKTTDLFVRFSTVAGERGAADAERDIRGFAMKFYTEEGNWDLVGNNTPVFFLKDPLKFPDLNHAVKRDPRTNMRSAANNWDYWSSLPEALHQVTITMSDRGIPLSYRHMNGYGSHTYSLLNENNERFWVKFHFKTQQGIKTLSDEEAEKLVGRDRESHQRDLLEAIDNHEFPSWKMQIQVVPEKEAANFPFNPFDLTKVWPHDDYPLIDVGIMELNKNPENYFAEVEQAAFNPANIVPGIGFSPDKMLQGRLFSYGDAQRYRLGVNHHLIPVNRARCPFHSFHRDGAMRVDGNYGGTRGYEPNSYGEWREQPEFKEPPLTLEGAADHWNHREDSDDYYSQPGNLFRLMTAEQKKVLFENTARALGDAPRAIKMRHASNCQKADRAYGEGVAMALGLPVSELEE

SEQ ID NO: 8155 - protein, 532 aa, Yarrowia lipolytica CLIB122
MSKELYANSKDDAVYSYSFGVPYPHHPYSSQRAGPTGPLLLQDTYLIDALAHFDRERIPERVVHANGGGAHGYFEVTDDISDITYAEPFQKIGYKCPTTVRFSTVGGERGSPDTARDPRGFAVKHKTDWGNWDMVGLNSPVFFIRDPVKFIHVNHSQKRDPQTNLTAGDDASNYWNYLVQNPESLHQVVYMFGDRGTPNGWRHMNCFSTHTYKMINKEGKLTYVQFHYKSDQGVKNFTGPEAAEMAGKSPDHDQKDLFFAIDNGDYPSWTVSLQTMTPEQAEEWEYSILDMTKTWPYDKFPLRKVGKLVLNKNAENFFEEIEQAAFSPSNLIHGIEASDDPVLQARLFSYPDTARHRLGPNFNQLPVNQARTFQKGSGCPFMAGNFQRDGNMAIHNQGNRPNYLSTIRPIQSVSVPNEDFKNTHDYCGVVTKEMEDESFKVQAEAAKKHNEKIWESSSYLYLSGFQESDAAQPRDLYERVYDDAAKQRMIDNVVDHASTIKQHGLKEQVAKYFGRISDDLGKKIAEGLGVPY

SEQ ID NO: 8156 - protein, 433 aa, Sulfolobus solfataricus P2
MLCLFIFRRDLRLDDNTGLIKALEDCEKVIPAFILDPRQVGNENEYKSEFAINFMINSLNELNDELRKRGSRLYVYFGLAEEVIKNLLKDVDAVYLNEDYTPFSKMRDERIRKYCEDTGKIMKSFEDYLLTSKNDFKNYRNFTTFYNVVKNKQIKKPVQNNYTNYYKNSLGDEHELPPRQGERGGRKEGIKLIERARQINYDRKDFVAEDNRTFLSPHLKFGTLSIREVYYSLLDSQAIIRQLYWRDFYTLLAYYNERVFHEPLKREYNCIEWENNERLFQAWLEGKTGYPIIDAGMRQLNRTGDMPNRVRMLTAFFLVKVLIIDWRIGEKYFASKLIDYDPSVNNGNWQWIASVGTDYIFRVFDPWKQQVTYDPEAKYIKRWVDELESYDAEIIHNAYKYTLKSYPKPIVDWRIRVNLAKRLYEVCRKSKIK

SEQ ID NO: 8157 - protein, 546 aa, Rhizobium leguminosarum bv. viciae
MASKEIKFGRTGREKMLRGVDILADAVKVTLGPKGRNVIIDKSFGAPRITKDGVSVAKEIELEDKFENMGAQMVREVASKTNDIAGDGTTTATVLAQAIVREGNKAVAAGMNPMDLKRGIDLAVADVVKDLQAKAKKISTSEEVAQVGTISANGDKQVGLDIAEAMQKVGNEGVITVEEAKTAETELEVVEGMQFDRGYLSPYFVTNPEKMIADLEDVFILLHEKKLSNLQSMLPVLEAVVQTGKPLLIVAEDVEGEALATLVVNKLRGGLKIAAVKAPGFGDRRKRMLEDIAILTGGTVISEDLGIKLESVTLDMLGRAKKVSISKENTTIVDGSGAKTDIEGRVAQIKAQIEETTSDYDREKLQERLAKLAGGVAVIRVGGSTEVEVKEKKDRIDDALNATRAAVQEGIVPGGGIALARSSTKITVKGANDDQEAGINIVRRALQSLVRQIAENAGDEASIVVGKVLDKNEDNFGYNAQTSEYGDMIAMGIVDPLKVVRTALQNAASVASLLITTEAMIAELPKKDAPAGMPGGMGGMGGMDMM

SEQ ID NO: 8158 - protein, 98 aa, Dianthus caryophyllus
MATVGGIKDSGGSSANSLEIDELAKFAVDHYNSKENALLEFQRVVNTKEQVVAGTIYYITLEATDGGVKKLYEAKVWVKPWVNFKEVQDFKYVGDASA

SEQ ID NO: 8159 - protein, 175 aa, Draba nemorosa var. hebecarpa
MVRGKTQMKRIENATSRQVTFSKRRNGLLKKAFELSVLCDAEVSLIIFSPKGKLYEFASSNMQDTIDRYLRHTKDRISSKPVSEENMQHLKHEAANMMKKIEQLEASKRKLLGEGIGTCSIEELQQIEQQLGKSVKCIRARKTQVFKEQIEQLKQKEKALAAENEKLSEKWGSNE

SEQ ID NO: 8160 - protein, 272 aa, Bradyrhizobium japonicum USDA 110
MLFVEANGARIPAIGLGTWELSGRPCARVVEQALRLGYRHIDTAQVYDNEREVGDGVRASGVRRDDVFLTTKVWTNHFAPNDLERSVKESLARLRLPSVDLLLLHWPNSHVPLAETLGALSHARQMGLTRHIGVSNFTVALIEQAVALSPEPLVCNQVEFHPYLDQAKVRAACDQHGLALVAYSPIARGRIKTDQTLAGIGRAHRKTPAQVCLRWLVQQNVAAIPRTSRIERLSENIEIFDFELSDDEMARIAALANPKGRLTDFGFAPKWD

SEQ ID NO: 8161 - protein, 415 aa, Oryza sativa
  misc_feature (110)..(110): Xaa can be any naturally occurring amino acid
  misc_feature (122)..(122): Xaa can be any naturally occurring amino acid
MATSEAAAISNPFAPLTNHQQEHPPPPPPPAKKKRNLPGTPDPEAEVIALSPRTLMATNRFVCEICGKGFQRDQNLQLHRRGHNLPWKLRQRSGKEPRKRVYVCPEKSCXHHNPSRALGDLXGIKKHFCRKHGEKKWKCDKCSKRYAVQSDWKAHSKTCGTREYRCDCGTLFSRRDSFITHRAFCDALAEETARLNAASGAAAAAAAATATSLCGQSYLFAGSGGPGMAGMRPNTMMPPQFDAAQLSWLYGNGKLSSSNASELTSATAAAKEAESVPSVFSNQQHAKPAAPTDMSATALLQKAAQIGAVTSTAAMPLVSPFEPTKPGGATASPADECGKFDGAALFAAASHHNANLGGAMSELTGAAGNVPYDVLSAVRHHAGLKDAGGVGREETRDFLGVGVQALCSSSIHGWI

SEQ ID NO: 8162 - protein, 547 aa, Oryza sativa
MQGGGGAASAAAAAAAAATQQHRELLERYELVRVRGRGSFAQVWEARHRRTGLSVAVKILNLAGLLASGIPIRKVEREIAVMRLLNHPHIVRFHEAIAGGDGGGHVYIVMELATQGQLYDYVTQLGRLREDDARRIFQQIISGAEYCHHNMVVHRDLKLENILMDSEMNVKIVDFGFSKFFRHNKVLSASCGSREYAAPELLAGRKYVGPPVDVWSCGVILYILFCGRLPFDSADVSELHRIIKRGEFSIPPYVPDDARDLISSMLIVRPDKRLTITEVRTHRWLQHSIPRYLAMPPLNARTQITRIDAETVDKVVGHGFERRYLVESLENRVENEATVAYNLILNKKFDAPTRYVWTIDVYQEAGQSNTTGAAEATGSSAAGEPPVAVAGEDDGRNNGWALGGVEFHECPREAMRAIAAALRETGVVYAHDDDDRGRYGKLLCARFAGAAGVRRIIRSYLAATDDAPSSSSSAGGGSGRGEAGHGGGAPVDDAVLESLSAAVFFEIQLYKSEGEGNYLMDLKRLSGPQLQYLNICSELSSKLRAIN

SEQ ID NO: 8163 - protein, 918 aa, Escherichia coli O157:H7 EDL933
  misc_feature (639)..(639): Xaa can be any naturally occurring amino acid
MTNYSLRARMMILILAPTVLIGLLLSIFFVVHRYNDLQRQLEDAGASIIEPLAVSTEYGMSLQNRESIGQLISVLHRRHSDIVRAISVYDENNRLFVTSNFHLDPSSMQLGSNVPFPRQLTVTRDGDIMILRTPIISESYSPDESPSSDAKNSQNMLGYIALELDLKSVRLQQYKEIFISSVMMLFCIGIALIFGWRLMRDVTGPIRNMVNTVDRIRRGQLDSRVEGFMLGELDMLKNGINSMAMSLAAYHEEMQHNIDQATSDLRETLEQMEIQNVELDLAKKRAQEAARIKSEFLANMSHELRTPLNGVIGFTRLTLKTELTPTQRDHLNTIERSANNLLAIINDVLDFSKLEAGKLILESIPFPLRSTLDEVVTLLAHSSHDKGLELTLNIKSDVPDNVIGDPLRLQQIITNLVGNAIKFTENGNIDILVEKRALSNTKVQIEVQIRDTGIGIPERDQSRLFQAFRQADASISRRHGGTGLGLVITQKLVNEMGGDISFHSQPNRGSTFWFHINLDLNPNIIIEGPSTQCLAGKRLAYVEPNSAAAQCTLDILSETPLEVVYSPTFSALPPAHYDMMLLGIAVTFREPLTMQHERLAKAVSMTDFLMLALPCHAQVNAEKLKQDGIGACLLKPLTXTRLLPALTEFCHHKQNTLLPVTDESKLAMTVMAVDDNPANLKLIGALLEDMVQHVELCDSGHQAVERAKQMPFDLILMDIQMPDMDGIRACELIHQLPHQQQTPVIAVTAHAMAGQKEKLLGAGMSDYLAKPIEEERLHNLLLRYKPGSGISSRVVTPEVNEIVVNPNATLDWQLALRQAAGKTDLARDMLQMLLDFLPEVRNKVEEQLVGENPEGLVDLIHKLHGSCGYSGVPRMKNLCQLIEQQLRSGTKEEDLEPELLELLDEMDNVAREASKILG

SEQ ID NO: 8164 - protein, 677 aa, Xanthomonas campestris pv. campestris
MATWLILVGELLVSLGLMVAILLRPQVSHTRRLIGMLLDYTCTGAIMAIQGEPASPLYAVCMWVTIGNGLRYGSNYLRAATAMGSLCFLGAILISPYWKANPYLSWGLLLGLIAVPLYFDSLLRAMTRAVREARHANQAKSRFLANMSHEFRTPLNGLSGMTEVLATTRLDAEQKECLNTIQASARSLLSLVEEVLDISAIEAGKIRIDRRDFSLREMIGSVNLILQPQARGRRLEYGTQVADDVPDLLKGDTAHLRQVLLNLVGNAVKFTEHGHVLLRVTRVSGSAEDAVRLRFDVEDTGIGVPMDMRPRLFEAFEQADVGLSRRYEGTGLGTTIAKGLVEAMGGSIGFKENQPSGSVFWFELPMAIGEPLKSSTVRVPTGALVDAPEELESSNIIAFSNPFLRHRARVRSMRMLVADDHEANRMVLQRLLEKAGHKVLCVNGAEQVLDAMAEEDYDAVIVDLHMPGMNGLDMLKQLRVMQASGMRYTPVVVLSADVTPEAIRACEQAGARAFLAKPVVAAKLLDTLADLAVSTRQLATPATTVQVATSFEGVLDSSVLDELAALGMGEEFERQFVRQCLDDAQNCVGDIERDGTCSDWEQLRESAHALRGVASNLGLAQVASSGGELMRMADWQLQAEWRLRLSTLREQLKAGKDALDARVQGVKDGECSPRSNE

SEQ ID NO: 8165 - protein, 455 aa, Nocardioides sp. JS614
MSLHLPSPSTLAYGAATASYQIEGATAEDGRGASIWDTFTTRPGAIRDGSDGSVACDSYHRYEEDADLVAGLGVGWYRFSIAWPRVLPEGTGRVEPRGLDYYDRLVDALLARGVSPTATLYHWDLPQALEDRGGWLERSTAEAFADYAMVVHERLGDRVGVWATHNEPWCAAYLGYAAGIHAPGRREGGAAHRAAHHLLLGHGLAAARLHEAGVGDVGIALNLAPFWPESPDAVAAADGVDAIRNRLWLGPLVDGAYDDGLLAVAPELADPDVVHEGDLELVRGSADWIGINYYTPFRPTLADPALETHPEVDAYPGATPVSFVVREPRTDIGWEVEARGLEELLVETHRRTGLPLIVTENGAAYADDTLREGAAGVIDDQDRIAYLRDHIAATERARSAGADVRAYIVWTLLDNFEWAEGYTKTFGVVHVDPKDQTRTPKASYHWLAEHVAEAH

SEQ ID NO: 8166 - protein, 259 aa, Catharanthus roseus
MALEALNSPTTPTPVFQYENAATLRYLDQPWAKGKRSKRPRSVEPPPPQHQQQQQPTEEEYLALCLIMLARGGAPSTTTLPLPPPPQQHNIPSSSSSDPPKLLYKCSVCDKAFSSYQALGGHKASHRKLSTASAGGGDDQSTTSTSTTTAAAATGRTHECSICHKCFPSGQALGGHKRCHYEGGAGAVGSTGNAASGVTSSEGMGSTNTHSNRDFDLNLPALPEFWLAAAAGDDEVSSPHPAKRSRFALPIKVENHQIN

SEQ ID NO: 8167 - protein, 153 aa, Methanococcoides burtonii DSM 6242
MKFGLVRRGSSDVSRWDPFDEIRQTQEHLNQLLREVSPFGGLFEGKSRAPLMDIKEEDNNVIVTTDLPGIDKEDVEISVNNNILEIHAEFKKESESEKEGYVQKERTYSSFSRSAVLPSVVSDEGVKAKLEAGVLTITLPKTKAEEKTKIKIE

SEQ ID NO: 8168 - protein, 480 aa, Pediococcus pentosaceus ATCC 25745
MKMTKLPENFLWGGAVAAHQLEGAWQADGKGVSMADVMTAGANKVPRKITDGVVPGENYPNHEGIDFYHHYREDVKMFAELGLKAFRTSIAWTRIFPNGDDAEPNEAGLKFYDDLFDECLKYGIEPVITLAHFEMPYHLVKKYNGFSDRHVIDLYVRFAETCFKRYKDKVKYWMTFNEINNQSMYNNDFLMATNSGLVFKGDENREAAMYQAAHYELVASAKAVKLGHEINPDFQIGCMINFTPFYPLNAAPNNIMLAERLMQRRYWFSDVHVNGVYPENVETYLQQKGYRPDITEADREILKAGTVDYVGFSYYNSNTVALPEGRSIDENLAPEDVTVENPYLATSDWDWPIDPVGLRYSLNWLNDRYHLPMFIVENGLGAYDTVESDGAIHDPYRVDYLRAHIQEMEKAVELDGVNLMGYTPWGFIDLVSAGTGQMSKRYGFIYVDKDDDGNGTLQRSKKDSFGWYQKVIRTNGEDLD

SEQ ID NO: 8169 - protein, 617 aa, Candida albicans SC5314
MSEQAQTQVSADQQQHQHNHHHHHHHHHNENQSQQQVPIDPAANPANRIGRYQILKTLGEGSFGKVKLAQHLGTGQKVALKIINRKTLAKSDMQGRVEREISYLRLLRHPHIIKLYDVIKSKDEIIMVIEFAGKELFDYIVQRGKMPEDEARRFFQQIIAAVEYCHRHKIVHRDLKPENLLLDDQLNVKIADFGLSNIMTDGNFLKTSCGSPNYAAPEVISGKLYAGPEVDVWSAGVILYVMLCGRLPFDDEFIPALFKKISNGVYTLPNYLSAGAKHLLTRMLVVNPLNRITIHEIMEDEWFKQDMPDYLLPPDLSKNKNSKIDVDEDVIRALSVTMGYDRDEIVNVIEKANKQVAAGNSSSQQSKSSNEILDAYLLMKENHALVKDLKKSKSENIESFLSQSPPPSPFPNAGSTSSAPGVQQSLTYQTLATVPDLSTLPNSTIAILPTSLPSIHRAYMAETKQNGDPSQQHAPPPTKKSKTRWHFGIRSRSYPLDVMGEIYRALKNLGAEWAKPTEEELWTIRVRWKYDTSAQFECGSAPNLMKMQIQLFQLEPNNYLVDFKFDGWESAHGNAGTDSPQSHRQQDLDEVGSFSAYPFLHLATRLIMELAVNSQSG

SEQ ID NO: 8170 - protein, 207 aa, Alkaliphilus metalliredigenes QYMF
MKFEKIVVGIEEANGYIFYDENSLEAVVIDPGDEAKTFMKYIDKRYLKPIGIILTHYHYDHIAAAEALKKKYQCPINAHKKEIDGLKDPEINYSKREYAKEVSITPDVLLSHGDTISVGALQLEVIHTPGHTPGSICLAVKDEKVIFTGDTVFSDALGRTDLAGGSEAMLRKTIRNKVSKWDDDVRVYPGHGESALMAQLRSRREIK

SEQ ID NO: 8171 - protein, 311 aa, Zea mays
MAAAEVYSPTAAAAAQQQREKAASQAWRTVVGWIGFLVQVLLQILRGTPSCAQLLSFVGVRYPLLSGPTASNPSPEVAFMPLRSEIPADAAPAPTPAPEPLGRLKVVLDLDETLVSAYESSSLPTIVRTQAVEAGLHCFDMECISSDKDAEGKQKVNHVTVFERPGLHEFLQKTSEFADLILFTAGLEGYARPLVDRIDVHNRFRLRLYRPSTVTTEYREHVKDLSCVSKDFGRIVIVDNNPFSFILQPLNGIPCVPFSAGQHSDDQLMMVIFPLLKHLSLQKDVRPVLHERFHMPEWFQKHGIPQTNQSV

SEQ ID NO: 8172 - protein, 582 aa, Candida glabrata CBS138
MGNTTSIESKIDFGQNRHVKPHLKNNNHVDDIYKRDTLPPSMAQMEPRSPILVVNGKHLTDIKEIANISSQIPETMMAANAEAASLQESLSNEERAAYLPTFSKSSSYVSSLHSRKSSLLSNSTTLGTPATSPGLNESSSSLANDYFASKRRPSLPDQTLGQHLTRPSLLDSHRSYSSDNCLSTINSNSTELQNTTTHHNDRLRDIFPFSRPKSPNGFEIRIPLSSDDVSSSSESKLSLHRHHSSKDIPGDQTGYVMINGKRKKQVNIDEAIQRLLDVGYSGKKNKAFCLKNSEIIQICIQAREVFLNQPALLELSAPVKIVGDIHGQFQDLLRLFTKCGFPPSSNFLFLGDYVDRGKQSLETILLLLCYKIKYPENFFLLRGNHECANVTRVYGFYDECKRRCNIKIWKYFIDTFNTLPLTAIVAGKIFCVHGGLSPVLNTMDEIRNMSRPTDVPDFGLINDLLWSDPIDSPNEWEDNDRGVSYCYNKVAINKFINKFNFDLVCRAHMVVEDGYEFFNDRTLVTVFSAPNYCGEFNNWGAVMSVSQELLCSFELLDPLDSNSLKQVMKKGKQERDLANSFD

SEQ ID NO: 8173 - protein, 587 aa, Gibberella zeae PH-1
MSAGDGTSTPGVGGSNASEFVRKLYRMLEDPAHQDVARWGKDGDTFVVVENEKFTRSILPKHFKHSNMASFVRQLNKYDFHKVRQTNDSGSAANGANTLEFKHPNFRVGSKDDLDNIRRKAPAPRRTQATEDFTTSHHISVMTEQLTATQQQVQQLQELFTEVSQTNRLLVNEVLTLQKMLNAQKQSQHEMLNFLSPSTNRHQQTMHLNVGTSPLDGSDDSAPELRRARELLSSVTPDQIADRELERLQGVYGSPADSAVVIPQASMPMMHDPMNDINRYPVYPVGQTVGIDPFHSDHIHKIPYAMPNDSSANAMQEVAAPQPINIQTHGNSNSSANSALTWASRKPRIFLVEDDPTCAKIGIKFLKSMGCEVEHAQNGADAYSRITGVARDHFDMIFMDIIMPKLDGVSTTMYIRQDCPAIPIVAMTSNIRSDEVHCYFEHGMNGVLAKPFTKSGMQKIVENHLSYLLKGYDPSTQQESGSGYVVGGAGYMNPPSNLNTPGGTAFKFETTPTPPATGATWSPGQMPQQSPLTTGMDQGYGMVNGANQYGLTPTSASRASFPGNISQNNQGRMDGQSPPEKRQRTYV

SEQ ID NO: 8174 - protein, 402 aa, Carica papaya
PDQMGLAENQVITYRNPIHTYTYTYTFNSKVDSHLLIWLMQLCFNLIHEWLLKNPEASICTAQGAAEFRDIAIFQDYHGLAEFREAVAKFMGKVRRNRASFDPDRIVMSGGATGAHEMIAFCLADPGDAFLVPPPYYPGFDRDLRWRTGVKLIPVVCESSNDYQITIEALEAAYETAQEADIKVKGLLITNPSNPLGTIITKDTLGALVTFTNHKNIHLVCDEIYAATVFSQPEFTSIAEIIEEDKICCNRDLIHIIYSLSKDMGFPGFRVAIVYSYNDAVVSCARKMSSFGLVSSQTQYLIASMLADDEFVDKFIVESRKRLAMRHSFFTQRLAQVGINCLKSNAGLFVWMDLRRLLKEQTFEAEMVLWRVIINEMKLNVSPGSSFHCSEPGWFRVCFAAE

SEQ ID NO: 8175 - protein, 495 aa, Arabidopsis thaliana
MVAFATEKKQDLNLLSKIASGDGHGENSSYFDGWKAYEENPFHPIDRPDGVIQMGLAENQLCGDLMRKWVLKHPEASICTSEGVNQFSDIAIFQDYHGLPEFRQAVAKFMEKTRNNKVKFDPDRIVMSGGATGAHETVAFCLANPGDGFLVPTPYYPGFDRDLRWRTGVNLVPVTCHSSNGFKITVEALEAAYENARKSNIPVKGLLVTNPSNPLGTTLDRECLKSLVNFTNDKGIHLIADEIYAATTFGQSEFISVAEVIEEIEDCNRDLIHIVYSLSKDMGLPGLRVGIVYSYNDRVVQIARKMSSFGLVSSQTQHLIAKMLSDEEFVDEFIRESKLRLAARHAEITTGLDGLGIGWLKAKAGLFLWMDLRNLLKTATFDSETELWRVIVHQVKLNVSPGGSFHCHEPGWFRVCFANMDHKTMETALERIRVFTSQLEEETKPMAATTMMAKKKKKCWQSNLRLSFSDTRRFDDGFFSPHSPVPPSPLVRAQT

SEQ ID NO: 8176 - protein, 324 aa, Yarrowia lipolytica CLIB122
MSITDSFKLNDGHSIPALGLGTASDGNVEEVVYAAIKNGYRHIDTAFIYGSEVDVGKGIKRAIDEELVKRENLFVTTKVWPTFYNRVSESLDISLKDLSLDYVDLLLVHWPVSLLADSDDPRAIYLVNTDGSVRYSDSLDDWITTYKQIEEEKLSGRTKSIGVSNVSEVYLKRLLDQVKTVPAVNQFEIHPYLPQKKEIEFNEKHGILVTAFSPLGSSTGALKLHENPIAVEIAQKHNTSTGSVLINWHVSQKRAVLPKTRSIERVVANGMKVPLDQGDLDKLDKIWLQTGTQRAIGLRWLDKNGDYLGFSEDDIEHKHIWAKD

SEQ ID NO: 8177 - protein, 469 aa, Vibrio cholerae O1 biovar eltor str. N16961
MRLVWFRRDLRSFDNTALTAALNSGDPVAAMYIATPEQWHQHHLAPIQADLIWRRLAELQQELAALNVPLFYQQVADFQAAAVAVSQLAKTLNATQVLANRDYELDEQQRDQLAQQLLSEQGIIWSAFDDKCVLPPGSVRTKQGEFFKVFTPFKRAWLTLFQPPVIGKNRPVALWNVPSALAELVWHPEQAFDYPRIDSTPWAADFETVRAQLRDFCRERVQDYHQARDFPAREGTSSLSPYLAIGVLSARQCVARLYHESSMGELSEGAQVWLSELIWREFYQHLVAIEPNLSKSRDFVEWGARLEWWNDNEKFQLWCEGKTGYPIVDAAMRQLNQTGWMHNRLRMIVASFLTKDLHIDWRWGERYFMSRLIDGDYAANNGGWQWCASTGCDGQPYFRIFNPVSQGEKFDPNGDFIRRWVPELRSVSSAYIHQPWTYPAVNSVLYPARLVDHKQEREVTLRLYKTAKG

SEQ ID NO: 8178 - protein, 206 aa, Cupriavidus necator
LQPGSAQVAAGYALYGPTTMLVLTVGNGVNGFTLDPNLGEFFLTHPHLRVPPDTQEFAINASNSRFWEAPVQRYIGECMAGKSGPRGKDFNMRWIASMVAEAHRILMRGGVFMYPRDTKDPAKPGRLRLLYEANPIAFLMEQAGGRASTGRQTLMSVAPGALHQRIGVIFGSRNEVERIEGYHTNQTDPDLPSPLFNERSLFRASA

SEQ ID NO: 8179 - protein, 471 aa, Vibrio parahaemolyticus RIMD 2210633
MILVWFRRDLRTLDHTALKAALDTGQPVVACFIATPEQWQEHHMAPMQADLIARRLEHVHQELTELNIPLLYKEVPRFDDCTQVICDWADKLNATAAMVNINYEVNEVELDRKVSQALDNRGVEFHAFHDKCVHAPTTVLNKQGEYFKVFTPFKRAWLQKFSLPTVSKPQRQNELPSAQLAAVKQDGFDADFTFSYPRESSEAWCVSTNDILKQLRTFARERSDGYQMKRDFPAIDGTSQLSPYLAIGALSPRQCIARLYAENPQPDLSEGKATWLSEIIWREFYQHLLVFEPKLVKGRGFIDWEDKIQWSYDEQAFECWKTGTTGYPIVDAAMRQLNQTGWMHNRLRMIVASFLTKDLHIDWRWGEEYFMSKLVDGDFAANNGGWQWSASTGCDGQPYFRIFNPISQGEKFDSDGQFVRHWVPEIKSVPNKFVHKPWTWEGFSLLEYHKPMVDHKVEREITLRLFKSAKE

SEQ ID NO: 8180 - protein, 159 aa, Cupriavidus necator
LQVPADTQEFAINASNSRFWEAPVQRYIAECMAGKSGPRGKDFNMRWIASMVAEAHRILMRGGVFMYPRDSKDPAKPGRLRLLYEANPIAFLMEQAGGRASTGRQTLMSVAPGALHQRIGVIFGSRNEVERIEGYHTDQTDPDLPSPLFNERSLFRASA

SEQ ID NO: 8181 - protein, 462 aa, Arabidopsis thaliana
MSEEQPHANLAVPAFKTEKDPVTQTQNGQSSVWRFGGSDKAAKASTVTLRGVIYMLFDNCGKDVNKTILPLGHGDPSVYPCFRTCIEAEDAVVDVLRSGKGNSYGPGAGILPARRAVADYMNRDLPHKLTPEDIFLTAGCNQGIEIVFESLARPNANILLPRPGFPHYDARAAYSGLEVRKFDLLPEKEWEIDLEGIEAIADEKTVAMVVINPNNPCGNVYSHDHLKKVAETARKLGIMVISDEVYDRTIFGDNPFVPMGKFASIVPVLTLAGISKGWVVPGWKIGWIALNDPEGVFETTKVLQSIKQNLDVTPDPATIIQAALPAILEKADKNFFAKKNKILKHNVDLVCDRLKDIPCVVCPKKPESCTYLLTKLELSLMDNIKDDIDFCVKLAREENLVFLPGYALGLKNWMRITIGVEAHMLEDALERLKGFCTRHAKKTETETESLQALKLSDNNLEM

SEQ ID NO: 8182 - protein, 340 aa, Brassica napus
MDHEADAFRTDLMTITRFVLNEQSKYPESRGDFTILLSNIVLGCKFVCSAVNKAGLAKLIGLAGDTNIQGEEQKKLDVLSNDVFVKALVSSGRTSVLVSEEDEEATFVESSKCGKYCVVFDPLDGSSNIDCGVSIGTIFGIYTMEHSDEPTTKDVLKPGNEMVAAGYCMYGSSCMLVLSTGTGVHGFTLDPSLGEFILTHPDIKIPKKGNIYSVNEGNAQNWDGPTTKYVERCKYPKDGSPAKSLRYVGSMVADVHRTLLYGGIFLYPADKKSPNGKLRVLYEVFPMAFLMEQAGGQAFTGKKRALDLVPKKIHERSPIFLGSYDDVEEIKALYAEEEKN

SEQ ID NO: 8183 - protein, 462 aa, Arabidopsis thaliana
MSEEQPHANLAVPAFKTEKDPITQTRNGQSSVWRFGGSDKAAKASTVTLRGVIYMLFDNCGKDVNKTILPLGHGDPSVYPCFRTCIEAEDAVVDVLRSGKGNSYGPGAGILPARRAVADYMNRDLPHKLTPEDIFLTAGCNQGIEIVFESLARPNANILLPRPGFPHYDARAAYSGLEVRKFDLLPEKEWEIDLEGIEAIADEKTVAMVVINPNNPCGNVYSHDHLKKVAETARKLGIMVISDEVYDRTIFGDNPFVPMGKFASIVPVLTLAGISKGWVVPGWKIGWIALNDPEGVFETTKVLQSIKQNLDVTPDPATIIQAALPAILEKADKNFFAKKNKILKHNVDLVCDRLKDIPCVVCPKKPESCTYLLTKLELSLMDNIKDDIDFCVKLAREENLVFLPGDALGLKNWMRITIGVEAHMLEDALERLKGFCTRHAKKTETETESLQALKLSDNNLEM

SEQ ID NO: 8184 - protein, 544 aa, Geobacter sulfurreducens PCA
MAARIIKFDQEGRNAILKGVNTLADAVKVTLGPKGRNVVIEKAFGSPLITKDGVTVAKEIELEDKFENMGAQLVKEVASKTSDVAGDGTTTATVLAQAIYRQGSKLVAAGHNPMEIKRGIDKAVETIVAELKSISKPIKDHKEIAQVGTISANNDKTIGDIIAQAMEKVGKEGVITVEEAKAMETSLETVEGMQFDRGYLSPYFVTDPERMEASLENAMILIHDKKISNMKDLLPVLEQTAKSGRPLLIIAEDIEGEALATLVVNKLRGVLNICAVKAPGFGDRRKAMLEDIAILTGGQVISEEIGNKLENTTMDMLGRAKRITVDKDNTTIIDGDGKEADIQGRVKQIRAQIEETTSDYDREKLQERLAKLVGGVAVIKVGAATETEMKEKKARVEDALHATRAAVDEGIVPGGGVAYLRALASLDALSLPTEQQFGVNVIKRSLEEPIRQIAQNAGVDGSIVVDKVKNSKDAFGYNAAEDEYVDMLAAGIIDPTKVSRSALQNAASVAGLMLTTEAMIADKPKEEAPMPAMPGGMGGMGGMM

SEQ ID NO: 8185 - protein, 383 aa, Ceratopteris richardii
MNTFLSSGPHTYLNNLRCGEWGSGTAPGPIADPKSAAYYRDHTKNDKVNDLSNRLHSYGPPEALQYPNQHAIAADTEKMEVENSGKMAASVERSAQDAHASGALQEDVVAAYVDNMPACVAGVTLVPQGGRGTIPIRRIDNPTSRQVTFSKRRNGLLKKAYELSVLCDAEVGVMVFSATGRLSEFASTSMQKVLERYQEHSNGAPSRKVLLQDVEFWKREVLFLRDQLFHLKNYENHILGENQIPLDLAEIQRVETRLENALNKIRIQKVQVLHGEMQQIYKQEARLFEENNILRKKLAEATTINGMRGSMSTMTMSHEDLPGSTNQSYGTKALQGGCPSDTSTTTSNDPNHHSSHPPSHPSASQPLTLHLTSPCSPKLDLRL

SEQ ID NO: 8186 - protein, 199 aa, Triticum aestivum
MWSTDSDLDESASTTTAATSSLSSSCSLQPQTPPPPRRRRSRNRRRAQRRVKNGPEVEESEAEAEAEEVWCGAQWEAAWPRRARPVVLAGEDAAPDRAGAGAGDSGVGRARSLTDDDLEELKGCVDLGFGFSYNEIPELCGTLPALELCYSMSQRFLDEHQPFLSASCLDWIVRDSPDEVKARLKYWAQAVACTVKLCS

SEQ ID NO: 8187 - protein, 239 aa, Ceratopteris richardii
MVRRKIKIKRIENATTRQVTFSKRRGGLLKKAHDLSVLCDADVGVIIFSSKGKLFQFANPSMKSVLERYYKAQGDAESADNVSSAENIEIDRITLFTEKLKALQRNVIGDDLERLSLRDLIHLEQQIHESLGRIRAKKEEMILDQLEDFKKKVTDARKTTNANSSLLDKLLDFCSSDMTSSHNFVDCEPLLISEAPQADASLAGRAATSEQSTDVRECSPPAKRLRITEDLNHSPVCME

SEQ ID NO: 8188 - protein, 401 aa, Xanthomonas oryzae pv. oryzae KACC10331
MLSEPLIDFLTSGVARLGVWGMLAVLLVFTQLTIFAVTLYLHRSQAHRGVDFHPVIAHFFRFWTWFTTSMISREWVAIHRKHHAKVETEEDPHSPQSKGISQVFWRGVELYREARTQRADIEQYGKAAPTDWIERHLYTPHANAGPVALLVINSVLFGLPGIALWAVQMAWIPFWAAGVVNVLGHWWGYRNFESADTSTNLTPWALRIGGEELHTHHHAFPSSARFSMRRWELDIGWVVIRSVQAFGLAKVLRVAPSLDIRPNIAVLDADTLKPLLSHRFQAMTDYQRNVLKPALREEAAATGAKLRELLPRRLRKGLVDDGRWLKPEARAQLQTWVAQRPRMRTLVEYRARLTAVLEARSHDASERLRQLQQWCHEAEASGNAALQAYAARLKGDALSGA

SEQ ID NO: 8189 - protein, 345 aa, Candida glabrata CBS138
MPVATERRASMDDFDTDIITLPRFIVENQKTVKTARGDFSLVLNALGFAFKFISQTIRRAELVNLIGLAGASNSTGDEQKKLDVLGDEIFINAMKGCGFIKLLVSEEQEDLIVFPTETGTYAICCDPIDGSSNLDAGVSVGTIVSIFKLLPGSTGSIKDVLRSGHDMVAACYAMYGASTHLMLTMGNGVDGFTLDTNLGEFILTQPNLRIPQLRPIYSVNEGNRLYWDELIVSFIDSLKEGQESNKGKPYSLRYIGAMVADVHRTFLYGGLFSYPGDRLKPDGKLRLLYEAFPMAFLVEQAGGKAVNDQGERILDLVPKHIHDKSSIWLGSSGEIDKFLKHIGKE

SEQ ID NO: 8190 - protein, 449 aa, Arabidopsis thaliana
MNHNSNLVLPSHQTETQTQDETDISVWRFRGSDNAAKASSVTMRVIVYKLFDECSLDVKKPLLPLAHGDPSVYPCYRTSILVENAVVDVLRSGKGNSYGPAAGILPARQAVADYVNRDLTNKVKPNDVFITVGCNQGIEVVLQSLARPNANILLPRPSYPHYEARAVYSGLEVRKFDLLPEKEWEIDLPGIEAMADENTVAMVIINPNNPCGNVYSYDHLKKVAETAKKLGIMVITDEVYCQTIFGDKPFVPMGEFSSITPVITLGGISKGWIVPGWRIGWIALNDPRGILKSTGMVQSIQQNLDITPDATTIVQAALPEILGKANKELFAKKNSMLKQNVELVCDRLKEIPCLVCNKKPESCTYLLTKLKLPLLEDIEDDMDFCMKLAKEENLVLLPGVALGLKNWIRITIGVEAQMLEDALERLNGFCKRHLKKTESSFQALSNGKI

SEQ ID NO: 8191 - protein, 709 aa, Pseudomonas aeruginosa PAO1
MSEQNNEQRSQAAGTDTVDRGNSNAKLEQLEAYREDATGEALSTNTGTRIADNQNTLKAGERGPSLLEDFIMREKITHFDHERIPERVVHARGSAAHGYFEAYEDLSDLTKAGFLAEAGKRTPVFVRFSTVQGPRGSADTVRDVRGFAVKFYTDEGNFDLVGNNMPVFFIQDAIKFPDFVHAVKPEPHNEIPTGASAHDTFWDFVSLTPESAHMVMWLMSDRAIPIAYRNMQGFGVHTFRLVNAAGESVLVKFHWRPKSGTCSLVWDEAQKLAGKDPDFNRRTLWEDIEKGDYPEWELGLQVIPENQQDSFDFDLLDPTKLVPEELVPVRVVGRMVLNRNPDNFFAETEQVAFHVGHVVPGIDFTNDPLLQGRLFSYTDTQLLRLSGPNFNEIPINRPLCPFHNNQRDAPHRQTINRGRASYEPNSIDGGWPKETPPAARNGGFSTYHEPVSGSKLRKRADSFADHFSQAALFWHSMSEAEQAHIVAAYSFELSKVERQSIREREVNQILLNIDPQLAARVAANVGVQLAAPANPTPQPKPSPALSQMNLLSGDIRSRKVAILIADGVAESDVSDLRDALRQEGADAKLIAPSASPVQAENGAELSPEGTWDGLPSVAFDAVFVPGGAASSQAIGADGRGLHYLLEAYKHLKPVAFAGDAQALASQLSLPGDPGVVLGATATDVFPGLRQALMQHRIWQREAATKAIPA

SEQ ID NO: 8192 - protein, 341 aa, Musa acuminata
MDHEAEAHRTDLMTITRYVLNEQSRHQESRGDFTILLSHIVLGCKFVCSAVNKAGLAKLIGLAGETNVQGGSKRKLDVLSNEVFVKALISSGRTCILVSEEDEEATFVDPSLRGKYCVVFDPLDGSSNIDCGVSIGTIFGVYMVKDKDNVTLDEVLQPGKNMLAAGYCMYGSSCTLVLSTGSGVNGFTLDPSLGEFILTHPDIKIPKKGKIYSVNEGNAKNWDGPTTKYVEKCKFPKDGDSPKSLRYIGSMVADVHRTLLYGGIFLYPADKKSPNGKLRVLYEVFPMSFLMEQAGGQAFTGKQRALDLVPTKIHQRSPIFLGSYDEVEEIKALYAAEENTA

SEQ ID NO: 8193 - protein, 728 aa, Aspergillus fumigatus
MRLTFIPSLIGVANAVCPYMTGELNRRDEISDGDAAAATEEFLSQYYFNDNDAFMTSDVGGPIEDQNSFSAGERGPTLLEDFIFRQKIQRFDHERVPERAVHARGAGAHGVFTSYGDFSNITAASFLAKEGKQTPVFVRFSTVAGSRGSSDLARDVHGFATRFYTDEGNFDIVGNNIPVFFIQDAILFPDLIHAVKPRGDNEIPQAATAHDSAWDFFSQQPSTMHTLLWAMSGHGIPRSFRHVDGFGVHTFRFVTDDGASKLVKFHWKSLQGKASMVWEEAQQTSGKNPDFMRQDLHDAIEAGRYPEWELGVQIMDEEDQLRFGFDLLDPTKIVPEEFVPITKLGKMQLNRNPRNYFAETEQVMFQPGHIVRGVDFTEDPLLQGRLFSYLDTQLNRHGGPNFEQLPINQPRVPVHNNNRDGAGQMFIPLNPHAYSPKTSVNGSPKQANQTVGDGFFTAPGRTTSGKLVRAVSSSFEDVWSQPRLFYNSLVPAEKQFVIDAIRFENANVKSPVVKNNVIIQLNRIDNDLARRVARAIGVAEPEPDPTFYHNNKTADVGTFGTKLKKLDGLKVGVLGSVQHPGSVEGASTLRDRLKDDGVDVVLVAERLADGVDQTYSTSDAIQFDAVVVAAGAESLFAASSFTGGSANSASGASSLYPTGRPLQILIDGFRFGKTVGALGSGTAALRNAGIATSRDGVYVAQSVTDDFANDLKEGLRTFKFLDRFPVDH

SEQ ID NO: 8194 - protein, 355 aa, Aspergillus oryzae
MSGHENNGAPPVGKEKINTDIVTLTRFLTEEQTKVPEATGDFTLLCHALQFSFKSIAYYIRCAFLINLTGLAGSSNTTGDDQKKLDVIGNDIFISAMRGSGKCRILVSEEEEEAIIFDEHPYARYAVVCDPIDGSSNLDAGVSVGTIFGIFKLPDSVLGPENKVSPKDLLLPGTEMVASGFTMYGASAQLVITMRNGGVNGFTLENSLGEFILTHPNMTLPAKRAIYSVNEGNSSYWEEWTNAYFHSLKFPPEGQKPYSARYIGSMVADAYRTLLYGGVFAYPADKKAPKGKLRILYECAPMAMLFENAGGLAVNSRMERLLGVVPEHIHDKSGVFLGSKDEVQKIIDTYNKYKK

SEQ ID NO: 8195 - protein, 446 aa, Oryza sativa (japonica cultivar-group)
MVGGGALRRVGKYEVGRTIGEGTFAKVKFAQNTESGESVAMKVVDRSSILKHKMADQIKREISIMKLVRHPNVVRLHEVLASRKKIFIILEFITGGELFDKIIRHGRLNEADARRYFQQLIDGVDFCHSKGVYHRDLKPENLLLDSQGNLKISDFGLSAWPAQGGALLRTTCGTPNYVAPEVLSHKGYDGALADTWSCGVILYVLLAGYLPFDEVDLTTLYGKIESAEYSFPAWFPNGAKSLIHRILDPNPDKRIRIEEIRNDEWFKKNYEPTREIESEEVNLDDVNAAFDDPEEDADHTLDDEAGPLTLNAFDLIILSQGLNLAALFDRRQDYDKLQNRFLSRKPAKVIMSSMEVVAQSMGYKTHIRNYKMRVEGLNANKTSHLAVMLEIFEVAPSIFMIELQRAAGDTSDYNKFINNYCSKLDDIIWNFPIEKSKSRISRLSKR

SEQ ID NO: 8196 - protein, 460 aa, Lactobacillus plantarum WCFS1
MDKERQMPKDFFWGNSVSSMQTEGAWDEDGKGRSVYDVRPATATTSDWHDAIDEYHRYEEDLDLMKDLHLNMYRIQISWSRVVPDGDGEFNAAGIAFYDRLVDAMLARGITPMICLYHFDMPLALAENENGFMSRHTVDAFVRFGEKMIAHFADRVKYWIVFNEHNLYFTDEVFNISGYTKGDQSVNDLYRIFHHTMLAHARLDDFVHQNYDDVKIGGMLAYTPVYPETAKPIDIMAARKSDEFLNNNLNDAYVHGHYSPEVLRYVEQQGIDYDLQPGDEAIIGKMKADFLAFSYYRSTVINGDKIPVNAVPNRYLNYSFEANRFLQANEWGWAIDPLGFRNLITKLYDQYEVPVFPIENGIGLREHWDGQHMIEDDERITYHEEHIKAMKDAMLIDGAKVLGYLGWGLIDIPSSHADIEKRYGVVYVNRSNHDLKDLKRVPKKSYYWLQGVLAKNGDEL

SEQ ID NO: 8197 - protein, 190 aa, Gleditsia triacanthos
KFHEDDHGEVVSEIRRSDLEPYLGLHYPATDIPQASRFLFKQNRVRLICDCHANPVRVIQSEELRQPLCLVISTLRSPHGCHTQYMANMGSIASLVMAVIVNGTDTTKLWGLLVCHHTSPRHVPFPLRYACEFLMQAFGLQLYSDMQLASQMAEKRILRTQTLLCDMLLRDSPFGIVTQSPNIMDLVKCD

SEQ ID NO: 8198 - protein, 220 aa, Oryza sativa (japonica cultivar-group)
MTAALQALLDPTALSLGLPTPAINKEEYLAICLAALACTRAGKALVGVGGQQQVQACSKWLCPAPAAPEELRFRCTVCGKAFASYQALGGHKSSHRKPPSPGDHYGAAAAAQQLASAGDSKEDSASSAAGSTGPHRCTICRRSFATGQALGGHKRCHYWDGTSVSVSVSASASAASSAVRNFDLNLMPLPESTAAAGIKRWAEEEEVQSPLPVKKLRMSN

SEQ ID NO: 8199 - protein, 139 aa, Glycine max
WKYRVVGSVAALLLLLAIVVPFTQTQTQSARDKAAMAEDAGPLVGGISDSPMGQENDLDVIALARFAVSEHNNKANALLEFENVVKVKKQTVAGTMHYITIRVTEGGAKKLYEAKVWEKPWENFKKLEEFKLVEDVPSA

SEQ ID NO: 8200 - protein, 143 aa, Polaromonas sp. JS666
MTTHLRVFEPGISDTFESALRRFFSPVPLDINPQAIQMRLDVSEKKDAYVVKADLPGVKKEDINVRIDGNIVQIDAEVKQEKETRGSDDKVLRSERYYGSVSRTFSLSQDVDDAKAVAKYADGVLTLELPKKTTAASKKLTVQ

SEQ ID NO: 8201 - protein, 503 aa, Micrococcus luteus
  misc_feature (53)..(53): Xaa can be any naturally occurring amino acid
  misc_feature (144)..(144): Xaa can be any naturally occurring amino acid
  misc_feature (166)..(166): Xaa can be any naturally occurring amino acid
  misc_feature (185)..(185): Xaa can be any naturally occurring amino acid
  misc_feature (376)..(376): Xaa can be any naturally occurring amino acid
MEHQKTTPHATGSTRQNGAPAVSDRQSLTVGSEGPIVLHDTHLLETHQHFNRXNIPERRPHAKGSGAFGEFEVTEDVSKYTKALVFQPGTKTETLLRFSTVAGELGSPDTWRDVRGFALRFYTEEGNYDLVGNNTPIFFLRDPXKFTHFIRSQKRLPDSGLRDATXQWDFWTNNPESAHQVTYLXGPRGLPRTWREMNGYGSHTYLWVNAQGEKHWVKYHFISQQGVHNLSNDEATKIAGENADFHRQDLFESIAKGDHPKWDLYIQAIPYEEGKTYRFNPFDLTKTISQKDYPRIKVGTLTLNRNPENHFAQIESAAFSPSNTVPGIGLSPDRMLLGRAFAYHDAQLYRVGAHVNQLPVNRPKNAVHNYAFEGQXWYDHTGDRSTYVPNSNGDSWSDETGPVDDGWEADGTLTREAQALRADDDDFGQAGTLVREVFSDQERDDFVETVAGALKGVRQDVQARAFEYWKNVDATIGQRIEDEVKRHEGDGIPGVEAGGEARI

SEQ ID NO: 8202 - protein, 246 aa, Antirrhinum majus
MASLSDQSTEVSPERKIGRGKIEIKRIENKTNQQVTFCKRRNGLLKKAYELSVLCDAEVALVVFSSRGRLYEYANNSVKATIDRYKKASSDSSLNGSISEANTQYYQQEASKLRAQISNLQNQNRNMLGESLGALSLRELKNLESRVERGISRIRSKKNELLFAEIEYMQKRQEIDLHHNNQYLRAKIAESERVQGQHMNLMPGGSSGYEQLVETQPFDARNYLQVNGLQPNNDYPRQDQLPLQLV

SEQ ID NO: 8203 - protein, 186 aa, Gymnocladus dioica
MAYKFHEDDHGEVIAEITKPGLEPYLGLHYPATDIPQAARFLFMKNKVRMIVDCHARHVKVLQDEKLPFELTLCGSTLRAPHTCHLQYMENMNSIASLVMAVVVNDNDEDVDSSDSIQPQKRKRLWGLVVCHNTTPRFVPFPLRYACEFLAQVFAIHVNKELELENQIVEKKILRTQTLLCDMLMR

SEQ ID NO: 8204 - protein, 184 aa, Gymnocladus dioica
HGEVVSEIRRSDLEPFLGLHYPATDIPQAARFLFKQNRVRMICDCHANPVKVIQSEESRQPLCLVNSTLRSPHQCHAQYMENMGSIASLVMAVIVNGNDTTKLWGLLVCHHTSPRHVPFPLRYACEFLMQAFGLQLYMEMQLASQMAEKRTLKTQTLLCDMLLRDALFSIVTQSPNIMDLVKCD

SEQ ID NO: 8205 - protein, 844 aa, Saccharomyces cerevisiae
MKPYLFDLKLKDTEKLDWKKGLSSYLKKSYGSSQWRTFYDEKATSELDHLRNNANGELAPSSLSEQNLKYYSFLEHLYFRLGSKGSRLKMDFTWYDAEYSSAQKGLKYTQHTLAFEKSCTLFNIAVIFTQIARENINEDYKNSIANLTKAFSCFEYLSENFLNSPSVDLQSENTRFLANICHAEAQELFVLKLLNDQISSKQYTLISKLSRATCNLFQKCHDFMKEIDDDVAIYGEPKWKTTVTCKLHFYKSLSAYYHGLHLEEENRVGEAIAFLDFSMQQLISSLPFKTWLVEFIDFDGFKETLEKKQKELIKDNDFIYHESVPAVVQVDSIKALDAIKSPTWEKILEPYMQDVANKCDSLYRGIIPLDVYEKESIYSEEKATLLRKQVEETETANLEYSSFIEFTNLPRLLSDLEKQFSDGNIFSNTDTQGQLMRDQIQTWCKFIQTNEFRDIEEQMNKIVFKRKQILEILSALPNDQKENVTKLKSSLVAASNSDEKLFACVKPHIVEINLLNDNGKIWKKFDEFNRNTPPQPSLLDIDDTKNDKILELLKQVKGHAEDLRTLKEERSRNLSELRDEINNDDITKLLIINKGKSDVELKDLFEVELEKFEPLSTRIEATIYKQSSMIDDIKAKLDEIFHLSNFKDKSSGEEKFLEDRKNFFDKLQEAVKSFSIFASDLPKGIEFYDSLFNMSRDLAERVRVAKQTEDSTANSPAPPLPPLDSKASVVGGPPLLPQKSAAFQSLSRQGLNLGDQFQNLKISAGSDLPQGPGIPPRTYEASPYAATPTMAAPPVPPKQSQEDMYDLRRRKAVENEERELQENPTSFYNRPSVFDENMYSKYSS

SEQ ID NO: 8206 - protein, 50 aa, Pisum sativum
PKMTLEKLLEYGNMLVQEQENVKRVQLADKYLSEAALGDANEDAIKRGTF

SEQ ID NO: 8207 - protein, 238 aa, Ceratopteris richardii
MVRRKIKIKRIENATTRQVTFSKRRGGLLKKAHDLSVLCDAEVAVIIFSSKGKLFQFANPSMETVLGRYVKASRDPEAGDNGSSTDNVEADRLTVFTEKLKMLQSNVIGDDLERLSLRDLIHLEQQVHESLGHIRAKKDELILEQIDEFKQKMADTRRTTNANTSMLDRLVDFCSSGITGSQNIVASEPGYVVGVPRTDTLRAGWIATSDQSNDGPEYVPCAKRFRITEGLNESPASE

SEQ ID NO: 8208 - protein, 97 aa, Glycine max
MAALGGNRDVTGSQNSVEIDALARFAVEEHNKKQNALLEFEKVVTAKQQVVSGTLYTITLEAKDGGQKKVYEAKVWEKSWLNFKEVQEFKLVGDAPA

SEQ ID NO: 8209 - protein, 157 aa, Brassica napus
MFDMGPPISSELQVVSFHTVSKGYWGECGQRGGYFEMTNLPPKTVDEIYKVASIALSPNVPGQIFMGVMVNPPKPGDISYLKFAAESKSIHESLRRRARMMTDGFNSCRNVVCNFTEGAMYSFPQIRLPPRAIEAARRAGQSADVFYCLKLLEATGI

SEQ ID NO: 8210 - protein, 137 aa, Schizosaccharomyces pombe
MPPSTVNQEVNSILFIKNLSFKITAEEMYDLFGRYGPVRQIRLGNTVQTRGTAFVVYENVQDARRACEKLSGYNFMDRYLVVHYYNPERAKVDGQDLAARFPLSINSVEENIQQKNESAHIKQSFTSVSNLGIKKVL

SEQ ID NO: 8211 - protein, 212 aa, Zea mays
  misc_feature (160)..(160): Xaa can be any naturally occurring amino acid
  misc_feature (186)..(186): Xaa can be any naturally occurring amino acid
ALTEENLLFLEAWRAVDRAYYDKSFNGQSWFRYRENALRNEPMNTREETYAAIKKMLSTLDDPFTRFLEPEKLKSLRSGTQGALTGVGLSIGYPMAINGSPSGVAVMTATPGGPAEKAGILPGDTILAIDNRSTEDMDIYDAAERLQGPEGSSVDLSIRXGTNTRHVVLKYKQSNLNPVRSRMCEXIPGSKDSSKIGYIKLTTFNQNAAGMQ

SEQ ID NO: 8212 - protein, 404 aa, Prosthecochloris aestuarii DSM 271
MPYTHSPVFTPAQRVQNYNYAIRNIVTHARKLEAQGKKITYLNIGDPVLYGFQPPEELIEANVLALRHGHNGYSPSSGRKEAVEAIAEDACRRGISTSPDNVIITFGASEAADLVCTSMLNPGDEVLCPSPGYPLYNAIIAKLNAREVRYSLDPANDWLPDPEQVEKSITPRTKILVVINPNNPTGELYSRETLDMFVDIARRHKLLIITDEVYHKLVYEGEHIPLASLASDDVAVITIDSLSKNYMAPGWRTGWLMITNSALIPDVRQAFIKLADARLCAPMAPQYTIKAAMTMGPEYNETILSRLRAQRELTIDRLNAIEGFSCNKPSGAFYVMGKLDLDATPFKTDEEFVLKLLQEKQVLFVHGSGFGTDPASGYARIVYLPDVTILEKVYADVADFINSL

SEQ ID NO: 8213 - protein, 783 aa, Bordetella parapertussis 12822
MKIVCLGGGPAGLYFGLLMKLQDPANEVTVIERNRPYDTFGWGVVFSDATMDNLRQADPVSAKTIGDAFNHWDDIEIHYRDRSIRTSGHGFIGIGRKHLLNILQARCEEVGVKLVFETFVQDDQALARDYDADLVIAADGINSVVRTRYADTFTPDIDQRRCRFVWLGTTKVFDAFTFAFVQNEHGWFQAHAYRFEDGLSTFIVETPEETWQSAGIEGMSQEDGIAYCERLFAPWLDGHRLISNAKHIRGAAIWIRFPRVICPHWVRWNRLQTPRGERDVPVVLMGDAAHTAHFSIGSGTKLALEDAIELARCLDGRRGDLRGALQHYEDVRSVEVLKIQNAARNSTEWFENVRRYANLEPEQFAYSLLTRSQRISHENLRLRDAAWLQGYEAWIAERAGAGPAPGAQAPLPMLTPFQARSVRLANRIVVSPMAMYSCVDGVPGEFHLVHLGARALGGAGLVMVEMTCTSPDARITPGCPGLWNDEQAGAFGRIVDFVHGNSAARIGIQLGHAGRKGSTQLGWQQMDHPLPEGNWPLLSASALPYLPGVSQTPRAMTRADMDRVREDFAAAARRAARAGFDWLELHCAHGYLLSSFISPLTNQRDDEYGGSLENRLRYPLEVFRAVRQAWPAELPMSVRISAHDWVEGGITADDAVEIARHFKAAGADMIDCSSGQVSPDQQPVYGRMYQTPFADRVRNEAGIATIAVGAIFEADHANGIIASGRADLCALARPHLADAAWTLREAARVGYRDVHWPDQYVAGKRQLETNFERAAMLAQLDIK

SEQ ID NO: 8214 - protein, 732 aa, Pseudomonas aeruginosa PAO1
MSEPMSERERWQLELDKLQRGLQGDPFAFLGPQRDPGGEGGVLRAYLPGAQRVELLDEDGATLAELEQSDPGSGLFQRHLERLPPRYRLRVHWPDGVQESEDPYAFGPLLGELDLYLFAEGNHRQLASCLGAQLTRHEGVEGVRFAVWAPNAVRVSVVGDFNGWDGRRHPMRRRYPSGVWELFVPRLGEGELYKYELQGHDGLLPLKADPLALACETPPGTASKTCAALRHEWRDQDWLARRAERQGYAAPLSIYEVHAGSWRHRDGRPPHWSELAEELIPYVRQLGFTHIELMPVMEHPFGGSWGYQPLGLFAPTARYGTPEDFAAFVDACHQAGIGVILDWVPAHFPTDAHGLGRFDGTALYEYEHPFEGFHQDWDTYIYNLGRSEVHGFMLASALHWLRTYHVDGLRVDAVASMLYRDYSRKEGEWLPNRHGGRENLEAIDFLHHLNQVVASETPGALVIAEESTAWPGVSRPVAEGGLGFSHKWNMGWMHDSLAYIGEDPLHRRYHHHQLTFGLLYAFSEHFILPISHDEVVHGKHSLLDKMPGDRWQKFANLRLYLSFMWSHPGKKLLFMGCEFGQWREWNHDGELDWYLLRYPEHQGVQDLVAALNRLYRELPALHARDGEALGFEWLIGDDQANSVYAWLRHAAGEPSLLAVHNFTPVPRQGYRIGVPQGGDWDVLLNSDAQAFAGSGAGSQGRVSSESCGAHGQAQSLVLDLPPLGTLLLRPAG

SEQ ID NO: 8215 - protein, 248 aa, Oryza sativa
MGRGRVELKRIENKINRQVTFAKRRNGLLKKAYELSVLCDAEVALIIFSNRGKLYEFCSGQSMTRTLERYQKFSYGGPDTAIQNKENELVQSSRNEYLKLKARVENLQRTQRNLLGEDLGTLGIKELEQLEKQLDSSLRHIRSTRTQHMLDQLTDLQRREQMLCEANKCLRRKLEESNQLHGQVWEHGATLLGYERQSPHAVQQVPPHGGNGFFHSLEAAAEPTLQIGFTPEQMNNSCVTAFMPTWLP

SEQ ID NO: 8216 - protein, 466 aa, Lactococcus lactis
MLYGKENRDEAEFLEPIFGSESEQVDLPKYKLAQQSIEPRVAYQLVQDEMLDEGNARLNLATFCQTYMEPEAVKLMSQTLEKNAIDKSEYPRTTEIENRCVNMIADLWNASEKGKIYGTSTIGSSEACMLGGMAMKFSWRKRAEKLGLDINAKKPNLVISSGYQVCWEKFCVYWDIEMREVPMDREHMSINLEKVMDYVDEYTIGVVGIMGITYTGRYDDIKALDNLIEEYNKQTDYKVYIHVDAASGGLYAPFVEPELEWDFRLKNVISINTSGHKYGLVYPGVGWVLWRDKKYLPEELIFKVSYLGGELPTMAINFSHSASQLIGQYYNFVRYGFDGYKAIHERTHKVAMYLAEEIEKTGMFEIMNDGAQLPIVCYKLKENSNRGWNLYDLADRLLMKGWQVPAYPLPKNLENEIIQRLVIRADFGMNMAFNYVQDMQEAIDALNKAHILFHQEPENKTYGFTH

SEQ ID NO: 8217 - protein, 336 aa, Oryza sativa; identical to SEQ ID NO: 161

SEQ ID NO: 8218 - protein, 360 aa, Triticum aestivum
  misc_feature (302)..(303): Xaa can be any naturally occurring amino acid
  misc_feature (310)..(310): Xaa can be any naturally occurring amino acid
  misc_feature (313)..(313): Xaa can be any naturally occurring amino acid
AYLGDTIEQVCTKKQAGTGPEFPGYRRPTRPLLSGGLDSSLVASVVSRYLAETKVARQWGNKLHTFCIGLKGSPDLKAAKEVADYLGTVHHELHFTVQQGIDALEEVIYHIETYDVTTIRASTPMFLMSRKIKSLGVKMVLSGEGSDEIFGGYLYFHKAPNKKELHEETCRKIKALHLYDCLRANKATSAWGLEARVPFLDKNFINVAMDLDPECKMIRRDLGRIEKWVLRNAFDDEKKPYLPKHILYRQKETVQRMGLGTSWDGWVWKDHANAHVPESMMTNAYFVYLKTHHNKRTYYYRXXLRILPKXLLXNGPGGHVACTRKTVEWDPPGQASPSAVALVYTRLRERPDRYPLEASS

SEQ ID NO: 8219 - protein, 336 aa, Rubrivivax gelatinosus PM1
MTRRISLTQYLVEEQRERGRIPAQLRLLLEVVARACKSIAISVNKGALGGVLGSAGSENVQGEVQKKLDIIANEVLIEANEWGGALAAMASEEMDSIYVVPNRYPQGEYLLLFDPLDGSSNIDVNVSIGTIFSVLKKQSDTPGVSTQDFLQPGSAQVAAGYCVYGPQTTLVLTVGDGVAMFTLDREQGSWVLTTDEVRIPEDTREFAVNMSNQRHWAPPMQRYIDECLQGKDGPRGKDFNMRWVASMVADVHRILCRGGVFMYPWDKREPAKAGKLRLMYEANPMGFIVEQAGGAATNGKQRVLDLQPSQLHERVSVILGSKNEVERASAYHREAG

SEQ ID NO: 8220 - protein, 670 aa, Parachlamydia sp. UWE25
MNIQITPGSPFPFGANIQEGKVNFALYAKNIEKISLCLFNENDPLNPFKEIELEPSLNKTGNVWHIAIESLPPYTLYAFRVPVENSNYLLIDPYAKSIYSSPDWGNAKPYSPLGRIIPLTTFDWEGIPSPKLPSKDLIIYEMHIRGLTQDQSSQVSHPGTYLGVIEKIPYLKELGINAVELMPIYEFNESEALQINPKTQQKLVNYFGYSTVNFFSPMNRYASEIQENKTLVEFKTMVKELHRHGIEVILDVVYNHTFEGNQMGPIQSFRGLDKHAYYMIDEQGNYLNFSGCGNTFNANHPIVKEFIIQSLRYWVTEMRVDGFRFDLASILCRSENGTPLNPSPLIEAISHDPILSQTKLIAEAWDAGGLYQVGGFYPGQRWAEWNGHYRDIVRRFIKGTSGHKTAFATALSGSQDLYGWRGTPCCSINFITAHDGFSLADLVTYNDKHNLDNGEENRDGFDHNDSWNCGIEGHSNNKKIVALRERQIRNFLLALLVSQGIPMILMGDEYAHTRDGNNNTWCQDNKLNWFLWDKLLEKQSVFRFFKSLITFRKNYPLLKRDTFLEETDVTWHGQVPFNPDWENDNKFIAFSLNIPHEGPDLYVAFNASHVVLTVTIPPARQGMHWVWLVNTHNVAPGDFFEESCRKRVNSNTLKIPSYTSIALKAEVDRS

SEQ ID NO: 8221 - protein, 411 aa, Solenostemon scutellarioides
MELQNSAQEMEAPTTITIKGILGLLMANTDAKENGKRVISLGIGDPTAYSCFHASNAAQEGVVECLRSAKFNGYAPTAGLPQTRQAIAEYLSRDLPYKLPAESVYVTAGCTQAIEIALSVLARPGANILLPRPCFPIYGLCASFRNIEVRYFDLHPEKGWEVDLQAVEDLADHNTVAMVIINPGNPCGNVYSYQHLKKVAETAKRLGIVVIADEVYGHLAFGANPFVPMGNFGSIAPVVTLGSLSKRWLVPGWRLGWLVINDPDGTLMSPKFVERIKKYCDICGGPATFIQAAVPEIVEQTQEVFFRKTINILRQTSDICCQKIEEIDGITCPTKPKGAMAFMVKLNISRMKDISDDIDFCFKLAKEESVIILPGIAVGLNNWLRITFAVEPSALEEAMERLKSFCIRHSY

SEQ ID NO: 8222 - protein, 585 aa, Triticum aestivum
MCGILAVLGCADDTQGKRVRVLELSRRLKHRGPDWSGMHQVGDCYLSHQRLAIIDPASGDQPLYNEDKSIVVTVNGEIYNHEQLRAQLSSHTFRTGSDCEVIAHLYEEHGENFIDMLDGVFSFVLLDTRDNSFIAARDAIGVTPLYIGWGIDGSVWISSEVKGLNDDCEHFEIFPPGHLYSSKQGGFKRWYNPPWFSEVIPSVPYDPLALRKAFEKAVIKRLMTDVPFGVLLSGGLDSSLVAAVTVRHLAGTKAAKRWGTKLHSFCVGLEGSPDLKAAKEVANYLGTMHHEFTFTVQDGIDAIEDVIYHTETYDVTTIRASTPMFLMSRKIKSLGVKMVISGEGSDEIFGGYLYFHKAPNKEELHRETCQKIKALHQYDCLRANKATSAWGLEARVPFLDKEFINEAMSIDPEWKMIRPDLGRIEKWMLRKAFDDEEQPFLPKHILYRQKEQFSDGVGYSWIDGLKAHAESNVTDKMMSNAKFIYPHNTPTTKEAYCYRMIFERFFPQNSAILTVPGGPSVACSTAKAVEWDAQWSGNLDPSGRAALGVHLSAYEQEHLPATILTGTSKKPRMIEVAAPGVAIES

SEQ ID NO: 8223 - protein, 208 aa, Enterolobium cyclocarpum
RVMAYKFHEDEHGEVVSEVKKPGLESYMGLHYPATDVPQATRFLFMKNKVRMIVDCRAKHVKVLQDENLPYDLTFCGSTLRAPHSCHVQYMQNMDLVASLVMAVVINDRDEDGDSSDSVQPQKRKRLWGLVVCHNYTPRFVPFPLRYACEFLAQVFAIHVNKEIELEYQIIEKNIMRTQSLLCDMLMRDEPLGIISQSPNIMDLVKCD

SEQ ID NO: 8224 - protein, 1383 aa, Streptomyces avermitilis MA-4680
MSENSATRVLEDGQIRASDLRPLLAAMTAARDGIFTRVPETGHGLVAELSTAFNQIMDRNAHFNSEVQRVRRELVRHGRLDERLSASPGQGYWAARVSDVNQLLDALVAPAANATRVLDAVAGGDLTQRVDLHDGNRQLRGDLRRLGRAVNKMVDQLSLFTGEVTRVAREVGTEGRLGGRAKVQGLSGSWRDVTEAVNTMASRLTAQVRDIALVTTAVARGDLTRTVTVEATGELLELKLTVNTMVDQLSAFADEVTRVAREVGTEGQLGGRAQVRGVSGVWKDLTDNVNFMASNLTSQVRNIAQVTTAVANGDLSQKITVDAQGEILELKSTINTMVDQLSAFADEVTRVAREVGTEGNLGGRAQVRGVSGVWKDLTDNVNFMADNLTSQVRNIALVSTAVAQGDLGKKITVEAKGEILELKSTINTMVDQLSAFADEVTRVAREVGTEGNLGGQAQVRGVSGVWKDLTDNVNFMALNLTSQVRNIAQVTTAVANGDLSKKITVDARGEILELKDTVNTMVEQLRAFADEVTRVAREVGTDGRLGGRAQVLGVSGVWRDLTDNVNYMADNLTSQVRNIAQVATAVAQGDLSKKIDVDARGEILELKTTINTMVDTLSSFSSEVTRVAREVGSEGQLGGQARVEGVYGTWKRLTTNVNELALNLTTQVRAIAEVASAVAQGDMSRSISVETRGEVAELKDNINLMVANLRETTRAKDWLESNLARLAALMQGHRDLMEVADLILRELTPLVNAQYGAFFLADPDEDGASLRTTVPAKGLAFIAGYGSAHSVTVDTGGMPVHGLVRQAAREKKRILVEEAPPDYIKINSGLGEAAPASVVIIPILFEDKLLGVIELASFSRFSDVHLAFFDQFVNTIGVAINTIIANSRTESLLGESQRLAIQLQDRSDELQSQQAELQRSNAELEEKAALLATSSQYKSEFLANMSHELRTPLNSLLILARLLSDNPDGHLSDQEVQFATTIHRSGSDLLQLINDILDLSKIEAGRMDVRPKKLPLIKLLDYVHATFRPLTIDRGLAFDVAVGEDVPREMYSDEQRLQQILRNLLSNAIKFTASGRVELRVGRVKDPEHRYTREDSEEVIAFAVSDTGIGIAPEKLPVIFEAFQQADGTTNRKYGGTGLGLSISREIAGLLGGRIIAESVPGKGSTFTLYVPVVSPGHAATGPAPEERPLPTPEQLSTESYITHDPEDSWPAPTKLEEWQVGRAGQVLPGRRVLIVDDDIRNVFALTHVLGRVGMPVLYAENGREGIETLERNPDVELVLMDIMMPEMDGYETISVIRRTPRWAGLPIVALTAKAMPGDREKSIARGANDYVPKPVDVDQLLTVVCALLDPEGADAEERDDFAEPTDPGPVTSGEPAVPPLTE

SEQ ID NO: 8225 - protein, 362 aa, Idiomarina loihiensis L2TR
MSALFQPFELKDVRLRNRIAVPPMCQYMAEDGVVNDWHLSHYTSLARGGAGLVIVEATAVSPEGRITPNCTGLWNDEQAQAFAPVVENIKKAGAVAGIQIGHAGRKASANRPWDGDDHIAENDTRGWQPISPSPIAFGANLPREPEEMSLDDIKRVQIDFVAAAERARDLGFEWLELHFAHGYLGQSFFSAHANQRTDEYGGSFENRARFLVETVRAVKQVWPDNFPLTARFGVIEFDGNDEQQMQESVKLTQLLKAEGLDFLNVSISFSTPNANIPWGPGFMAPIAERIRKEVDIPVASAWGIDLPQLAEHTIAQGQLDLVMVGRAHLENPHWPYDAAKVLRVEKPSWVLPAPYAHWLERY

SEQ ID NO: 8226 - protein, 207 aa, Cyclolobium nutans
VMAYKFHEDDHGEVIAEITKPGLEPYLGLHYPATDIPQAARFLFMKNKVRMIVDCHAKHVKVLQDEKLPFDLTLCGSTLRAPHSCHLQYMANMDSIASLVMAVVVNDSDEDGNSSDAVQPQKRKRLWGLVVCHNTTPRFVPFPLRYACEFLAQVFAIHVNKEIELEYQIIEKNILRTQTLLCDMLMRNAPLGIVSQSPNIMDLVKCD

SEQ ID NO: 8227 - protein, 404 aa, Neisseria meningitidis MC58
MDKFPKSAKLDHVCYDIRGPVHKKALQLEEEGNKILKLNIGNPAPFGFEAPDEILVDVIRNLPTSQGYCDSKGLYSARKAIVHYYQTKGLRDITVDDVYIGNGVSELITMSMQALLNDGDEILIPAPDYPLWTAAATLAGGTVRHYLCDEENGWFPNLADMEAKITPKTKAIVVINPNNPTGAVYSREILLEIAELARKHGLIIFADEIYDKILYDGAVHHHIAALAPDLLTVTFNGLSKAYRVAGFRQGWMVLNGPKHHAKGYIEGLDMLSSMRLCANTPMQHAIQTALGGYQSINEFILPGGRLLEQRNRAWELVNQIPGVSCVKPMGAMYMFPKIDTEMYRIRDDMKFVYDLLVREKVLLVQGTGFNWIKPDHFRIVTLPYVHQIEEAMGRLARFLQTYRQ

SEQ ID NO: 8228 - protein, 460 aa, Oryza sativa
APGYHTLSFGITAFFGVMAEQRGNMLMKKYEMGKLLGQGTFAKVYHARNTETSESVAIKMIDKEKVLKGGLMDQIKREISVMKLVRHPNIVQLYEVMATKTKIYFVLEHVKGGELFNKVQRGRLKEDAARKYFQQLICAVDFCHSRGVYHRDLKPENLLLDENSNLKVSDFGLSALADCKRQDGLLHTTCGTPAYVAPEVINRRGYDGAKADIWSCGVILFVLLAGYLPFHDKNLMDMYKKIGKAEFKCPSWFNTDVRRLLLRILDPNPSTRISMDKIMENPWFRKGLDAKLLRYNLQPKDAIPVDMSTDFDSFNSAPTLEKKPSNLNAFDIISLSTGLDLSGMFEESDKKESKFTSTSTASTIISKIEDIAKGLRLKLTKKDGGLLKMEGSKPGRKGVMGIDAEIFEVTPNFHLVELKKTNGDTLEYRKVLNQEMRPALKDIVWAWQGEQPKQQQQPTC

SEQ ID NO: 8229 - protein, 206 aa, Cyclolobium nutans
MAYKFHEDDHGEVIAEVTKPGLEPYLGLHYPATDIPQATRFLLMKNKVRLIVDCCAKHVKVLQDKKIPFELTLCGSTLRAPHSCHIQYMLNMNSIASLVMAVVVNDSDEDGDSSDAVQPQKRKRLWGLVVCHNTTPRFVPFPLRYACEFLAQVFAIHVNKEIELEYQIIEKNILRTQTLLCDMLMRNAPLGIVSQSPNIMDLVKCD

SEQ ID NO: 8230 - protein, 587 aa, Magnaporthe grisea 70-15
MATAIQTAHRSHHLVNMRSSESDNIQTRTIPILTPTIQMSAPSPGDPMDISTPTSASAPQSANRSPESERNGLTASSGAKLGAGEHRSSTPKAEQQQTTNPVAMPAPAAAAAAVHQPKIVQTAFIHKLYNMLEDPNIQHLISWSPSQESFLMSPSNDFSKVLAQLNMYGFHKVSDVFHNGSDSTLWEFKHGNNNFKRGDIIGLREIKRRASRHALVHKEYNQRPTPPQPGTPAEPMPIQDGTDPRIANMENALYDLSMRLQRSEESSHYMHIKQQAAMDTMGRLLQLNQELARTVLTLVPNPDNPTHRDVIALQGSLQRQAEMIRTLEEPHDQPLSSGRHYFSQLENAPVSPRQMPQDDPRRANLTVPPHRPSNYYRPQVPSNLSLNTRRPYGSIGGGTPSQSSPSTLRPQPPPPPAPQQHPQHPLANVELPPSSLARRHTSADIRGHGWPVPQASPSASGPPSGPPSTQWPSSPNRSVPTDDQRIRDSFSTYSIQNATPQSHSRPETPPPPPFSNGGSGLDTLTSWTWNSASSGRSGGLTVKDSSAPPTRRGSMAHILNPTDTAESPHEDMDDPRGDDDRKRKRLQ

SEQ ID NO: 8231 - protein, 300 aa, Synechococcus sp. PCC 7002
MTHYSNVLDPIPSTPPQPNPRPRNYSRLTRLSYATGPVWIILCHLGMAIAFFTGLSWGAVLWIVFWYWLRMLGTTAIYHRLLTHKAYQASPWVKWIGSFITASAGQMGPSWWKAHHEDHHRFSDHPGDPHSSKEGFWWAHYRWLISPNTFPKKLPADIERDPILKLIDRFHFVPLIALGALSYGVGGLEYLAAFFISTTLLFHGVAFVNSVCHKWGDRPFQTTDHSRNNSWVAVLALGEGWHNLHHAFGWSVRHGITIQKGKVKYLPDFTYSFIRLLERMGLASKLKQPTVTDLQNAANP

SEQ ID NO: 8232 - protein, 222 aa, Solanum habrochaites
MNIFETYNSDSLISTESSSSSSSSSSSLFSEEEIILASNNPKRPAGRKKFRETRHPIYRGIRKRNSGKWVCEVREPNKKTRIWLGTFPTAEMAARAHDVAALALRGRSACLNFSDSAWRLPIPASSNSKDIQKAAAEAAEIFRPLKESEEVSGESDNSTSPETSENVQESSDFVDEEAIFFMPGLLANMAEGLMLPPPQCAEMGDHYVETDAYMITLWNYSI

SEQ ID NO: 8233 - protein, 594 aa, Cryptococcus neoformans var. neoformans JEC21
MSAAVPPMTPPLEKEESELVHRRPSPVDQLDPAFTPPHTPEQNPCKSTKGKGIDPIDPTLLASDRHIPDNYVSYTIANQKYLPPITWKNLIYNIQWISFLALTVTPSLAIYGVFTTAWNTKTAIWSVIYYFITGLGITAGYHRLWAHRAYNASVPLQFALAIAGTGAVEGSIKWWCRGHRAHHRYTDTELDPYSAEKGFFWSHVGWMLVKPRGKIGVADVSDLSRNRVVKWQHRHYIPLILGMGFVLPTVVAGLGWGDWRGGFFFAGAARLCFVHHSTFCVNSLAHWLGEQPFDNKHSPRDHIITALCTIGEGYHNFHHQFPQDFRNAIKWFQYDPTKWFIWTMSQLGLASHLKRFPDNEVKKGQYTMKLRLLKEQADQLEWPKSSNDLPVISWDDFKAEAKERSLVAIHGFIHDCSSFVEDHPGGAHLIKRAIGTDATTAFFGGVYDHSNAAHNLLAMMRVGILDGGMEVEHLKRRPAESAASSVTNSPVSSASASSVDIQSLADDDFRLDQTQLNSQGPKPKAPFGQPQAQVADRWTLSVPPSEKLRIVQTVPEIRPGLLTHRSTGKLNKVTKADVGGEINEFIGEKPVAAA

SEQ ID NO: 8234 - protein, 371 aa, Arabidopsis thaliana
MASLLTKPKPVFLCSPSLSPRTLNTATPSLNFTRISFTHHQKLAPFKPPSLVVAFSEKGLKRDVTTAAAATEGDYRRIMLSDVLVKKKEKVVWWEREWKAMDFGAVAVVLSMHLLSLLAPFQFNWRAVSVAFGLYIVTGLLGITLSFHRNLSHKAFKLPKWLEYLFAYCGAQALQGNPIDWVSTHRYHHQFCDSDRDPHSPLDGFWFSHMNWMFDTNTITQRCGEPNNVGDLEKQPFYRFLRTTYILHPLALAVALYAMGGFPFIVWGMGVRIVWVYHITWLVNSACHVWGKQAWNTGDLSKNNWWVAALAFGEGWHNNHHAFEFSARHGLEWWQLDMTWYVVKFLQAIGLATDVKLPSEAQKQRMAFTSD

SEQ ID NO: 8235 - protein, 471 aa, Triticum aestivum
  misc_feature (333)..(333): Xaa can be any naturally occurring amino acid
  misc_feature (401)..(401): Xaa can be any naturally occurring amino acid
MGATGDSEVAAAEGAAAGCRARAALLGAYELGRTLGEGNFGKVKQARHRATGEHFAVKILDRGRVLSLRGADDQVRREIATLTMLAHPNVVRLHEVAASKTKIYMVLEFVNGGELFDRIAIKRKLSEREGRRLFQQLIDGVSYCHGKGVYHRDLKPENVLIDRKGNIKISDFGLSALPQHLGNDGLLHTTCGSPNYIAPEVLQNRGYDGSLSDIWSCGVILYIMLVGHLPFVDRNMVVLYQKIFKGDTQIPEWLSPGAQNLLRRILEPNPMKRINMAEIKIHEWFQKDYIPAAPYDDDDEDVRLGAILPIKQQISEAPGDKSTHQMNAFQLIXMASSLDLSGLFEEEGVSQRKIRFTSAHPPKDLFDKIEVSATQSGFHVQRAHSKLKITGNCNGPNNPHXFLVCAEVFVLGPSLHVVELRKSHGDTAVYRQLCDRISSDLGIDKIFGMGSLFDDNLPGFDSRAATPLVAL

SEQ ID NO: 8236 - protein, 532 aa, Yarrowia lipolytica CLIB122
MSKELYANSKDDAVYSTSFGVPFPHHPYSAQRAGPTGPLLLQDTYLIDALAHFDRERIPERVVHAKGGGAHGYFEVTDDLSDITYAEPFQKAGYKCPVTVRFSTVGGERGSADSARDPRGFSIKHRTDWGNWDMVANNTPIFFIRDPIKFPHFIHTQKRDPQTNLGAGPDASHFWNYLTQNPESLHQITYMFGDRGTPDGWRHMNGYSGHTFKFISKEGKITYTQFHYITDQGVKNLSAEKAGELAGANPDSSQQDLFEAIDNGDYPSWTVYVQTMTPEQAEKFRYSILDLTKVWSHKEFPLRKVGKFVLNKNADNYFEEIEQVAFSPSNLPNGLEASADPVLQSRLFSYPDTHRHRLGPNFNQLPVNQPRTFQKGSGCPFLAGNFQRDGNMAINNQGNRPNYLSTIRPIQSVSVPDEDFKSTHNYTGVVTKKMEDESLSVQTEEAKKHDEKIWEGASYIYVSGIQDIDAEQPRALYEKVYDDAAKARFIENVVGHASSIKQPGLKEQVAKYFGQINDDLGQKVAKGLGVSY

SEQ ID NO: 8237 - protein, 512 aa, Nicotiana attenuata
MDGSTVQGGSSVESFLRNYKLGKTLGIGSFGKVKIAEHTLTGHKVAVKILNRRKIKNMDMEEKVRREIKILRLFMHPHIIRLYEVVETPSDIYVVMEYVKSGELFDYIVEKGRLQEDEARKFFQQIISGVEYCHRNMVVHRDLKPENLLLDSKWNVKIADFGLSNIMRDGHFLKTSCGSPNYAAPEVISGKLYAGPEVDVWSCGVILYALLCGTLPFDDENIPNLFKKIKGGMYTLPSHLSAGARDLIPRMLIVDPMKRMTIPEIRMHPWFQAHLPRYLAVPPPDTMQQAKKIDEDILQEVVKRGFDRNSLVASLCNRVQNEGTVAYYLLLDNRFRASSGYMGAEFQETMEYGYHQINSSEAVASPVGQHLPGIMDFQQVGARQFPVERKWALGLQSRAHPREIMTEVLKALQGLNVRWKKIGPYNMKCQWVPGVPGHHEGMSNNSIHNPFFGDDSTIIENGGVTIPNAVKFEVQLYKTREEKYLLDLQRVQGPQFLFLDLCAAFLAQLRVL

SEQ ID NO: 8238 - protein, 583 aa, Pseudomonas aeruginosa PAO1
MAIRRRFGAQFQGNGRTCFGLWAPDAREVRVETADGRDWPLEGSDSGWFEATLPCPPGTRYRYRIDGRPGVPDPASQFQPDGVHGHSQVLDHGTYAWRVDEWRGRPWHEAVIYELHVGLFGSYAEVERFLPRLVELGVTAVELMPLGEFPGRRNWGYDGVLPFAPASAYGTPEQLKHLIDSAHGMGLMVFVDVIYNHFGPDGNYLAQYAAAFFRDDRQTPWGQAIDFRRGEVREFFYENALMWLLDYRVDGLRFDAVHAIPDSAFLVEMARRLRGAAGPERHVHLVLENDDNRASLLRQGYDAQWNDDGHHALHVLLTGENDGYYQDYPEPLRCLARCLAEGFVYQGEANRHGRPRGEPSADLAPDAFVLFLQNHDQVGNRAFGERLSVLAEPQALRLAIALQLLAPMIPLLFMGEECAAREPFLYFTDHQGELADAVREGRRKEFGEFGRFGEGATLASLPDPNAVETFERSRPGLADCDPAWRGFYRQLLEIRHEHLIPRLRGARSLGVTTIAGAALSARWRLGDGSDWRIDFNPSPLEAEVEPPAAATWVLFLDNLACAEYRRGRLSPRSIAVSLEPAHE

SEQ ID NO: 8239 - protein, 285 aa, Anabaena variabilis ATCC 29413
MTVKHLAIAPEGKKSLRLNWTNVAFFTTVHALALLAPWFFSWSALGLLLFLHWLFGSIGICLGYHRLLSHKSFQVPKWLEYAIATIGALAMQGGPIFWIGGHRQHHAHTEDVNLDPYSSQRGFWWSHMLWILYPRSEFFDYEIYQKYAPDLARQPFYRWLDRYFLLLQIPFGLLLYAIGGWSFVIYGVVLRAVLLWHSTWFVNSATHMWGYRTFNADDNARNLWWVSIVTYGEGWHNNHHTFPNVAKAGFQWWEVDVTWWSIKLLQTLGLAKKVVLPPSQRMNQG

SEQ ID NO: 8240 - protein, 485 aa, Candida tropicalis
MAPTFTNSNGQPIPEPFATQRVGQHGPLLLQDFNLIDSLAHFDRERIPERVVHAKGSGAYGVFEVTDDITDVCAAKFLDTVGKKTRIFTRFSTVGGELGSADTARDPRGFATKFYTEEGNLDLVYNNTPVFFIRDPSKFPHFIHTQKRNPETHLKDANMFWDYLTTNEESVHQVMVLFSDRGTPASYREMNGYSGHTYKWSNNKGEWFYVQVHFISDQGIKTLTNEEAGSLAGSNPDYAQEDLFKNIAAGNYPSWTCYIQTMTEAQAKEAEFSVFDLTKVWPHGKYPMRRFGKFTLNENPKNYFAEVEQAAFSPAHTVPHMEPSADPVLQSRLFSYADTHRHRLGTNYTQIPVNCPVTGAVFNPHMRDGAMNVNGNLGNHPNYLASDKPIEFKQFSLQEDQEVWHGAATPFHWKATPADFKQATELWKVLKKYPNQQEHLAHNVAVHASAADAPIQDRVIAYFTKVHPDLGDLIKKEILELSPRK

SEQ ID NO: 8241 - protein, 443 aa, Mesorhizobium loti MAFF303099
MMRKLSLLFAGALMGASAMSLVYGAPGSSANAAGSETYKQLAIFGDIFERVRAQYVTPPDDKSLVENAINGMLSSLDPHSSYMNAEQAQDMRVQTKGEFGGLGIEVTMENDLVKVITPIDDTPAAKAGVLAGDYIAKIDGEEVRGLTLNDAVDKMRGLVNTPIKLTILRQGADKPIELTVVRDIIKVKAVKFRVENDIGYMKITSFTEKTYDDLENAIDTIKKQVPDDKLKGYVLDLRLNPGGLLDQAVSVSDAFLKRGEIVSTRGRDPKDVTRFDAKPKQTDDINGKPMIVLVNGGSASASEIVAGALQDLRRVTVVGTQSFGKGSVQTIIPLGENGALRLTTALYYTPSGKSIQGKGITPDIKVDQPLPPELQGRDLTRGESDLKGHIKGADESKTGSGSAAYVPPDPKDDLQLIFAEQLLRGQKTDPAFPPNPEKAVLNQ

SEQ ID NO: 8242 - protein, 336 aa, Pseudomonas aeruginosa PAO1
MSRVTLSRYLIEQTRSHNTPADLRFLIEVVARACKEISHAVSKGALGGVLGSMGTENVQGEVQKKLDVMSNEILLEANEWAGNLAGMASEEMDHPYQIPGRYPKGAYLLVFDPLDGSSNIDVNVSVGTIFSVLRCPNEYLNQNDTLREEAFLQPGTTQVAAGYAIYGPQTMLMLTLGNGVKGFTLDRELGSFVLTHDNISVPESTAEFAINMSNQRHWEAPVKRYVEELLAGKEGPLGKNYNMRWIASMVADVHRILTRGGVFMYPRDAREPEKPGKLRLMYEANPMSFIIEQAGGAATNGTQRILDIKPENLHQRVAVFLGSKQEVERITGYHAE

SEQ ID NO: 8243 - protein, 635 aa, Lotus corniculatus var. japonicus
MCGICCVIGVPAGAESIRSTVLDRAKRIRHRGPDWTGVYAKGKNIIVHERLSIVDVETGNQPLKSADGKQVLVCNGEIYNHLQLRQSLKAPVQFATNSDSECILHLYNERGVGFVNSLNGIFGFVLIDEAKDTFIVARDHEGIIPLYYGWDETGALWVASELKALHDVCVRFEEFPPGHVLHGKVGSAGKLEKWYQPVWHDEAYVPAATAACDIKGLRESLEAAVERQMMTDVPYGVLLSGGLDSSVISAVAVRVAAKRAAAKADSKHTELGHVDPKSVVHSFSVGLKGSPDLKAAREVAAFIGTEHHEFVFTVDDGINALRDVIYHLETFDTTTIRASTAMYLMSRKIKALGVKMVLSGEGSDEVFGGYLYFHKAPDRVEFHKETVRKLKALNKFDCLRANKSTMAWGLEARVPFLDKEFLDFAMTLDPTHKMCGKHAGGRIEKWIVRKAFEGYLPPAILWRQKEQFSDGVGYSWIDSLKAFADAKVSDAQLAAAAFKFPENTPLTKESYLYRSIFETHYPEPAARACVPGGPSVACSTPAAIAWDAAFQKMADPSGRAVAGVHADAYAVAADDKTPDTSADAKHGTAAEHKASGATRAPFIAAANGIKCSAEAALPHALPKPVALASGKAEAE

SEQ ID NO: 8244 - protein, 140 aa, Triticum aestivum
MVSFDINDRTKIGLGLTGFGVLFSFLGILMLFDKGFLAMGNILFASGVSLTIGLKSTAQFFTKPKNHKGSIAFGIGLFLVLIGWPVFGMMAESYGFAVLFSGFWPTAAVYLQKNPTVGWIFQHPYVTSLLTRFRGRRAPV

SEQ ID NO: 8245 - protein, 452 aa, Neurospora crassa
MSAANGRQPEVQPCRYKVGKTLGAGSYSVVKECVHIDTGRYYAAKVINKRLMAGREHMVRNEIAVLKKVSMGHQNILTLVDYFETMNNLYLVTDLALGGELFDRICRKGSYYESDAADLIRATLSAVAYLHDHGIVHRDLKPENLLFRTPEDNADLLIADFGLSRIMDEEQFHVLTTTCGTPGYMAPEIFKKTGHGKPVDIWALGVITYFLLCGYTPFDRDSDFEEMQAILNADYSFTPLEYWRGVSDNAKDFIRRCLTIDPAKRMTAHEALQHPFVAGWARGTDGAEADKGANLLPTVKKNFNARRTLHAAIDTVRAINKLREGQFMNGGRSREPAKKAAAALGPTLGKEASMVSTASSNVTKDSGYATQPEGEGGSRDGDDVLMKDASVPAPTSSSPAPCRVSYGRAVSRIRLSRLVKACGMGLVLSDDQFLGLSSLTNGGWFCSIVIIF

SEQ ID NO: 8246 - protein, 455 aa, Caldicellulosiruptor saccharolyticus
MDMSFPKGFLWGAATASYQIEGAWNEDGKGESIWDRFTHQKRNILYGHNGDVACDHYHRFEEDVSLMKELGLKAYRFSIAWTRIFPDGFGTVNQKGLEFYDRLINKLVENGIEPVVTLYHWDLPQKLQDIGGWANPEIVNYYFDYAMLVINRYKDKVKKWITFNEPYCIAFLGYFHGIHAPGIKDFKVAMDVVHSLMLSHFKVVKAVKENNIDVEVGITLNLTPVYLQTERLGYKVSEIEREMVSLSSQLDNQLFLDPVLKGSYPQKLLDYLVQKDLLDSQKALSMQQEVKENFIFPDFLGINYYTRAVRLYDENSSWIFPIRWEHPAGEYTEMGWEVFPQGLFDLLIWIKESYPQIPIYITENGAAYNDIVTEDGKVHDSKRIEYLKQHFEAARKAIENGVDLRGYFVWSLMDNFEWAMGYTKRFGIIYVDYETQKRIKKDSFYFYQQYIKENS

SEQ ID NO: 8247 - protein, 176 aa, Pseudomonas aeruginosa PAO1
MSFNTEVQPGICMEPDAITQEYVFNHTMLRVKDPKRSLDFYSRVLGMRLLRRLDFEEGRFSLYFLAMTRGEEVPDAVDERQRYTFGRQSVLELTHNWGSESDDSQYHNGNQDPRGFGHICFSVPDLVAACERFETLGVNFVKPLDRGMKNVAFISDPDGYWVEIVQASLNGEMGRG

SEQ ID NO: 8248 - protein, 367 aa, Pseudomonas syringae pv. syringae B728a
MHDPRTTTDLFSPVTLGSMELANRIVMAPVTRSRYGEDGVPNELHATYYAQRATAGLIVAEATNISAQGRGYAATPGIWSEQQVAGWRLVTDAVHAAGGKIVSQLWHVGRFSSVDLQPNGEAPVAPSAIKAEGNTYTAGGFVPVSMPRALETGEIPGIIEQYKHAAENAKRAGFDGIEVHSANSYLLDQFLRDSTNQRTDQYGGSIENRARLTLEVTQAIVDIWGSDRVGIRLSPVTPDAGNTAPDSNVMGLHGYLIQQLNTFNLAYLHFVEGATATSREVPEGVDMDALSAGFNGPFIGNNNYDLKMAIERRAQGKIDAVAFGRLFISNPDLVARLRHGAELTIAPRESYYGGGAKGYIDWPMGKY

SEQ ID NO: 8249 - protein, 267 aa, Helianthus annuus
MENSEAIEHEHDFSCIDRSMSFQNEDSGDISPQRRIGKGKIEIKRIENTTNRQVTFCKRRNGLLKKAYELSVLCDAEVALIVFSSRGRLYEYANNSVRGTIDRYKKSCLDPPSTGSVAEANAQFYQQEATKLRQQIANLQNQNRQFYRNIMGESLADMPGKELKNLESKLEKAINRIRAKKNELLFAEIEYMQKRELELHNSNQFLRARISENERAQQQHMSLMPGSSGYNDLGPHQSFDGLNDLQTNELQLNNNYSCQDQTPLQLV

SEQ ID NO: 8250 - protein, 365 aa, Pseudomonas syringae pv. syringae B728a
MSETHKHVTAPFDRGHLKLKNRFAVAPMTRVSADEQGSATQAMTRYYERFAKGGFGLIITEGNYTDRRFSQGYRFQPGLTDDEQAQAWRATTDAVHRHGSVMIAQLMHAGALSQANRFVSESAGPSAIRPKGEQMAFYYGVGSYRVPRAMSDKDIAEAIDGFARAAQLAIGTAGFDGVEIHGANGYLLDQFLTDYSNQRTDQWGGEVGQRLRLTLEVIAAVKKVAGQAPVGVRLSQGKVNDFQHKWAGGEGDAEVIFAALADAGVDYIHVTEHEAWQPAFTQGQASLVELARRYAPDVALIANGGLHDPQKADQVLRQGADIIAVGKGALANPDLPELLRQGAPLRDFDPAILGPIANIKDSELV

SEQ ID NO: 8251 - protein, 247 aa, Helianthus annuus
MSFPNESGEMSPQRKLGRGKIEIKRIENTTNRQVTFCKRRNGLLKKAYELSVLCDAEVALIVFSSRGRLYEYANNSVKGTIDRYKKACLDPPSSGSVAEANAQFYQQEAAKLRQQIANLQNQNRQFYRNIMGESLGNMPAKDLKNLEGKLEKGISRIRSKKNELLFAEIEYMPKRENELHNNNQFLRAKIAENERSQQQHMSLMPGSSDYDLVPPHQPFDGRNYLQVNDLQPNNSYSCQDQTPLQLV

SEQ ID NO: 8252 - protein, 95 aa, Pyrus communis
MAAVGAVRDNQGVANSVETESLARYAVDEHNKKENDLLEFVRVLDDKVQVVSGTMHYLKIEATEGGKKKVYEAKVWVKPWENFKQVQEFKPVSDS

SEQ ID NO: 8253 - protein, 200 aa, Myrospermum sousanum
RVMAYKFHEDEHGEVVAESKRPDLEPYIGLHYPATDIPQASRFLFKQNRVRMIVDCHASPVGVIQDEGLMQPLCLVGSTLRAPHGCHAQYMANMGSIASLVMAVIINGNDEDTVCSRSSMRLWGLVVCHHTSARCIPFPLRYACEFLMQAFGLQLNMELQLASQSLEKRVLKTQTLLCDMLLRDSPIGIVTQSPNIMDLV

SEQ ID NO: 8254 - protein, 735 aa, Agrobacterium tumefaciens str. C58
MKKPLNSAEEKKTGDITKAEIEAIKSGLHSNPFALLGVHETPEGFSARCFIPGAEEVSVLTLDGNFVGELKQIDPDGFFEGRIDLSKRQPVRYRACRDDAEWAVTDPYSFGPVLGPMDDYFVREGSHLRLFDRMGAHPLKLEGVEGFHFAVWAPNARRVSVVGDFNNWDGRRHVMRFRKDTGIWEIFAPDVYAGCAYKFEILGANGELLPLKADPYARRGELRPKNASVTAPELTQKWEDQAHREHWAQVDQRRQPISIYEVHAGSWQRREDGTFLSWDELAAQLIPYCTDMGFTHIEFLPITEHPYDPSWGYQTTGLYAPTARFGDPEGFARFVNGAHKVGIGVLLDWVPAHFPTDEHGLRWFDGTALYEHADPRQGFHPDWNTAIYNFGRIEVMSYLINNALYWAEKFHLDGLRVDAVASMLYLDYSRKEGEWIPNEYGGRENLESVRFLQKMNSLVYGTHPGVMTIAEESTSWPKVSQPVHEGGLGFGFKWNMGFMHDTLSYFSREPVHRKFHHQELTFGLLYAFTENFVLPLSHDEVVHGKGSLIAKMSGDDWQKFANLRSYYGFMWGYPGKKLLFMGQEFAQWSEWSEKGSLDWNLRQYPMHEGMRRLVRDLNLTYRSKAALHARDCEPDGFRWLVVDDHENSVFAWLRTAPGEKPVAVICNLTPVYRENYYVPLPVAGRWREILNTDAEIYGGSGKGNGGRVQAVDAGGEIGAMLVLPPLATIMLEPEN

SEQ ID NO: 8255 - protein, 231 aa, Brassica napus
  misc_feature (105)..(105): Xaa can be any naturally occurring amino acid
MGRGKIEIKRIENSTNRQVTFCKRRNGLLKKAYELAVLCDAEVALIVFSTRGRLYEYGNNNIRATIERYKKASSDNANTHSVQEINAAYYQQESAKLRQQIQTIXNSNRNLMGDSLSALNVKELKQVENRLEKAISRIRSKKHELLLAEIENLHKREIKLDNESIYLRTKIAEVERFQPHHHQMVSGTEMTAIEALASRNYFAHNIMTIGSGSGAGHGCSYFDPDKKTHLG

SEQ ID NO: 8256 - protein, 380 aa, Escherichia coli O157:H7 EDL933
MTNKHPSLFSPFMLTEKIKLRNRIVMAPMTTWSANPDGTISEQELEFYKRRSQNVGLVITGCTYVTPSGIGFTHEFAAYDDRFINSLEKLAAAAKSGGAPAILQIFHAGNKAIPELVPNNDVISASASSVKSGDFMKRVVQSREMTENEIQETIRAFGDVTKRAIKAGFDGIELHGAHGFLLQNFFSPLFNQRNDRWGGDLEGRMRFPLAVLQEVKNVVYEYATKPFAIGYRISPEESATGGLRIEDTYKLLDRLISSGISYIHTSLVSINDSYPVESPNGPRTIELILNHIAGRVPVIAAGKIRTPSQAQEAISTGLPLVAIGKGLVINPEWVTLAESGRGHEIQTTLNPQLVPELTIPDKLWDQIQASKGTGWFPLMD

SEQ ID NO: 8257 - protein, 560 aa, Oryza sativa (japonica cultivar-group)
MDAAATAATATAAAAMVWFRKGLRVHDNPALDAARRGGAAARLYPVFVLDPRYLRPDQAAPSPGSARAGVARVRFLLESLSDLDARLRRLGSRLLLLRARDDGDVAGTVCAALKDWNIGKLCFESDTEPYALARDKKVMDFAAASGIDVFSPVSHTLFDPAEIIEKFLFSFGKWKNGGRPPMTYQSFVAIAGEPPEPIMEEYSELPPVGDTGEYELLPVPRVEELGYGDISQEDLSLFRGGETEALKRMRESLHDKEWVAKFEKPKGDPSAFLKPATTVLSPYLKFGCLSSRYFYHCIQDIYRSTKKHTNPPVSLTGQLLWRDFFYTVAFGTPNFDQMKGNKICKQIPWTENEELFPAWRDGRTGYPWIDAIMIQLRKWGWMHHLARHSVACFLTRGDLFIHWEKGRDVFERLLIDSDWAINNGNWMWLSCSSFFYQYHRIYSPTSFGKKYDPNGNYIRHFIPVLKDMPKEYIYEPWTAPLSIQKKANCIIGKDYPKPVVDHAIASKECKKMMGEAYASNRLDDDKPDKGKSSNSSRRKLSAGSQVTPNSSKTKQLKRSS

SEQ ID NO: 8258 - protein, 449 aa, Aspergillus nidulans FGSC A4
MAGSKVVEKGSVDGAPAAKLHITELPMTWSNWYQHVNWLNCFFVLFIPLVGCIGAIWTPLRLHTAIFAIIYYFNAGLGITAGYHRLWAHCCYKATLPLQIYLALAGAGAGQGSIRWWSRGHRAHHRYTDTEKDPYSVRKGFWYSHIGWIIMKQNYKKVGRSDASDLDADPVVIWQHKNYINTALFMTLIFPTLVCGLGWGDWRGGFIYGGILRVFFIQQATNCVNSLAHWIGEQPFDDRNSPRDHVITALVTLGEGYHNFHHEFPSDYRNAIEWWQYDPTKWMIWIWKQVGLAYDLKQFRANEIEKGRLQQMQKKVDARRAALDWGVPLKELPVFSWDEFIAESANRALVAIGGVIHDVSDFIKEHPGGKTFISSAVGKDATAMFNGGVYQHSNAAHNLLAMKRVGVVRGGGEVEIWKDAKQPSKVSFPEMVRAGEQITRRTVPVLDRS

SEQ ID NO: 8259 - protein, 120 aa, Glycine max
  misc_feature (72)..(72): Xaa can be any naturally occurring amino acid
  misc_feature (88)..(88): Xaa can be any naturally occurring amino acid
  misc_feature (90)..(92): Xaa can be any naturally occurring amino acid
  misc_feature (95)..(95): Xaa can be any naturally occurring amino acid
  misc_feature (98)..(98): Xaa can be any naturally occurring amino acid
  misc_feature (100)..(102): Xaa can be any naturally occurring amino acid
  misc_feature (104)..(105): Xaa can be any naturally occurring amino acid
  misc_feature (107)..(107): Xaa can be any naturally occurring amino acid
  misc_feature (109)..(110): Xaa can be any naturally occurring amino acid
APPPIQRAWQIVDQIPGRATGAYSLSQGVKGLRDTISAGIEERDGYPANPDDIFMTDGASPAVHNMMQLLIXSENDGILRPIPQYPLXSXXXALXGRXLXXXYXXEXSXXGGEIPNQGAR

SEQ ID NO: 8260 - protein, 258 aa, Silicibacter sp. TM1040
MNILVAGGVRGAGNALFKWSNTPDAVYLERRILPVSQKLFAEPTAGALELTTRLVIAPLKHDRAGDTTAEVLERYAEYYAQRASAGLIITEGSQISAEARGYIQTPGIHTAAQAAAWRKVTDAVHAKGGKIVIQMWHVGRSTHAGFEPTATPEALTVGGIQRVIEDRVQAATYAKEAGFDGVELHVANGCLLEQFRKDRVNTRSDAYGGSAENRARLLFEVLDALATVWEPGRIAVRLAPFASLTMSSIAPPWPIPPR

SEQ ID NO: 8261 - protein, 730 aa, Haemophilus influenzae Rd KW20
MTTAVTQAIIDGFFDASNGDPFATLGMHETEQGIEIRTLLPDANRMVVIERESGKEITELDCVDERGFFVGVIPNCRQFFAYQLQVFWGNEAQIIEDPYRFHPMIDDLEQWLLSEGSMLRPYEVLGAHFMECDGVSGVNFRLWAPNARRVSIVGDFNYWDGRRHPMRFHSKSGVWELFLPKASLGQLYKFELIDCHGNLRLKADPFAFSSQLRPDTASQVSALPNVVEMTEARKKANQGNQPISIYEVHLGSWRRNLENNFWLDYDQIADELIPYVKEMGFTHIEFLPLSEFPFDGSWGYQPLGLYSPTSRFGSPEAFRRLVKRAHEAGINVILDWVPGHFPSDTHGLVAFDGTALYEHEDPREGYHQDWNTLIYNYGRNEVKNFLSSNALYWLERFGVDGIRVDAVASMIYRDYSRAEGEWIPNQYGGRENLEAIEFLKHTNWKIHSEMAGAISIAEESTSFAGVTHPSENGGLGFNFKWNMGWMNDTLAYMKLDPIYRQYHHNKMTFGMVYQYSENFVLPLSHDEVVHGKYSLLGKMPGDTWQKFANLRAYYGYMWGYPGKKLLFMGNEFAQGREWNYEESLDWFLLDENIGGGWHKGVLKLVKDLNQIYQKNRPLFELDNSPEGFDWLVVDDAANSVLAFERRSSNGERIIVVSNFTPVPRHNYRIGVNVAGKYEEILNTDSMYYEGSNVGNFGCVASEQIESHGRENSISVSIPPLATVYLRLKTK

SEQ ID NO: 8262 - protein, 491 aa, Nicotiana tabacum
MGFENEKNSSILSKLATNEELGENSPYFDGWKAYDNDPFHPLKNPNGVIQMGLAENQLCFDLIEEWIKRNPNASICTTEGIKSFRAIANFQDYHGLPEFRSAIAKFMEKTRGGRVTFDPERVVMAGGATGANETIIFCLADTGDAFLVPSPYYPAFNRDLRWRTGVQLIPIPCDSSNNFQITTKAVREAYENAQKSNIKVKGLILTNPSNPLGTTLDRDTLKNLLTFTNQHNIHLVCDEIYAATVFNTPQFVSIAEILDDETSHCNKDLVHIVYSLSKDMGLPGFRVGIVYSFNDAVVNCARKMSSFGLVSTQTQYLLAEMLSDERFVSNFLTESSKRLAKRHKHFTNGLEEVGIKCLRSNAGLFCWMDLRPLLKESTFDSEMSLWRVIINDVKLNVSPGSSFDCQEPGFFRVCFANMDDETVDIALARIRSFVGVKKSGDESTPILMEKKQQWKKNNLRLSFSKRMYDESVNLSPLSSPIPHSPLVRART

SEQ ID NO: 8263 - protein, 474 aa, Oryza sativa (japonica cultivar-group)
METTSQDSQVIMGRYKLGRLLGRGTFAKVYKAYKLATGEAVAIKVFDKEAVQRSGTVEQVKREVDVMRRVHHRHVIRLHEVMATRSRIYFVMEYASGGELFTRLSRSPRFPEPVARRYFQQLITAVEFCHSRGVYHRDLKPENLLLDARGDLKVTDFGLSALDGGLRGDGLLHTTCGTPAYVAPEVLLKRGYDGAKADIWSCGVILFVLLAGYLPFNETNLVILYRNITESNYRCPPWFSVEARKLLARLLDPNPKTRITISKIMDRPWFQQATCPLGDMSLVASAPSVLLARKEASQQHDDEEDDGFAREKKKRSNVIMSSPVIDVRPSSMNAFDIISRSRGLDLSKMFDAEERRSEARFSTRETTTAIVSKLEEIAEAGRFSFKLKEKGRVELEGSQDGRKGALAIEAEIFKVAPEVHVVEVRKTGGDSPDFRDFYKQELKPSLGDMVWAWQGGDSPPLVPAAGRRPITKRS

SEQ ID NO: 8264 - protein, 331 aa, Rhodobacter sphaeroides 2.4.1
MAIELEDLGLSPDVADVMQRLARVGAGIARIISRNGLERDLGAGVGTNAGGDGQKALDVIADDAFRAALEGSAVAYYASEEQDEVVTLGEGSLALAIDPLDGSSNIDVNVSIGTIFSIFPAAAGPEASFLRPGTEQIAGGYIIYGPQCALVCSFGQGVQHWVLDLDAGIFRRMPDIRPLPAETSEFAINASNYRHWPQPIRAFVDDLVAGAEGPRGKNFNMRWIASLVAETHRILMRGGVFLYPGDERKGYERGRLRHVYECAPIAFLIANVGGGATDGCADILTALPDRLHARTPFVFGCASKVARVAAYHDLACEETSALFGSRGLFRS

SEQ ID NO: 8265 - protein, 75 aa, Nicotiana tabacum
LAEYTEFTGNFPAIAAQCLQKLPSSNNKFTYNCDHHTFNFLVEDGYGKFSFYLSVLASPFCIVFSIFYTFFFSSI

SEQ ID NO: 8266 - protein, 234 aa, Glycine max
  misc_feature (225)..(225): Xaa can be any naturally occurring amino acid
  misc_feature (228)..(228): Xaa can be any naturally occurring amino acid
MTVTASLHRLSRLRFIAKPQPFLSPHSTPSHFSLTPKTKKPNRFRFRFRSMAAEPKESPSNNPGLHTTPDEATKGYIMQQTMFRIKDPKVSLDFYSRVLGMSLLKRLDFPEMKFSLYFMGYEDTTEAPSNPIDKVVWTFSQKATIELTHNWGTESDPEFKGYHNGNSEPRGFGHIGITVDDTYKACERFQNLGVEFVKKPDDGKMKGIAFIKDPDGYWIEIFDRXTIXNGTQAP

SEQ ID NO: 8267 - protein, 449 aa, Glycine max
  misc_feature (54)..(54): Xaa can be any naturally occurring amino acid
  misc_feature (204)..(204): Xaa can be any naturally occurring amino acid
MEQKGGVLMQRYELGRLLGQGTFAKVYHARNIITGMSVAIKIIDKDKILKVGMXMRLIRHPHVVELYEVMASKTKIYFVMEHAKGGELFNKVVKGKLKEDDARKYFQQLISAVDYCHSRGVCHRDLKPENLLLDENGNLKVTDFGLSALAESKCQDGLLHTTCGTPAYVAPEVINRKGYDGIKADIWSCGVILYVLLAGHLPFXMTPRGEFKFPNWFAPDVRRLLSKILDPNPKTRISMAKIMESSWFKKGLEKPTITQNEDEELAPLDADGVFGACENGDPIEPAKNSKPCNNLNAFDIISYSSGFDLSGLFEETDRKKEERFTSDKPASIIISKLEEICRRLRLKVKKKDGGLFKLEGSKEGRKGPLGIDAEIFEITPVFHLVELKKSSGDTLEYQKLLKQEVRPALKDIVWNWQGEQPQPLQHGVVQKEEQPSYPGISEVVPQSTA

SEQ ID NO: 8268 - protein, 520 aa, Oryza sativa (japonica cultivar-group)
MLMATVSPARREPTPQAVRASPMPSAAAALVRRGGGGSGGTVLGKYELGRVLGQGSFAKVYQARHLETDECVAIKVLDKEKAVKGGMVHLVKREINVLRRVRHPNIVQLFEVMASKTKIYFVMEYVRGGELFSRVSKGRLREDTARRYFQQLVSAVDFCHARGVFHRDLKPENLLVDENGDLKVSDFGLAAGPDQFDPDGLLHTFCGTPAYVAPEVLRRRGYDGAKADIWSCGVILFALMAGYLPFHDHNIMVLYRKIYNGEFRCPRWFSKDFTRLITRLLDANPKTRITVPEIIESDWFKKGYKPVKFYIEDDKLYNLSDDVLNLEPADPVPPPLGLAPPVPPPPQGDDPDGSGSESDSSVVSCPATLSTGESQRVRGSLPRPASLNAFDIISFSKGFNLSGLFEERGNEIRFVSGEPMSDIVKKLEEIAKVKSFTVRRKDWRVSIEGTREGVKGPLTIGAEIFELTPSLVVVEVKRKAGDNEEYEDFCNMELKPGMQHLVHQMLPAPNGTPVSEKVER

SEQ ID NO: 8269 - protein, 344 aa, Oryza coarctata
MDHEADAYRTDLMTITRYVLNEQSRNPEARGDLTILLSHIVLGCKFVASAVNKAGLAKLIGLAGETNVQGEEQKKLDVLSNEVFVKALVSSGRTCVLVSEEDEEATFVDPALRGKYCVCFDPLDGSSNIDCGVSIGTIFGIYMIKDKDNVTLEDVLQPGKNMVAAGYCMYGSSCTLVLSTGNGVNGFTLDPSLGEFILTHPDIKIPKKGKIYSVNEGNAKNWDEPTAKFVEKCKFPKDGSSPKSLRYIGSMVADVHRTLLYGGVFLYPADKKSPNGKLRVLYEVFPMSFLMEQAGGQSFTGKERALDLVPTKIHERSPIFLGSFEDVEEIKGLYAAQAKLEHNH

SEQ ID NO: 8270 - protein, 1131 aa, Zea mays
MSSSRPAHSSSSSSRTRQSSRARILAQTTLDAELNAEYEESGDSFDYSKLVEAQRSTPPEQQGRSGKVIAYLQHIQRGKLIQPFGCLLALDEKSFRVIAFSENAPEMLTTVSHAVPNVDDPPKLGIGTNVRSLFTDPGATALQKALGFADVSLLNPILVQCKTSGKPFYAIVHRATGCLVVDFEPVKPTEFPATAAGALQSYKLAAKAISKIQSLPGGSMEALCNTVVKEVFDLTGYDRVMAYKFHEDEHGEVFAEITKPGIEPYIGLHYPATDIPQAARFLFMKNKVRMICDCRARSVKIIEDEALSIDISLCGSTLRAPHSCHLKYMENMNSIASLVMAVVVNENEEDDEPEPEQPPQQQKKKRLWGLIVCHHESPRYVPFPLRYACEFLAQVFAVHVNKEFELEKQIREKNILRMQTMLSDMLFKESSPLSIVSGSPNIMDLVKCDGAALLYGDKVWRLQTAPTESQIRDIAFWLSEVHGDSTGLSTDSLQDAGYPGAASLGDMICGMAVAKITSKDILFWFRSHTAAEIKWGGAKHDPSDKDDNRRMHPRLSFKAFLEVVKTKSLPWSDYEMDAIHSLQLILRGTLNDASKPAQASGLDNQIGDLKLDGLAELQAVTSEMVRLMETATVPILAVDGNGLVNGWNQKVAELSGLRVDEAIGRHILTLVEDSSVSLVQRMLYLALQGREEKEVRFELKTHGSKRDDGPVILVVNACASRDLHDHVVGVCFVAQDMTVHKLVMDKFTRVEGDYKAIIHNPNPLIPPIFGADQFGWCSEWNAAMTKLTGWHRDEVVDKMLLGEVFNSSNASCLLKSKDAFVRLCIVINSALAGEEAEKASFGFFDRNEKYVECLLSVNRKVNADGVVTGVFCFIHVPSDDLQHALHVQQASEQTAQRKLKAFSYMRHAINKPLSGMLYSRETLKSTGLNEEQMRQVRVGDNCHRQLNKILADLDQDNITDKSSCLDLDMAEFVLQDVVVSAVSQVLIGCQAKGIRVACNLPERSMKQKVYGDGIRLQQIVSDFLFVSVKFSPAGGSVDISSKLTKNSIGENLHLIDFELRIKHRGAGVPAEILSQMYEEDNKEQSEEGFSLAVSRNLLRLMNGDIRHLREAGMSTFILTAELAAAPSAVGR

SEQ ID NO: 8271 - protein, 357 aa, Rubrivivax gelatinosus PM1
MPTGGKSTLTQFLIEERRKHPAATGELNALITDVSLACKAISRKVAFGGLAGVLGSAGSGNVQGEEQKTLDVLSNTMFLRATEWGGHVAGMVSEELEAPYTLPPQYARGKYLLMFDPLDGSSNIDVNVTVGSIFAIHRAPQPRQDPQPQDYLQPGTTMVCGGYAIYGPSTMLVLTLGDGTHAFTLDPQLGEWVLSHPNLRIPEKTREFAINASNSRFWEPAVKRYVDECLAGSTGPRGTDFNMRWIASLVAETHRILMRGGVFLYPRDSKDPNKAGRLRLLYEANPISFLIEQAGGMASTGRKRLLEVQPEDIHQRIGFVFGSTEEVARIEAYHRDEPPTPYNSPLFGKRGLFAEAG

SEQ ID NO: 8272 - protein, 1353 aa, Pseudomonas syringae pv. syringae B728a
MKKSSLTWLVGWMAVVLLAGLSVSFIASHEQRRSIDARIGQALKEAGEGIGDNLQARLRVYEYRLRGLRGAVHMLDLQHINSSQMGRYSKGRNIEKEYPGARGFGFIRRVAASDEAEFVRRVREDGRPDFSLSRLSGPGTRQGDRFIIQFIDPLDRNVQALGLDITSEEHRRDAALQAMRSGAATLSAPITLLQDNDDHMRAFLFLLPVYSTPEIPTDIAQRETSLIGWTYAPLAMREVMSNLDPLNHRLHLKLYDVNEGRQLIYQTPENDHDQEVLQTYAFEREIYGRVWRMEVGAHPAFIAALDPVPAGRVFIIGTLVSLMLTVLVGTLLLSRQRKQQVVAGQARLATIVENSSDAIIGEALDGRIITWNRAAEQMFGYDEHEVLGRPLAPLLVPPELVHEDEQLLERVARGERGPTLETRRLHKNGQLIDVTITCSFIRETDGTLLGAAKMMHDITDRKRVERYLMEFNAQLEQQVSERTAELSRVAGLLQGVLDASSEVSIIATDTQGQIFVFNRGAELLLGYSNSEMLSGNGPGVFHLPEEVAARSAELSREYGTLIEGIDVFCYKASREGSETRQWTYVRKDGTTVPVLMIITPIRTADGELIGHLGIAQDITERLHHSAELHAAKSSAEAANAAKSLFLANMSHEIRTPMNAVIGISHLLHNTALNDQQRQLLTKLQIAGRTLLGIINDILDIAKIEAGEMRLEHNPFSPRQLLDELGELFTPQAQEKGLRFSVNVVASLPGQLIGDALRVNQILMNLVGNALKFTSVGGVDVTVSREDDHADTCCLRFSVQDTGCGIPGDVLGQLFSPFTQADASTTRRFGGTGLGLSVVRGLAEQMGGRIGVESELGTGSEFWVELPFQISQSDLEPSGPGSSLEVMLLSDDAQSSMALQRLCRGLGWRVASLTGEHDLRTALQERNHVNAALPDVLLVDWQQPQVEEVQQLIEATPLPVILVTSSEIRAELHPLVDKVLLKPLDSSALFNAVNACIARYQGSTERVIQATRMDTSMTLWLSGLHLLLVDDSEINLEVASLLLQQQGAVVQTCSNGLLALERLRQTPDFFDAVLMDVQMPEMDGYEATRRLRSELGLTRLPVLALTAGALAEERRQAELAGMDDFLTKPLDPAALIRAVRRAVERVRGAPLAVGTLLQEASTGSAWPVIEGIDTQEVAARLGNDVPLFLSSLRRFFSEFAAFGESESVLARARQNPDQTMADLHKLRGSALLLGATQVGLHAGQAETLLRNAADPEQAVRALSAAFRSLQERTPVLEERPLAPRIDADPDVSRQALSTLRELLENHDIAALDQFPLAAVALQELAGQALVEQLWQTIEGLEFEQALHLLERAEL

SEQ ID NO: 8273 - protein, 491 aa, Solanum tuberosum
DPSKYRPSSAYDTPFLTTNAGGPVYNNVSSLTVGPRGPVLLEDYYLIEKLATFDREKIPERVVHARGASAKGFFEVTHDISHLTCADFLRAPGAQTPVICRFSTVVHERGSPESIRDIRGFAVKFYTREGNFDLVGNNVPVFFNRDAKSFPDTIRALKPNPKSHIQENWRILDFFSFLPESLHTFAFFYDDVCLPTDYRHMEGFGVHAYQLINKEGKAHYVKFHWKPTCGVKSMSEEEAIRVGGTNHSHATKDLYDSIAAGNYPEWKLFIQTMDPEDVDKFDFDPLDVTKTWPEDLLPLIPVGRLVLNRNIDNFFAENEQLAFNPGHIVPGIYYSEDKLLQTRIFAYADTQRHRIGPNYMQLPVNAPKCGHHNNHRDGAMNMTHRDEEVDYLPSRFDPCRPAEQYPIPACVLNGRRTNCVIPKENNFKQAGERYRSWESDRQDRYITKWVESLSDPRVTHEIRSIWISYLSQADKSCGQKVASRLTVKPTM

SEQ ID NO: 8274 - protein, 193 aa, Arabidopsis thaliana
  misc_feature (60)..(60): Xaa can be any naturally occurring amino acid
MEEKKTESTNKNVKKANLLDHHSIKHILDESVSDIVTSRGYKEDVRLSNLKLILGTIIIXLLLLVAQFYNKEFPENRDFLIGCIALYVVLNAVLQLILYTKEKNAILFTYPPEGSFTSTGLVVSSKLPRFSDQYTLTIDSADPKSISAGKSVQLTKSVTQWFTKDGVLVEGLFWKDVEALIKNYAEEEPKKKK

SEQ ID NO: 8275 - protein, 294 aa, Escherichia coli O157:H7 EDL933
MEGLTVEFSVLSNNLKMPMMGFGVFQVTDKNVCKQSVLNAIRTGYRLIDTAAVYGNEDAVGEAVREAISEGLCTREELFITSKLWVQDMLNQDTAAAGIEASLKKSGLEYFDLYLLHQAMRDYFSAWRALEDAYEEGKLKAIGVSNFYPHVLANFCETVRVKPMVNQVELHPYFAQPEALATMKYYNVQPEAWAPLGGGRHKPFENNLLQSIADAHQKSISQVILRWNIQRGVVVIPKSTHQQRIEENFAIWDFSLTEKEMAQISSLDLGYVGESVKHFNPEFVRGCLAVKIHD

SEQ ID NO: 8276 - protein, 209 aa, Austrosteenisia blackii
DRVMAYKFHEDDHGEVIAEITKPGLEPYLGLHYPATDIPQAARFLFMKNKVRMIVDCHAKHVKVLQDEKLPFDLTLCGSTLRAPHSCHLQYMANMNSIASLVLAVVVNDNEEDGDSSDAVQPQKRKRLWGLVVCHNTTPRFVPFPLRYACEFLAQVFAIHVNKEIELEYQIIEKNILRTQTLLCDMLMRDAPLGIISQSPNIMDLVKCD

SEQ ID NO: 8277 - protein, 417 aa, Zea mays
  misc_feature (203)..(203): Xaa can be any naturally occurring amino acid
  misc_feature (208)..(208): Xaa can be any naturally occurring amino acid
MAAAFDAYTDKNAVFRRLKAKPENKMCFDCNAKNPTWASVTYGIFLCLDCSAAHRSLGVHITFVRSTNLDSWTPDQLKMMAFGGNNRAHAFFKQHGWTDGGKVEAKYTSRAAELYRQMLTKEVAKSATTDNALPSSPVASEASKPPSDDFPEFKLPDVAAPPAENLNGKHEPKSPKAAPRSPKAATHSTFATSVKEPIGAKKXGGKTXGGLGVRKLTTKPNESLYEQKPEEPKPAVPALAASTKKGGQALHSRFEYVENESSADSRTGGSGSRVSGHVAPPKSSDFFQEYGMGNGFQKKSSNASKTQVEETDEARKKFSNAKAISSSQFFGTQNREEKEAQLSLQKFAGSSSISSTDLFGRNDADNSNLDLSAADLINRISFQASQDLSSLKDIAGETGKKLTSLASNFISDLDRIL

SEQ ID NO: 8278 - protein, 706 aa, Yersinia pestis KIM
MCAQNTCSSDTEANLGMNKFVRLAAIAGLLLAGASYATDTTYRIDQLPQLRQEPEHATVSERVTSRFTRSHYRQFALDDQFSAKIFDRYLNMLDYSHNVLLASDVAQFADKKYSLDKELKSGQLDTPFALFNLAQKRRFERYQYALSVLDRPMVFTGNDTIDIDRAKAPWPSSEAELNALWDAKVKYDQLNLKLAGKTDKEIKETLTKRYQSAIKRLTQSNSEDVFQLIMNAFAREIDPHTNYLSPRNTEQFNTEMSLSLEGIGAVLQMDDDYTLINSMVPGGPAAKSKTIAVGDRVIGVGQAGKPMVDVIGWRLDDVVALIKGPKGSKVRLEILPAGKGTKPRTVTLTRERIRLEDRAVKMSVKTIGKERVGVLDIPGFYVGLTEDVKVQLQKLEKQNVSSIIIDLRSNGGGALTEAVSLSGLFIPSGPVVQVRDNNGKVREDSDTDGVVYYKGPLVVLVDRYSASASEIFAAAMQDYGRALIVGEPTFGKGTVQQYRSLNRIYDQMLRPEWPALGSLQYTIQKFYRVDGGSTQRKGVTPDIVMPTGVDPAETGENFEDNALPWDRINAASYTKTGDLKPWEPELLKNHAERIAANPEFQYIQKDIERYKALKDKRNIVSLNYAQREKENRDDDMTRLTRLNERFIREGKKPLKSLDDLPKDYQEPDPYLDETVNIALDLAHKEKAQPQIASRPVAAATAGATVK

SEQ ID NO: 8279 - protein, 205 aa, Austrosteenisia blackii
RTSSMRMIMGKVIAEIKKPGLEPYLGLHYPATDIPQATRFLFMKNKVRQIVDCRAKHVKVLQDKNIPFDLTLCGSTLRAPHSCHLQYMKNMNSSASLVMAVVVNDNNEDGDSSDAFQPQKRKRLWGLVVCHHTTPRFVPFPLRYACEFLAQVFAYLVNKELEIAYQIVEKNILRTQTLLCDMLMRDAPLGIVSQSPNIMDLVKCD

SEQ ID NO: 8280 - protein, 831 aa, Arabidopsis thaliana
MSEPKVRRWVGKYEVGRLIGECNFGKLRSAVDTETGDPVALMILDKDKVLKHKMAEQIKREISIMKLINHPNVVQLYEVLASKAKIYIVLEFISGGKLFDKIKNDGRMNEDEAQRYFQQLINAVDYCHSRGVYHRDLKPENLLLDAQENLKVAEFGLIALSQQAGGDGLRHTACGNPDYAAPEVLNDQGYDGAKADLWSCGVILFVLLAGYLPFEDSSLTTLYKKISSADFSCPPWLSSGVKNLIVRILDPNPMTRITIPEILEDVWFKKDYKPAVFEEKKEANLADVEAVFKDSEEGRVQLRSFPCVICSGGTTCGDVRSRTKLMNGLIERGRPQEAHSIFNTLIEEGHKPSLITYTTLVTALTRQKHFHSLLSLISKVEKNGLKPDTILFNAIINASSESGNLDQAMKIFEKMKESGCKPTASTFNTLIKGYGKIGKLEESSRLLDMMLRDEMLQPNDRTCNILVQAWCNQRKIEEAWNIVYKMQSYGVKPDVVTFNTLAKAYARIGSTCTAEDMIIPRMLHNKVKPNVRTCGTIVNGYCEEGKMEEALRFFYRMKELGVHPNLFVFNSLIKGFLNINDMDGVGEVVDLMEEFGVKPDVVTFSTLMNAWSSVGDMKRCEEIYTDMLEGGIDPDIHAFSILAKGYARAGEPEKAEQILNQMRKFGVRPNVVIYTQIISGWCSAGEMKKAMQVYKKMCGIVGLSPNLTTYETLIWGFGEAKQPWKAEELLKDMEGKNVVPTRKTMQLIADGWKSIGVSNSNDANTLGSSFSTSSKLNIPNNIASSRSPLFLKGMPEKPKLCIKSQFGLRQTLLVVLCRDQIGEAGRFCKFM

SEQ ID NO: 8281 - protein, 193 aa, Austrosteenisia blackii
MAYKFHEDDHGEVVSEIRRSDLEPYLGLHYPATDIPQASRFLFKQNRVRMICDCHAKPVKVIQSEELRQPLCLVNSTLRSPHGCHTQYMANMGSIASLVMAVTVNGNDTRRLWGLLVCHHTSPRYVPFPVRYACEFLMQAFGLQLYMEIQLASQMAEKRILKTQTLLCDMLLRDAPFGIVSQSPNIMDLVKCD

SEQ ID NO: 8282 - protein, 546 aa, Sulfolobus tokodaii str. 7
MRLLEPFYIRDVELKNRVVMSPMITNLGAPEGYPTEEHIRYFVRRASAGLLITEYTYVNKVDARGSPNQLGLYDDELIPKFARLTEAVHNMDSKIFVQLVHVGRKTRRSLIWNNDPIAPSNIPLLDPVREMTEDDINRVIMDFVKASERAEKSGFDGIELHGAHGYLIAQFLSPATNKREDKYKDGVIFLEELLKEIRRVVSIPVGMRISVTEFDPQGLTPELVAKIVKRVENLLDYIHLSAGRDGPLGGSSSFYYKRPSYVDEAKVVRKVTNLPLLLVGSVSTVEDAEKVLEVADAVVLGRQILADPDWVIKVKNNLPIRPCIRCNQLCRLLSTREVRCDVNPELGWEILNLEKGEGEVRIVGGGVMGLETARVLALRGFEVKIYEKKDKIGGQLNEIRDPWKREEFSRLIDYYEKELKRLGVKIYLSTEERKADIFALPKERQPEFKEYKGMRILVNSNLYAYQDYVFEWLKHNEVYITENVFKGLDRNRSYLLQQKYKELGVNIVKENVKADIVINDVRRNQPSIGQSIARGYWLGMTFKLKY

SEQ ID NO: 8283 - protein, 439 aa, Arabidopsis thaliana
MNRPKVQRRVGKYEVGKTLGQGTFAKVRCAVNTETGERVALKILDKEKVLKHKMAEQIRREICTMKLINHPNVVRLYEVLASKTKIYIVLEFGTGGELFDKIVHDGRLKEENARKYFQQLINAVDYCHSRGVYHRDLKPENLLLDAQGNLKVSDFGLSALSRQVRGDGLLHTACGTPNYAAPEVLNDQGYDGATADLWSCGVILFVLLAGYLPFEDSNLMTLYKKIIAGEYHCPPWLSPGAKNLIVRILDPNPMTRITIPEVLGDAWFKKNYKPAVFEEKEEANLDDVDAVFKDSEEHHVTEKKEEQPTSMNAFELISMSRALDLGNLFEEEEGFKRETRFAAKGAANDLVQKIEEASKPLGFDIQKKNYKMRLENVTAGRKGNLRVATEIFQVSPSLHMIEVRKTKGDTLEFHKFYKKLSTSLNDVVWKSGESSGLSK

SEQ ID NO: 8284 - protein, 398 aa, Burkholderia vietnamiensis G4
MLNSLLDFLSHGLLRFSWWQVALFALAVTHVTIIGVTVYLHRCQAHRALELHPIASHFFRVWLWMTTGMLTGQWAAIHRKHHAKCETEEDPHSPQTRGIWKVFLEGAELYRAEAKNEETMRKFSHGTPNDWIERNVYSKYPILGVSLMMVIDVALFGVLGLTVWAVQMVWIPFWAAGVVNGFGHFWGYRNFNSADASTNLFPWGIVIGGEELHNNHHTFATSAKLSNKWYEFDIGWMYIRIMSAFGLAKVKKIAPTPRLNKPKTVLDQETLQAVLSNRYEVMARYGKAVKRAYRQELAHLKELGSRDKYQLMRGARKWFHKDADGLDEPQKKLLPEIFANSQKLHTYYQLRQDLAAIWDRSTASREQLLAQLQDWCHRAEQSGIKSLQEFATRLRRYA

SEQ ID NO: 8285 - protein, 468 aa, Zea mays
MVEGEAEAEAEVKKGGVLQGRYELGHVLGHGNFGRVHEARDLRTGRGVAVKVLAKDKLLRTGMMEQIKREIAVMKRVSHPNIVELHEVMATRTKIYLALELVRGGDLLARIARSGRVREDVARRYFRQLVSAVDFCHARGVFHRDLKPENLLVDEAGNLKVVDFGLSALADHARADGLLHTICGTPGYVAPEVFRNRGYDGAKADVWSCGVVLYVLLAGSLPFPKDSIAAMFIKMSRRDYRCPPWLSTEARRLIPKLLDPDPDTRITVAQIVETPWFNKPSVSRAVTAAAAEPPAEAACSAKDSGGGDKDELPETLNAFHLISLSAGLDLSPLFDVEGGPARGHREDGMRFATREPASGVVSRLEEVAARSGGRMRVTKSGARGVRLEGAGRGGRKGRLAVAADIFCLAPSVLVVDIKKDGGDTLEYRSFCSEVLRPALKDIVWAADPHPAAAAVDAVRPPSDHCSGS

SEQ ID NO: 8286 - protein, 547 aa, Pasteurella multocida
MAAKDVKFGNDARVKMLAGVNILADAVKVTLGPKGRNVVLDKSFGAPTITKDGVSVAREIELEDKFENMGAQMVKEVASKANDAAGDGTTTATVLAQAIVNEGLKAVAAGMNPMDLKRGIDKAVTAVVTELKALSKPCETSKEIEQVGTISANSDSIVGQIIAQAMDKVGKEGVITVEDGTGLEDELAVVEGMQFDRGYLSPYFINKPETATVELDNPFILLVDKKVSNIRELLPVLEGVAKAGKPLLIIAEDVEGEALATLVVNTMRGIVKVAAVKAPGFGDRRKAMLQDIAILTAGTVISEEIGMELEKATLEDLGQAKRVVINKDNTTIIDGIGDEAQIQGRVAQIRQQIEESTSDYDKEKLQERVAKLAGGVAVIKVGAATEVEMKEKKARVEDALHATRAAVEEGIVAGGGVALIRAANKVAGLQGDNEEQNVGIKLALRAMEAPLRQIVANAGEEASVVASAVKNGEGNFGYNAGTEQYGDMIEMGILDPTKVTRSALQFAASVAGLMITTECMVTDLPKEDKADLGAAGMGGMGGMGGMM

SEQ ID NO: 8287 - protein, 425 aa, Arabidopsis thaliana
MNRRQQVKRRVGKYEVGRTIGEGTFAKVKFARNSETGEPVALKILDKEKVLKHKMAEQIRREIATMKLIKHPNVVQLYEVMASKTKIFIILEYVTGGELFDKIVNDGRMKEDEARRYFQQLIHAVDYCHSRGVYHRDLKPENLLLDSYGNLKISDFGLSALSQQVRDDGLLHTSCGTPNYVAPEVLNDRGYDGATADMWSCGVVLYVLLAGYLPFDDSNLMNLYKKISSGEFNCPPWLSLGAMKLITRILDPNPMTRVTPQEVFEDEWFKKDYKPPVFEERDDSNMDDIDAVFKDSEEHLVTEKREEQPAAINAFEIISMSRGLNLENLFDPEQEFKRETRITLRGGANEIIEKIEEAAKPLGFDVQKKNYKMRLENVKAGRKGNLNVATEVCYMRLDIQESVGDGLLNQCVFCLYGVTTSRYSK
